United States Patent Application Publication US 2023/0026259 A1 - sequence listing, part 54

SEQ ID NO: 148349 - DNA, 3567 bp, Homo sapiens
  Payload ID: 9374
  Gene Symbol: LGR6
  Gene Name: leucine-rich repeat containing G protein-coupled receptor 6
  Uniprot ID: Q9HBX8
  ENST ID: ENST00000367278
  CDS Start-End: 90-2993
gcccgccgggaccgggaggaagcagctgcggccatcgcgccgtgcgtccgcgcccggccgccaggtgccccagtagcccgaccgccgagatgcccagcccgccggggctccgggcgctatggctttgcgccgcgctgtgcgcttcccggagggccggcggcgccccccagcccggcccggggcccaccgcctgcccggccccctgccactgccaggaggacggcatcatgctgtctgccgactgctctgagctcgggctgtccgccgttccgggggacctggaccccctgacggcttacctggacctcagcatgaacaacctcacagagcttcagcctggcctcttccaccacctgcgcttcttggaggagctgcgtctctctgggaaccatctctcacacatcccaggacaagcattctctggtctctacagcctgaaaatcctgatgctgcagaacaatcagctgggaggaatccccgcagaggcgctgtgggagctgccgagcctgcagtcgctgcgcctagatgccaacctcatctccctggtcccggagaggagctttgaggggctgtcctccctccgccacctctggctggacgacaatgcactcacggagatccctgtcagggccctcaacaacctccctgccctgcaggccatgaccctggccctcaaccgcatcagccacatccccgactacgcgttccagaatctcaccagccttgtggtgctgcatttgcataacaaccgcatccagcatctggggacccacagcttcgaggggctgcacaatctggagacactagacctgaattataacaagctgcaggagttccctgtggccatccggaccctgggcagactgcaggaactggggttccataacaacaacatcaaggccatcccagaaaaggccttcatggggaaccctctgctacagacgatacacttttatgataacccaatccagtttgtgggaagatcggcattccagtacctgcctaaactccacacactatctctgaatggtgccatggacatccaggagtttccagatctcaaaggcaccaccagcctggagatcctgaccctgacccgcgcaggcatccggctgctcccatcggggatgtgccaacagctgcccaggctccgagtcctggaactgtctcacaatcaaattgaggagctgcccagcctgcacaggtgtcagaaattggaggaaatcggcctccaacacaaccgcatctgggaaattggagctgacaccttcagccagctgagctccctgcaagccctggatcttagctggaacgccatccggtccatccaccccgaggccttctccaccctgcactccctggtcaagctggacctgacagacaaccagctgaccacactgcccctggctggacttgggggcttgatgcatctgaagctcaaagggaaccttgctctctcccaggccttctccaaggacagtttcccaaaactgaggatcctggaggtgccttatgcctaccagtgctgtccctatgggatgtgtgccagcttcttcaaggcctctgggcagtgggaggctgaagaccttcaccttgatgatgaggagtcttcaaaaaggcccctgggcctccttgccagacaagcagagaaccactatgaccaggacctggatgagctccagctggagatggaggactcaaagccacaccccagtgtccagtgtagccctactccaggccccttcaagccctgtgagtacctctttgaaagctggggcatccgcctggccgtgtgggccatcgtgttgctctccgtgctctgcaatggactggtgctgctgaccgtgttcgctggcgggcctgtccccctgcccccggtcaagtttgtggtaggtgcgattgcaggcgccaacaccttgactggcatttcctgtggccttctagcctcagtcgatgccctgacctttggtcagttctctgagtacggagcccgctgggagacggggctaggctgccgggccactggcttcctggcagtacttgggtcggaggcatcggtgctgctgctcactctggccgcagtgcagtgcagcgtctccgtctcctgtgtccgggcctatgggaagtccccctccctgggcagcgttcgagcaggggtcctaggctgcctggcactggcagggctggccgccgcgctgcccctggcctcagtgggagaatacggggcctccccactctgcctgccctacgcgccacctgagggtcagccagcagccctgggcttcaccgtggccctggtgatgatgaactccttctgtttcctggtcgtggccggtgcctacatcaaactgtactgtgacctgccgcggggcgactttgaggccgtgtgggactgcgccatggtgaggcacgtggcctggctcatcttcgcagacgggctcctctactgtcccgtggccttcctcagctttgcctccatgctgggcctcttccctgtcacgcccgaggccgtcaagtctgtcctgctggtggtgctgcccctgcctgcctgcctcaacccactgctgtacctgctcttcaacccccacttccgggatgaccttcggcggcttcggccccgcgcaggggactcagggcccctagcctatgctgcggccggggagctggagaagagctcctgtgattctacccaggccctggtagccttctctgatgtggatctcattctggaagcttctgaagctgggcggccccctgggctggagacctatggcttcccctcagtgaccctcatctcctgtcagcagccaggggcccccaggctggagggcagccattgtgtagagccagaggggaaccactttgggaacccccaaccctccatggatggagaactgctgctgagggcagagggatctacgccagcaggtggaggcttgtcagggggtggcggctttcagccctctggcttggcctttgcttcacacgtgtaaatatccctccccattcttctcttcccctctcttccctttcctctctccccctcggtgaatgatggctgcttctaaaacaaatacaaccaaaactcagcagtgtgatctatagcaggatggcccagtccctggctccactgatcacctctctcctgtgaccatcaccaacgggtgcctcttggcctggctttcccttggccttcctcagcttcaccttgatactgggcctcttccttgtcatgtctgaagctgtggaccagagacctggacttttgtctgcttaagggaaatgagggaagtaaagacagtgaaggggtggagggttgatcagggcacagtggacagggagacctcacagagaaaggcctggaaggtgatttcccgtgtgactcatggataggatacaaaatgtgttccatgtaccattaatcttgacatatgccatgcataaagacttcctattaaaataagctttggaagagattacacatgatgtctttttcttagagattcacagtgcatgttagtgtaataaagagataagtcctacagtagtaaaatctattgaactttg

SEQ ID NO: 148350 - DNA, 2487 bp, Homo sapiens
  Payload ID: 9374
  Gene Symbol: LGR6
  Gene Name: leucine-rich repeat containing G protein-coupled receptor 6
  Uniprot ID: Q9HBX8
  ENST ID: ENST00000439764
  CDS Start-End: 1-2487
atgcgcttggagggagagggccgctcagcgagggcgggacagaacctctcccgggctgggagtgcacggcgcggtgcgcccagggacctcagcatgaacaacctcacagagcttcagcctggcctcttccaccacctgcgcttcttggaggagctgcgtctctctgggaaccatctctcacacatcccaggacaagcattctctggtctctacagcctgaaaatcctgatgctgcagaacaatcagctgggaggaatccccgcagaggcgctgtgggagctgccgagcctgcagtcgctagacctgaattataacaagctgcaggagttccctgtggccatccggaccctgggcagactgcaggaactggggttccataacaacaacatcaaggccatcccagaaaaggccttcatggggaaccctctgctacagacgatacacttttatgataacccaatccagtttgtgggaagatcggcattccagtacctgcctaaactccacacactatctctgaatggtgccatggacatccaggagtttccagatctcaaaggcaccaccagcctggagatcctgaccctgacccgcgcaggcatccggctgctcccatcggggatgtgccaacagctgcccaggctccgagtcctggaactgtctcacaatcaaattgaggagctgcccagcctgcacaggtgtcagaaattggaggaaatcggcctccaacacaaccgcatctgggaaattggagctgacaccttcagccagctgagctccctgcaagccctggatcttagctggaacgccatccggtccatccaccccgaggccttctccaccctgcactccctggtcaagctggacctgacagacaaccagctgaccacactgcccctggctggacttgggggcttgatgcatctgaagctcaaagggaaccttgctctctcccaggccttctccaaggacagtttcccaaaactgaggatcctggaggtgccttatgcctaccagtgctgtccctatgggatgtgtgccagcttcttcaaggcctctgggcagtgggaggctgaagaccttcaccttgatgatgaggagtcttcaaaaaggcccctgggcctccttgccagacaagcagagaaccactatgaccaggacctggatgagctccagctggagatggaggactcaaagccacaccccagtgtccagtgtagccctactccaggccccttcaagccctgtgagtacctctttgaaagctggggcatccgcctggccgtgtgggccatcgtgttgctctccgtgctctgcaatggactggtgctgctgaccgtgttcgctggcgggcctgtccccctgcccccggtcaagtttgtggtaggtgcgattgcaggcgccaacaccttgactggcatttcctgtggccttctagcctcagtcgatgccctgacctttggtcagttctctgagtacggagcccgctgggagacggggctaggctgccgggccactggcttcctggcagtacttgggtcggaggcatcggtgctgctgctcactctggccgcagtgcagtgcagcgtctccgtctcctgtgtccgggcctatgggaagtccccctccctgggcagcgttcgagcaggggtcctaggctgcctggcactggcagggctggccgccgcgctgcccctggcctcagtgggagaatacggggcctccccactctgcctgccctacgcgccacctgagggtcagccagcagccctgggcttcaccgtggccctggtgatgatgaactccttctgtttcctggtcgtggccggtgcctacatcaaactgtactgtgacctgccgcggggcgactttgaggccgtgtgggactgcgccatggtgaggcacgtggcctggctcatcttcgcagacgggctcctctactgtcccgtggccttcctcagctttgcctccatgctgggcctcttccctgtcacgcccgaggccgtcaagtctgtcctgctggtggtgctgcccctgcctgcctgcctcaacccactgctgtacctgctcttcaacccccacttccgggatgaccttcggcggcttcggccccgcgcaggggactcagggcccctagcctatgctgcggccggggagctggagaagagctcctgtgattctacccaggccctggtagccttctctgatgtggatctcattctggaagcttctgaagctgggcggccccctgggctggagacctatggcttcccctcagtgaccctcatctcctgtcagcagccaggggcccccaggctggagggcagccattgtgtagagccagaggggaaccactttgggaacccccaaccctccatggatggagaactgctgctgagggcagagggatctacgccagcaggtggaggcttgtcagggggtggcggctttcagccctctggcttggcctttgcttcacacgtgtaa

SEQ ID NO: 148351 - DNA, 792 bp, Homo sapiens
  Payload ID: 9374
  Gene Symbol: LGR6
  Gene Name: leucine-rich repeat containing G protein-coupled receptor 6
  ENST ID: ENST00000423542
  CDS Start-End: 95-792
tcctattcattctcttgattttttttaaagaaaacttcttttgaaaatttccatccaattccaaacaagctaggacgaacaaagggacctcagcatgaacaacctcacagagcttcagcctggcctcttccaccacctgcgcttcttggaggagctgcgtctctctgggaaccatctctcacacatcccaggacaagcattctctggtctctacagcctgaaaatcctgatgctgcagaacaatcagctgggaggaatccccgcagaggcgctgtgggagctgccgagcctgcagtcgctgcgcctagatgccaacctcatctccctggtcccggagaggagctttgaggggctgtcctccctccgccacctctggctggacgacaatgcactcacggagatccctgtcagggccctcaacaacctccctgccctgcaggccatgaccctggccctcaaccgcatcagccacatccccgactacgcgttccagaatctcaccagccttgtggtgctagacctgaattataacaagctgcaggagttccctgtggccatccggaccctgggcagactgcaggaactatctctgaatggtgccatggacatccaggagtttccagatctcaaaggcaccaccagcctggagatcctgaccctgacccgcgcaggcatccggctgctcccatcggggatgtgccaacagctgcccaggctccgagtcctggaactgtctcacaatcaaattgaggagctgcccagcctgcacaggtgtcagaaattggaggaaat

SEQ ID NO: 148352 - DNA, 3377 bp, Homo sapiens
  Payload ID: 9374
  Gene Symbol: LGR6
  Gene Name: leucine-rich repeat containing G protein-coupled receptor 6
  ENST ID: ENST00000487787
  CDS Start-End: 44-1090
tgaaaggcggttgtggtgcaaaggaaaacccacaggccaaggaatgggaagaccaaggttgacacttgtttgtcaagtgtcaataatcatctctgcccgggacctcagcatgaacaacctcacagagcttcagcctggcctcttccaccacctgcgcttcttggaggagctgcgtctctctgggaaccatctctcacacatcccaggacaagcattctctggtctctacagcctgaaaatcctgatgctgcagaacaatcagctgggaggaatccccgcagaggcgctgtgggagctgccgagcctgcagtcgctgcgcctagatgccaacctcatctccctggtcccggagaggagctttgaggggctgtcctccctccgccacctctggctggacgacaatgcactcacggagatccctgtcagggccctcaacaacctccctgccctgcaggccatgaccctggccctcaaccgcatcagccacatccccgactacgcgttccagaatctcaccagccttgtggtgctgcatttgcataacaaccgcatccagcatctggggacccacagcttcgaggggctgcacaatctggagacactagacctgaattataacaagctgcaggagttccctgtggccatccggaccctgggcagactgcaggaactggggttccataacaacaacatcaaggccatcccagaaaaggccttcatggggaaccctctgctacagacgatacacttttatgataacccaatccagtttgtgggaagatcggcattccagtacctgcctaaactccacacactatctctgaatggtgccatggacatccaggagtttccagatctcaaaggcaccaccagcctggagatcctgaccctgacccgcgcaggcatccggctgctcccatcggggatgtgccaacagctgcccaggctccgagtcctggaactgtctcacaatcaaattgaggagctgcccagcctgcacaggtgtcagaaattggaggaaatgagaagtggggggctctactttcttcctcccagtgctcggggggcatggagcggagccagggtctgagcctgccggctcatccagcctctcttgctgccctagcggcctccaacacaaccgcatctgggaaattggagctgacaccttcagccagctgagctccctgcaagccctggatcttagctggaacgccatccggtccatccaccccgaggccttctccaccctgcactccctggtcaagctggacctgacagacaaccagctgaccacactgcccctggctggacttgggggcttgatgcatctgaagctcaaagggaaccttgctctctcccaggccttctccaaggacagtttcccaaaactgaggatcctggaggtgccttatgcctaccagtgctgtccctatgggatgtgtgccagcttcttcaaggcctctgggcagtgggaggctgaagaccttcaccttgatgatgaggagtcttcaaaaaggcccctgggcctccttgccagacaagcagagaaccactatgaccaggacctggatgagctccagctggagatggaggactcaaagccacaccccagtgtccagtgtagccctactccaggccccttcaagccctgtgagtacctctttgaaagctggggcatccgcctggccgtgtgggccatcgtgttgctctccgtgctctgcaatggactggtgctgctgaccgtgttcgctggcgggcctgtccccctgcccccggtcaagtttgtggtaggtgcgattgcaggcgccaacaccttgactggcatttcctgtggccttctagcctcagtcgatgccctgacctttggtcagttctctgagtacggagcccgctgggagacggggctaggctgccgggccactggcttcctggcagtacttgggtcggaggcatcggtgctgctgctcactctggccgcagtgcagtgcagcgtctccgtctcctgtgtccgggcctatgggaagtccccctccctgggcagcgttcgagcaggggtcctaggctgcctggcactggcagggctggccgccgcgctgcccctggcctcagtgggagaatacggggcctccccactctgcctgccctacgcgccacctgagggtcagccagcagccctgggcttcaccgtggccctggtgatgatgaactccttctgtttcctggtcgtggccggtgcctacatcaaactgtactgtgacctgccgcggggcgactttgaggccgtgtgggactgcgccatggtgaggcacgtggcctggctcatcttcgcagacgggctcctctactgtcccgtggccttcctcagctttgcctccatgctgggcctcttccctgtcacgcccgaggccgtcaagtctgtcctgctggtggtgctgcccctgcctgcctgcctcaacccactgctgtacctgctcttcaacccccacttccgggatgaccttcggcggcttcggccccgcgcaggggactcagggcccctagcctatgctgcggccggggagctggagaagagctcctgtgattctacccaggccctggtagccttctctgatgtggatctcattctggaagcttctgaagctgggcggccccctgggctggagacctatggcttcccctcagtgaccctcatctcctgtcagcagccaggggcccccaggctggagggcagccattgtgtagagccagaggggaaccactttgggaacccccaaccctccatggatggagaactgctgctgagggcagagggatctacgccagcaggtggaggcttgtcagggggtggcggctttcagccctctggcttggcctttgcttcacacgtgtaaatatccctccccattcttctcttcccctctcttccctttcctctctccccctcggtgaatgatggctgcttctaaaacaaatacaaccaaaactcagcagtgtgatctatagcaggatggcccagtccctggctccactgatcacctctctcctgtgaccatcaccaacgggtgcctcttggcctggctttcccttggccttcctcagcttcaccttgatactgggcctcttccttgtcatgtctgaagctgtggaccagagacctggacttttgtctgcttaagggaaatgagggaagtaaagacagtgaaggggtggagggttgatcagggcacagtggacagggagacctcacagagaaaggcctggaaggtgatttcccgtgtgactcatggataggatacaaaatgtgttccatgtaccattaatcttgacatatgccatgcataaagacttcctattaaaataagctttggaagaga

SEQ ID NO: 148353 - DNA, 7671 bp, Homo sapiens
  Payload ID: 9375
  Gene Symbol: LRRK1
  Gene Name: leucine-rich repeat kinase 1
  Uniprot ID: Q38SD2
  ENST ID: ENST00000388948
  CDS Start-End: 360-6407
gcggccgccgaggggacgcctcgcgacggttcctgggagagctggcggcggccttgctctgcgcgctcttcgcgccgccctccccgcccgcccgcctcaggattgaggaagtgcgtctgggcccggccccggcgcggggggcagacggcggtgggacggccaggccccggccccgccagtgtgtccgcccggccccgcgtcccggagcgcccgcacccggccccgccgccgcctcagagcaagaaagctttctgctcagccatggctacgagtccacgccttaatgcaccccacagccagcggcagtggcagtgacaacagcgggacctgcctttgaagatcggctgctgcaagggttgatggctggcatgtcgcaaagaccccccagcatgtactggtgtgtggggccggaggagtcagctgtgtgtccagaacgtgccatggagacgcttaacggtgccggggacacgggcggcaagccgtccacgcggggcggtgaccctgcagcgcggtcccgcaggacggaaggcatccgcgccgcgtacaggcggggagaccgcggcggcgcccgggacctgctggaggaggcctgcgaccagtgcgcgtcccagctggaaaagggccagcttctgagcatcccggcagcctatggggatctggagatggtccgctacctactcagcaagagactggtggagctgcccaccgagcccacggatgacaacccagccgtggtggcagcgtattttggacacacggcagttgtgcaggaattgcttgagtccttaccaggtccctgcagtccccagcggcttctgaactggatgctggccttggcttgccagcgagggcacctgggggttgtgaagctcctggtcctgacgcacggggctgacccggagagctacgctgtcaggaagaatgagttccctgtcatcgtgcgcttgcccctgtatgcggccatcaagtcagggaatgaagacattgcaatattcctgcttcggcatggggcctatttctgttcctacatcttgctggatagtcctgaccccagcaaacatctgctgagaaagtacttcattgaagccagtcccttgcccagcagttatccgggaaaaacagctctccgtgtgaaatggtcccatctcagactgccctgggtagacctagactggctcatagacatctcctgccagatcacggagctcgacctttctgccaactgcctggcgaccctcccctcggttatcccctggggcctcatcaatctccggaagctgaacctctccgacaaccacctgggggagctgcctggcgtgcagtcatcggacgaaatcatctgttccaggctacttgaaattgacatttccagcaacaagttgtcccacctccctcctggattcttgcacctctcaaaacttcaaaaactgacagcttcaaaaaattgtttagaaaaattgttcgaagaagaaaatgccactaactggataggtttacggaagctacaggaacttgatatatctgacaataaattgacagaactccctgccctgttccttcactctttcaagtccctcaattctctgaatgtctccagaaacaacctgaaggtgtttccagatccctgggcctgccctttgaaatgttgtaaagcttccagaaatgccctggaatgtctgccagacaaaatggctgtcttttggaaaaatcacctgaaggatgtggatttctcagaaaacgcactcaaagaagttcccctgggacttttccagcttgatgccctcatgttcttgaggttacaggggaaccagctggcggcacttccacctcaagagaagtggacctgcaggcagctcaaaaccctggatctctccagaaaccaacttggcaaaaatgaagatggactgaaaacgaagcgtattgcctttttcaccaccagaggtcgccagcgctccgggactgaggcagcaagtgtgctggaatttccggccttcctaagtgagtctttggaagtcctttgcctgaacgacaaccacctcgacacagtccctccctcggtttgcctactgaagagcttatcagagctctacttgggaaacaaccctggcctccgggagctccctcctgagctggggcagctgggcaacctctggcagctggacactgaagacctgaccatcagcaatgtgcctgcagaaatccaaaaagaaggccccaaagcaatgctgtcttacctgcgtgctcagctgcggaaagcggaaaagtgcaagctgatgaagatgatcatcgtgggtcccccgcgccagggcaagtccaccctcctggagatcttacagacggggagggccccccaggtggtgcatggagaggccaccatcaggaccaccaagtgggagctccagaggccggctggctcgagagccaaggttgagtccgtggagttcaacgtctgggacatcgggggaccggccagcatggccactgtcaaccagtgcttcttcacggacaaggccctgtacgtggtggtctggaacctggcgctgggggaggaggccgtggccaacctccagttctggctgctcaacatcgaggccaaggccccaaacgccgtggtgctggtggtcgggacgcacctggatttaattgaagccaagttccgtgtggaaaggattgcaacgctgcgtgcctatgtgctggcactctgccgctccccctccggctccagggccacaggcttcccagacatcaccttcaaacacttacatgagatttcctgcaagagcctggaaggtcaggaagggctgcgacagctgattttccacgtcacgtgcagcatgaaggacgtgggcagcaccatcggctgccagcgactggcagggcggctgatccccaggagctacctgagcctgcaggaggccgtgctggcagagcagcagcgccgcagccgggacgacgacgtgcagtacctgacggacaggcagctggagcagctggtggagcagacgcccgacaacgacatcaaggactacgaggacctgcagtcagccatcagcttcctcatagaaaccggcaccctgctccatttcccggacaccagccacggcctgaggaacctctacttcctcgaccctatttggctctccgaatgtctgcagaggatctttaatattaagggctctcggtcagtggccaagaatggggtgatcagagcagaagacctcaggatgctgctggtggggactggcttcacgcagcagacggaagagcagtacttccagttcctggccaagtttgagatcgccctgcccgtcgccaatgacagctacctcctgccccatctccttccatctaaacctggcctggacacccacggtatgcggcaccccacagccaacaccattcagagggtatttaagatgagcttcgttcccgttggcttctggcaaaggtttatagcacggatgctgatcagcctggcggagatggacctgcagctttttgaaaacaagaagaatactaaaagcaggaacaggaaagtcaccatttacagttttacaggaaaccagagaaatcgctgtagcacattcagagtgaaaagaaatcagaccatctattggcaggaagggctcctggtcacttttgatgggggctacctcagtgtggaatcttccgacgtgaactggaaaaagaagaaaagcggaggaatgaaaattgtttgccaatcagaagtgagggacttctcagccatggctttcatcacggaccacgtcaattccttgattgatcagtggtttcccgccctgacagccacagagagcgacgggacgccactcatggagcagtacgtgccctgcccggtctgcgagacagcctgggcccagcacacggaccccagtgagaaatcagaggatgtgcagtacttcgacatggaagactgtgtcctgacggccatcgagcgggacttcatctcctgccccagacacccggacctccccgtgccgctgcaggagctggtccctgaactgttcatgaccgacttcccggccaggctcttcctggagaacagcaagctggagcacagcgaggacgagggcagcgtcctgggccagggcggcagtggcaccgtcatctaccgggcccggtaccagggccagcctgtggccgtcaagcgcttccacatcaaaaaattcaagaactttgctaacgtaccggcagacaccatgctgaggcacctgcgggccaccgatgccatgaagaacttctccgagttccggcaggaggccagcatgctgcacgcgctgcagcacccctgcatcgtggcgctcatcggcatcagcatccacccgctctgcttcgccctggagctcgcgccgctcagcagcctcaacaccgtgctgtccgagaacgccagagattcttcctttatacccctgggacacatgctcacccaaaaaatagcctaccagatcgcctcgggcctggcctacctgcacaagaaaaacatcatcttctgtgacctgaagtcggacaacattctggtgtggtcccttgacgtcaaggagcacatcaacatcaagctatctgactacgggatttcgaggcagtcattccatgagggcgccctaggcgtggagggcactcctggctaccaggccccagagatcaggcctcgcattgtatatgatgagaaggtagatatgttctcctatggaatggtgctctacgagttgctgtcaggacagcgccctgcactgggccaccaccagctccagattgccaagaagctgtccaagggcatccgcccggttctggggcagccggaggaagtgcagttccggcgactgcaggcgctcatgatggagtgctgggacactaagccagagaagcgaccgctggccctgtcggtggtgagccagatgaaggacccgacttttgccaccttcatgtatgaactgtgctgtgggaagcagacagccttcttctcatcccagggccaggagtacaccgtggtgttttgggatggaaaagaggagtccaggaactacacggtggtgaacacagagaagggcctcatggaggtgcagaggatgtgctgccctgggatgaaggtgagctgccagctccaggtccagagatccctgtggacagccaccgaggaccagaaaatctacatctacaccctcaagggcatgtgccccttaaacacaccccaacaggccttggatactccagctgtcgtcacctgcttcttggccgtgcctgttattaaaaagaattcctacctggtcttagcgggcctcgccgatgggcttgtggctgtgtttcccgtggtgcggggcaccccaaaggacagctgctcctacctgtgctcacacacagccaacaggtccaagttcagcatcgcggatgaagacgcacggcagaacccctacccagtgaaggccatggaggtggtcaacagcggctctgaggtctggtacagcaatgggccgggcctccttgtcatcgactgtgcctccctggagatctgcaggcggctggagccctacatggccccctccatggttacgtcagtcgtgtgcagctctgagggcagaggggaggaggtcgtctggtgcctggatgacaaggccaactccttggtgatgtaccactccaccacctaccagctgtgtgcccggtacttctgcggggtccccagccccctcagggacatgtttcccgtgcggcccttggacacggaacccccggcagccagccacacggccaacccaaaggtgcctgagggggactccatcgcggacgtgagcatcatgtacagtgaggagctgggcacgcagatcctgatccaccaggaatcactcactgactactgctccatgtcctcctactcctcatccccaccccgccaggctgccaggtccccctcaagcctccccagctccccagcaagttcttccagtgtgcctttctccaccgactgcgaggactcagacatgctacatacgcccggtgctgcctccgacaggtctgagcatgacctgacccccatggacggggagaccttcagccagcacctgcaggccgtgaagatcctcgccgtcagagacctcatttgggtccccaggcgcggtggagatgttatcgtcattggcctggagaaggattctggcgcccagcggggccgagtcattgccgtcttaaaagcccgagagctgactccgcatggggtgctggtggatgctgccgtggtggcaaaggacactgttgtgtgcacctttgaaaatgaaaacacagagtggtgcctggccgtctggaggggctggggcgccagggagttcgacattttctaccagtcctacgaggagctgggccggctggaggcttgcactcgcaagagaaggtaattcctgtggaatgactgtcacacatcagagctggctggcccggggctgcagcctgacccctctgccatcggcctctagttctccaaggacctagaagacagatggagttctcccctgaactccttgctgctaagaagtgctgagaagttactcgcctggcggtggctccagggttctctggttctctggagcagagttctctgaataccccatcccccaactgctgattttacagccccagggaagacagtggtatcaggctgggagcggcctcctctggcctcccccatcagtttgcaggagcaggggtgcaggatcctgttctgagctgggtcaaacaaagcagggccgggccttcctgccatccccaggtctcagatggaattacactagaggccctccgctgggaagcacttgaggtagggcaggaggggggctgtgacccctgccctttccccgccagagacctcaggctctcagcacattccacaggctcctgagtccccgaggcctgggccagcttgggcaagccaagatcagatgtctctgtgttcgggaaggtctccgtgtgggaaagcccttgggggatcccgggtgaggagtgttgccccatccagagaatgaatgagttcctttaagtgccaccgccagcaagcccagaggcacacagtccgagtgcacccgcttagcctttacattcctctccaccgacaaaaggaaggggaaactcaatcagcaggacttcagaaagggccttgtgtttatagctttgtcaagtaaatttggacgcagctggagcacaggccctgtttgtttgcacataataatcttgtttatcactttaaaaaattcagtaatatctcagcagtcaggcttctggttgtgaaatcacattgtatgggatttataccaaattatgtatttgctaaacattcactgcacacgtgtacagcggagtacgaaaaggaacgttgtccacaggggatttatggatacaacagcaaacattttataaactatgcacatgcattacacacatgcacacacatatgcacacacatgtgcaaacatagccacttttttgtcaagagttaccctttggggctccttaaaccagaatgggagtttgaaagagagatcatactccagctgaagtttgttgacccttttctaaaattaaaaagatcaaatttagtatttgctggatatgcagggagatgagactcttttaatctcaaaataaacagattctttcaagaacgaa

SEQ ID NO: 148354 - DNA, 6015 bp, Homo sapiens
  Payload ID: 9375
  Gene Symbol: LRRK1
  Gene Name: leucine-rich repeat kinase 1
  ENST ID: ENST00000531270
  CDS Start-End: 31-1983
gcctttgaagatcggctgctgcaagggttgatggctggcatgtcgcaaagaccccccagcatgtactggtgtgtggggccggaggagtcagctgtgtgtccagaacgtgccatggagacgcttaacggtgccggggacacgggcggcaagccgtccacgcggggcggtgaccctgcagcgcggtcccgcaggacggaaggcatccgcgccgcgtacaggcggggagaccgcggcggcgcccgggacctgctggaggaggcctgcgaccagtgcgcgtcccagctggaaaagggccagcttctgagcatcccggcagcctatggggatctggagatggtccgctacctactcagcaagagactggtggagctgcccaccgagcccacggatgacaacccagccgtggtggcagcgtattttggacacacggcagttgtgcaggaattgcttgagtccttaccaggtccctgcagtccccagcggcttctgaactggatgctggccttggcttgccagcgagggcacctgggggttgtgaagctcctggtcctgacgcacggggctgacccggagagctacgctgtcaggaagaatgagttccctgtcatcgtgcgcttgcccctgtatgcggccatcaagtcagggaatgaagacattgcaatattcctgcttcggcatggggcctatttctgttcctacatcttgctggatagtcctgaccccagcaaacatctgctgagaaagtacttcattgaagccagtcccttgcccagcagttatccgggaaaaacagctctccgtgtgaaatggtcccatctcagactgccctgggtagacctagactggctcatagacatctcctgccagatcacggagctcgacctttctgccaactgcctggcgaccctcccctcggttatcccctggggcctcatcaatctccggaagctgaacctctccgacaaccacctgggggagctgcctggcgtgcagtcatcggacgaaatcatctgttccaggctacttgaaattgacatttccagcaacaagttgtcccacctccctcctggattcttgcacctctcaaaacttcaaaaactgacagcttcaaaaaattgtttagaaaaattgttcgaagaagaaaatgccactaactggataggtttacggaagctacaggaacttgatatatctgacaataaattgacagaactccctgccctgttccttcactctttcaagtccctcaattctctgaatgtctccagaaacaacctgaaggtgtttccagatccctgggcctgccctttgaaatgttgtaaagcttccagaaatgccctggaatgtctgccagacaaaatggctgtcttttggaaaaatcacctgaaggatgtggatttctcagaaaacgcactcaaagaagttcccctgggacttttccagcttgatgccctcatgttcttgaggttacaggggaaccagctggcggcacttccacctcaagagaagtggacctgcaggcagctcaaaaccctggatctctccagaaaccaacttggcaaaaatgaagatggactgaaaacgaagcgtattgcctttttcaccaccagaggtcgccagcgctccgggactgaggcagcaagtgtgctggaatttccggccttcctaagtgagtctttggaagtcctttgcctgaacgacaaccacctcgacacagtccctccctcggtttgcctactgaagagcttatcagagctctacttgggaaacaaccctggcctccgggagctccctcctgagctggggcagctgggcaacctctggcagctggacactgaagacctgaccatcagcaatgtgcctgcagaaatccaaaaagaaggccccaaagcaatgctgtcttacctgcgtgctcagctgcggaaagcggaaaagtgcaagctgatgaagatgatcatcgtgggtcccccgcgccagggttgagtccgtggagttcaacgtctgggacatcgggggaccggccagcatggccactgtcaaccagtgcttcttcacggacaaggccctgtacgtggtggtctggaacctggcgctgggggaggaggccgtggccaacctccagttctggctgctcaacatcgaggccaaggccccaaacgccgtggtgctggtggtcgggacgcacctggatttaattgaagccaagttccgtgtggaaaggattgcaacgctgcgtgcctatgtgctggcactctgccgctccccctccggctccagggccacaggcttcccagacatcaccttcaaacacttacatgagatttcctgcaagagcctggaaggtcaggaagggctgcgacagctgattttccacgtcacgtgcagcatgaaggacgtgggcagcaccatcggctgccagcgactggcagggcggctgatccccaggagctacctgagcctgcaggaggccgtgctggcagagcagcagcgccgcagccgggacgacgacgtgcagtacctgacggacaggcagctggagcagctggtggagcagacgcccgacaacgacatcaaggactacgaggacctgcagtcagccatcagcttcctcatagaaaccggcaccctgctccatttcccggacaccagccacggcctgaggaacctctacttcctcgaccctatttggctctccgaatgtctgcagaggatctttaatattaagggctctcggtcagtggccaagaatggggtgatcagagcagaagacctcaggatgctgctggtggggactggcttcacgcagcagacggaagagcagtacttccagttcctggccaagtttgagatcgccctgcccgtcgccaatgacagctacctcctgccccatctccttccatctaaacctggcctggacacccacggtatgcggcaccccacagccaacaccattcagagggtatttaagatgagcttcgttcccgttggcttctggcaaaggtttatagcacggatgctgatcagcctggcggagatggacctgcagtgtggaatcttccgacgtgaactggaaaaagaagaaaagcggaggaatgaaaattgtttgccaatcagaagtgagggacttctcagccatggctttcatcacggaccacgtcaattccttgattgatcagtggtttcccgccctgacagccacagagagcgacgggacgccactcatggagcagtacgtgccctgcccggtctgcgagacagcctgggcccagcacacggaccccagtgagaaatcagaggatgtgcagtacttcgacatggaagactgtgtcctgacggccatcgagcgggacttcatctcctgccccagacacccggacctccccgtgccgctgcaggagctggtccctgaactgttcatgaccgacttcccggccaggctcttcctggagaacagcaagctggagcacagcgaggacgagggcagcgtcctgggccagggcggcagtggcaccgtcatctaccgggcccggtaccagggccagcctgtggccgtcaagcgcttccacatcaaaaaattcaagaactttgctaacgtaccggcagacaccatgctgaggcacctgcgggccaccgatgccatgaagaacttctccgagttccggcaggaggccagcatgctgcacgcgctgcagcacccctgcatcgtggcgctcatcggcatcagcatccacccgctctgcttcgccctggagctcgcgccgctcagcagcctcaacaccgtgctgtccgagaacgccagagattcttcctttatacccctgggacacatgctcacccaaaaaatagcctaccagatcgcctcgggcctggcctacctgcacaagaaaaacatcatcttctgtgacctgaagtcggacaacattctggtgtggtcccttgacgtcaaggagcacatcaacatcaagctatctgactacgggatttcgaggcagtcattccatgagggcgccctaggcgtggagggcactcctggctaccaggccccagagatcaggcctcgcattgtatatgatgagaaggtagatatgttctcctatggaatggtgctctacgagttgctgtcaggacagcgccctgcactgggccaccaccagctccagattgccaagaagctgtccaagggcatccgcccggttctggggcagccggaggaagtgcagttccggcgactgcaggcgctcatgatggagtgctgggacactaagccagagaagcgaccgctggccctgtcggtggtgagccagatgaaggacccgacttttgccaccttcatgtatgaactgtgctgtgggaagcagacagccttcttctcatcccagggccaggagtacaccgtggtgttttgggatggaaaagaggagtccaggaactacacggtggtgaacacagagaagggcctcatggaggtgcagaggatgtgctgccctgggatgaaggtgagctgccagctccaggtccagagatccctgtggacagccaccgaggaccagaaaatctacatctacaccctcaagggcatgtgccccttaaacacaccccaacaggccttggatactccagctgtcgtcacctgcttcttggccgtgcctgttattaaaaagaattcctacctggtcttagcgggcctcgccgatgggcttgtggctgtgtttcccgtggtgcggggcaccccaaaggacagctgctcctacctgtgctcacacacagccaacaggtccaagttcagcatcgcggatgaagacgcacggcagaacccctacccagtgaaggccatggaggtggtcaacagcggctctgaggtctggtacagcaatgggccgggcctccttgtcatcgactgtgcctccctggagatctgcaggcggctggagccctacatggccccctccatggttacgtcagtcgtgtgcagctctgagggcagaggggaggaggtcgtctggtgcctggatgacaaggccaactccttggtgatgtaccactccaccacctaccagctgtgtgcccggtacttctgcggggtccccagccccctcagggacatgtttcccgtgcggcccttggacacggaacccccggcagccagccacacggccaacccaaaggtgcctgagggggactccatcgcggacgtgagcatcatgtacagtgaggagctgggcacgcagatcctgatccaccaggaatcactcactgactactgctccatgtcctcctactcctcatccccaccccgccaggctgccaggtccccctcaagcctccccagctccccagcaagttcttccagtgtgcctttctccaccgactgcgaggactcagacatgctacatacgcccggtgctgcctccgacaggtctgagcatgacctgacccccatggacggggagaccttcagccagcacctgcaggccgtgaagatcctcgccgtcagagacctcatttgggtccccaggcgcggtggagatgttatcgtcattggcctggagaaggattctggcgcccagcggggccgagtcattgccgtcttaaaagcccgagagctgactccgcatggggtgctggtggatgctgccgtggtggcaaaggacactgttgtgtgcacctttgaaaatgaaaacacagagtggtgcctggccgtctggaggggctggggcgccagggagttcgacattttctaccagtcctacgaggagctgggccggctggaggcttgcactcgcaagagaaggtaattcctgtggaatgactgtcacacatcagagctggctggcccggggctgcagcctgacccctctgccatcggcctctagttctccaaggacctagaagacagatggagttctcccctgaactccttgctgctaagaagtgctgagaagttactcgcctggcggtggctccagggttctctggttctctggagcagagttctctgaataccccatcccccaa

SEQ ID NO: 148355 - DNA, 6494 bp, Homo sapiens
  Payload ID: 9375
  Gene Symbol: LRRK1
  Gene Name: leucine-rich repeat kinase 1
  ENST ID: ENST00000525284
  CDS Start-End: 31-2100
gcctttgaagatcggctgctgcaagggttgatggctggcatgtcgcaaagaccccccagcatgtactggtgtgtggggccggaggagtcagctgtgtgtccagaacgtgccatggagacgcttaacggtgccggggacacgggcggcaagccgtccacgcggggcggtgaccctgcagcgcggtcccgcaggacggaaggcatccgcgccgcgtacaggcggggagaccgcggcggcgcccgggacctgctggaggaggcctgcgaccagtgcgcgtcccagctggaaaagggccagcttctgagcatcccggcagcctatggggatctggagatggtccgctacctactcagcaagagactggtggagctgcccaccgagcccacggatgacaacccagccgtggtggcagcgtattttggacacacggcagttgtgcaggaattgcttgagtccttaccaggtccctgcagtccccagcggcttctgaactggatgctggccttggcttgccagcgagggcacctgggggttgtgaagctcctggtcctgacgcacggggctgacccggagagctacgctgtcaggaagaatgagttccctgtcatcgtgcgcttgcccctgtatgcggccatcaagtcagggaatgaagacattgcaatattcctgcttcggcatggggcctatttctgttcctacatcttgctggatagtcctgaccccagcaaacatctgctgagaaagtacttcattgaagccagtcccttgcccagcagttatccgggaaaaacagctctccgtgtgaaatggtcccatctcagactgccctgggtagacctagactggctcatagacatctcctgccagatcacggagctcgacctttctgccaactgcctggcgaccctcccctcggttatcccctggggcctcatcaatctccggaagctgaacctctccgacaaccacctgggggagctgcctggcgtgcagtcatcggacgaaatcatctgttccaggctacttgaaattgacatttccagcaacaagttgtcccacctccctcctggattcttgcacctctcaaaacttcaaaaactgacagcttcaaaaaattgtttagaaaaattgttcgaagaagaaaatgccactaactggataggtttacggaagctacaggaacttgatatatctgacaataaattgacagaactccctgccctgttccttcactctttcaagtccctcaattctctgaatgtctccagaaacaacctgaaggtgtttccagatccctgggcctgccctttgaaatgttgtaaagcttccagaaatgccctggaatgtctgccagacaaaatggctgtcttttggaaaaatcacctgaaggatgtggatttctcagaaaacgcactcaaagaagttcccctgggacttttccagcttgatgccctcatgttcttgaggttacaggggaaccagctggcggcacttccacctcaagagaagtggacctgcaggcagctcaaaaccctggatctctccagaaaccaacttggcaaaaatgaagatggactgaaaacgaagcgtattgcctttttcaccaccagaggtcgccagcgctccgggactgaggcagcaagtgtgctggaatttccggccttcctaagtgagtctttggaagtcctttgcctgaacgacaaccacctcgacacagtccctccctcggtttgcctactgaagagcttatcagagctctacttgggaaacaaccctggcctccgggagctccctcctgagctggggcagctgggcaacctctggcagctggacactgaagacctgaccatcagcaatgtgcctgcagaaatccaaaaagaaggccccaaagcaatgctgtcttacctgcgtgctcagctgcggaaagcggaaaagtgcaagctgatgaagatgatcatcgtgggtcccccgcgccagggcaagtccaccctcctggagatcttacagacggggagggccccccaggtggtgcatggagaggccaccatcaggaccaccaagtgggagctccagaggccggctggctcgagagccaagtaggttgagtccgtggagttcaacgtctgggacatcgggggaccggccagcatggccactgtcaaccagtgcttcttcacggacaaggccctgtacgtggtggtctggaacctggcgctgggggaggaggccgtggccaacctccagttctggctgctcaacatcgaggccaaggccccaaacgccgtggtgctggtggtcgggacgcacctggatttaattgaagccaagttccgtgtggaaaggattgcaacgctgcgtgcctatgtgctggcactctgccgctccccctccggctccagggccacaggcttcccagacatcaccttcaaacacttacatgagatttcctgcaagagcctggaaggtcaggaagggctgcgacagctgattttccacgtcacgtgcagcatgaaggacgtgggcagcaccatcggctgccagcgactggcagggcggctgatccccaggagctacctgagcctgcaggaggccgtgctggcagagcagcagcgccgcagccgggacgacgacgtgcagtacctgacggacaggcagctggagcagctggtggagcagacgcccgacaacgacatcaaggactacgaggacctgcagtcagccatcagcttcctcatagaaaccggcaccctgctccatttcccggacaccagccacggcctgaggaacctctacttcctcgaccctatttggctctccgaatgtctgcagaggatctttaatattaagggctctcggtcagtggccaagaatggggtgatcagagcagaagacctcaggatgctgctggtggggactggcttcacgcagcagacggaagagcagtacttccagttcctggccaagtttgagatcgccctgcccgtcgccaatgacagctacctcctgccccatctccttccatctaaacctggcctggacacccacggtatgcggcaccccacagccaacaccattcagagggtatttaagatgagcttcgttcccgttggcttctggcaaaggtttatagcacggatgctgatcagcctggcggagatggacctgcagctttttgaaaacaagaagaatactaaaagcaggaacaggaaagtcaccatttacagttttacaggaaaccagagaaatcgctgtagcacattcagagtgaaaagaaatcagaccatctattggcaggaagggctcctggtcacttttgatgggggctacctcagtgtggaatcttccgacgtgaactggaaaaagaagaaaagcggaggaatgaaaattgtttgccaatcagaagtgagggacttctcagccatggctttcatcacggaccacgtcaattccttgattgatcagtggtttcccgccctgacagccacagagagcgacgggacgccactcatggagcagtacgtgccctgcccggtctgcgagacagcctgggcccagcacacggaccccagtgagaaatcagaggatgtgcagtacttcgacatggaagactgtgtcctgacggccatcgagcgggacttcatctcctgccccagacacccggacctccccgtgccgctgcaggagctggtccctgaactgttcatgaccgacttcccggccaggctcttcctggagaacagcaagctggagcacagcgaggacgagggcagcgtcctgggccagggcggcagtggcaccgtcatctaccgggcccggtaccagggccagcctgtggccgtcaagcgcttccacatcaaaaaattcaagaactttgctaacgtaccggcagacaccatgctgaggcacctgcgggccaccgatgccatgaagaacttctccgagttccggcaggaggccagcatgctgcacgcgctgcagcacccctgcatcgtggcgctcatcggcatcagcatccacccgctctgcttcgccctggagctcgcgccgctcagcagcctcaacaccgtgctgtccgagaacgccagagattcttcctttatacccctgggacacatgctcacccaaaaaatagcctaccagatcgcctcgggcctggcctacctgcacaagaaaaacatcatcttctgtgacctgaagtcggacaacattctggtgtggtcccttgacgtcaaggagcacatcaacatcaagctatctgactacgggatttcgaggcagtcattccatgagggcgccctaggcgtggagggcactcctggctaccaggccccagagatcaggcctcgcattgtatatgatgagaaggtagatatgttctcctatggaatggtgctctacgagttgctgtcaggacagcgccctgcactgggccaccaccagctccagattgccaagaagctgtccaagggcatccgcccggttctggggcagccggaggaagtgcagttccggcgactgcaggcgctcatgatggagtgctgggacactaagccagagaagcgaccgctggccctgtcggtggtgagccagatgaaggacccgacttttgccaccttcatgtatgaactgtgctgtgggaagcagacagccttcttctcatcccagggccaggagtacaccgtggtgttttgggatggaaaagaggagtccaggaactacacggtggtgaacacagagaagggcctcatggaggtgcagaggatgtgctgccctgggatgaaggtgagctgccagctccaggtccagagatccctgtggacagccaccgagactagtctgtctttttcaacgtttctacaaagagcagaaatccataaacaacccaccagaacgtgtcaatccatgtaactttccaagacccataggggatccccaagtccaagtgcatcctcatgggaatggcttgggaaatgccagacactttccagcctgggtctcacagtggacctgtctgcctctgcaggaccagaaaatctacatctacaccctcaagggcatgtgccccttaaacacaccccaacaggccttggatactccagctgtcgtcacctgcttcttggccgtgcctgttattaaaaagaattcctacctggtcttagcgggcctcgccgatgggcttgtggctgtgtttcccgtggtgcggggcaccccaaaggacagctgctcctacctgtgctcacacacagccaacaggtccaagttcagcatcgcggatgaagacgcacggcagaacccctacccagtgaaggccatggaggtggtcaacagcggctctgaggtctggtacagcaatgggccgggcctccttgtcatcgactgtgcctccctggagatctgcaggcggctggagccctacatggccccctccatggttacgtcagtcgtgtgcagctctgagggcagaggggaggaggtcgtctggtgcctggatgacaaggccaactccttggtgatgtaccactccaccacctaccagctgtgtgcccggtacttctgcggggtccccagccccctcagggacatgtttcccgtgcggcccttggacacggaacccccggcagccagccacacggccaacccaaaggtgcctgagggggactccatcgcggacgtgagcatcatgtacagtgaggagctgggcacgcagatcctgatccaccaggaatcactcactgactactgctccatgtcctcctactcctcatccccaccccgccaggctgccaggtccccctcaagcctccccagctccccagcaagttcttccagtgtgcctttctccaccgactgcgaggactcagacatgctacatacgcccggtgctgcctccgacaggtctgagcatgacctgacccccatggacggggagaccttcagccagcacctgcaggccgtgaagatcctcgccgtcagagacctcatttgggtccccaggcgcggtggagatgttatcgtcattggcctggagaaggattctggcgcccagcggggccgagtcattgccgtcttaaaagcccgagagctgactccgcatggggtgctggtggatgctgccgtggtggcaaaggacactgttgtgtgcacctttgaaaatgaaaacacagagtggtgcctggccgtctggaggggctggggcgccagggagttcgacattttctaccagtcctacgaggagctgggccggctggaggcttgcactcgcaagagaaggtaattcctgtggaatgactgtcacacatcagagctggctggcccggggctgcagcctgacccctctgccatcggcctctagttctccaaggacctagaagacagatggagttctcccctgaactccttgctgctaagaagtgctgagaagttactcgcctggcggtggctccagggttctctggttctctggagcagagttctctgaataccccatcccccaa

SEQ ID NO: 148356 - DNA, 1241 bp, Homo sapiens
  Payload ID: 9375
  Gene Symbol: LRRK1
  Gene Name: leucine-rich repeat kinase 1
  Uniprot ID: Q38SD2
  ENST ID: ENST00000532029
  CDS Start-End: 230-1024
ggcgcggggggcagacggcggtgggacggccaggccccggccccgccagtgtgtccgcccggccccgcgtcccggagcgcccgcacccggccccgccgccgcctcagagcaagaaagctttctgctcagccatggctacgagtccacgccttaatgcaccccacagccagcggcagtggcagtgacaacagcgggacctgcctttgaagatcggctgctgcaagggttgatggctggcatgtcgcaaagaccccccagcatgtactggtgtgtggggccggaggagtcagctgtgtgtccagaacgtgccatggagacgcttaacggtgccggggacacgggcggcaagccgtccacgcggggcggtgaccctgcagcgcggtcccgcaggacggaaggcatccgcgccgcgtacaggcggggagaccgcggcggcgcccgggacctgctggaggaggcctgcgaccagtgcgcgtcccagctggaaaagggccagcttctgagcatcccggcagcctatggggatctggagatggtccgctacctactcagcaagagactggtggagctgcccaccgagcccacggatgacaacccagccgtggtggcagcgtattttggacacacggcagttgtgcaggaattgcttgagtccttaccaggtccctgcagtccccagcggcttctgaactggatgctggccttggcttgccagcgagggcacctgggggttgtgaagctcctggtcctgacgcacggggctgacccggagagctacgctgtcaggaagaatgagttccctgtcatcgtgcgcttgcccctgtatgcggccatcaagtcagggaatgaagacattgcaatattcctgcttcggcatggggcctatttctgttcctacatcttgctggatagtcctgaccccagcaaacatctgctgagaaagtacttcattgaagccagtcccttgcccagcagttatccgggaaaaacagtgagtagtcactgcctgtggagtgtgttttagttccttttgtgctgctgtaacagaatcctgcagactgggtaatttataataaacagaaatatatttggcttacaggtctggagattgagaagtccaagagcatagtgctggtatctggtgagggccttcatgcagtgatatgaaggtggagggcaagagaccaacagactgagagagggaagaactcacttttataacaacccaccctcaaaataac

SEQ ID NO: 148357 - DNA, 569 bp, Homo sapiens
  Payload ID: 9375
  Gene Symbol: LRRK1
  Gene Name: leucine-rich repeat kinase 1
  ENST ID: ENST00000534045
  CDS Start-End: 473-569
gcgtctgggcccggccccggcgcggggggcagacggcggtgggacggccaggccccggccccgccagtgtgtccgcccggccccgcgtcccggagcgcccgcacccggccccgccgccgcctcaggtggtctctggctggcgcagatacaactgctctgtctaccatggtctctgcaagctacaggggaccttcctggcaggcagggacgcgggaaggaagcctaggaaggccggggtcagcgaggagacgctggtggagaatctgagaacccccgtggccatctcaacctaccccttcacagtatgaggccgcgaagtttttctcccacgaacacttcccctgcaacagagcaagaaagctttctgctcagccatggctacgagtccacgccttaatgcaccccacagccagcggcagtggcagtgacaacagcgggacctgcctttgaagatcggctgctgcaagggttgatggctggcatgtcgcaaagaccccccagcatgtactggtgtgtggggccggaggagtcagctgtgtgtccagaacgtgccatggagacgcttaacg

SEQ ID NO: 148358 - DNA, 11632 bp, Homo sapiens
  Payload ID: 9375
  Gene Symbol: LRRK1
  Gene Name: leucine-rich repeat kinase 1
  ENST ID: ENST00000526457
  CDS Start-End: 1-1982
gcatcagcatccacccgctctgcttcgccctggagctcgcgccgctcagcagcctcaacaccgtgctgtccgagaacgccagagattcttcctttatacccctgggacacatgctcacccaaaaaatagcctaccagatcgcctcgggcctggcctacctgcacaagaaaaacatcatcttctgtgacctgaagtcggacaacattctggtgtggtcccttgacgtcaaggagcacatcaacatcaagctatctgactacgggatttcgaggcagtcattccatgagggcgccctaggcgtggagggcactcctggctaccaggccccagagatcaggcctcgcattgtatatgatgagaaggtagatatgttctcctatggaatggtgctctacgagttgctgtcaggacagcgccctgcactgggccaccaccagctccagattgccaagaagctgtccaagggcatccgcccggttctggggcagccggaggaagtgcagttccggcgactgcaggcgctcatgatggagtgctgggacactaagccagagaagcgaccgctggccctgtcggtggtgagccagatgaaggacccgacttttgccaccttcatgtatgaactgtgctgtgggaagcagacagccttcttctcatcccagggccaggagtacaccgtggtgttttgggatggaaaagaggagtccaggaactacacggtggtgaacacagagaagggcctcatggaggtgcagaggatgtgctgccctgggatgaaggtgagctgccagctccaggtccagagatccctgtggacagccaccgaggaccagaaaatctacatctacaccctcaagggcatgtgccccttaaacacaccccaacaggccttggatactccagctgtcgtcacctgcttcttggccgtgcctgttattaaaaagaattcctacctggtcttagcgggcctcgccgatgggcttgtggctgtgtttcccgtggtgcggggcaccccaaaggacagctgctcctacctgtgctcacacacagccaacaggtccaagttcagcatcgcggatgaagacgcacggcagaacccctacccagtgaaggccatggaggtggtcaacagcggctctgaggtctggtacagcaatgggccgggcctccttgtcatcgactgtgcctccctggagatctgcaggcggctggagccctacatggccccctccatggttacgtcagtcgtgtgcagctctgagggcagaggggaggaggtcgtctggtgcctggatgacaaggccaactccttggtgatgtaccactccaccacctaccagctgtgtgcccggtacttctgcggggtccccagccccctcagggacatgtttcccgtgcggcccttggacacggaacccccggcagccagccacacggccaacccaaaggtgcctgagggggactccatcgcggacgtgagcatcatgtacagtgaggagctgggcacgcagatcctgatccaccaggaatcactcactgactactgctccatgtcctcctactcctcatccccaccccgccaggctgccaggtccccctcaagcctccccagctccccagcaagttcttccagtgtgcctttctccaccgactgcgaggactcagacatgctacatacgcccggtgctgcctccgacaggtctgagcatgacctgacccccatggacggggagaccttcagccagcacctgcaggccgtgaagatcctcgccgtcagagacctcatttgggtccccaggcgcggtggagatgttatcgtcattggcctggagaaggattctggcgcccagcggggccgagtcattgccgtcttaaaagcccgagagctgactccgcatgggattatgccagtctcctctgtgaaggtatgctgggcagggtggcctgtccgggacatggtctacatggttgcagtgatgtgaggctggcgccagctgcagctccccacagtgtttacaccccgcactttgactaccgagccccacacgggtgctggtggatgctgccgtggtggcaaaggacactgttgtgtgcacctttgaaaatgaaaacacagagtggtgcctggccgtctggaggggctggggcgccagggagttcgacattttctaccagtcctacgaggagctgggccggctggaggcttgcactcgcaagagaaggtaattcctgtggaatgactgtcacacatcagagctggctggcccggggctgcagcctgacccctctgccatcggcctctagttctccaaggacctagaagacagatggagttctcccctgaactccttgctgctaagaagtgctgagaagttactcgcctggcggtggctccagggttctctggttctctggagcagagttctctgaataccccatcccccaactgctgattttacagccccagggaagacagtggtatcaggctgggagcggcctcctctggcctcccccatcagtttgcaggagcaggggtgcaggatcctgttctgagctgggtcaaacaaagcagggccgggccttcctgccatccccaggtctcagatggaattacactagaggccctccgctgggaagcacttgaggtagggcaggaggggggctgtgacccctgccctttccccgccagagacctcaggctctcagcacattccacaggctcctgagtccccgaggcctgggccagcttgggcaagccaagatcagatgtctctgtgttcgggaaggtctccgtgtgggaaagcccttgggggatcccgggtgaggagtgttgccccatccagagaatgaatgagttcctttaagtgccaccgccagcaagcccagaggcacacagtccgagtgcacccgcttagcctttacattcctctccaccgacaaaaggaaggggaaactcaatcagcaggacttcagaaagggccttgtgtttatagctttgtcaagtaaatttggacgcagctggagcacaggccctgtttgtttgcacataataatcttgtttatcactttaaaaaattcagtaatatctcagcagtcaggcttctggttgtgaaatcacattgtatgggatttataccaaattatgtatttgctaaacattcactgcacacgtgtacagcggagtacgaaaaggaacgttgtccacaggggatttatggatacaacagcaaacattttataaactatgcacatgcattacacacatgcacacacatatgcacacacatgtgcaaacatagccacttttttgtcaagagttaccctttggggctccttaaaccagaatgggagtttgaaagagagatcatactccagctgaagtttgttgacccttttctaaaattaaaaagatcaaatttagtatttgctggatatgcagggagatgagactcttttaatctcaaaataaacagattctttcaagaacgaagctgtggcctctgtcttttgagcgcttatgaccacagcacgggctcagtccctcccagacccactcgctgtctggggataatgggcagcccctccttgcccactgtgccaacatgcaggtggcccctgagcagcttccatgggtggagacgctgctctgtcagtcacaggcttggaaaaagcgagtccccccactcttttttttttttttttttttttttttaccaacctgggcaccaagtcccagggggctgagggtctgtgcttcctgtctacctccctgccattctctcaccctcatcccacagcagggtctcaggagtcccactctccctctcctctcattccagtgccccacaactgcccagttaacccccagatgcaagccagattccatctgccccaggccccaagcttttgctttggcatcacgcgaggccaggctgctttgcaggcaccaaaattcaccctctcctactcctggaaaagcccagccccaggcctcacagagccaggggaggggatctcatcacatcacagttagaaatcatacaggcctaaagtcccagctacccaggagccaaggcaggaggaacccttgagcctgggagttggaggttacagtgagctatgatcacaccagctttctagcctgggtgacagagcaagacccaactcttaaaaaaaaaaaaaaaatacaggaaatgactaatgaacttgactccatgaaattgaaacttacgtggaaaattagtccaaagcctaaaagactagcaactgagaaaaaaaaacattgcaacacaaatgagagacaaagacctcacttatcttcattacagagagttcgtaatgtcaataagaaacagaaaaccggaaaggcaaacaggttaagggcatgggcagcaattgaattacaaagaaacagacagacccttaaacatcaatgcttgacctcacccaacagcagggaaacagtctccacaacagtaaaatgttgctgggatgggcccagcattcagcatggtccctgcaactttggcctctgcccagtgacctctggcgggtgtagaagagctcatgcttcagtgagggggtggggggcaccctgaggaccctgtcaacatcagctggaccacaggcatctcagatagatgtcacttaccaccctcatgttggcagagggtggtaaccagccagcatctccttcttaaacacctactaagtgtcaggcactgtgaccggagacacagtcaagaatctctgtgttttttttgttttgttttgtttttgttttttgagacggagtctcgctctgttgcccaggctggagtgcaatggcgcgatctcagctcactgccacctccgcctcccaggttcaagcaattctcctgcctcagcctcccgagtagctgcgattacaggcgtgcaccacaatgcctggataatttttgtattttcagtagaaacggggtttcaccatgttggccaggatggtcttgaactcctgagctcaggtgatccgcccgcctcatcctcccaaagtgctgggattacaggtgtgagctacctgcgctggccgaatctctgcttttaggagctcactcctcataggtagagttgacaataagcacacaaacaagtgagatagcagggcagccggaccacccagttgggcaattcgtggcttggcctaggaacgttacatttgactgaggctggcgaggcctgcagcctgcaccaggaggtacaatgtgagactgaggaatgggaagaaggcattccatggagctctgagggcactgggtgcaagggccttgcacatgcaaagaccctgttgtgggttcaagccactgtgtgggagggacaggagagcctggcgtggctgcggccttgaaggaggggactgtgcacacagaattgcaagtgggggtctccgcggaagctcctggcagttttaagcaggattattagatgattcagtcaactttacaactcactttgctgaatggagggtggattaacgagggggtagttggaggctaccccttggagggcattctggacttatctaccaaaatttcaaatgcacataccctctgacccagcagttccacttaagtatttggtcctgaaatcttggtaaaagtgcccaaagatacagaacaaggatgttcactatagcatctcttagaatatggccccaaacaggaagcaaccccaacctctatcatgagggaggtcataaaattcctgcacatgcaacagtgccatcctctgcagcctgtcaaagaggcaggcagcactaactgctggactggaatgttctccaagatataataaatgcatttgtttgaaagcagcttgcagcacagtgcgtcaggcctctgagcccaagccaagccatcgcatcccctgtgacttgcacgtatatgcctagatggcctgaagtaactgaagaatcacaaaagaagtgaatatgccctgccccgccttaactgatgacattccaccacaaaagaagtgaaaaaggccggtccttgacttaactgatgacattatcttatgaaattccttctcctggctcatcctggctcaaaaagctcccccactgagcacgttgccacccccactcctgcccgccagagaacaaaccccctttttcctttacctacccaaatcttataaaacggcctcacgcctatctcccttcactgactcccttttcggactcagcccacctgcgcccaggtgaaataaacagccttgttgctcacacaaagcctgtttggtggtctcttcacatggacgtgcattaaatttggtgccgtaactggcgcggggggaggggggggggaacctcccttgggagatcaatcccctgtcctcctgctctttggtccatgagaaagatccacctacaacctcaagtcctcagaccaaccagcccaagaaacatctcaccaatttcaaatccagtaagcagcctctttttactctcttctccaacctccctcactatccctcaacctctttctcctttcaatcttggcgccacacttcaatttctcccttctcttaacttcaattcctttcattttctggtagagataaaggagacacgttttatccgtggacccaaaactccagcgccggtcacggactgggaaggcagccttcccttggtgtttaatcattgcagggacacctctctgattattcacccaggtttcagaggtgtcagaccacgcagggacgcctgccttggtccttcacccttagcggcaagtcccgcttttctggggaatgggcaaggaccccaaccccttctctccgtgtctctaccccttctccgcctttctggggggcaagaaacccccaaccccttctccttcaccctgagcggcaagtcccgcttttctagaggaggagcaagtactccaacctcatatctctgcgccccaatcccttatttctgtgccccaacctcttatctctgtgccccaatcccttatttccatgcccccacctcttatatctctgcaccttgatcccttatttccacatcccgacctcgtatctctgcaccccgacccctttcccacttttctggagagtaagaacccctgaaccgcttctctccgtgtctctactctcccttttctttaaacttgcctccttcactgtaggcaaccttccactctccattcctccttcttctcccttagcctatgttctcaaaaacttaaaacctcttcaactcacacctgacctaaaacctaaatgccttattttcttctgcaatgccgcttgaccccaatacaaactcaacagtagttccaaatagccggaaaacagcactttcaatttttccatcctgcaagatctaaataattcttgtcgtaaaatgggcaaatggtctgaggtgcctgacgtccaggcgttcttttacacatcagtccctccctagtctctgttcccagtgcaactcatcccaaatcttccttctttccctcccgcctgtctcctcagtcccaaccccaagcatcgctgagtctttctaatcttttctatagacccatctgacctctcccctcctccccaggctgctccttgccaggccgagctaggtcccaattcttcctcagcctccgctcctccaccatataatctttttatcacctcccctcctcacacccggtccggcttacagtttccttccgtgactagccctcccctacctgcccagcaattttctcttaaaaaggtggctggagctaaaggcatagtcaaggttaatgctcctttttctttatcccaaatcagatagcgtttaggctctttttcatcaaatataaaaacccagcccagttcatgcctcgtttggcagcaaccctgagacactttacggccctagaccctaaaagcccaaaaggccgtcttattctcaatatatattttatcacccaatctgctccctacattaaataaaactccaaaaattaaattccggccctcaaaccccacaacaggatttaattaaccttgccttcaaggtgtacaataatagaaaaaagttgcaattccttgcctccactgtgagacaaaccccagccacatctccagcacacaagaacttccaaacacctgaactgcagcggccaggcattcctccagaacctcctcccccaggagcttgctacaagtgccagaaatctggccaccaggccaaggaatgcctgcagcccaggattcctcctaagccgtgtcccatctgtgcgggaccccactggaaatcggactgtccaactcacctggcagccactcccagagcccctggaactccggcccaaggctctctgactgactccttcccagatcttcttggcttagcggctgaagactgacactgcccgatcacctcggaagccccctagaccatcacggacgccgagctgccagtaactctcacagtggaaggtaaacccgtccccttcttaatcaatacggaggctacccactccacattaccttcttttcaagggcctgtttcccttacctccataactgttgtgcgtattgacagccaggcttctaaacctcttaaaactccccaactctggtgccaacttagacaatactcttttaagcactccttttagttatccccagctgcccagttcccttattaggctgagacactttaactaaattatctgcttccctgactattcctgggctacagccacacctcattactgcccttcttcccaatccaaagcctcctttgtgtcctcctcttgtatcccccgaccttaacccataagtataagatacctctactccctccttggtgaccgatcatgcaccccttaccatctcatcgaaacctaatcacccttaccccgctcaacaccaatatcccatcccacagcatgctttgaaaagactaaagcctgttatcactctcctgctacagcatggccttttaaagcctataaactctccttacaattcccccatttcacttgtcctaaaaccagacaagccttacaagttagttcaggatctgtgccttatcaaccacattgttttgcctatccaccccatggtgtcaaacccatatactctcctatcctcaatacctcactccataatccattattgtgttctggatctcaaacatgctttctttactattcctttgcacccttcatcccagcctctcttcactttcacttggactgaccctgacacccatcaggctcagcaaattacctgggctgtactgccccaaagcttcacagacagcccccattacatcagtcaagcccaaattttttccctatctgttacctatctcagcataattctcataaagacacacgtgctctccctgccgatcatgtccgattaatctcccaaaccccaaccccttctacaaaacaagaactcctttccttcctaggcatggttagtgcagtcagaattcttacacaagagccaggaccgcaccctgtagaccttctgtccaaacaacttgaccttactgttttagcctagccctcatgtctctgtgcagcggctgctgccaccctaatacttttagaggccctcaaaatcacaaactatgctcaactcactctctacagttatcataacttccaaaatctattttcttcctcatacctgacatatatactttctgctccccggctccttcagctgtactcactctttattgagtctcccacaattaccatttttcctggcaccgacttcaatccagcctcccacattattcctgataccacacctgacccccatgactgcatctctctgatccacctgacgttcaccccatttccccacatttccttcttccctgcttctcaccctgatcacacttggtttatggatggcagttccaccaggcctaatggccacacaccagcaaaggcaggctgtgctatagtacaagccgctagcccgcctcttagaacctctcatttcctttccatcgtggaaatctatcctcaaggaaataacttctcagtgttccatctgctattctactgctcctcagggattattcaggccccctcccttccctacacatcaagctcagggatttgcctccacccaggactggcaaattgactttactcaacatgccccgagtcagataactaaaatacctcttattctaggtagacactttcactggataggtagaggcctttcctacagggtctgagaaggccaccatggtcatttcttcccttctgtcaaacataattcctcggtttggccttcccacctctatactgtctgataacagaccagcctttattagtcaaatcagccaagcgttttttcaggctcttagtattcagtgaaacctttatatcccttacagtcctcagccttcaggaaaggtagaacggactaatgatcttttaaaaacacacctcaccaagctcagccaccaacttaaaaaagactggacaatacttttaccactttcccttctcagaattcaggcctgtccttggaatgctacaaggtacagcccatttgagctcctgtatagacgctcctttttattaggccccagtctcattccagacaccagaccaacttggactgtgccccaaaaaacttgtcatccctactatcttctgtctagtcgtactcctattcaccattctcaactactcatacgtgccctgctcttgtttacactgccagtttacactgtttctccaagccatcacagctgatatctcctggtgctatccccaaaccgccactctgaactcttaaatacataatctttgctggcaggactatgctgaacctcctttggcactctctaatcagatgtcctgagtcatctcaattcttagaccttttatacctgtttttctcctttacttattccgtttagtttttcaattcatacaaaaccgtatccaggtcatcaccaataattctaaatgacgaatgtttcttctaacaaccgcacaatatcaccccttaccacaagacctcccttcagcttaatctctcccactctaggttcccacgccgccccgaatcccgctcgaagcagccctgagaaacatcgcccattctctctctccacaccgccccccaaaaattttcgctgccccaacacttcgacactattttgttttatttttcttattaatataagaaggcaggaatgtcaggcctctgagcccaagctaagccatcgcatcccctgtgacctgcacgcatatataagcccagatggcctgaagtaactgaagaatcacaaaagaagtgaatatgccctgccccaccttaactgatgacattccaccacaaaagaagtgtaaatggctggttcttgccttaagtgatgacattaccttgtgaaagtccttttcctggctcatcctggctcaaaaagcacccccactgagcaccttgccgcccccactcctgcccgccagagaacaaaccccctttgactgtaattttcctttacctacccaaatcctataaaacggccccacccccatctccctgcactgactctcttttcggactcagcccgcctgcacccaggtgaaataaacagctttattgctcacac

SEQ ID NO: 148359 - DNA, 9158 bp, Homo sapiens
  Payload ID: 9376
  Gene Symbol: LRRK2
  Gene Name: leucine-rich repeat kinase 2
  Uniprot ID: Q5S007
  ENST ID: ENST00000298910
  CDS Start-End: 59-7642
ttccctgagcagcggacgttcatgctgggagggcggcgggttggaagcaggtgccaccatggctagtggcagctgtcaggggtgcgaagaggacgaggaaactctgaagaagttgatagtcaggctgaacaatgtccaggaaggaaaacagatagaaacgctggtccaaatcctggaggatctgctggtgttcacgtactccgagcgcgcctccaagttatttcaaggcaaaaatatccatgtgcctctgttgatcgtcttggactcctatatgagagtcgcgagtgtgcagcaggtgggttggtcacttctgtgcaaattaatagaagtctgtccaggtacaatgcaaagcttaatgggaccccaggatgttggaaatgattgggaagtccttggtgttcaccaattgattcttaaaatgctaacagttcataatgccagtgtaaacttgtcagtgattggactgaagaccttagatctcctcctaacttcaggtaaaatcaccttgctgatattggatgaagaaagtgatattttcatgttaatttttgatgccatgcactcatttccagccaatgatgaagtccagaaacttggatgcaaagctttacatgtgctgtttgagagagtctcagaggagcaactgactgaatttgttgagaacaaagattatatgatattgttaagtgcgttaacaaattttaaagatgaagaggaaattgtgcttcatgtgctgcattgtttacattccctagcgattccttgcaataatgtggaagtcctcatgagtggcaatgtcaggtgttataatattgtggtggaagctatgaaagcattccctatgagtgaaagaattcaagaagtgagttgctgtttgctccataggcttacattaggtaattttttcaatatcctggtattaaacgaagtccatgagtttgtggtgaaagctgtgcagcagtacccagagaatgcagcattgcagatctcagcgctcagctgtttggccctcctcactgagactattttcttaaatcaagatttagaggaaaagaatgagaatcaagagaatgatgatgagggggaagaagataaattgttttggctggaagcctgttacaaagcattaacgtggcatagaaagaacaagcacgtgcaggaggccgcatgctgggcactaaataatctccttatgtaccaaaacagtttacatgagaagattggagatgaagatggccatttcccagctcatagggaagtgatgctctccatgctgatgcattcttcatcaaaggaagttttccaggcatctgcgaatgcattgtcaactctcttagaacaaaatgttaatttcagaaaaatactgttatcaaaaggaatacacctgaatgttttggagttaatgcagaagcatatacattctcctgaagtggctgaaagtggctgtaaaatgctaaatcatctttttgaaggaagcaacacttccctggatataatggcagcagtggtccccaaaatactaacagttatgaaacgtcatgagacatcattaccagtgcagctggaggcgcttcgagctattttacattttatagtgcctggcatgccagaagaatccagggaggatacagaatttcatcataagctaaatatggttaaaaaacagtgtttcaagaatgatattcacaaactggtcctagcagctttgaacaggttcattggaaatcctgggattcagaaatgtggattaaaagtaatttcttctattgtacattttcctgatgcattagagatgttatccctggaaggtgctatggattcagtgcttcacacactgcagatgtatccagatgaccaagaaattcagtgtctgggtttaagtcttataggatacttgattacaaagaagaatgtgttcataggaactggacatctgctggcaaaaattctggtttccagcttataccgatttaaggatgttgctgaaatacagactaaaggatttcagacaatcttagcaatcctcaaattgtcagcatctttttctaagctgctggtgcatcattcatttgacttagtaatattccatcaaatgtcttccaatatcatggaacaaaaggatcaacagtttctaaacctctgttgcaagtgttttgcaaaagtagctatggatgattacttaaaaaatgtgatgctagagagagcgtgtgatcagaataacagcatcatggttgaatgcttgcttctattgggagcagatgccaatcaagcaaaggagggatcttctttaatttgtcaggtatgtgagaaagagagcagtcccaaattggtggaactcttactgaatagtggatctcgtgaacaagatgtacgaaaagcgttgacgataagcattgggaaaggtgacagccagatcatcagcttgctcttaaggaggctggccctggatgtggccaacaatagcatttgccttggaggattttgtataggaaaagttgaaccttcttggcttggtcctttatttccagataagacttctaatttaaggaaacaaacaaatatagcatctacactagcaagaatggtgatcagatatcagatgaaaagtgctgtggaagaaggaacagcctcaggcagcgatggaaatttttctgaagatgtgctgtctaaatttgatgaatggacctttattcctgactcttctatggacagtgtgtttgctcaaagtgatgacctggatagtgaaggaagtgaaggctcatttcttgtgaaaaagaaatctaattcaattagtgtaggagaattttaccgagatgccgtattacagcgttgctcaccaaatttgcaaagacattccaattccttggggcccatttttgatcatgaagatttactgaagcgaaaaagaaaaatattatcttcagatgattcactcaggtcatcaaaacttcaatcccatatgaggcattcagacagcatttcttctctggcttctgagagagaatatattacatcactagacctttcagcaaatgaactaagagatattgatgccctaagccagaaatgctgtataagtgttcatttggagcatcttgaaaagctggagcttcaccagaatgcactcacgagctttccacaacagctatgtgaaactctgaagagtttgacacatttggacttgcacagtaataaatttacatcatttccttcttatttgttgaaaatgagttgtattgctaatcttgatgtctctcgaaatgacattggaccctcagtggttttagatcctacagtgaaatgtccaactctgaaacagtttaacctgtcatataaccagctgtcttttgtacctgagaacctcactgatgtggtagagaaactggagcagctcattttagaaggaaataaaatatcagggatatgctcccccttgagactgaaggaactgaagattttaaaccttagtaagaaccacatttcatccctatcagagaactttcttgaggcttgtcctaaagtggagagtttcagtgccagaatgaattttcttgctgctatgcctttcttgcctccttctatgacaatcctaaaattatctcagaacaaattttcctgtattccagaagcaattttaaatcttccacacttgcggtctttagatatgagcagcaatgatattcagtacctaccaggtcccgcacactggaaatctttgaacttaagggaactcttatttagccataatcagatcagcatcttggacttgagtgaaaaagcatatttatggtctagagtagagaaactgcatctttctcacaataaactgaaagagattcctcctgagattggctgtcttgaaaatctgacatctctggatgtcagttacaacttggaactaagatcctttcccaatgaaatggggaaattaagcaaaatatgggatcttcctttggatgaactgcatcttaactttgattttaaacatataggatgtaaagccaaagacatcataaggtttcttcaacagcgattaaaaaaggctgtgccttataaccgaatgaaacttatgattgtgggaaatactgggagtggtaaaaccaccttattgcagcaattaatgaaaaccaagaaatcagatcttggaatgcaaagtgccacagttggcatagatgtgaaagactggcctatccaaataagagacaaaagaaagagagatctcgtcctaaatgtgtgggattttgcaggtcgtgaggaattctatagtactcatccccattttatgacgcagcgagcattgtaccttgctgtctatgacctcagcaagggacaggctgaagttgatgccatgaagccttggctcttcaatataaaggctcgcgcttcttcttcccctgtgattctcgttggcacacatttggatgtttctgatgagaagcaacgcaaagcctgcatgagtaaaatcaccaaggaactcctgaataagcgagggttccctgccatacgagattaccactttgtgaatgccaccgaggaatctgatgctttggcaaaacttcggaaaaccatcataaacgagagccttaatttcaagatccgagatcagcttgttgttggacagctgattccagactgctatgtagaacttgaaaaaatcattttatcggagcgtaaaaatgtgccaattgaatttcccgtaattgaccggaaacgattattacaactagtgagagaaaatcagctgcagttagatgaaaatgagcttcctcacgcagttcactttctaaatgaatcaggagtccttcttcattttcaagacccagcactgcagttaagtgacttgtactttgtggaacccaagtggctttgtaaaatcatggcacagattttgacagtgaaagtggaaggttgtccaaaacaccctaagggcattatttcgcgtagagatgtggaaaaatttctttcaaaaaaaaggaaatttccaaagaactacatgtcacagtattttaagctcctagaaaaattccagattgctttgccaataggagaagaatatttgctggttccaagcagtttgtctgaccacaggcctgtgatagagcttccccattgtgagaactctgaaattatcatccgactatatgaaatgccttattttccaatgggattttggtcaagattaatcaatcgattacttgagatttcaccttacatgctttcagggagagaacgagcacttcgcccaaacagaatgtattggcgacaaggcatttacttaaattggtctcctgaagcttattgtctggtaggatctgaagtcttagacaatcatccagagagtttcttaaaaattacagttccttcttgtagaaaaggctgtattcttttgggccaagttgtggaccacattgattctctcatggaagaatggtttcctgggttgctggagattgatatttgtggtgaaggagaaactctgttgaagaaatgggcattatatagttttaatgatggtgaagaacatcaaaaaatcttacttgatgacttgatgaagaaagcagaggaaggagatctcttagtaaatccagatcaaccaaggctcaccattccaatatctcagattgcccctgacttgattttggctgacctgcctagaaatattatgttgaataatgatgagttggaatttgaacaagctccagagtttctcctaggtgatggcagttttggatcagtttaccgagcagcctatgaaggagaagaagtggctgtgaagatttttaataaacatacatcactcaggctgttaagacaagagcttgtggtgctttgccacctccaccaccccagtttgatatctttgctggcagctgggattcgtccccggatgttggtgatggagttagcctccaagggttccttggatcgcctgcttcagcaggacaaagccagcctcactagaaccctacagcacaggattgcactccacgtagctgatggtttgagatacctccactcagccatgattatataccgagacctgaaaccccacaatgtgctgcttttcacactgtatcccaatgctgccatcattgcaaagattgctgactacggcattgctcagtactgctgtagaatggggataaaaacatcagagggcacaccagggtttcgtgcacctgaagttgccagaggaaatgtcatttataaccaacaggctgatgtttattcatttggtttactactctatgacattttgacaactggaggtagaatagtagagggtttgaagtttccaaatgagtttgatgaattagaaatacaaggaaaattacctgatccagttaaagaatatggttgtgccccatggcctatggttgagaaattaattaaacagtgtttgaaagaaaatcctcaagaaaggcctacttctgcccaggtctttgacattttgaattcagctgaattagtctgtctgacgagacgcattttattacctaaaaacgtaattgttgaatgcatggttgctacacatcacaacagcaggaatgcaagcatttggctgggctgtgggcacaccgacagaggacagctctcatttcttgacttaaatactgaaggatacacttctgaggaagttgctgatagtagaatattgtgcttagccttggtgcatcttcctgttgaaaaggaaagctggattgtgtctgggacacagtctggtactctcctggtcatcaataccgaagatgggaaaaagagacataccctagaaaagatgactgattctgtcacttgtttgtattgcaattccttttccaagcaaagcaaacaaaaaaattttcttttggttggaaccgctgatggcaagttagcaatttttgaagataagactgttaagcttaaaggagctgctcctttgaagatactaaatataggaaatgtcagtactccattgatgtgtttgagtgaatccacaaattcaacggaaagaaatgtaatgtggggaggatgtggcacaaagattttctccttttctaatgatttcaccattcagaaactcattgagacaagaacaagccaactgttttcttatgcagctttcagtgattccaacatcataacagtggtggtagacactgctctctatattgctaagcaaaatagccctgttgtggaagtgtgggataagaaaactgaaaaactctgtggactaatagactgcgtgcactttttaagggaggtaatggtaaaagaaaacaaggaatcaaaacacaaaatgtcttattctgggagagtgaaaaccctctgccttcagaagaacactgctctttggataggaactggaggaggccatattttactcctggatctttcaactcgtcgacttatacgtgtaatttacaacttttgtaattcggtcagagtcatgatgacagcacagctaggaagccttaaaaatgtcatgctggtattgggctacaaccggaaaaatactgaaggtacacaaaagcagaaagagatacaatcttgcttgaccgtttgggacatcaatcttccacatgaagtgcaaaatttagaaaaacacattgaagtgagaaaagaattagctgaaaaaatgagacgaacatctgttgagtaagagagaaataggaattgtctttggataggaaaattattctctcctcttgtaaatatttattttaaaaatgttcacatggaaagggtactcacattttttgaaatagctcgtgtgtatgaaggaatgttattatttttaatttaaatatatgtaaaaatacttaccagtaaatgtgtattttaaagaactatttaaaacacaatgttatatttcttataaataccagttactttcgttcattaattaatgaaaataaatctgtgaagtacctaatttaagtactcatactaaaatttataaggccgataattttttgttttcttgtctgtaatggaggtaaactttattttaaattctgtgcttaagacaggactattgcttgtcgatttttctagaaatctgcacggtataatgaaaatattaagacagtttcccatgtaatgtattccttcttagattgcatcgaaatgcactatcatatatgcttgtaaatattcaaatgaatttgcactaataaagtcctttgttggtatgtgaattctctttgttgctgttgcaaacagtgcatcttacacaacttcactcaattcaaaagaaaactccattaaaagtactaatgaaaaaacatgacatactgtcaaagtcctcatatctaggaaagacacagaaactctctttgtcacagaaactctctgtgtctttcctagacataatagagttgtttttcaactctatgtttgaatgtggataccctgaattttgtataattagtgtaaatacagtgttcagtccttcaagtgatatttttatttttttattcataccactagctacttgttttctaatctgcttcattctaatgcttatattcatcttttccctaaatttgtgatgctgcagatcctacatcattcagatagaaacctttttttttttcagaattatagaattccacagctcctaccaagaccatgaggataaatatctaacacttttcagttgctgaaggagaaaggagctttagttatgatggataaaaatatctgccaccctaggcttccaaattatacttaaattgtttacatagcttaccacaataggagtatcagggccaaatacctatgtaataatttgaggtcatttctgctttaggaaaagtactttcggtaaattctttggccctgaccagtattcattatttcagataattccctgtgataggacaactagtacatttaatattctcagaacttatggcattttactatgtgaaaactttaaatttatttatattaagggtaatcaaattcttaaagatgaaagattttctgtattttaaaggaagctatgctttaacttgttatgtaattaacaaaaaaatcatatataatagagctctttgttccagtgttatctctttcattgttactttgtatttgcaattttttttaccaaagacaaattaaaaaaatgaataccatatttaaatggaataataaaggttttttaaaaactt

SEQ ID NO: 148360 - DNA, 4740 bp, Homo sapiens
  Payload ID: 9376
  Gene Symbol: LRRK2
  Gene Name: leucine-rich repeat kinase 2
  ENST ID: ENST00000343742
  CDS Start-End: 122-3937
gcgctggctgcgggcggtgagctgagctcgcccccggggagctgtggccggcgcccctgccggttccctgagcagcggacgttcatgctgggagggcggcgggttggaagcaggtgccaccatggctagtggcagctgtcaggggtgcgaagaggacgaggaaactctgaagaagttgatagtcaggctgaacaatgtccaggaaggaaaacagatagaaacgctggtccaaatcctggaggatctgctggtgttcacgtactccgagcgcgcctccaagttatttcaaggcaaaaatatccatgtgcctctgttgatcgtcttggactcctatatgagagtcgcgagtgtgcagcaggtgggttggtcacttctgtgcaaattaatagaagtctgtccaggtacaatgcaaagcttaatgggaccccaggatgttggaaatgattgggaagtccttggtgttcaccaattgattcttaaaatgctaacagttcataatgccagtgtaaacttgtcagtgattggactgaagaccttagatctcctcctaacttcaggtaaaatcaccttgctgatattggatgaagaaagtgatattttcatgttaatttttgatgccatgcactcatttccagccaatgatgaagtccagaaacttggatgcaaagctttacatgtgctgtttgagagagtctcagaggagcaactgactgaatttgttgagaacaaagattatatgatattgttaagtgcgttaacaaattttaaagatgaagaggaaattgtgcttcatgtgctgcattgtttacattccctagcgattccttgcaataatgtggaagtcctcatgagtggcaatgtcaggtgttataatattgtggtggaagctatgaaagcattccctatgagtgaaagaattcaagaagtgagttgctgtttgctccataggcttacattaggtaattttttcaatatcctggtattaaacgaagtccatgagtttgtggtgaaagctgtgcagcagtacccagagaatgcagcattgcagatctcagcgctcagctgtttggccctcctcactgagactattttcttaaatcaagatttagaggaaaagaatgagaatcaagagaatgatgatgagggggaagaagataaattgttttggctggaagcctgttacaaagcattaacgtggcatagaaagaacaagcacgtgcaggaggccgcatgctgggcactaaataatctccttatgtaccaaaacagtttacatgagaagattggagatgaagatggccatttcccagctcatagggaagtgatgctctccatgctgatgcattcttcatcaaaggaagttttccaggcatctgcgaatgcattgtcaactctcttagaacaaaatgttaatttcagaaaaatactgttatcaaaaggaatacacctgaatgttttggagttaatgcagaagcatatacattctcctgaagtggctgaaagtggctgtaaaatgctaaatcatctttttgaaggaagcaacacttccctggatataatggcagcagtggtccccaaaatactaacagttatgaaacgtcatgagacatcattaccagtgcagctggaggcgcttcgagctattttacattttatagtgcctggcatgccagaagaatccagggaggatacagaatttcatcataagctaaatatggttaaaaaacagtgtttcaagaatgatattcacaaactggtcctagcagctttgaacaggttcattggaaatcctgggattcagaaatgtggattaaaagtaatttcttctattgtacattttcctgatgcattagagatgttatccctggaaggtgctatggattcagtgcttcacacactgcagatgtatccagatgaccaagaaattcagtgtctgggtttaagtcttataggatacttgattacaaagaagaatgtgttcataggaactggacatctgctggcaaaaattctggtttccagcttataccgatttaaggatgttgctgaaatacagactaaaggatttcagacaatcttagcaatcctcaaattgtcagcatctttttctaagctgctggtgcatcattcatttgacttagtaatattccatcaaatgtcttccaatatcatggaacaaaaggatcaacagtttctaaacctctgttgcaagtgttttgcaaaagtagctatggatgattacttaaaaaatgtgatgctagagagagcgtgtgatcagaataacagcatcatggttgaatgcttgcttctattgggagcagatgccaatcaagcaaaggagggatcttctttaatttgtcaggtatgtgagaaagagagcagtcccaaattggtggaactcttactgaatagtggatctcgtgaacaagatgtacgaaaagcgttgacgataagcattgggaaaggtgacagccagatcatcagcttgctcttaaggaggctggccctggatgtggccaacaatagcatttgccttggaggattttgtataggaaaagttgaaccttcttggcttggtcctttatttccagataagacttctaatttaaggaaacaaacaaatatagcatctacactagcaagaatggtgatcagatatcagatgaaaagtgctgtggaagaaggaacagcctcaggcagcgatggaaatttttctgaagatgtgctgtctaaatttgatgaatggacctttattcctgactcttctatggacagtgtgtttgctcaaagtgatgacctggatagtgaaggaagtgaaggctcatttcttgtgaaaaagaaatctaattcaattagtgtaggagaattttaccgagatgccgtattacagcgttgctcaccaaatttgcaaagacattccaattccttggggcccatttttgatcatgaagatttactgaagcgaaaaagaaaaatattatcttcagatgattcactcaggtcatcaaaacttcaatcccatatgaggcattcagacagcatttcttctctggcttctgagagagaatatattacatcactagacctttcagcaaatgaactaagagatattgatgccctaagccagaaatgctgtataagtgttcatttggagcatcttgaaaagctggagcttcaccagaatgcactcacgagctttccacaacagctatgtgaaactctgaagagtttgacacatttggacttgcacagtaataaatttacatcatttccttcttatttgttgaaaatgagttgtattgctaatcttgatgtctctcgaaatgacattggaccctcagtggttttagatcctacagtgaaatgtccaactctgaaacagtttaacctgtcatataaccagctgtcttttgtacctgagaacctcactgatgtggtagagaaactggagcagctcattttagaaggaaataaaatatcagggatatgctcccccttgagactgaaggaactgaagattttaaaccttagtaagaaccacatttcatccctatcagagaactttcttgaggcttgtcctaaagtggagagtttcagtgccagaatgaattttcttgctgctatgcctttcttgcctccttctatgacaatcctaaaattatctcagaacaaattttcctgtattccagaagcaattttaaatcttccacacttgcggtctttagatatgagcagcaatgatattcagtacctaccaggtcccgcacactggaaatctttgaacttaagggaactcttatttagccataatcagatcagcatcttggacttgagtgaaaaagcatatttatggtctagagtagagaaactgcatctttctcacaataaactgaaagaggtaagacgattattgccacttaaaaaatatactttatgatttgcatcattacaaattatcattttaagtgatatttagcttctaaataccaatttcatgaaactagaagcttcctgttaactataaattcctgtcaactataaatccagatttccattaaatttaaaaataagaacagctactaatgatgtgtcacttaatttaatttccattctcacaccgacaatttaaaaaaatctacttttaaaaataaggtagtagccttaatacttccactaaacaataaaacaatatgctatacttatcagaaccttttaatctgaaagctaaacagctagatataaatttgtctacccaacatttgtacaaagtaaaaattattagaatattcatttcaaattatgtgtgatgttatcatataacatattatagattaactcaaattattcttaactgttacttaactatgacaaaacaacttagaacgctttgctaatacacaagatagtataaggataaaaattctttatagtactagctcataaagagtgttctatggaatagtagtggatgtcatttaataactataaattcaaaataagcattgtaaatatcaataccattcaatttttttttgttttttaaacaagttgtaagcctaccctatggtaaatggatatggtaacacagcataatttcctcaaaaaattacttttgtgatatacttttaaaggattatatgaatatatacataattatagatgaatgtgatgctgtgtgtcattgtatcaccaaatctctgtccaatctgttaacagactcttaaataaaccatttttctc

SEQ ID NO: 148361 - DNA, 1655 bp, Homo sapiens
  Payload ID: 9376
  Gene Symbol: LRRK2
  Gene Name: leucine-rich repeat kinase 2
  ENST ID: ENST00000416796
  CDS Start-End: 93-1655
tggcagcgttttccccagaacatccccaagcctccaagttatttcaaggcaaaaatatccatgtgcctctgttgatcgtcttggactcctatatgagagtcgcgagtgtgcagcaggtgggttggtcacttctgtgcaaattaatagaagtctgtccaggtacaatgcaaagcttaatgggaccccaggatgttggaaatgattgggaagtccttggtgttcaccaattgattcttaaaatgctaacagttcataatgccagtgtaaacttgtcagtgattggactgaagaccttagatctcctcctaacttcaggtaaaatcaccttgctgatattggatgaagaaagtgatattttcatgttaatttttgatgccatgcactcatttccagccaatgatgaagtccagaaacttggatgcaaagctttacatgtgctgtttgagagaggcaataatgtggaagtcctcatgagtggcaatgtcaggtgttataatattgtggtggaagctatgaaagcattccctatgagtgaaagaattcaagaagtgagttgctgtttgctccataggcttacattaggtaattttttcaatatcctggtattaaacgaagtccatgagtttgtggtgaaagctgtgcagcagtacccagagaatgcagcattgcagatctcagcgctcagctgtttggccctcctcagaagttttccaggcatctgcgaatgcattgtcaactctcttagaacaaaatgcaacacttccctggatataatggcagcagtggtccccaaaatactaacagttatgaaacgtcatgagacatcattaccagtgcagctggaggcgcttcgagctattttacattttatagtgcctggcatgccagaagaatccagggaggatacagaatttcatcataagctaaatatggttaaaaaacagtgtttcaagaatgatattcacaaactggtcctagcagctttgaacaggttcattggaaatcctgggattcagaaatgtggattaaaagtaatttcttctattgtacattttcctgatgcattagagatgttatccctggaaggtgctatggattcagtgcttcacacactgcagatgtatccagatgaccaagaaattcagtgtctgggtttaagtcttataggatacttgattacaaagaagaatgtgttcataggaactggacatctgctggcaaaaattctggtttccagcttataccgatttaaggatgttgctgaaatacagactaaaggatttcagacaatcttagcaatcctcaaattgtcagcatctttttctaagctgctggtgcatcattcatttgacttagtaatattccatcaaatgtcttccaatatcatggaacaaaaggatcaacagtttctaaacctctgttgcaagtgttttgcaaaagtagctatggatgattacttaaaaaatgtgatgctagagagagcgtgtgatcagaataacagcatcatggttgaatgcttgcttctattgggagcagatgccaatcaagcaaaggagggatcttctttaatttgtcaggtatgtgagaaagagagcagtcccaaattggtggaactcttactgaatagtggatctcgtgaacaagatgtacgaaaa

SEQ ID NO: 148362 - DNA, 6400 bp, Homo sapiens
  Payload ID: 9376
  Gene Symbol: LRRK2
  Gene Name: leucine-rich repeat kinase 2
  ENST ID: ENST00000430804
  CDS Start-End: 1-623
cactagacctttcagcaaatgaactaagagatattgatgccctaagccagaaatgctgtataagtgttcatttggagcatcttgaaaagctggagcttcaccagaatgcactcacgagctttccacaacagctatgtgaaactctgaagagtttgacacatttggacttgcacagtaataaatttacatcatttccttcttatttgttgaaaatgagttgtattgctaatcttgatgtctctcgaaatgacattggaccctcagtggttttagatcctacagtgaaatgtccaactctgaaacagtttaacctgtcatataaccagctgtcttttgtacctgagaacctcactgatgtggtagagaaactggagcagctcattttagaaggaaataaaatatcagggatatgctcccccttgagactgaaggaactgaagattttaaaccttagtaagaaccacatttcatccctatcagagaactttcttgaggcttgtcctaaagtggagagtttcagtgccagaatgaattttcttgtttcaggatgctctgtggtacctcaggggaatctgattcagactgtggagtcaggaaagcatttctgtgcctgtgacatttaagttgggtctggaaagaggagcatccaaaaggaccttgaagcttgtgtatggtcagtgtgtcatctcagctgaatctcacaatgatcctaatggtcatacctaggacaggtatgacctctgcccaattgaggaaattgaagccgtgagattttttgtgtgatgcttacagctgctatgcctttcttgcctccttctatgacaatcctaaaattatctcagaacaaattttcctgtattccagaagcaattttaaatcttccacacttgcggtctttagatatgagcagcaatgatattcagtacctaccaggtcccgcacactggaaatctttgaacttaagggaactcttatttagccataatcagatcagcatcttggacttgagtgaaaaagcatatttatggtctagagtagagaaactgcatctttctcacaataaactgaaagagattcctcctgagattggctgtcttgaaaatctgacatctctggatgtcagttacaacttggaactaagatcctttcccaatgaaatggggaaattaagcaaaatatgggatcttcctttggatgaactgcatcttaactttgattttaaacatataggatgtaaagccaaagacatcataaggtttcttcaacagcgattaaaaaaggctgtgccttataaccgaatgaaacttatgattgtgggaaatactgggagtggtaaaaccaccttattgcagcaattaatgaaaaccaagaaatcagatcttggaatgcaaagtgccacagttggcatagatgtgaaagactggcctatccaaataagagacaaaagaaagagagatctcgtcctaaatgtgtgggattttgcaggtcgtgaggaattctatagtactcatccccattttatgacgcagcgagcattgtaccttgctgtctatgacctcagcaagggacaggctgaagttgatgccatgaagccttggctcttcaatataaaggctcgcgcttcttcttcccctgtgattctcgttggcacacatttggatgtttctgatgagaagcaacgcaaagcctgcatgagtaaaatcaccaaggaactcctgaataagcgagggttccctgccatacgagattaccactttgtgaatgccaccgaggaatctgatgctttggcaaaacttcggaaaaccatcataaacgagagccttaatttcaagatccgagatcagcttgttgttggacagctgattccagactgctatgtagaacttgaaaaaatcattttatcggagcgtaaaaatgtgccaattgaatttcccgtaattgaccggaaacgattattacaactagtgagagaaaatcagctgcagttagatgaaaatgagcttcctcacgcagttcactttctaaatgaatcaggagtccttcttcattttcaagacccagcactgcagttaagtgacttgtactttgtggaacccaagtggctttgtaaaatcatggcacagattttgacagtgaaagtggaaggttgtccaaaacaccctaagggcattatttcgcgtagagatgtggaaaaatttctttcaaaaaaaaggaaatttccaaagaactacatgtcacagtattttaagctcctagaaaaattccagattgctttgccaataggagaagaatatttgctggttccaagcagtttgtctgaccacaggcctgtgatagagcttccccattgtgagaactctgaaattatcatccgactatatgaaatgccttattttccaatgggattttggtcaagattaatcaatcgattacttgagatttcaccttacatgctttcagggagagaacgagcacttcgcccaaacagaatgtattggcgacaaggcatttacttaaattggtctcctgaagcttattgtctggtaggatctgaagtcttagacaatcatccagagagtttcttaaaaattacagttccttcttgtagaaaaggctgtattcttttgggccaagttgtggaccacattgattctctcatggaagaatggtttcctgggttgctggagattgatatttgtggtgaaggagaaactctgttgaagaaatgggcattatatagttttaatgatggtgaagaacatcaaaaaatcttacttgatgacttgatgaagaaagcagaggaaggagatctcttagtaaatccagatcaaccaaggctcaccattccaatatctcagattgcccctgacttgattttggctgacctgcctagaaatattatgttgaataatgatgagttggaatttgaacaagctccagagtttctcctaggtgatggcagttttggatcagtttaccgagcagcctatgaaggagaagaagtggctgtgaagatttttaataaacatacatcactcaggctgttaagacaagagcttgtggtgctttgccacctccaccaccccagtttgatatctttgctggcagctgggattcgtccccggatgttggtgatggagttagcctccaagggttccttggatcgcctgcttcagcaggacaaagccagcctcactagaaccctacagcacaggattgcactccacgtagctgatggtttgagatacctccactcagccatgattatataccgagacctgaaaccccacaatgtgctgcttttcacactgtatcccaatgctgccatcattgcaaagattgctgactacggcattgctcagtactgctgtagaatggggataaaaacatcagagggcacaccagggtttcgtgcacctgaagttgccagaggaaatgtcatttataaccaacaggctgatgtttattcatttggtttactactctatgacattttgacaactggaggtagaatagtagagggtttgaagtttccaaatgagtttgatgaattagaaatacaaggaaaattacctgatccagttaaagaatatggttgtgccccatggcctatggttgagaaattaattaaacagtgtttgaaagaaaatcctcaagaaaggcctacttctgcccaggtctttgacattttgaattcagctgaattagtctgtctgacgagacgcattttattacctaaaaacgtaattgttgaatgcatggttgctacacatcacaacagcaggaatgcaagcatttggctgggctgtgggcacaccgacagaggacagctctcatttcttgacttaaatactgaaggatacacttctgaggaagttgctgatagtagaatattgtgcttagccttggtgcatcttcctgttgaaaaggaaagctggattgtgtctgggacacagtctggtactctcctggtcatcaataccgaagatgggaaaaagagacataccctagaaaagatgactgattctgtcacttgtttgtattgcaattccttttccaagcaaagcaaacaaaaaaattttcttttggttggaaccgctgatggcaagttagcaatttttgaagataagactgttaagcttaaaggagctgctcctttgaagatactaaatataggaaatgtcagtactccattgatgtgtttgagtgaatccacaaattcaacggaaagaaatgtaatgtggggaggatgtggcacaaagattttctccttttctaatgatttcaccattcagaaactcattgagacaagaacaagccaactgttttcttatgcagctttcagtgattccaacatcataacagtggtggtagacactgctctctatattgctaagcaaaatagccctgttgtggaagtgtgggataagaaaactgaaaaactctgtggactaatagactgcgtgcactttttaagggaggtaatggtaaaagaaaacaaggaatcaaaacacaaaatgtcttattctgggagagtgaaaaccctctgccttcagaagaacactgctctttggataggaactggaggaggccatattttactcctggatctttcaactcgtcgacttatacgtgtaatttacaacttttgtaattcggtcagagtcatgatgacagcacagctaggaagccttaaaaatgtcatgctggtattgggctacaaccggaaaaatactgaaggtacacaaaagcagaaagagatacaatcttgcttgaccgtttgggacatcaatcttccacatgaagtgcaaaatttagaaaaacacattgaagtgagaaaagaattagctgaaaaaatgagacgaacatctgttgagtaagagagaaataggaattgtctttggataggaaaattattctctcctcttgtaaatatttattttaaaaatgttcacatggaaagggtactcacattttttgaaatagctcgtgtgtatgaaggaatgttattatttttaatttaaatatatgtaaaaatacttaccagtaaatgtgtattttaaagaactatttaaaacacaatgttatatttcttataaataccagttactttcgttcattaattaatgaaaataaatctgtgaagtacctaatttaagtactcatactaaaatttataaggccgataattttttgttttcttgtctgtaatggaggtaaactttattttaaattctgtgcttaagacaggactattgcttgtcgatttttctagaaatctgcacggtataatgaaaatattaagacagtttcccatgtaatgtattccttcttagattgcatcgaaatgcactatcatatatgcttgtaaatattcaaatgaatttgcactaataaagtcctttgttggtatgtgaattctctttgttgctgttgcaaacagtgcatcttacacaacttcactcaattcaaaagaaaactccattaaaagtactaatgaaaaaacatgacatactgtcaaagtcctcatatctaggaaagacacagaaactctctttgtcacagaaactctctgtgtctttcctagacataatagagttgtttttcaactctatgtttgaatgtggataccctgaattttgtataattagtgtaaatacagtgttcagtccttcaagtgatatttttatttttttattcataccactagctacttgttttctaatctgcttcattctaatgcttatattcatcttttccctaaatttgtgatgctgcagatcctacatcattcagatagaaacctttttttttttcagaattatagaattccacagctcctaccaagaccatgaggataaatatctaacacttttcagttgctgaaggagaaaggagctttagttatgatggataaaaatatctgccaccctaggcttccaaattatacttaaattgtttacatagcttaccacaataggagtatcagggccaaatacctatgtaataatttgaggtcatttctgctttaggaaaagtactttcggtaaattctttggccctgaccagtattcattatttcagataattccctgtgataggacaactagtacatttaatattctcagaacttatggcattttactatgtgaaaactttaaatttatttatattaagggtaatcaaattcttaaagatgaaagattttctgtattttaaaggaagctatgctttaacttgttatgtaattaacaaaaaaatcatatataatagagctctttgttccagtgttatctctttcattgttactttgtatttgcaattttttttaccaaagacaaattaaaaaaatgaataccatatttaaatggaataataaaggttttttaaaaactttaaa

SEQ ID NO: 148363 - DNA, 6428 bp, Homo sapiens
  Payload ID: 9377
  Gene Symbol: LGI2
  Gene Name: leucine-rich repeat LGI family, member 2
  Uniprot ID: Q8N0V4
  ENST ID: ENST00000382114
  CDS Start-End: 187-1824
gagtgggggtggcggccagcatgctgctcggctgcggctcggcctcccacacccgcggctccctagtcctcgccagcagcggcggcggcagagcagcgagcggcgcccgcgtctgcagcggcgccgggtccgagcgcgcggcgcggcggtgggggtcggggcccgggcggggagcggggaccgggcatggcgctgcggagaggcggctgcggagcgctcgggctgctgctgctgctgctgggcgccgcgtgcctgataccgcggagcgcgcaggtgaggcggctggcgcgctgccccgccacttgcagctgtaccaaggagtctatcatctgcgtgggctcttcctgggtgcccaggatcgtgccgggcgacatcagctccctgagcctggtaaatgggacgttttcagaaatcaaggaccgaatgttttcccatctgccttctctgcagctgctattgctgaattctaactcattcacgatcatccgggatgatgcttttgctggactttttcatcttgaatacctgttcattgaagggaacaaaatagaaaccatttcaagaaatgcctttcgtggcctccgtgacctgactcacctttctttggccaataaccacataaaagcactaccaagggatgtcttcagtgatttagactctctgattgaactagatttgaggggtaataaatttgaatgtgactgcaaagccaagtggctatacctgtggttgaagatgacaaattccaccgtttctgatgtgctgtgtattggtccaccagagtatcaggaaaagaagctaaatgacgtgaccagctttgactatgaatgcacaactacagattttgttgttcatcagactttaccctaccagtcggtttcagtggatacgttcaactccaagaacgatgtgtacgtggccatcgcgcagcccagcatggagaactgcatggtgctggagtgggaccacattgaaatgaatttccggagctatgacaacattacaggtcagtccatcgtgggctgtaaggccattctcatcgatgatcaggtctttgtggtggtagcccagctcttcggtggctctcacatttacaaatacgacgagagttggaccaaatttgtcaaattccaagacatagaggtctctcgcatttccaagcccaatgacatcgagctgtttcagatcgacgacgagacgttctttgtcatcgcagacagctcaaaggctggtctgtccacagtttataaatggaacagcaaaggattctattcttaccagtcactgcacgagtggttcagggacacggatgcggagtttgttgatatcgatggaaaatcgcatctcatcctgtccagccgctcccaggtccccatcatcctccagtggaataaaagctctaagaagtttgtcccccatggtgacatccccaacatggaggacgtactggctgtgaagagcttccgaatgcaaaataccctctacctttcccttacccgcttcatcggggactcccgggtcatgaggtggaacagtaagcagtttgtggagatccaagctcttccatcccggggggccatgaccctgcagcccttttcttttaaagataatcactacctggccctggggagtgactatacattctctcagatataccagtgggataaagagaagcagctattcaaaaagtttaaggagatttacgtgcaggcgcctcgttcattcacagctgtctccaccgacaggagagatttcttttttgcatccagtttcaaagggaaaacaaagatttttgaacatataattgttgacttaagtttgtgaaggtgtggtgggtgaaactaagagaaatgtagcattagctctcacaaaagaggaccaagaaaaatcaacaaacaaatcaaagccaggctcagagctctgaaattaaaaagcactgaaatagttagatgttttcaaacttttagaactcacattttaatcagggattgcatttattggctaactgcatgacatgcccattctaccatttaaaaaaaaatcttaaagcctgtaatttctgagaaaagagtacagcatttactcttatcatctagaaatgtaatatgcttcccccccgctttttgatgaggaagaagacaattggataagatgggacagcacttataatgaaataaaaaaaaactttgagcccctctcattccactttagcaatctttttggtaagaactcttaaagccaaaagtctgctgaaaagatttgctgattattagtttaaaaatcttgtaacactcagcagtgctattttgagtcatcccagtttcctgaaagtaatgcccagtcttcctgaatcctccttaatagcagaaccttggtgattttgttggctcatatgaatgcttgtcatggatatgttaacaatttagtgtttgacattgcttcctctgccacaaagacaatactctggtgacacatgtctagacccagcacaggctgtaggcccaggagtgactcaaaggagtttttccctctttcttacggttcaaaggtgaccctggtggtggccagagcagtaatgcttgtttgatgctcttcatggctcatctgcttctcagaacccacccgttgagtttgtgggtaaccagcaggcaggccaaagactggtgcttttcatttcatcctttagagggatgaaacagttatttccgtctgatgagcattcggtagaatttttgaagtgagattttatgaagtcaaaggggactttacacagatctcgacctgctttgaaacctagaggtggccctttgatttgtgcgtgtccttgccctctggacaacttaatatttcaagtaatcgaataccaacttccctgccagcccacctgccttccgccccgcttgtgtaacagtcctgttttgttgagttgctgctattgcactgccagtgcagcccacaccaaatcacaacccaagatactcagataggaagactccttcctctcccagtactttaccaaaggaacccccgccaggacccacatggggccacgtgttggcagtggaatcagcctgtgcaggctggggatctcaggctgatcagtaggggccagctttggagccagccaagctgaatcccacactccaggtctgtgctcaagagaccagatggtgtatttccaaatgggcctctctggtatgggcaataggcaagctcctggggtctggttatgtggaagattcttagtggatgttccgcctggttagctggttctcttcagagaatataaagtgaatgcctttaggggtagctctgaaagagaaacccaacaacttcattcctagccatgaaagtagcacgatcatattgtactgtattgttattgtaaaatgactatttgccatgtcatgagtaggtagatgttttgccacaaatatgaatgtgtttgttgtttcctgactttaagcaatgaagattgagacaataaatagcactcagagaatgaagcattgatgttacatcagcactcttgggtacattctgggactgtaggctgaggcttctagcctcagaaaccacggattttaatgaacgaactcacccacgcatagtagtgttgttacttgaaacttctgcaaaataccaagcaaacaggagaaaagtggtttgttttcatttttaagtgcaaattacttttcttctgcacttttttttccctcttggtttctttgaacaggctacaaatgcccaggtccccccattggaggctgaaagggaaagagctttgccattcctccagtcctaaagatggcaagctattctttctgttgcatggaaccactcagataaacctgggcagaaaaatgggtacttggcaaactgtaggagatatttagacagtcccagcaactatgccagatcaaagtgatgttcccaattccagccacctgtagagatggcaaggtggcatcttttcacagtgttgctactgcagagaggtatcacattcccagctgcccctctgagggtaaatgagcgactgaccccctgcactcactattctgctcacattgccagattctgggaaaccaggaaacacaggatgctgggcttaggatggggagagctgttgagtccagatggggaattaggaggtgaaagaacgatctaaacaggtgatgggtggggtgtgagaagggggtgacccactcaactgcaatcaggttttccttttttataatgttattttatacaagactaaagcctgtagtctacagagcgcctgtgctgtggaaggagatatttgttctggccaacttactaaaggagcatagatgttcttggcacggggtggtgatatctttgcttcattaatcttactgctccatcccaagaatccctgaagttttaaacaacttctgcaagaagcattcttccagtaataatgtaaaacaaaaaaccaaccaagcaacagcaaaaatgcaaagcagagaaatatgtggaccgtccccagtggagatcagcttgaaggagggggtggatctttcttctactttccctcccatcacccactgggtggtcgtctgctcagcttatttcttctttatgaactttgtggcgaggctcctggactgatccctctgtgcggccatgtggctttaaggcctttccttaaagggggcttgtccccatactccatggggtcgggaatgggtctattatcaagactctaaaaataactcttagacatgaagagcactgtgttattggacagtggatgataaggccaccttacatttagcaaagctttatatttttccaatgcacattagtactcacctcatttgttcataaatagctctgaagtttattgcagggcaggtattattctaatttcagagagaaggaaatagacatgaaaactatatgaattgcctgccatggttatccaatagggactggcaaagcaataactttccctctgatcagcagacattgtattttctttctaagacaccctgctatactctcccagagaaagactttcatttctagcatgattttgaatttggcagcaccttgagataaagtaaaaagtgcaataaaatatgcatagccagaagaaaaatcatactgaatagacaccattcaatcaactggtccatttaacaattaacaaacatgcaattgcatgccccactctttttacattcaaggccccactcttgaaagtggtccagaaattttggatagttttctgttgtactaaggaggatatctagctggtctggttgtttctccccctgcatagctatggggaggatgttgaggttgagacacatctggttcttgtcacattgtccaccagataaacaagaagagatctgtgaaggaaaaattcaaaacctgaatgcacgagtggtgatgaattgctctcggccgtcatcagccttcaggaagcacactggaaatggcagagttgcattttttcttccccatggagtgagagtctgtgtatttttaggaaagaaatcagcatgggatgccagaggtttggcggtcaggagtgctcatgatggaaatttctctggcctggggtataatgaaggtgagatgaagatctgcaggaggggagtctatttgcatgccacctaaagaaaacctcttaagctggcttcctgattcttctgcagaggtatcagcctctccttcgcagctgcggaaggaagttctttaattaggcagcggccaaagattctgttcaacagcttcctggagtggaatacaataatctagttgtatgcaatgatgcaattagaaagtggtccggatttgggtggcaatggaaggggaatggcaaagtggggcagatggctctggaggaaacttgggaaagtaaaaacaaactgaaagaaaaggaaaaaaggatgatgatttcttttgcctcagccaggcaagcagagggtagaatgaccaggaagattaacaacatctcaattattaatgaagagagccaactgtaatgctcattcaaataagaagcatattgtaaagctactgagatcgaaaccaagttattattatccttactgtattccattgcttgtatcaaaatctactttttttctagtaggaaactatgcattccctatcagtccctttgattatcaggaatgtataagaattgtgataaaataggccaatatgctatttggtaccatttgtatgtattttaagtgcataacctaggtaaaataagaatagtttctatgtgtaaagaagcaagttttacagtatgcagactacagtggatgtattttaggctgtatacatatttagctctttttggtaaatagggtatacaaactatatgcctcttaattcaatatattcggtaagcctatgaataaaaagtggttcatgcctaa

SEQ ID NO: 148364 - DNA, 767 bp, Homo sapiens
  Payload ID: 9377
  Gene Symbol: LGI2
  Gene Name: leucine-rich repeat LGI family, member 2
  ENST ID: ENST00000512108
  CDS Start-End: 1-767
cgctcgggctgctgctgctgctgctgggcgccgcgtgcctgataccgcggagcgcgcaggtgaggcggctggcgcgctgccccgccacttgcagctgtaccaaggagtctatcatctgcgtgggctcttcctgggtgcccaggatcgtgccgggcgacatcagctccctgagcctggtaaatgggacgttttcagaaatcaaggaccgaatgttttcccatctgccttctctgcagctgctattgctgaattctaactcattcacgatcatccgggatgatgcttttgctggactttttcatcttgaatacctgttcattgaagggaacaaaatagaaaccatttcaagaaatgcctttcgtggcctccgtgacctgactcacctttctttggccaataaccacataaaagcactaccaagggatgtcttcagtgatttagactctctgattgaactagatttgaggggtaataaatttgaatgtgactgcaaagccaagtggctatacctgtggttgaagatgacaaattccaccgtttctgatgtgctgtgtattggtccaccagagtatcaggaaaagaagctaaatgacgtgaccagctttgactatgaatgcacaactacagataaacaagaagagatctgtgaaggaaaaattcaaaacctgaatgcacgagtggtgatgaattgctctcggccgtcatcagccttcaggaagcacactggaaatggcagagttgcattttttcttccccatggagtgaga

SEQ ID NO: 148365 - DNA, 3272 bp, Homo sapiens
  Payload ID: 9378
  Gene Symbol: LGI3
  Gene Name: leucine-rich repeat LGI family, member 3
  Uniprot ID: Q8N145
  ENST ID: ENST00000306317
  CDS Start-End: 291-1937
gcgcgcgcccccgccgcccgcgccgcagtccgcagccacccggcgcggtcagccccggctgcggctccagctccgcgctccgctcttctctcccgagccggatcgcgggagcgagcaggggaggggaccgcagccggcgcccgagggcaggaggagtccgcaggcgggcccctggctgcggtagcagctgccggtggcagggaggtgccagcccgcgcggggtggcccagccgcgggagcggtggggcgggggccgcggccgccggccccagggagagatcgcgggcagcatggcggggctgcgggccagggggggcccggggccggggctgctggcgctctccgcgctcggcttctgcctcatgctgcaagtcagcgctaagaggccccccaagacgcccccctgcccgcccagctgctcttgcaccagggacaccgccttctgcgtggactcaaaggcggtgcccaggaacctgccctcggaggtcatctccctgaccctggtgaatgccgccttctcagagatccaggatggagcgttctcccacctcccgctgctgcagttcttgttactcaactccaacaagtttacactgattggagacaacgccttcacaggactgtcgcacctgcagtatctcttcattgagaacaatgacatctgggcactatccaagttcaccttccgaggactcaagtccttgactcacctctcgctggccaacaataacctgcagacactgcccagagacatcttccggcccctggacatcctgaatgacttggacctgcggggcaactcactcaactgtgactgcaaggtgaagtggttggtggagtggctggcacacaccaacaccacggtggcacccatctactgcgccagcccgccccgcttccaggagcacaaggtgcaggacctgccgctgcgggagttcgattgcatcaccacagattttgtgttgtaccagaccctggccttcccagcagtgtcggctgagcccttcctctactccagtgacctctatttggctctggcccagccaggagtcagtgcctgcaccatcctgaagtgggactatgttgagcggcagcttcgagactatgatagaatcccagccccctctgcagtgcactgcaagccgatggtggtggacagccagctgtacgtggtcgtggcccagctgtttggcggctcttacatttaccactgggatcccaacaccacgcgcttcaccaggctgcaagacattgacccgcagcgcgtgcgcaagcctaacgacctagaagccttccgcatcgacggtgactggtactttgccgtggctgacagctccaaggcaggcgccaccagcctctaccgctggcaccagaatggcttctactcccaccaggcactgcacccctggcaccgtgacaccgacctggagtttgtggacggcgagggcaagccacggctgattgtgtccagcagctcccaggcacccgtcatctatcagtggagtcgcacccagaagcagtttgtggcccagggtgaggtgacccaggtgcctgatgcccaagctgtgaaacactttcgtgccggccgcgacagctacctgtgcctcagccgctacattggcgactccaagatcctgcgctgggagggtacccgcttctcggaggtgcaggccctgccctcccggggctcgctggccctgcagcccttccttgtgggtggccgccgctacctggcactgggcagtgatttctccttcacccagatctaccagtgggatgagggacgacagaagtttgtacggttccaggagctggctgtgcaggctcctcgggccttctgctacatgcctgctggggacgcccagctactcctggcccccagcttcaagggacagacgctggtgtatagacacattgtggtggatctcagtgcctagggggtgccgaggcctctggtctcctcagggtggccactggaggatgggtgggggcctctgtgagcaccacgtatgcctgtgtgaagacaagcgaccaacctgcattcatgcccttgtatccgcacacgcccagtgtgtacaggcgcaccccgtggactggcccaggaggacgtgcatcatcactgcaatcagcatgaacaccaggcacccctgggacacctaacgcccagttcccgtgaccccaactgcaggccccccctactctgcagcctttcccatgctctgccccctgtctcatgcacgagtggtgcggggtgctgggagcgaggggggccgcatcctcctgtccttgtgcttctccttctgcccctctggtctttcctgttggtgctccaggcattgtttacctgctcttgctccccgctgtagcccacagccatatctgtcatgcttccccggggccactcacccctgccccaccccgtctgcatgctcacatggacgcggacggacacactcattacacactcacacgccccgactgcacccggtgtccatctataaacatgtcagggcacgtgtgcatacaagcagattcagcactgcctaccaggctctcctgttaccttgcctctctgcttggagggggccccctctgctcacccccagcgtgccccccccggaactgataaggatgagaatggtggtgccagcttctgagggcctgcttggcctcctgggggcaaagcccctctgcccgaagcaataacaacagcagcagaagcaatcccggggagctgccaggggtgtctgtctctgttctccttggcgtttccttcatggccgtgaatcccagctcacccatggacagaagacctcccctcatctgaaagcctttctgccttccttcctgtagctgtcgctttctcaggcttggactgtcccctggttcaccctgtctttgggatgtggcccttgagctgggcgggctccttgggtggattagagagctggccgagctgcaagcacctgagttacctgcgagggtgcccagagtggagcttggcctgagggcgtgttgcagccctggccccaccagtccacagaggcccccaggagcactgcctttcagtggaccgggtggggcctggtgggaggggccccactagctgagcttctgctgccctctgctgtctgctgagatgccaggctagtggagagggcacaccatgtgcccaaatggtgtgatgctccttgtagcaggataccagggtactggggggcaatgctatgattaacttgcttcaaataaaaagttcccgccccataaccggc

SEQ ID NO: 148366 - DNA, 3114 bp, Homo sapiens
  Payload ID: 9378
  Gene Symbol: LGI3
  Gene Name: leucine-rich repeat LGI family, member 3
  Uniprot ID: Q8N145
  ENST ID: ENST00000424267
  CDS Start-End: 210-1784
gctcttctctcccgagccggatcgcgggagcgagcaggggaggggaccgcagccggcgcccgagggcaggaggagtccgcaggcgggcccctggctgcggtagcagctgccggtggcagggaggtgccagcccgcgcggggtggcccagccgcgggagcggtggggcgggggccgcggccgccggccccagggagagatcgcgggcagcatggcggggctgcgggccagggggggcccggggccggggctgctggcgctctccgcgctcggcttctgcctcatgctgcaagtcagcgctaagaggccccccaagacgcccccctgcccgcccagctgctcttgcaccagggacaccgccttctgcgtggactcaaaggcggtgcccaggaacctgccctcggaggtcatctccctgaccctggtgaatgccgccttctcagagatccaggatggagcgttctcccacctcccgctgctgcagttcttgttactcaactccaacaagtttacactgattggagacaacgccttcacaggactgtcgcacctgcagtatctctcgctggccaacaataacctgcagacactgcccagagacatcttccggcccctggacatcctgaatgacttggacctgcggggcaactcactcaactgtgactgcaaggtgaagtggttggtggagtggctggcacacaccaacaccacggtggcacccatctactgcgccagcccgccccgcttccaggagcacaaggtgcaggacctgccgctgcgggagttcgattgcatcaccacagattttgtgttgtaccagaccctggccttcccagcagtgtcggctgagcccttcctctactccagtgacctctatttggctctggcccagccaggagtcagtgcctgcaccatcctgaagtgggactatgttgagcggcagcttcgagactatgatagaatcccagccccctctgcagtgcactgcaagccgatggtggtggacagccagctgtacgtggtcgtggcccagctgtttggcggctcttacatttaccactgggatcccaacaccacgcgcttcaccaggctgcaagacattgacccgcagcgcgtgcgcaagcctaacgacctagaagccttccgcatcgacggtgactggtactttgccgtggctgacagctccaaggcaggcgccaccagcctctaccgctggcaccagaatggcttctactcccaccaggcactgcacccctggcaccgtgacaccgacctggagtttgtggacggcgagggcaagccacggctgattgtgtccagcagctcccaggcacccgtcatctatcagtggagtcgcacccagaagcagtttgtggcccagggtgaggtgacccaggtgcctgatgcccaagctgtgaaacactttcgtgccggccgcgacagctacctgtgcctcagccgctacattggcgactccaagatcctgcgctgggagggtacccgcttctcggaggtgcaggccctgccctcccggggctcgctggccctgcagcccttccttgtgggtggccgccgctacctggcactgggcagtgatttctccttcacccagatctaccagtgggatgagggacgacagaagtttgtacggttccaggagctggctgtgcaggctcctcgggccttctgctacatgcctgctggggacgcccagctactcctggcccccagcttcaagggacagacgctggtgtatagacacattgtggtggatctcagtgcctagggggtgccgaggcctctggtctcctcagggtggccactggaggatgggtgggggcctctgtgagcaccacgtatgcctgtgtgaagacaagcgaccaacctgcattcatgcccttgtatccgcacacgcccagtgtgtacaggcgcaccccgtggactggcccaggaggacgtgcatcatcactgcaatcagcatgaacaccaggcacccctgggacacctaacgcccagttcccgtgaccccaactgcaggccccccctactctgcagcctttcccatgctctgccccctgtctcatgcacgagtggtgcggggtgctgggagcgaggggggccgcatcctcctgtccttgtgcttctccttctgcccctctggtctttcctgttggtgctccaggcattgtttacctgctcttgctccccgctgtagcccacagccatatctgtcatgcttccccggggccactcacccctgccccaccccgtctgcatgctcacatggacgcggacggacacactcattacacactcacacgccccgactgcacccggtgtccatctataaacatgtcagggcacgtgtgcatacaagcagattcagcactgcctaccaggctctcctgttaccttgcctctctgcttggagggggccccctctgctcacccccagcgtgccccccccggaactgataaggatgagaatggtggtgccagcttctgagggcctgcttggcctcctgggggcaaagcccctctgcccgaagcaataacaacagcagcagaagcaatcccggggagctgccaggggtgtctgtctctgttctccttggcgtttccttcatggccgtgaatcccagctcacccatggacagaagacctcccctcatctgaaagcctttctgccttccttcctgtagctgtcgctttctcaggcttggactgtcccctggttcaccctgtctttgggatgtggcccttgagctgggcgggctccttgggtggattagagagctggccgagctgcaagcacctgagttacctgcgagggtgcccagagtggagcttggcctgagggcgtgttgcagccctggccccaccagtccacagaggcccccaggagcactgcctttcagtggaccgggtggggcctggtgggaggggccccactagctgagcttctgctgccctctgctgtctgctgagatgccaggctagtggagagggcacaccatgtgcccaaatggtgtgatgctccttgtagcaggataccagggtactggggggcaatgctatgattaacttgcttcaaataaaaagttcccgccccataa

SEQ ID NO: 148367 - DNA, 663 bp, Homo sapiens
  Payload ID: 9378
  Gene Symbol: LGI3
  Gene Name: leucine-rich repeat LGI family, member 3
  ENST ID: ENST00000517694
  CDS Start-End: 70-663
aaagaaacccaggtagacagaagcacagggatccctaacgccgaagcgcctccacaaggcagtgagtgcatgtgcccgtgcagagacaggaccctggtgaatgccgccttctcagagatccaggatggagcgttctcccacctcccgctgctgcagttcttgttactcaactccaacaagtttacactgattggagacaacgccttcacaggactgtcgcacctgcagtatctcttcattgagaacaatgacatctgggcactatccaagttcaccttccgaggactcaagtccttgactcacctctcgctggccaacaataacctgcagacactgcccagagacatcttccggcccctggacatcctgaatgacttggacctgcggggcaactcactcaactgtgactgcaaggtgaagtggttggtggagtggctggcacacaccaacaccacggtggcacccatctactgcgccagcccgccccgcttccaggagcacaaggtgcaggacctgccgctgcgggagttcgattgcatcaccacagattttgtgttgtaccagaccctggccttcccagcagtgtcggctgagcccttcctctactccagtgacctctatttggctctggcccagccaggagtcagtgcctgcaccatcctg

SEQ ID NO: 148368 - DNA, 784 bp, Homo sapiens
  Payload ID: 9378
  Gene Symbol: LGI3
  Gene Name: leucine-rich repeat LGI family, member 3
  ENST ID: ENST00000518365
  CDS Start-End: 136-540
gtccgcaggcgggcccctggctgcggtagcagctgccggtggcagggaggtgccagcccgcgcggggtggcccagccgcgggagcggtggggcgggggccgcggccgccggccccagggagagatcgcgggcagcatggcggggctgcgggccagggggggcccggggccggggctgctggcgctctccgcgctcggcttctgcctcatgctgcaagtcagcgctaagaggccccccaagacgcccccctgcccgcccagctgctcttgcaccagggacaccgccttctgcgtggactcaaaggcggtgcccaggaacctgccctcggaggtcatctccctcacagcccttgcagaccccacagtactgactcgggtgtccccgcaggaccctggtgaatgccgccttctcagagatccaggatggagcgttctcccacctcccgctgctgcagttcttgttactcaactccaacaagtttacactgattggagacaacgccttcacaggactgtcgcacctgcagtatctcttcattgagaacaatgacatctgggcactatccaagttcaccttccgaggactcaagtccttgactcacctctcgctggccaacaataacctgcagacactgcccagagacatcttccggcccctggacatcctgaatgacttggacctgcggggcaactcactcaactgtgactgcaaggtgaagtggttggtggagtggctggcacacaccaacaccacggtggcacccatctactgcgccagcccgccc

SEQ ID NO: 148369 - DNA, 2814 bp, Homo sapiens
  Payload ID: 9379
  Gene Symbol: LGI4
  Gene Name: leucine-rich repeat LGI family, member 4
  Uniprot ID: Q8N135
  ENST ID: ENST00000310123
  CDS Start-End: 521-2134
gccgggtgtccagcgaacccctttcccaaaccttcggggagaagggaggtgggaggaggcaaagaaactacaggcagggagctggaagggggggtggggggggcaggagacaagaaatcaagacaccaggcagcaggacacacacacactcacatacactcacacacatagagaccaacagatagacagctacctaaagcctgaaagactgacagcaacacagaaaaaaagaaacaggcagaaagagagacaaagacagaaatagaaacagactaacacacagagtcaaaaatacagagacagaaagacagggagaaagagaaacagaaaattagacaccaaagacatacgaacagggaggaaggccgactgaaagaaagacggagaagaggagagagaagccagggccgagcgtgccagcaggcggatggagggcggcctggtggaggaggagacgtagtggcctgggctgagctgggtgggccgggagaagcgggtgcctcagagtgggggtgggggcatgggaggggcaggcattctgctgctgctgctggctggggcgggggtggtggtggcctggagacccccaaagggaaagtgtcccctgcgctgctcctgctctaaagacagcgccctgtgtgagggctccccggacctgcccgtcagcttctctccgaccctgctgtcactctcactcgtcaggacgggagtcacccagctgaaggccggcagcttcctgagaattccgtctctgcacctgctcctcttcacctccaactccttctccgtgattgaggacgatgcatttgcgggcctgtcccacctgcagtacctcttcatcgaggacaatgagattggctccatctctaagaatgccctcagaggacttcgctcgcttacacacctaagcctggccaataaccatctggagaccctccccagattcctgttccgaggcctggacacccttactcatgtggacctccgcgggaacccgttccagtgtgactgccgcgtcctctggctcctgcagtggatgcccaccgtgaatgccagcgtggggaccggcgcctgtgcgggccccgcctccctgagccacatgcagctccaccacctcgaccccaagactttcaagtgcagagccatagagctgtcctggttccagacggtgggggagtcggcactgagcgtagagcccttctcctaccaaggggagcctcacattgtgctggcacagcccttcgccggccgctgcctgattctctcctgggactacagcctgcagcgcttccggcccgaggaagagctgcccgcggcctccgtggtgtcctgcaagccactggtgctgggcccgagcctcttcgtgctggctgcccgcctgtgggggggctcacagctgtgggcccggcccagtcccggcctgcgcctggccccaacgcagaccctggccccgcggcggctgctgcggcccaatgacgccgagctcctgtggctggaagggcaaccctgcttcgtggtggccgatgcctccaaggcgggcagcaccacgctgctgtgccgcgacgggcccggcttttacccgcaccagagcctgcacgcctggcaccgggacacggacgctgaggccctggagctggacggccggccccacctgctgctggcctcggcttcccagcggcccgtgctcttccactggaccggtggccgcttcgagagacgcacagacatccccgaggccgaggatgtctatgccacacgccacttccaggctggtggggacgtgttcctgtgcctcacacgctacattggggactccatggtcatgcgctgggacggctccatgtttcgtctgctgcagcaacttccctcgcgcggtgcccacgtcttccagccactgctcatcgccagggaccagctggccatcctaggcagcgacttcgccttcagccaggtcctccgccttgagcctgacaaggggctcctggagccactgcaggagctggggcctccggccctggtggccccccgtgcctttgcccacatcactatggccggcagacgcttcctctttgctgcttgctttaagggccccacacagatctaccagcatcacgagatcgacctcagtgcctgagaccaccaacgggactctgggcatggctggggcccctggacggccccttggctggctcctggccctacttggggtgatggcccgcctgtgagctgctgaccgtgggccacgttcatcagccacacgtctaggccttaagcccacttcttaaaggatctgcacccatggggggacatagagggtcccagcctactggacctcccgagctgcccttcaggtctaaagcaacatctggacatctcggctggggcagattccccatcaaaggcaacctggggggtgcaggctggtgcactgcatggagtcgaggtggaggtcacgtgcagagctccatgaggtcccggagcccccctctcaacccgctcctaccccgctggtccctctgaaagcaccgaggggttgatggcattcctttcccattctaaactccacgcagccaatcgctttcctggaggagcgccaacctcgaagacaactcagcactgggcgggttcccctctgctgcttgtgcgcatgcgtgcggccgcccagcaagctgtgccttttgcgcctcttgcgcgtgcgccggggcacagggagggacagcgggaggtgtcgcggggagcctggtgcccttctagatgggcgacggaggcaaggacaagacgagtccgagctcaataaatgcgctgtgcaccctc

SEQ ID NO: 148370 - DNA, 2891 bp, Homo sapiens
  Payload ID: 9379
  Gene Symbol: LGI4
  Gene Name: leucine-rich repeat LGI family, member 4
  ENST ID: ENST00000392225
  CDS Start-End: 521-2005
gccgggtgtccagcgaacccctttcccaaaccttcggggagaagggaggtgggaggaggcaaagaaactacaggcagggagctggaagggggggtggggggggcaggagacaagaaatcaagacaccaggcagcaggacacacacacactcacatacactcacacacatagagaccaacagatagacagctacctaaagcctgaaagactgacagcaacacagaaaaaaagaaacaggcagaaagagagacaaagacagaaatagaaacagactaacacacagagtcaaaaatacagagacagaaagacagggagaaagagaaacagaaaattagacaccaaagacatacgaacagggaggaaggccgactgaaagaaagacggagaagaggagagagaagccagggccgagcgtgccagcaggcggatggagggcggcctggtggaggaggagacgtagtggcctgggctgagctgggtgggccgggagaagcgggtgcctcagagtgggggtgggggcatgggaggggcaggcattctgctgctgctgctggctggggcgggggtggtggtggcctggagacccccaaagggaaagtgtcccctgcgctgctcctgctctaaagacagcgccctgtgtgagggctccccggacctgcccgtcagcttctctccgaccctgctgtcactctcactcgtcaggacgggagtcacccagctgaaggccggcagcttcctgagaattccgtctctgcacctgctcctcttcacctccaactccttctccgtgattgaggacgatgcatttgcgggcctgtcccacctgcagtacctcttcatcgaggacaatgagattggctccatctctaagaatgccctcagaggacttcgctcgcttacacacctaagcctggccaataaccatctggagaccctccccagattcctgttccgaggcctggacacccttactcatgtggacctccgcgggaacccgttccagtgtgactgccgcgtcctctggctcctgcagtggatgcccaccgtgaatgccagcgtggggaccggcgcctgtgcgggccccgcctccctgagccacatgcagctccaccacctcgaccccaagactttcaagtgcagagccatagagctgtcctggttccagacggtgggggagtcggcactgagcgtagagcccttctcctaccaaggggagcctcacattgtgctggcacagcccttcgccggccgctgcctgattctctcctgggactacagcctgcagcgcttccggcccgaggaagagctgcccggtgagccccctccccgtccttctgcctgtccagcagcctgcctggctggcctgacctgcctccccacctccccacagcggcctccgtggtgtcctgcaagccactggtgctgggcccgagcctcttcgtgctggctgcccgcctgtgggggggctcacagctgtgggcccggcccagtcccggcctgcgcctggccccaacgcagaccctggccccgcggcggctgctgcggcccaatgacgccgagctcctgtggctggaagggcaaccctgcttcgtggtggccgatgcctccaaggcgggcagcaccacgctgctgtgccgcgacgggcccggcttttacccgcaccagagcctgcacgcctggcaccgggacacggacgctgaggccctggagctggacggccggccccacctgctgctggcctcggcttcccagcggcccgtgctcttccactggaccggtggccgcttcgagagacgcacagacatccccgaggccgaggatgtctatgccacacgccacttccaggctggtggggacgtgttcctgtgcctcacacgctacattggggactccatggtcatgcgctgggacggctccatgtttcgtctgctgcagcaacttccctcgcgcggtgcccacgtcttccagccactgctcatcgccagggaccagctggccatcctaggcagcgacttcgccttcagccaggtcctccgccttgagcctgacaaggggctcctggagccactgcaggagctggggcctccggccctggtggccccccgtgcctttgcccacatcactatggccggcagacgcttcctctttgctgcttgctttaagggccccacacagatctaccagcatcacgagatcgacctcagtgcctgagaccaccaacgggactctgggcatggctggggcccctggacggccccttggctggctcctggccctacttggggtgatggcccgcctgtgagctgctgaccgtgggccacgttcatcagccacacgtctaggccttaagcccacttcttaaaggatctgcacccatggggggacatagagggtcccagcctactggacctcccgagctgcccttcaggtctaaagcaacatctggacatctcggctggggcagattccccatcaaaggcaacctggggggtgcaggctggtgcactgcatggagtcgaggtggaggtcacgtgcagagctccatgaggtcccggagcccccctctcaacccgctcctaccccgctggtccctctgaaagcaccgaggggttgatggcattcctttcccattctaaactccacgcagccaatcgctttcctggaggagcgccaacctcgaagacaactcagcactgggcgggttcccctctgctgcttgtgcgcatgcgtgcggccgcccagcaagctgtgccttttgcgcctcttgcgcgtgcgccggggcacagggagggacagcgggaggtgtcgcggggagcctggtgcccttctagatgggcgacggaggcaaggacaagacgagtccgagctcaataaatgcgctgtgcaccctc

SEQ ID NO: 148371 - DNA, 2630 bp, Homo sapiens
  Payload ID: 9379
  Gene Symbol: LGI4
  Gene Name: leucine-rich repeat LGI family, member 4
  ENST ID: ENST00000587780
  CDS Start-End: 1-1136
ccgtgattgaggacgatgcatttgcgggcctgtcccacctgcagtacctcttcatcgaggacaatgagattggctccatctctaagaatgccctcagaggacttcgctcgcttacacacctaagcctggccaataaccatctggagaccctccccagattcctgttccgaggcctggacacccttactcatgtggacctccgcgggaacccgttccagtgtgactgccgcgtcctctggctcctgcagtggatgcccaccgtgaatgccagcgtggggaccggcgcctgtgcgggccccgcctccctgagccacatgcagctccaccacctcgaccccaagactttcaagtgcagagccatagagctgtcctggttccagacggtgggggagtcggcactgagcgtagagcccttctcctaccaaggggagcctcacattgtgctggcacagcccttcgccggccgctgcctgattctctcctgggactacagcctgcagcgcttccggcccgaggaagagctgcccgcggcctccgtggtgtcctgcaagccactggtgctgggcccgagcctcttcgtgctggctgcccgcctgtgggggggctcacagctgtgggcccggcccagtcccggcctgcgcctggccccaacgcagaccctggccccgcggcggctgctgcggcccaatgacgccgagctcctgtggctggaagggcaaccctgcttcgtggtggccgatgcctccaaggcgggcagcaccacgctgctgtgccgcgacgggcccggcttttacccgcaccagagcctgcacgcctggcaccgggacacggacgctgaggccctggagctggacggccggccccacctgctgctggcctcggcttcccagcggcccgtgctcttccactggaccggtggccgcttcgagagacgcacagacatccccgaggccgaggatgtctatgccacacgccacttccaggctggtggggacgtgttcctgtgcctcacacgctacattggggactccatggtgaggctgggcctgggggcggggggctggcttttcagcactgacccaatcttgcacactaagcctctaaactctgacctaccctcacatgccgacctttgaaccaggaccccaccccacactgatgccaagactctgaccccctcaaggctggctgactccgaaccactccccagtccccgacactgatgctggccccaacatcctgattctacccccaaatgctggctctgtgactcggatgcattccagacttcaccacagccacacctgtccccaccctgacactgagcccccaaggctgatgctagggttaagcactgcccactgtttctggagtgaggtgcaggcaggggagggttctgagtctggaagggccctgatctgactcaggtgttcacaaggtctctgggtggggaacagactgggggagcagggagaggagcctagaggccagggaagaggctgccaggatggtccagtcaggaggggatggagttcagccagaggtggtgggagaaatgtacaactgtagaaggtgaaactgacagagtccatggctgagtgcttctgtgtggggcgtgagggcaagggaagggctcagaacaactgcatgtgtgtggccgaacaggtgggtggtgacttttatgaagataagaaagctatgggagttttgggaccgacaggcttctgcttccaagctgttccacggcccccagagacccccgggaccccaggccctcactggccacacccccacaggtcatgcgctgggacggctccatgtttcgtctgctgcagcaacttccctcgcgcggtgcccacgtcttccagccactgctcatcgccagggaccagctggccatcctaggcagcgacttcgccttcagccaggtcctccgccttgagcctgacaaggggctcctggagccactgcaggagctggggcctccggccctggtggccccccgtgcctttgcccacatcactatggccggcagacgcttcctctttgctgcttgctttaagggccccacacagatctaccagcatcacgagatcgacctcagtgcctgagaccaccaacgggactctgggcatggctggggcccctggacggccccttggctggctcctggccctacttggggtgatggcccgcctgtgagctgctgaccgtgggccacgttcatcagccacacgtctaggccttaagcccacttcttaaaggatctgcacccatggggggacatagagggtcccagcctactggacctcccgagctgcccttcaggtctaaagcaacatctggacatctcggctggggcagattccccatcaaaggcaacctggggggtgcaggctggtgcactgcatggagtcgaggtggaggtcacgtgcagagctccatgaggtcccggagcccccctctcaacccgctcctaccccgctggtccctctgaaagcaccgaggggttgatggcattcctttcccattctaaactccacgcagccaatcgctttcctggaggagcgccaacctcgaagacaactcagcactgggcgggttcccctctgctgcttgtgcgcatgcgt

SEQ ID NO: 148372 - DNA, 1113 bp, Homo sapiens
  Payload ID: 9379
  Gene Symbol: LGI4
  Gene Name: leucine-rich repeat LGI family, member 4
  Uniprot ID: Q8N135
  ENST ID: ENST00000591633
  CDS Start-End: 184-969
accaaagacatacgaacagggaggaaggccgactgaaagaaagacggagaagaggagagagaagccagggccgagcgtgccagcaggcggatggagggcggcctggtggaggaggagacgtagtggcctgggctgagctgggtgggccgggagaagcgggtgcctcagagtgggggtgggggcatgggaggggcaggcattctgctgctgctgctggctggggcgggggtggtggtggcctggagacccccaaagggaaagtgtcccctgcgctgctcctgctctaaagacagcgccctgtgtgagggctccccggacctgcccgtcagcttctctccgaccctgctgtcactctcactcgtcaggacgggagtcacccagctgaaggccggcagcttcctgagaattccgtctctgcacctgctcctcttcacctccaactccttctccgtgattgaggacgatgcatttgcgggcctgtcccacctgcagtacctcttcatcgaggacaatgagattggctccatctctaagaatgccctcagaggacttcgctcgcttacacacctaagcctggccaataaccatctggagaccctccccagattcctgttccgaggcctggacacccttactcatgtggacctccgcgggaacccgttccagtgtgactgccgcgtcctctggctcctgcagtggatgcccaccgtgaatgccagcgtggggaccggcgcctgtgcgggccccgcctccctgagccacatgcagctccaccacctcgaccccaagactttcaagtgcagagccataggtggggggctttcccgatggggtgggaggcgggagatctgggggaaaggctgccagggccaagaggctcgtctcactccctgccctgccatttcccggagtgggaagaccctgagcaagcagcactgccttcctgagccccagttttctcatctgtaaagtgggggtaataaacagtgatataggagtgccatgggaattcaatgatacatcttcacgtgttcggcatttggcgccgggcctgggacaggaggtccttataaacgttcacccttgttaacataaaagcaaccaatttaaaaa

SEQ ID NO: 148373 - DNA, 2228 bp, Homo sapiens
  Payload ID: 9380
  Gene Symbol: LRIT1
  Gene Name: leucine-rich repeat, immunoglobulin-like and transmembrane domains 1
  Uniprot ID: Q9P2V4
  ENST ID: ENST00000372105
  CDS Start-End: 23-1894
ggccagagaggagccaggagccatgagggtggcattaggcatgctctggctcttggcccttgcgtggcccccccaggcccggggcttctgcccctctcaatgcagctgcagcctccatatcatgggtgatggcagcaaggccaggacagtagtgtgcaacgaccccgacatgaccctgcccccggcgtccatccccccggacacctccagactgcgcctggagcggacggccatacgcagggttcctggcgaggccttcaggcccctgggccgcctggagcagctgtggctgccttacaacgccctcagcgagctcaacgccctcatgctgcggggcctgcgacgcctgcgggagctgcggctgcccgggaaccgcctggccgccttcccctgggcggcgctcagggacgcccccaagctgcggctgctggacctgcaggccaaccgcctctcggctgtgcccgctgaggccgcgcgcttcctggagaacctcaccttcctcgacctctccagcaaccagctgatgaggctcccgcaggagctcatcgtctcctgggctcacctggagaccggtatctttcctcccggccaccaccccaggcgggtcctagggctacaggacaacccctgggcatgtgactgccgactctatgacctggttcatcttttggatggctgggccccaaacttggccttcattgagactgaactgagatgtgccagcccacgtagcctggccggagtggccttcagccagcttgaactgaggaagtgccagggcccagagctccatccaggagtggccagcatcaggtcccttttgggtggcacagcactgctacgctgtggagctactggagtccctgggcccgagatgagctggaggagggccaatggcaggccccttaatggtacagtgcaccaggaagtctccagtgacggcacgagctggactctgctgggcctgcctgcagtgtcccaccttgactccggagactacatctgccaagccaagaacttcctgggagcctctgaaactgttatctccttgattgtcactgagccaccgacttccacagaacacagtgggagcccaggagcactatgggcaaggacaggtggcggaggggaagctgctgcttacaacaacaagctggtggccaggcatgtcccccagattcccaaacccgctgtcctggccactggaccctctgtgcccagcacaaaggaggagctgacccttgagcacttccagatggatgccctgggagagctctctgatgggcgggcaggaccctcagaggcacgaatggtgaggtctgtgaaggtggtgggggacacttaccacagcgtgtccttggtgtggaaggcaccccaggctaagaacacaactgccttcagtgtcctctacgcggtctttgggcagcacagcatgcggcgggtgattgtgcagcctgggaagaccagagtgaccatcactgggctgttgcccaagaccaagtatgtggcgtgtgtctgtgtgcagggcctggtgccccggaaggagcagtgtgttattttctccaccaatgaagtggtggatgctgagaacactcagcagcttatcaatgtggtggtgatcagtgtggccatcgtcattgccctgcctctcacgctgcttgtctgctgcagtgctcttcagaagcgctgccgaaagtgcttcaacaaggactccactgaggccacagttacctacgtcaacctagagagactgggctacagcgaggacggcttggaggagctgtcccggcacagtgtcagcgaggctgacaggcttctctcagctcgttccagtgtggactttcaggcctttggagtcaaagggggcaggagaatcaatgagtacttctgctgagggatatgcctccgcaactcacacacctgcctgcccacgctccttctttagctctgacacctgagtacacgatcacccactcttacctgctcgggtacctgcttactcagatacttacacacaacaacagcagcagcagctgctactgcaacaaccgctaacacttgttaagcacttactacagactagaaagtgttctaagtgctaaattcttgtaacaatcatttgcagcaggcatcactattctctccatttccctggggtggggggttaagaaacttgcctgtatcagtcagcttttgctgtataacaaatgaaagcaaaatcttggtga

SEQ ID NO: 148374 - DNA, 3081 bp, Homo sapiens
  Payload ID: 9381
  Gene Symbol: LRIT2
  Gene Name: leucine-rich repeat, immunoglobulin-like and transmembrane domains 2
  Uniprot ID: A6NDA9
  ENST ID: ENST00000372113
  CDS Start-End: 7-1659
agaaatatggcttcagtttttcattacttcctgttagttctggtctttctggatacacacgcagctcagcctttctgtctgccaggatgcacttgctcagaggagagttttggcaggactctgcagtgcacatctgtctccttgggaaagatccctgggaacctttctgaagagttcaagcaagtgagaattgaaaattcacccttatttgagatgccccaagggtctttcatcaacatgagcaccttggaatacctctggctcaattttaacaatatcagtgtgatccacctaggagccctggaacacctgccagaactgagggagctgagactggaggggaacaagctctgctcagtaccatggacagcgttccgtgccacccctctcctgagggtcttggatctcaaacgcaacaagattgatgcactccctgagctggctcttcaattcttggtcagcctgacctaccttgacctatcctccaataggcttacagttgtatccaagagtgtcttcctgaactggccagcctaccagaaatgccggcagcctgactgtggggctgagattctctccagcctggtggtggccctgcatgacaacccctgggtatgtgactgtcgcctaagggggcttgtccagtttgtcaagtccattaccctcccagtcatcctggtgaattcctacctgatatgtcagggccctctgtccaaggcagggcagctttttcatgaaactgagcttagtgcttgcatgaagccacagatctcaacccccagtgccaatatcaccatccgggcaggacagaatgtgaccctgcgatgcttggcacaggccagcccctcaccatccattgcatggacttatcccctgagtatgtggagagaatttgatgtgttgacatcttctactggagaagacactgctctgtcagagctggccatacctgctgcccacctggtagacagtggtaattacacctgcatggcctccaactccattggcaagagcaaccttgtaatctctctccatgtccagcctgcccaggccctacatgcacctgattctctttccatcccctcggagggcaatgcctacattgacctgcgggttgtcaagcagacagtgcatgggattttgctggagtggcttgcagtggctgacacctctaaggaggagtggttcaccctctacattgcatcggatgaagccttcaggaaggaggtggttcacattggccccggaatcaatacttatgctgtggatgacctccttcctggcacaaaatatgaggcctgcctcagcctagagggccagcctccacaccagggccagtgtgtagcttttgtaacaggcagagatgctggtgggctagaggcacgtgagcacctcctgcatgtcacagtggtcctgtgtgtggtgctgcttgcagtgcctgtgggcgcctatgcctgggcagcccagggcccctgcagctgcagcaagtgggtcctgcgcggctgtcttcatcgcaggaaagcccccagctgcacccctgcagccccgcagtccaaggatggctcctttagagaacatccagctgtctgtgatgacggtgaagggcacatagacactgagggggacaaggagaaaggaggaacggaagacaacagctgaacaacccaggccatggggtggaaacggcttgggcttcaagcctctgaaaccaaccctctgcagcagctccatccatttatccagcaagtatatattgagcacccactgtgttccaagcactgaacttgacacagggggttcaagagtaaaaagggaaacagagtctttatcttcatgataaaggggacatagtcattatcttcgtaaagttaaagtcaatgaagatttgtccatcaaattaatcattttattatacatggtgattagaaatcactaaatattactctttgcatatacttagcctataacatttacatgcttatacgtaatgtctacgtataatattttacatatattatcctgtaaacgaaggtagacttctacccactttttataggtgaaaaactgcagcctggacagttcaatgatacacccagagtccacatctggcaggaggcagaagccccattcaaaagaggttccagttccatcgtttccttgaatgcctgttttgcggtattcttgtgtctttcattgtttataaagtgtgaccctctctcttcatgacaaactcctaatgagatcacataaatgtgatgttccaaagagctgcccatcagggtgatgagagctgttgggtaatgtgagtctctttttgtaggtgtctgttcccctgtgagcacagcccttggtgctgctgggcaggctggagccatcagcaccaaggaagagtaggggattggctgcagccctgggtctggcagagagcagactctgcagggccatacccagaaggaagagcacccatacgtccgctgctttcccctagtcaatgtctaaagccctcctatgaaatccatgagaggtggtcatttcctcttagccggacccatgtggaatggaggggccccaagaatcccaacatcagctcatcatcccactgaacagcccttctaggggagaccattcccaggatttaattcacatctgtctccctgccgtttccctcactggccacatgcaaacctttctaagagtgtaaacatgaactagactcattgtgacatctccacacgtttcctccttcccaccttttttacccattcctaatcatccttttaggcctctctcaagtgtgtacattacgtcttccacagagctttccttgacttcacacctctggggaaaaggacagtatgcacattgtgtccattggttgtgagacatttgcaggcaaagactgaccttcctcacggtggccactgcactcgtctaatacctggattgtgttcataatcaatgttagttaacaataaattttaaaaaattgaagatggctctcattttcagactaattgtccgctcatttcttcagattctactcatttgttttcttctgggcattagaaaaaaaaactctaa

SEQ ID NO: 148375 - DNA, 3177 bp, Homo sapiens
  Payload ID: 9381
  Gene Symbol: LRIT2
  Gene Name: leucine-rich repeat, immunoglobulin-like and transmembrane domains 2
  Uniprot ID: A6NDA9
  ENST ID: ENST00000538192
  CDS Start-End: 70-1752
aggatttgccactcggaagctggggcgatacttattcaaaactcacaacgtattttcttacagagaaatatggcttcagtttttcattacttcctgttagttctggtctttctggatacacacgcagctcagcctttctgtctgccaggatgcacttgctcagaggagagttttggcaggactctgcagtgcacatctgtctccttgggaaagatccctgggaacctttctgaagagttcaagcaagtgagaattgaaaattcacccttatttgagatgccccaagggtctttcatcaacatgagcaccttggaatacctctggctcaattttaacaatatcagtgtgatccacctaggagccctggaacacctgccagaactgagggagctgagactggaggggaacaagctctgctcagtaccatggacagcgttccgtgccacccctctcctgagggtcttggatctcaaacgcaacaagattgatgcactccctgagctggctcttcaattcttggtcagcctgacctaccttgacctatcctccaataggcttacagttgtatccaagagtgtcttcctgaactggccagcctaccagaaatgccggcagcctgactgtggggctgagattctctccagcctggtggtggccctgcatgacaacccctgggtatgtgactgtcgcctaagggggcttgtccagtttgtcaagtccattaccctcccagtcatcctggtgaattcctacctgatatgtcagggccctctgtccaaggcagggcagctttttcatgaaactgagcttagtgcttgcatgaagccacagatctcaacccccagtgccaatatcaccatccgggcaggacagaatgtgaccctgcgatgcttggcacaggccagcccctcaccatccattgcatggacttatcccctgagtatgtggagagaatttgatggattgctgggaggcaaacacctgacaccagtgttgacatcttctactggagaagacactgctctgtcagagctggccatacctgctgcccacctggtagacagtggtaattacacctgcatggcctccaactccattggcaagagcaaccttgtaatctctctccatgtccagcctgcccaggccctacatgcacctgattctctttccatcccctcggagggcaatgcctacattgacctgcgggttgtcaagcagacagtgcatgggattttgctggagtggcttgcagtggctgacacctctaaggaggagtggttcaccctctacattgcatcggatgaagccttcaggaaggaggtggttcacattggccccggaatcaatacttatgctgtggatgacctccttcctggcacaaaatatgaggcctgcctcagcctagagggccagcctccacaccagggccagtgtgtagcttttgtaacaggcagagatgctggtgggctagaggcacgtgagcacctcctgcatgtcacagtggtcctgtgtgtggtgctgcttgcagtgcctgtgggcgcctatgcctgggcagcccagggcccctgcagctgcagcaagtgggtcctgcgcggctgtcttcatcgcaggaaagcccccagctgcacccctgcagccccgcagtccaaggatggctcctttagagaacatccagctgtctgtgatgacggtgaagggcacatagacactgagggggacaaggagaaaggaggaacggaagacaacagctgaacaacccaggccatggggtggaaacggcttgggcttcaagcctctgaaaccaaccctctgcagcagctccatccatttatccagcaagtatatattgagcacccactgtgttccaagcactgaacttgacacagggggttcaagagtaaaaagggaaacagagtctttatcttcatgataaaggggacatagtcattatcttcgtaaagttaaagtcaatgaagatttgtccatcaaattaatcattttattatacatggtgattagaaatcactaaatattactctttgcatatacttagcctataacatttacatgcttatacgtaatgtctacgtataatattttacatatattatcctgtaaacgaaggtagacttctacccactttttataggtgaaaaactgcagcctggacagttcaatgatacacccagagtccacatctggcaggaggcagaagccccattcaaaagaggttccagttccatcgtttccttgaatgcctgttttgcggtattcttgtgtctttcattgtttataaagtgtgaccctctctcttcatgacaaactcctaatgagatcacataaatgtgatgttccaaagagctgcccatcagggtgatgagagctgttgggtaatgtgagtctctttttgtaggtgtctgttcccctgtgagcacagcccttggtgctgctgggcaggctggagccatcagcaccaaggaagagtaggggattggctgcagccctgggtctggcagagagcagactctgcagggccatacccagaaggaagagcacccatacgtccgctgctttcccctagtcaatgtctaaagccctcctatgaaatccatgagaggtggtcatttcctcttagccggacccatgtggaatggaggggccccaagaatcccaacatcagctcatcatcccactgaacagcccttctaggggagaccattcccaggatttaattcacatctgtctccctgccgtttccctcactggccacatgcaaacctttctaagagtgtaaacatgaactagactcattgtgacatctccacacgtttcctccttcccaccttttttacccattcctaatcatccttttaggcctctctcaagtgtgtacattacgtcttccacagagctttccttgacttcacacctctggggaaaaggacagtatgcacattgtgtccattggttgtgagacatttgcaggcaaagactgaccttcctcacggtggccactgcactcgtctaatacctggattgtgttcataatcaatgttagttaacaataaattttaaaaaattgaagatggctctcattttcagactaattgtccgctcatttcttcagattctactcatttgttttcttctgggcattagaaaaaaaaactctaaatt

SEQ ID NO: 148376 - DNA, 3781 bp, Homo sapiens
  Payload ID: 9382
  Gene Symbol: LRIT3
  Gene Name: leucine-rich repeat, immunoglobulin-like and transmembrane domains 3
  ENST ID: ENST00000327908
  CDS Start-End: 765-2255
cttagaccttggttagatttgaaccaaggccctcctcggcctcccaaagtgctgggattacaggcgtgagccactgcccagctgaaaattgatacatttttcaaatgagaagtatttttttcaaatgggtgttggaaagtgagtttcctcacattgttcatgttgtgacactaggttggtgctatgtaatgacatggatatgaacgagctgcctacgaacctccccgtggacactgtgaagcttcgcatagagaagactgtcatccgcagaatctctgcggaggccttctattacctggtggagctccagtatctctgggtgacttacaattccgtggccagcattgaccccagcagcttttacaacctgaagcaactgcatgagttgcgcttggatgggaattctctggctgctttcccttgggcatctctgctggacatgccccttctgaggaccctggacttgcacaataacaaaataaccagtgtgccaaatgaggcgctcaggtatctgaagaaccttgcctacttggatttatcaagcaacagactcaccacattgccaccagatttcctggagagctggactcatttagtttcaacaccttctggagtcctggacctttccccaagcaggattattcttggctgatagaacgttacggctgtaaaaagctctagcatttatctagtcaactctcccattttgccgatgagaaaacaggctcagcaaggttgcatcacccaggtcacagaattaactaatggttgagcctcatcaggaacccaggcacagtaaagttggtctacaggacaatccttggttctgtgactgtcatatttccaaaatgattgagttgtcaaaggtcgttgaccctgctatagtgcttctggatccactgatgacttgcagtgaacctgagcgcctcacaggaattttgtttcagcgggctgaattggagcattgtctgaaaccatcagtgatgacctcagccaccaaaatcatgtctgctctgggcagtaatgttctactgcggtgtgatgccactggcttccccaccccacagatcacatggaccagatctgacagctcgccagttaattatacagtaatacaagaatctccagaggaaggagtcagatggtccataatgagcttgacaggcatttcttccaaagacgctggggattacaaatgtaaggccaaaaatctggctgggatgtcagaagctgtggttactgtgacagtgcttggcattaccacaactccaataccaccagacacttctgaaagaactggagatcatcctgagtgggatgtccagccgggatctggaagatctacatctgtatctagcgcatcatcatatctttggtcctcttccttctcccccacatcttctttttctgcttctactttgtctcctccctctactgcttccttctctttatctcctttctcctcctccactgtttcttcaaccacaactctgagcacaagcatctcagcaagtaccaccatggccaacaagcgatcattccagctccaccaaggtgggaaaagaaatttaaaggtggcaaagaatggaagtaagcttcctccagccagcacaagtaagaaagaagagctggcattgttggatcaaacaatgcttacggagacaaatgccgcaatagaaaacctcagggtggtcagtgagactaaagagagtgtgacattgacgtggaatatgatcaacaccacacataactctgcagtgactgtgttgtattccaagtatggtgggaaggacctgctgctgttgaatgcagactccagcaagaaccaagtaaccatagatggcttggaacccggtgggcaatacatggcctgtgtctgtccaaaaggagtgcctccccagaaagaccaatgcatcaccttttctactgaaagagttgaaggagatgattctcaatggtctctccttctcgtggtgaccagtactgcctgtgttgttatcttaccattgatttgtttcttgttgtacaaagtttgcaaactgcaatgtaaatcagaacctttttgggaagatgatttggcaaaggagacttatatccaatttgagaccctgtttcccaggtctcaaagtgtaggtgagctctggacacgaagccacagggatgactcagagaaattgctgctttgttctaggtcaagtgtggaatctcaggtgacttttaaaagtgaaggttccagaccagagtattattgctaaggttctgcagctcaggtgcatgtgagctacaaaactagcatctaagggtataattgaccctaggtttggatgacttttggacagactttcacattgtacatgaaaatcacaaatggaatgcttttaagtatgtttaaaaaataccatgagacctctgaactgaaaagacaaataatgttgattttttttcttgtgtggaaaaggtctacagaaataatttttagagtggtgcttaataaattattaatactttttagggtaatgttttagttcttaaaaataagttcatgtgaaagtagcaagtgaactctgtatttaaaaatatagttttttgagtcatgaggaaacattagcaaaaccagctaagccttgatgtttattcatgttcgaagtgcattatagcatttgctgtggatgttttctgacattgcctaatggagagcgtgggatcataaaggattttgtgttcactaaggttaaatctaactcacgggagagagagggctctgtctcttggtaccattatgcattgtgatactatagagttgtgttcatatttcttgtaagaaaaatttttgcttttctttagaaatataggtattagcaaaagtaagtatacaaagaggattatgacaaatagaccatttctttaaaaatggtaactgttgcatttaaacacatcgactgacagattatatggatatttaaaaataactttaaatcaatcttttaatattttgctgtttgctcttatgttctcccttctttcttccttccttgtcttccctccctttccttccttcattctttctttcttctgctctgtcagaagatatacaagtagccaaagcatcacgagccaagctgtttgtcttttgccatattgtcttttgattctcttgataaagagaaagcttttgaaattacttactgccctttgaaagtctgttttacaaccccaaaggatattttaggactttaaaagggaagcttcagtggattcatttggttagattcttttcctaggttaaaaacatcggggaacttaaatacataggaaaggagttcacaaataaaatttagtttttttagaaagagaatattttaataactgtagtatactacaagaaacatctcatggctttaagattaacgatagcgataaggcccactcaagcatctcacagtggtgatattacatgtcacttagcaggatgcaacctggcctagggatttccagaagacaaggccacctcagcacagatgcaactttcataaattttagaacaaagcctaaccttactagattaaacttgctctatgaaagaaacacttggtaattgacccagactgaatacatgtataagaaatgggaaagatctcccaaactctgagaacggtcctcaaatagaagctctcctagtcagttggtcatctgacctctgactatatccggcctatgacaccagccagctcctgctttctgtcttgtaagagcactgctggaataaactacttgagcatta

SEQ ID NO: 148377 - DNA, 3566 bp, Homo sapiens
  Payload ID: 9382
  Gene Symbol: LRIT3
  Gene Name: leucine-rich repeat, immunoglobulin-like and transmembrane domains 3
  Uniprot ID: Q3SXY7
  ENST ID: ENST00000594814
  CDS Start-End: 1-2040
atgcatctctttgcatgtctgtgcattgtccttagctttttggaaggagtgggctgtttgtgtccttcacagtgcacctgtgattatcacggcagaaatgacggctcaggatcaaggttggtgctatgtaatgacatggatatgaacgagctgcctacgaacctccccgtggacactgtgaagcttcgcatagagaagactgtcatccgcagaatctctgcggaggccttctattacctggtggagctccagtatctctgggtgacttacaattccgtggccagcattgaccccagcagcttttacaacctgaagcaactgcatgagttgcgcttggatgggaattctctggctgctttcccttgggcatctctgctggacatgccccttctgaggaccctggacttgcacaataacaaaataaccagtgtgccaaatgaggcgctcaggtatctgaagaaccttgcctacttggatttatcaagcaacagactcaccacattgccaccagatttcctggagagctggactcatttagtttcaacaccttctggagtcctggacctttccccaagcaggattattcttggtctacaggacaatccttggttctgtgactgtcatatttccaaaatgattgagttgtcaaaggtcgttgaccctgctatagtgcttctggatccactgatgacttgcagtgaacctgagcgcctcacaggaattttgtttcagcgggctgaattggagcattgtctgaaaccatcagtgatgacctcagccaccaaaatcatgtctgctctgggcagtaatgttctactgcggtgtgatgccactggcttccccaccccacagatcacatggaccagatctgacagctcgccagttaattatacagtaatacaagaatctccagaggaaggagtcagatggtccataatgagcttgacaggcatttcttccaaagacgctggggattacaaatgtaaggccaaaaatctggctgggatgtcagaagctgtggttactgtgacagtgcttggcattaccacaactccaataccaccagacacttctgaaagaactggagatcatcctgagtgggatgtccagccgggatctggaagatctacatctgtatctagcgcatcatcatatctttggtcctcttccttctcccccacatcttctttttctgcttctactttgtctcctccctctactgcttccttctctttatctcctttctcctcctccactgtttcttcaaccacaactctgagcacaagcatctcagcaagtaccaccatggccaacaagcgatcattccagctccaccaaggtgggaaaagaaatttaaaggtggcaaagaatggaagtaagcttcctccagccagcacaagtaagaaagaagagctggcattgttggatcaaacaatgcttacggagacaaatgccgcaatagaaaacctcagggtggtcagtgagactaaagagagtgtgacattgacgtggaatatgatcaacaccacacataactctgcagtgactgtgttgtattccaagtatggtgggaaggacctgctgctgttgaatgcagactccagcaagaaccaagtaaccatagatggcttggaacccggtgggcaatacatggcctgtgtctgtccaaaaggagtgcctccccagaaagaccaatgcatcaccttttctactgaaagagttgaaggagatgattctcaatggtctctccttctcgtggtgaccagtactgcctgtgttgttatcttaccattgatttgtttcttgttgtacaaagtttgcaaactgcaatgtaaatcagaacctttttgggaagatgatttggcaaaggagacttatatccaatttgagaccctgtttcccaggtctcaaagtgtaggtgagctctggacacgaagccacagggatgactcagagaaattgctgctttgttctaggtcaagtgtggaatctcaggtgacttttaaaagtgaaggttccagaccagagtattattgctaaggttctgcagctcaggtgcatgtgagctacaaaactagcatctaagggtataattgaccctaggtttggatgacttttggacagactttcacattgtacatgaaaatcacaaatggaatgcttttaagtatgtttaaaaaataccatgagacctctgaactgaaaagacaaataatgttgattttttttcttgtgtggaaaaggtctacagaaataatttttagagtggtgcttaataaattattaatactttttagggtaatgttttagttcttaaaaataagttcatgtgaaagtagcaagtgaactctgtatttaaaaatatagttttttgagtcatgaggaaacattagcaaaaccagctaagccttgatgtttattcatgttcgaagtgcattatagcatttgctgtggatgttttctgacattgcctaatggagagcgtgggatcataaaggattttgtgttcactaaggttaaatctaactcacgggagagagagggctctgtctcttggtaccattatgcattgtgatactatagagttgtgttcatatttcttgtaagaaaaatttttgcttttctttagaaatataggtattagcaaaagtaagtatacaaagaggattatgacaaatagaccatttctttaaaaatggtaactgttgcatttaaacacatcgactgacagattatatggatatttaaaaataactttaaatcaatcttttaatattttgctgtttgctcttatgttctcccttctttcttccttccttgtcttccctccctttccttccttcattctttctttcttctgctctgtcagaagatatacaagtagccaaagcatcacgagccaagctgtttgtcttttgccatattgtcttttgattctcttgataaagagaaagcttttgaaattacttactgccctttgaaagtctgttttacaaccccaaaggatattttaggactttaaaagggaagcttcagtggattcatttggttagattcttttcctaggttaaaaacatcggggaacttaaatacataggaaaggagttcacaaataaaatttagtttttttagaaagagaatattttaataactgtagtatactacaagaaacatctcatggctttaagattaacgatagcgataaggcccactcaagcatctcacagtggtgatattacatgtcacttagcaggatgcaacctggcctagggatttccagaagacaaggccacctcagcacagatgcaactttcataaattttagaacaaagcctaaccttactagattaaacttgctctatgaaagaaacacttggtaattgacccagactgaatacatgtataagaaatgggaaagatctcccaaactctgagaacggtcctcaaatagaagctctcctagtcagttggtcatctgacctctgactatatccggcctatgacaccagccagctcctgctttctgtcttgtaagagcactgctggaataaactacttgagcatta

SEQ ID NO: 148378 - DNA, 4710 bp, Homo sapiens
  Payload ID: 9383
  Gene Symbol: LRCH1
  Gene Name: leucine-rich repeats and calponin homology (CH) domain containing 1
  Uniprot ID: Q9Y2L9
  ENST ID: ENST00000311191
  CDS Start-End: 230-2320
ccgcagtccttagcttcccggggacaggaaaccttcaagaccgagctgccacggccgcctccccgcccgccccccattctacgcgcctgcccacaccctcctcccctccttccagcgcctttcggtggagcactgcggcactcagcccgagctgccgttttcccctcgcggggaacgctgtgacccccccgcaggagcggcggggcggggtgggggggcccgggagaagatggcgacgccgggaagcgaaccccaacctttcgtcccggccctttcggtagctactctgcacccacttcatcatccccaccaccaccaccaccaccatcagcaccacggaggaaccggcgcccccggcggggcgggtggtggcggcggtggcagcgggggcttcaacctgcccttgaaccggggtctggagcgcgcgcttgaggaggcggccaactccggggggctgaacctgagcgccaggaaattgaaggaatttccccgtaccgcagcccccgggcacgacctctcggacacggtgcaggcagacttatctaaaaacagactggttgaagttccaatggaattgtgccattttgtatcactggaaattcttaatctgtatcacaactgtatcagagtcattcctgaggccatcgttaatctgcagatgctgacttacctgaacttgagtcgaaatcagctgtccgccctgcctgcctgcctgtgtggtctgcctctcaaagtcttaatcgcaagtaacaacaaacttggatcattaccagaagagataggtcagctcaaacagttaatggagctggatgtcagctgcaacgagatcacagcgttgccccagcagataggtcagttgaaatctctacgagaactgaatgtcagaagaaattaccttaaagttttaccacaagaactagtagatctttccttggtaaagtttgacttttcctgcaacaaagtgctcgtgattccaatttgttttagagagatgaagcagctgcaagtgttactacttgagaataaccctctgcagtctcctccagcacagatttgcacaaagggcaaagttcacatatttaagtatctgagcatacaagcatgccagattaagacagctgactccctttatctccacaccatggagaggccacatttacaccagcacgtggaagatggcaagaaggattctgattcgggagttggaagtgataatggagataagcgattatctgccaccgagccttctgacgaagacactgttagcctcaatgtgccaatgtcaaacatcatggaagaagaacagatcatcaaggaggactcgtgccatcgccttagccccgttaaaggggaatttcatcaggaatttcaaccggagccttcccttttgggtgacagcaccaactcaggagaagaaagagaccagtttactgatagagcagatggtctccattcggaatttatgaactataaggcaagggcagaagactgtgaagagctgttacggatagaagaggatgtgcactggcaaactgagggcataataagttcatccaaagatcaggacatggatatagcaatgatcgagcagctgagagaagcagtagatttgctgcaagatcccaatggattaagcacagatattacagagagaagtgttttaaacctatatcctatgggatcagcagaagccttagaattacaagattctgcactgaatggtcaaatacagctggagacatctccggtgtgtgaggtgcaaagtgatctaacattacagagtaacgggagccagtattctccaaatgagattagagagaactcccctgcagtctctcctaccacaaacagcacagctccatttggcctgaagcctcgatcagtgtttctaagacctcagagaaatttggaatctatagacccgcagtttacaatccggaggaaaatggagcagatgagagaagagaaagagctggtggaacaacttcgtgagagcattgagatgagattgaaggtcagtctacacgaagacctgggggcagccctcatggatggtgtcgtcctctgccatctggtcaaccacatccgcccacggtcggttgcaagcatccatgtcccatcaccagcggttcccaaacttagcatggccaaatgcagaagaaatgtggaaaactttttggaagcatgccgaaaattaggagtaccagaggaaaagctatgtctcccccaccacatccttgaagaaaaaggcctggtcaaagtgggcattaccattcaagcattactagacatcaccgtaacgaaggctctgttcacatgaaactaccccttctccattgggggctcagactctgctctcatccaggatcctgaactctgctccaggcacctgttcaaccctctctcccacccactgcctgtcacttcactgactccagttacattgaaacaattttcagtctaagggaggattttctacctttcagagctgacctccgactttaagacttgacaggtatttatcttgaaaccagagagggagctggaggaaaaaaaaactgagcagcacatcaatgccttttccaccctccttcatcctttccacactcaccgactgccattaccaaaacgccaagcacaaccgttttgcagcaagacgcattcgttttattaaaaccaaactcgttatgtatttagtggggggaggggggcacaatcaggtttttcaccaccaaatttttcgagaggtttcttgagaccattgccttttaaaaaactattttcgacatacaaaatatttatataaatattatttattagtgagttgttattcatcctttggatgcaaattgtaaattaggaaactattttattactgcttttttgtggttaaacactttattttaatataaatgttgagttattttctatcctctttggtgtgcggtagtttaggtctcagtaatgtttctggtatatatgattccaaaaaaaagcgaaaaacaggtgcttttaggacacaacttttctggggaggcaatattgacactttggtttgtggaacgttggtcttatttatatttctgcattccatccagtttcctacattccagcagccctctgtcccccaatataatgaactgactaaaatcaagagagcaccccaaagttatttgtaaatagctgtgatggaaaaaaaaaagacatattaaacttgaagctaaaatgtgaacaattattttttggattcatacttcttttgctatgcacaaaacattcacgttttaacacaaagaaataataagtgttagcatcgtgtgtcttgaagtatacttttgcactgtaacttgggttacgttaaagagagcttagcaccaaaggtagataatgaagaaatggcataggaaagtggagatgataaaaagttgattgttgaaccaaaaagggtttgaagggaagcttcgactgagtatcagaaattacttaaggcacataggacctgaatcaggaaaccagcacttcttacaactgccagttttaaaagaggaaatgattctgagatgtgctcattttattttaatttggtggttggtggttttccaagtagtctgtaaaatcctgcaagattcacagtctctggtgtgaaacctcagaagtgagtcgttgtgagcctgtgggcagcaccaccaaggcaggctaaggggagggtgcagtaagtggagtttgtgaggctgagtggctgaggagggagcaagtgcaacaaaatagggctagagaagaaccagccaaggagtggaacccatgctgctctcagagattcacggaacacggcagccttctgcaggcagttccatgcatgtgcactcacgctgcaatcacagatgtcccagtaattaacctttctaagtcttgtgaatgctgactgcactttcacctcctcgaaaagccattggaagtttttagagcagcagcagccacagtttgtaagacaaatgtagagggggacgcaaaagaaaagacaccaccaggaggaggattcagtgtgcagtcagcacagaccaacatcaaccaaggcaatggctgccctccactcttgggaagatggggggaggtttctgaaaacggaaatttggattggcagctagcagttatttcctatcagatgtactgtgcactttaacctaacttaaaatgtattttaatatttttctgtactgcacaaatacctgttttgtcaaatagcataatgatgtaaagaaacattttggacaaagagtgtatacaatttaagcaacattcaaaggttgactatataagtaggagtttagcctgctgcaccttcacgggcattcagaatgcggggtcctgaaatattttcttacgtgtatatatggtagcatgaagctttgtaatcattgttttgagagatttttttttcaaaattaaagtatttcttttgatattaatttttattattttcttgaagttggttgtgtaatgtaaatggcttcagtcttctgtaaaattgcttttttttcttttaaatgcagtccttctatggctaagacgtcttcaagatccttgtacactgtttatatgtgcaataaaatgcatggccagctgacagtatcgtcagtggacagaatgtatatagtgcaaatatccttccttttattatttaacagccattaaaatcttggatttgtacaa

SEQ ID NO: 148379 - DNA, 3314 bp, Homo sapiens
  Payload ID: 9383
  Gene Symbol: LRCH1
  Gene Name: leucine-rich repeats and calponin homology (CH) domain containing 1
  Uniprot ID: Q9Y2L9
  ENST ID: ENST00000389797
  CDS Start-End: 138-2429
acaccctcctcccctccttccagcgcctttcggtggagcactgcggcactcagcccgagctgccgttttcccctcgcggggaacgctgtgacccccccgcaggagcggcggggcggggtgggggggcccgggagaagatggcgacgccgggaagcgaaccccaacctttcgtcccggccctttcggtagctactctgcacccacttcatcatccccaccaccaccaccaccaccatcagcaccacggaggaaccggcgcccccggcggggcgggtggtggcggcggtggcagcgggggcttcaacctgcccttgaaccggggtctggagcgcgcgcttgaggaggcggccaactccggggggctgaacctgagcgccaggaaattgaaggaatttccccgtaccgcagcccccgggcacgacctctcggacacggtgcaggcagacttatctaaaaacagactggttgaagttccaatggaattgtgccattttgtatcactggaaattcttaatctgtatcacaactgtatcagagtcattcctgaggccatcgttaatctgcagatgctgacttacctgaacttgagtcgaaatcagctgtccgccctgcctgcctgcctgtgtggtctgcctctcaaagtcttaatcgcaagtaacaacaaacttggatcattaccagaagagataggtcagctcaaacagttaatggagctggatgtcagctgcaacgagatcacagcgttgccccagcagataggtcagttgaaatctctacgagaactgaatgtcagaagaaattaccttaaagttttaccacaagaactagtagatctttccttggtaaagtttgacttttcctgcaacaaagtgctcgtgattccaatttgttttagagagatgaagcagctgcaagtgttactacttgagaataaccctctgcagtctcctccagcacagatttgcacaaagggcaaagttcacatatttaagtatctgagcatacaagcatgccagattaagacagctgactccctttatctccacaccatggagaggccacatttacaccagcacgtggaagatggcaagaaggattctgattcgggagttggaagtgataatggagataagcgattatctgccaccgagccttctgacgaagacactgttagcctcaatgtgccaatgtcaaacatcatggaagaagaacagatcatcaaggaggactcgtgccatcgccttagccccgttaaaggggaatttcatcaggaatttcaaccggagccttcccttttgggtgacagcaccaactcaggagaagaaagagaccagtttactgatagagcagatggtctccattcggaatttatgaactataaggcaagggcagaagactgtgaagagctgttacggatagaagaggatgtgcactggcaaactgagggcataataagttcatccaaagatcaggacatggatatagcaatgatcgagcagctgagagaagcagtagatttgctgcaagatcccaatggattaagcacagatattacagagagaagtgttttaaacctatatcctatgggatcagcagaagccttagaattacaagattctgcactgaatggtcaaatacagctggagacatctccggtgtgtgaggtgcaaagtgatctaacattacagagtaacgggagccagtattctccaaatgagattagagagaactcccctgcagtctctcctaccacaaacagcacagctccatttggcctgaagcctcgatcagacccagccctcattcttcctcctatctccttcaacacacttacacaggcacagacatgggacagctctagctacagtgttccatctgaaggagacagtgacaatgtgtttctaagacctcagagaaatttggaatctatagacccgcagtttacaatccggaggaaaatggagcagatgagagaagagaaagagctggtggaacaacttcgtgagagcattgagatgagattgaaggtcagtctacacgaagacctgggggcagccctcatggatggtgtcgtcctctgccatctggtcaaccacatccgcccacggtcggttgcaagcatccatgtcccatcaccagcggttcccaaacttagcatggccaaatgcagaagaaatgtggaaaactttttggaagcatgccgaaaattaggagtaccagaggctgacctctgctctccgtgtgacatcctgcagttggattttcgtcacattcgaaagactgttgacactctgctggcactcggggagaaagccccaccaccaacttctgccctccgctccagggaccttataggcttctgtcttgtccatattctctttatagtgctggtctatatcacttaccactggaatgctctgtccgcataatgtctgcacgtgcatccaaacgctgtgctctgtcgccctcaacctttgcagggtccttcctacctttgagcctttgccttgcaaacttccatccctgtcatgtcttcagttatctctcgagttttgaagctgaacagtagcaaatcagattttccagaagcacaaactttgtagaatacagtttagtataattcctctcacttactgaaatacaacgacgacgactgcaaagtgtatgcacaccgcatgcttcctcatccacatagtgccagcagcagtgccacgcagttcctcctctccctcccggtgagctgctgccctgggcagaggggaggagaattccaggacaagagtgtcaaggacagggatttagcatatggaagtctttcctttgggtcagtattgaactagaattctaattcgggactgggcaattgagctgtataggggccaccttgcagggaggacagaaaactaacattttggcccaacttgatctatacaaaactttaataataccactactgaccaagttggacgtgtacacgtactcacactgccttgatggccattcgattggattcctcccaaatttcctaaaaagggagccgcgaagggcgctgggcagtgtggccgccaacttccaccccggcaagcccctctgtcctatgcagaagggcgctcaagggaaggaagtgtcgttgctgttagagcctcacgtggaggagtcacttaaacaccagttttttactgcttaattccttgttaggtcttctcttgaggctcttagaaaagcgttttccagagagatttctatttttgaacaatggaacggatcactgcttttttgccacatcacatagtaactgccggtccagaatgtga

SEQ ID NO: 148380 - DNA, 4131 bp, Homo sapiens
  Payload ID: 9383
  Gene Symbol: LRCH1
  Gene Name: leucine-rich repeats and calponin homology (CH) domain containing 1
  Uniprot ID: Q9Y2L9
  ENST ID: ENST00000389798
  CDS Start-End: 198-2384
cttcaagaccgagctgccacggccgcctccccgcccgccccccattctacgcgcctgcccacaccctcctcccctccttccagcgcctttcggtggagcactgcggcactcagcccgagctgccgttttcccctcgcggggaacgctgtgacccccccgcaggagcggcggggcggggtgggggggcccgggagaagatggcgacgccgggaagcgaaccccaacctttcgtcccggccctttcggtagctactctgcacccacttcatcatccccaccaccaccaccaccaccatcagcaccacggaggaaccggcgcccccggcggggcgggtggtggcggcggtggcagcgggggcttcaacctgcccttgaaccggggtctggagcgcgcgcttgaggaggcggccaactccggggggctgaacctgagcgccaggaaattgaaggaatttccccgtaccgcagcccccgggcacgacctctcggacacggtgcaggcagacttatctaaaaacagactggttgaagttccaatggaattgtgccattttgtatcactggaaattcttaatctgtatcacaactgtatcagagtcattcctgaggccatcgttaatctgcagatgctgacttacctgaacttgagtcgaaatcagctgtccgccctgcctgcctgcctgtgtggtctgcctctcaaagtcttaatcgcaagtaacaacaaacttggatcattaccagaagagataggtcagctcaaacagttaatggagctggatgtcagctgcaacgagatcacagcgttgccccagcagataggtcagttgaaatctctacgagaactgaatgtcagaagaaattaccttaaagttttaccacaagaactagtagatctttccttggtaaagtttgacttttcctgcaacaaagtgctcgtgattccaatttgttttagagagatgaagcagctgcaagtgttactacttgagaataaccctctgcagtctcctccagcacagatttgcacaaagggcaaagttcacatatttaagtatctgagcatacaagcatgccagattaagacagctgactccctttatctccacaccatggagaggccacatttacaccagcacgtggaagatggcaagaaggattctgattcgggagttggaagtgataatggagataagcgattatctgccaccgagccttctgacgaagacactgttagcctcaatgtgccaatgtcaaacatcatggaagaagaacagatcatcaaggaggactcgtgccatcgccttagccccgttaaaggggaatttcatcaggaatttcaaccggagccttcccttttgggtgacagcaccaactcaggagaagaaagagaccagtttactgatagagcagatggtctccattcggaatttatgaactataaggcaagggcagaagactgtgaagagctgttacggatagaagaggatgtgcactggcaaactgagggcataataagttcatccaaagatcaggacatggatatagcaatgatcgagcagctgagagaagcagtagatttgctgcaagatcccaatggattaagcacagatattacagagagaagtgttttaaacctatatcctatgggatcagcagaagccttagaattacaagattctgcactgaatggtcaaatacagctggagacatctccggtgtgtgaggtgcaaagtgatctaacattacagagtaacgggagccagtattctccaaatgagattagagagaactcccctgcagtctctcctaccacaaacagcacagctccatttggcctgaagcctcgatcagtgtttctaagacctcagagaaatttggaatctatagacccgcagtttacaatccggaggaaaatggagcagatgagagaagagaaagagctggtggaacaacttcgtgagagcattgagatgagattgaaggtcagtctacacgaagacctgggggcagccctcatggatggtgtcgtcctctgccatctggtcaaccacatccgcccacggtcggttgcaagcatccatgtcccatcaccagcggttcccaaacttagcatggccaaatgcagaagaaatgtggaaaactttttggaagcatgccgaaaattaggagtaccagaggctgacctctgctctccgtgtgacatcctgcagttggattttcgtcacattcgaaagactgttgacactctgctggcactcggggagaaagccccaccaccaacttctgccctccgctccagggaccttataggcttctgtcttgtccatattctctttatagtgctggtctatatcacttaccactggaatgctctgtccgcataatgtctgcacgtgcatccaaacgctgtgctctgtcgccctcaacctttgcagggtccttcctacctttgagcctttgccttgcaaacttccatccctgtcatgtcttcagttatctctcgagttttgaagctgaacagtagcaaatcagattttccagaagcacaaactttgtagaatacagtttagtataattcctctcacttactgaaatacaacgacgacgactgcaaagtgtatgcacaccgcatgcttcctcatccacatagtgccagcagcagtgccacgcagttcctcctctccctcccggtgagctgctgccctgggcagaggggaggagaattccaggacaagagtgtcaaggacagggatttagcatatggaagtctttcctttgggtcagtattgaactagaattctaattcgggactgggcaattgagctgtataggggccaccttgcagggaggacagaaaactaacattttggcccaacttgatctatacaaaactttaataataccactactgaccaagttggacgtgtacacgtactcacactgccttgatggccattcgattggattcctcccaaatttcctaaaaagggagccgcgaagggcgctgggcagtgtggccgccaacttccaccccggcaagcccctctgtcctatgcagaagggcgctcaagggaaggaagtgtcgttgctgttagagcctcacgtggaggagtcacttaaacaccagttttttactgcttaattccttgttaggtcttctcttgaggctcttagaaaagcgttttccagagagatttctatttttgaacaatggaacggatcactgcttttttgccacatcacatagtaactgccggtccagaatgtgacggattcgactctattcattttcaaataaagccatgagccgtggaacattcttggtcctggtgcttgggttatgatggcaggagtcaagaagaagattactttcattctagaagaatgtagtttctctaattatttgaaatgttcatttagcctttgattttcactgatattaactagcaaactgctttaagtcagctcaaaggattatatagtaactatatctgcatttggagcaatgtgatcagtttgcatttaaaaggaaaaaaaagaattttatcttagccagaatgtccctggattcaggggtgtctttgtataatatgagagggccttgttccaaggtcaaggcagcctccttattttacatgctgtttgccaaatcttgtttcttagcttggggagatgatggacttagcttcctcaagataaatttctagtttattaagatgcaaacagctctcatagatggctactacgaagaaaatcttatttttctgaacattttcatgaatccaggggacttgaaaatatggaagacccacatagttagaagaatatatttataaagattccttgctgctaagtcagatcagatttgctaacaggaagcattctttacatgacagtatcttgagttatgtgagttttttttcctcctgactttgtgttgattggtgaaatgcagggtatgtggaagttatctaattaacctcagttgtatatgaataacccacagatgtactgaattacttttggtgctatcttgtactcttcaatctgtaacacaataaaatccctttgtacgatgtctaatgagcaccctgagccataaattgcttaataaacacattttgggtgatt

SEQ ID NO: 148381 - DNA, 554 bp, Homo sapiens
  Payload ID: 9383
  Gene Symbol: LRCH1
  Gene Name: leucine-rich repeats and calponin homology (CH) domain containing 1
  ENST ID: ENST00000463929
  CDS Start-End: 261-554
atcgggtggtatccattgagcactgtcctggtgaggacaggttgatagatcacctgaagccttttagatgagaccaggatgtcagctgcaacgagatcacagcgttgccccagcagataggtcagttgaaatctctacgagaactgaatgtcagaagaaattaccttaaagttttaccacaagaactagtagatctttccttggtaaagtttgacttttcctgcaacaaagtgctcgtgattccaatttgttttagagagatgaagcagctgcaagtgttactacttgagaataaccctctgcagtctcctccagcacagatttgcacaaagggcaaagttcacatatttaagtatctgagcatacaagcatgccagattaagacagctgactccctttatctccacaccatggagaggccacatttacaccagcacgtggaagatggcaagaaggattctgattcgggagttggaagtgataatggagataagcgattatctgccaccgagccttctgacgaagacactgttagcctcaatgtgccaatgtca

SEQ ID NO: 148382 - DNA, 545 bp, Homo sapiens
  Payload ID: 9383
  Gene Symbol: LRCH1
  Gene Name: leucine-rich repeats and calponin homology (CH) domain containing 1
  ENST ID: ENST00000478412
  CDS Start-End: 329-545
gaaacgaggctctgctgccttctatggtgaaaggggagagcttttccaggttcaaaagtaaagcgggatatttaaggccttgatctcactggaatcatttgtatctttagttctgtgatgccaagtgggacctgcatgggatttggatgtcagctgcaacgagatcacagcgttgccccagcagataggtcagttgaaatctctacgagaactgaatgtcagaagaaattaccttaaagttttaccacaagaactagtagatctttccttggtaaagtttgacttttcctgcaacaaagtgctcgtgattccaatttgttttagagagatgaagcagctgcaagtgttactacttgagaataaccctctgcagtctcctccagcacagatttgcacaaagggcaaagttcacatatttaagtatctgagcatacaagcatgccagattaagacagctgactccctttatctccacaccatggagaggccacatttacaccagcacgtggaagatggcaagaaggattctgattcgggagttggaa

SEQ ID NO: 148383 - DNA, 4929 bp, Homo sapiens
  Payload ID: 9384
  Gene Symbol: LRCH2
  Gene Name: leucine-rich repeats and calponin homology (CH) domain containing 2
  Uniprot ID: Q5VUJ6
  ENST ID: ENST00000317135
  CDS Start-End: 32-2329
attgtcgggggctattctctctcccaggaacatggcggcgagtcagggaggaggcggtaacagtgggggcggcggttgtggtggaggtggaagtagcggtggctgtggcacggctggagggggaggtggcggggctggagggggaggcggcggcggcggcgggaccctggtggtccccatcccggtaccgactcttttcggtcagccgttccccaacgggccgccgtggaacccggggagcctgcagcctcagcacaccgtgaggagcctggaccgggccctggaagaggcgggcagctccggcatcctgagcctcagtggtcggaaactccgagacttcccgggcagcggctacgacctgacggacaccacccaagcagatctttccagaaatcgttttacagaaattccttctgatgtctggttatttgcaccccttgaaacattaaatttatatcataattgcatcaaaaccattcctgaagccattaaaaatctgcagatgttaacataccttaacattagccgaaatcttttatcaacattgccaaaatacctatttgatcttccccttaaagttttggtcgtcagtaataataaactggtatccattccagaagaaattgggaagttaaaagatttaatggaattggatattagctgcaatgagattcaagtccttccccaacaaatgggaaaattacattcacttagagagctaaatataagaagaaataatcttcatgttttgccagatgaattaggagaccttcccttagtcaagctggatttctcttgtaataaagtgaccgaaattccagtttgttacagaaagctgcatcatttacaagtaataattttggataacaatccattgcaagtaccaccagcacagatatgtttaaagggtaaggtgcacatatttaagtacttaaatattcaagcatgttgcagaatggataagaaaccagattccctggatcttccatcattgagtaaacgaatgccctcacagcctctcacagacagtatggaagatttttatccaaataaaaatcatggccctgactctggaattggaagtgataatggagagaaacgattatccacaacagaaccatcagatgatgacacagtcagccttcattctcaagtctcagaatcaaatagagagcagacatcaagaaatgacagtcacataataggaagtaagactgattctcagaaagaccaggaggtatatgattttgttgaccccaacacagaagatgtagcagttcctgaacagggaaatgcacatattggatcatttgtatcattctttaagggaaaagaaaaatgttctgaaaaatctcggaaaaatgaagaattaggagatgaaaaaagacttgagaaagaacagttactggcagaggaagaggatgatgatttgaaggaagtaactgatttgaggaaaatagctgctcagttattgcagcaagaacagaagaacaggattcttaatcattcaacttctgtgatgagaaacaagccaaaacaaactgtggaatgtgaaaagagtgtctcagcagatgaagttaattcaccattatcacccctcacctggcagcccttagaaaatcagaaggatcaaatagatgaacaaccgtggccagaatctcaccctataatctggcagagtgaagaaaggaggcggagcaaacagattagaaaagaatatttcaagtataaatcaatgaggaagagttcaagtggcaatgaaaatgatgagcaagacagtgataatgctaatatgtcaacacaatctccagtatcatctgaggaatatgacagaactgatggtttttcacacagtccctttggcttgaagcctagatcagcttttagccgctcatctcgccaagaatatggggcagcagatccaggatttacaatgagaagaaagatggaacatttacgggaagagcgagagcaaatacgacaacttcgcaacaatcttgaatccaggttaaaagtaattttgcctgatgacattggagctgcactgatggatggggttgttctttgccatttagccaatcatataaggccacgttctgttgctagtattcatgtaccatcaccagcagtgcccaaactgagcatggcaaaatgtcgaagaaatgtagaaaattttcttgatgcttgtaaaaagttgggtgtctcacaggaaagactttgtttgcctcatcatattttggaagaacgaggacttgtgaaagttggtgtcacagttcaggcgctccttgaattaccaacaaccaaggcatctcagctttctgtggcttaatataacattttaaaattctaagtgtatagtttcatttatttgaagtgatttcaaatatttcaaattcatgaataagaatattccgtcaaaaatagtttgccttaggtcacgccttaggattttaaaaaaattacattgaaacatcaaacttaaacattgaattgcccgaacttctttgggggaaaactggattaacttaataagagtatttgataaactcaaattctctttttactaagtcagttgataatcttgattatttttcagaaagcagactgatactaaatttaaaatgtagtttcaatttaataatcacattaggtttaatttttttacatcatagcatattagtaaacatctggataaaggtaattttttttagcaatttagagcaattctatatttgagttatttaatacacttctaattctagtttatacacaatttcttcaatctttggtcttagttttctagaaaaaaggagtagaaaaaacaattctggctttatattaaattcttttagtattataggttggtgccaaaatattttcagttgtactgtagattgtttacatgtgaagtgcctgtgtaattgatgactcttacatagtcttaagcatttttgcaattttttaaatgtattaatagagtcaatggaactttaaaatattttagtagattttgtaaagtcagtaatatgtgaggatttaaatgagcctcacattgtgacatttgtggttttttagttagtccattgcagtttcccttaaattggttatttcatgttgtcaaaaataccaatgttaatatgattaatttatgctatttaattttgtgaaacttaatcatcttttaaaatgtattatttgaagagtattttatttctgtattgaaaatgttacacaaagcagtaaagtttttgagaactagtgaagtactaattatcaaggacattttgataaaactgccaaagtttgggtttatatcttccctttgagcagcattctatcagtgctgcctttagctatactcagagagcagcagttgaggaataggtttttactcaaaatctggccatttgtgaatcctgtaaaccttgtgatcttcaattactttgatgttaaattaaacacagactcttctataaatattttcatgagatactgtgttacacaaagtccttgttttaacttaggtatgggtaaatttacattggtggtattgcaggaatttttcaaaaacattactgtaatgaataactgagtttcctatagaagaacctgaataattacttttgtagtaaccaagcaagcatcatatcttaagtatgtgatcatttgcacttgttacctcttaatatggatgcaacttattaaaaatgttggcctgggtatttcaaagggtatatataaaaggtaaaaaactagtgtgccaaatggtataggaacaactgtactttttttgatcagttggcatgaagccatagaattaaattttggctttagaatacagatgtgttcattacattccccaagggtcaaattggagcttttaaagaattaaagcttctatgagtatatggtttaagaattaaattattagtaatttattattttaaatatttgacctcattagttgttaattttttagttggataaaaaaaaaactcgctgacataatctccctagtgaaaacttgggtaatatatgtaagaaatggcaaataaataccttagttaatgactttttatgtagaaatttgacagcattacaaattaagtgaccattaaaaacacagcaatcattcatactgctttcataggtgttatgatagtctctgattaatcaatctagtatgaattattttacaagtgttgtcctgtttcatatctttgaagtagtagtgaaattgtaggccattttcttataacatttcagttacttttcagttaattattcctttaaaaagaaaatacagcagaacctcactgtagcattctttactgcagagcaaaattcaatttaagatgggcttctctgaggtccacatcatggcagttcatttactcttgtgccaaatggcaacaccacgtctaaagcagtttcacagcatggtcccctacaatgttataccaaggctctgatgtatttcttttagtagtttctaagtgtaaaatttattctaaatgtttttatggctattatctatttcatcagttattgaattaagaatgattttcattacttgagtgggatttgtgatttaatgacagttgaataatcaaaaatattttattaggcccccaaaatttaatagatatctatttctgttacattttattactgtatggcacaagaaagaagtgacattgggtatgttagaaatgaaataaggagtaaaaatgcattaccatttgtttaataattatctttacagaatgctagtttaatgacttttttaactgaattttttgaataaatcagaaatgtttgtattggtcacagatctatcataattgcttttctgatgcatttaaaaataaatggaacacttaaatgtatattaccgatgcaaactgtggataaagttgaaagaaaaaa

SEQ ID NO: 148384 - DNA, 4868 bp, Homo sapiens
  Payload ID: 9384
  Gene Symbol: LRCH2
  Gene Name: leucine-rich repeats and calponin homology (CH) domain containing 2
  Uniprot ID: Q5VUJ6
  ENST ID: ENST00000538422
  CDS Start-End: 32-2278
attgtcgggggctattctctctcccaggaacatggcggcgagtcagggaggaggcggtaacagtgggggcggcggttgtggtggaggtggaagtagcggtggctgtggcacggctggagggggaggtggcggggctggagggggaggcggcggcggcggcgggaccctggtggtccccatcccggtaccgactcttttcggtcagccgttccccaacgggccgccgtggaacccggggagcctgcagcctcagcacaccgtgaggagcctggaccgggccctggaagaggcgggcagctccggcatcctgagcctcagtggtcggaaactccgagacttcccgggcagcggctacgacctgacggacaccacccaagcagatctttccagaaatcgttttacagaaattccttctgatgtctggttatttgcaccccttgaaacattaaatttatatcataattgcatcaaaaccattcctgaagccattaaaaatctgcagatgttaacataccttaacattagccgaaatcttttatcaacattgccaaaatacctatttgatcttccccttaaagttttggtcgtcagtaataataaactggtatccattccagaagaaattgggaagttaaaagatttaatggaattggatattagctgcaatgagattcaagtccttccccaacaaatgggaaaattacattcacttagagagctaaatataagaagaaataatcttcatgttttgccagatgaattaggagaccttcccttagtcaagctggatttctcttgtaataaagtgaccgaaattccagtttgttacagaaagctgcatcatttacaagtaataattttggataacaatccattgcaagtaccaccagcacagatatgtttaaagggtaaggtgcacatatttaagtacttaaatattcaagcatgttgcagaatggataagaaaccagattccctggatcttccatcattgagtaaacgaatgccctcacagcctctcacagacagtatggaagatttttatccaaataaaaatcatggccctgactctggaattggaagtgataatggagagaaacgattatccacaacagaaccatcagatgatgacacagtcagccttcattctcaagtctcagaatcaaatagagagcagacatcaagaaatgacagtcacataataggaagtaagactgattctcagaaagaccaggaggtatatgattttgttgaccccaacacagaagatgtagcagttcctgaacagggaaatgcacatattggatcatttgtatcattctttaagggaaaagaaaaatgttctgaaaaatctcggaaaaatgaagaattaggagatgaaaaaagacttgagaaagaacagttactggcagaggaagaggatgatgatttgaaggaagtaactgatttgaggaaaatagctgctcagttattgcagcaagaacagaagaacaggattcttaatcattcaacttctgtgatgagaaacaagccaaaacaaactgtggaatgtgaaaagagtgtctcagcagatgaagttaattcaccattatcacccctcacctggcagcccttagaaaatcagaaggatcaaatagatgaacaaccgtggccagaatctcaccctataatctggcagagtgaagaaaggaggcggagcaaacagattagaaaagaatatttcaagtataaatcaatgaggaagagttcaagtggcaatgaaaatgatgaggaatatgacagaactgatggtttttcacacagtccctttggcttgaagcctagatcagcttttagccgctcatctcgccaagaatatggggcagcagatccaggatttacaatgagaagaaagatggaacatttacgggaagagcgagagcaaatacgacaacttcgcaacaatcttgaatccaggttaaaagtaattttgcctgatgacattggagctgcactgatggatggggttgttctttgccatttagccaatcatataaggccacgttctgttgctagtattcatgtaccatcaccagcagtgcccaaactgagcatggcaaaatgtcgaagaaatgtagaaaattttcttgatgcttgtaaaaagttgggtgtctcacaggaaagactttgtttgcctcatcatattttggaagaacgaggacttgtgaaagttggtgtcacagttcaggcgctccttgaattaccaacaaccaaggcatctcagctttctgtggcttaatataacattttaaaattctaagtgtatagtttcatttatttgaagtgatttcaaatatttcaaattcatgaataagaatattccgtcaaaaatagtttgccttaggtcacgccttaggattttaaaaaaattacattgaaacatcaaacttaaacattgaattgcccgaacttctttgggggaaaactggattaacttaataagagtatttgataaactcaaattctctttttactaagtcagttgataatcttgattatttttcagaaagcagactgatactaaatttaaaatgtagtttcaatttaataatcacattaggtttaatttttttacatcatagcatattagtaaacatctggataaaggtaattttttttagcaatttagagcaattctatatttgagttatttaatacacttctaattctagtttatacacaatttcttcaatctttggtcttagttttctagaaaaaaggagtagaaaaaacaattctggctttatattaaattcttttagtattataggttggtgccaaaatattttcagttgtactgtagattgtttacatgtgaagtgcctgtgtaattgatgactcttacatagtcttaagcatttttgcaattttttaaatgtattaatagagtcaatggaactttaaaatattttagtagattttgtaaagtcagtaatatgtgaggatttaaatgagcctcacattgtgacatttgtggttttttagttagtccattgcagtttcccttaaattggttatttcatgttgtcaaaaataccaatgttaatatgattaatttatgctatttaattttgtgaaacttaatcatcttttaaaatgtattatttgaagagtattttatttctgtattgaaaatgttacacaaagcagtaaagtttttgagaactagtgaagtactaattatcaaggacattttgataaaactgccaaagtttgggtttatatcttccctttgagcagcattctatcagtgctgcctttagctatactcagagagcagcagttgaggaataggtttttactcaaaatctggccatttgtgaatcctgtaaaccttgtgatcttcaattactttgatgttaaattaaacacagactcttctataaatattttcatgagatactgtgttacacaaagtccttgttttaacttaggtatgggtaaatttacattggtggtattgcaggaatttttcaaaaacattactgtaatgaataactgagtttcctatagaagaacctgaataattacttttgtagtaaccaagcaagcatcatatcttaagtatgtgatcatttgcacttgttacctcttaatatggatgcaacttattaaaaatgttggcctgggtatttcaaagggtatatataaaaggtaaaaaactagtgtgccaaatggtataggaacaactgtactttttttgatcagttggcatgaagccatagaattaaattttggctttagaatacagatgtgttcattacattccccaagggtcaaattggagcttttaaagaattaaagcttctatgagtatatggtttaagaattaaattattagtaatttattattttaaatatttgacctcattagttgttaattttttagttggataaaaaaaaaactcgctgacataatctccctagtgaaaacttgggtaatatatgtaagaaatggcaaataaataccttagttaatgactttttatgtagaaatttgacagcattacaaattaagtgaccattaaaaacacagcaatcattcatactgctttcataggtgttatgatagtctctgattaatcaatctagtatgaattattttacaagtgttgtcctgtttcatatctttgaagtagtagtgaaattgtaggccattttcttataacatttcagttacttttcagttaattattcctttaaaaagaaaatacagcagaacctcactgtagcattctttactgcagagcaaaattcaatttaagatgggcttctctgaggtccacatcatggcagttcatttactcttgtgccaaatggcaacaccacgtctaaagcagtttcacagcatggtcccctacaatgttataccaaggctctgatgtatttcttttagtagtttctaagtgtaaaatttattctaaatgtttttatggctattatctatttcatcagttattgaattaagaatgattttcattacttgagtgggatttgtgatttaatgacagttgaataatcaaaaatattttattaggcccccaaaatttaatagatatctatttctgttacattttattactgtatggcacaagaaagaagtgacattgggtatgttagaaatgaaataaggagtaaaaatgcattaccatttgtttaataattatctttacagaatgctagtttaatgacttttttaactgaattttttgaataaatcagaaatgtttgtattggtcacagatctatcataattgcttttctgatgcatttaaaaataaatggaacacttaaatgtatattaccgatgcaaactgtggataaagttg

SEQ ID NO: 148385 - DNA, 2258 bp, Homo sapiens
  Payload ID: 9385
  Gene Symbol: LRCH3
  Gene Name: leucine-rich repeats and calponin homology (CH) domain containing 3
  Uniprot ID: Q96II8
  ENST ID: ENST00000334859
  CDS Start-End: 6-2144
gggaaatggcggccgcgggcttggtcgctgtggcagcggctgccgagtactctggcacggtagcgtcgggaggtaacctccctggtgttcactgcggcccaagctccggggcaggccctggttttggcccgggctcgtggagccgctctctcgatcgagccctggaggaggcggcggtcactggggtgctgagcctgagcggccggaaactgagggagtttccccggggagcggccaaccacgacctgacggacaccacccgggcggacctgtcgcgaaatcgcctttcagaaattcctatagaagcatgtcactttgtttctctggaaaatctcaacttgtaccaaaattgtattcgttatattccagaggcaattttaaacctacaagctctaacattcttaaatattagtcggaaccaactgtcaacattgccggtacacttgtgtaatttgccattgaaagtcttaattgctagtaataacaaattggtgtcacttccagaagaaattggacaccttagacatttgatggaacttgatgtgagctgcaatgaaattcaaactataccttcccaaattggtaacctggaggccttgagagaccttaatgtaagaagaaatcacctagtacatttgcctgaagagctggcggagttgcctttgatacggttagacttctcatgcaataaaattaccacaatccctgtttgttatcggaacctcaggcacctacagacgatcaccctagataacaatccactacaatcacctcctgcacagatatgtataaaaggcaaagtccacatatttaaatacctgaacatacaagcttgtaagattgctccagatctgccggattatgataggagaccgttgggttttggctcctgccatgaagaactgtactcaagtcgcccttatggagcccttgattcaggcttcaatagtgtggacagtggtgataagagatggtcagggaatgaacctacagatgaattttcagatctgcctcttcgagtagcagagattactaaagaacaaagactacgaagagaaagccagtaccaagagaaccgcggcagtttggtagtaacaaacggcggagtggaacatgatctggatcagattgactacatagacagctgcaccgcagaggaagaggaggccgaggtgagacagcccaagggaccagacccagacagccttagttcacagtttatggcgtatattgaacagcggcgaatctctcatgagggttcaccagtaaagccagtagccattagggagtttcaaaaaacagaagatatgagaagatatttacatcaaaacagggttccagctgagccatcttccctcctgtcactatcagcaagtcacaatcagctgtcacacacagacctggaacttcatcagagaagggagcagttagtagagcgcactcggagagaggctcagcttgctgccctgcagtatgaggaggagaaaataaggaccaagcagatccagagagatgctgtcctggactttgtcaaacaaaaagcatcacaaagtccacaaaaacagcacccgctcctagatggcgtagatggtgagtgccccttcccatccagaaggtctcagcacactgatgatagtgccttgtgcatgtcgctgtcagggttgaatcaagtgggctgtgctgctaccctgcctcattcttctgccttcacgcctcttaagagtgatgacagacctaatgctctattaagttcacctgcaacagaaacagttcatcattcccctgcatattcttttcctgctgctatccagagaaatcagcctcagcgccctgaaagcttccttttccgagcaggtgtcagggcagaaaccaacaaaggtcatgcttcaccccttcctccatctgctgcacctaccactgattctacagattccataacaggacagaattcaagacagagagaagaagagctggaattaatagaccaactgcgtaaacatattgagtaccggttgaaagtgtctctaccttgtgatctcggagcagctctaactgacggtgttgttctttgccatttggccaatcatgtgcgacctcgatctgtcccaagcattcatgttccctcaccagctgtagtaagttgataatcctaaaaagccttggctattcatcagacatttgttaagcacagtggacagacatttcttaagcattgtgctagatattaaggatacagatataaagagtccagtctctac

SEQ ID NO: 148386 - DNA, 2970 bp, Homo sapiens
  Payload ID: 9385
  Gene Symbol: LRCH3
  Gene Name: leucine-rich repeats and calponin homology (CH) domain containing 3
  Uniprot ID: Q96II8
  ENST ID: ENST00000425562
  CDS Start-End: 1-2334
atggcggccgcgggcttggtcgctgtggcagcggctgccgagtactctggcacggtagcgtcgggaggtaacctccctggtgttcactgcggcccaagctccggggcaggccctggttttggcccgggctcgtggagccgctctctcgatcgagccctggaggaggcggcggtcactggggtgctgagcctgagcggccggaaactgagggagtttccccggggagcggccaaccacgacctgacggacaccacccgggcggacctgtcgcgaaatcgcctttcagaaattcctatagaagcatgtcactttgtttctctggaaaatctcaacttgtaccaaaattgtattcgttatattccagaggcaattttaaacctacaagctctaacattcttaaatattagtcggaaccaactgtcaacattgccggtacacttgtgtaatttgccattgaaagtcttaattgctagtaataacaaattggtgtcacttccagaagaaattggacaccttagacatttgatggaacttgatgtgagctgcaatgaaattcaaactataccttcccaaattggtaacctggaggccttgagagaccttaatgtaagaagaaatcacctagtacatttgcctgaagagctggcggagttgcctttgatacggttagacttctcatgcaataaaattaccacaatccctgtttgttatcggaacctcaggcacctacagacgatcaccctagataacaatccactacaatcacctcctgcacagatatgtataaaaggcaaagtccacatatttaaatacctgaacatacaagcttgtaagattgctccagatctgccggattatgataggagaccgttgggttttggctcctgccatgaagaactgtactcaagtcgcccttatggagcccttgattcaggcttcaatagtgtggacagtggtgataagagatggtcagggaatgaacctacagatgaattttcagatctgcctcttcgagtagcagagattactaaagaacaaagactacgaagagaaagccagtaccaagagaaccgcggcagtttggtagtaacaaacggcggagtggaacatgatctggatcagattgactacatagacagctgcaccgcagaggaagaggaggccgaggtgagacagcccaagggaccagacccagacagccttagttcacagtttatggcgtatattgaacagcggcgaatctctcatgagggttcaccagtaaagccagtagccattagggagtttcaaaaaacagaagatatgagaagatatttacatcaaaacagggttccagctgagccatcttccctcctgtcactatcagcaagtcacaatcagctgtcacacacagacctggaacttcatcagagaagggagcagttagtagagcgcactcggagagaggctcagcttgctgccctgcagtatgaggaggagaaaataaggaccaagcagatccagagagatgctgtcctggactttgtcaaacaaaaagcatcacaaagtccacaaaaacagcacccgctcctagatggcgtagatggtgagtgccccttcccatccagaaggtctcagcacactgatgatagtgccttgtgcatgtcgctgtcagggttgaatcaagtgggctgtgctgctaccctgcctcattcttctgccttcacgcctcttaagagtgatgacagacctaatgctctattaagttcacctgcaacagaaacagttcatcattcccctgcatattcttttcctgctgctatccagagaaatcagcctcagcgccctgaaagcttccttttccgagcaggtgtcagggcagaaaccaacaaaggtcatgcttcaccccttcctccatctgctgcacctaccactgattctacagattccataacaggacagaattcaagacagagagaagaagagctggaattaatagaccaactgcgtaaacatattgagtaccggttgaaagtgtctctaccttgtgatctcggagcagctctaactgacggtgttgttctttgccatttggccaatcatgtgcgacctcgatctgtcccaagcattcatgttccctcaccagctgtacctaaattaacaatggcgaaatgcaggcgaaatgtggaaaatttcctagaagcttgcagaaaaattggtgtacctcaggagcaattatgtttgcctctccacattttagaagagaaaggtttgagccaggttgcagtgacggtccaggctctcctggaacttgccccacccaagcaacagcagcaccagttatctgctgtttgaggatccccaggacggtgggcactggcctggccaaaacaaggaacaggacaccgtgattgctgctgccagctgtctgcttaaacaaagctcttgtgtgttctcagaagggaccgttcccatgattcctaacaggaatattttgcttcatttctccattttaggggaggttatttccatttccattgaatttttttacgaagacaccattggttttctcagatgaaacttctcttactgaaaacccagcacctaacttggctgtgttttcctggagagcaggcgtgtttcacgtgccagaaagcacatcttctgtgttaggcacaagcatgctgtgccattgtttttacctggtctcaagacaactggtctgctggtttctaaacttggttgttcattagactctcctggagtatttgttaaaatacagattcacattcagtagagctggggtaaggcctaggaatctgcattttcaacaaccattgcacatgtttttgtttttgttggagaaggagttctgctcagtcgcccaggctagagtgcagtggcataatctcagctcactgcaacctccgcctcccgggctcaagcgattctcctgcctcagcctcccgagtagctgggacaacaggtgcc

SEQ ID NO: 148387 - DNA, 2034 bp, Homo sapiens
  Payload ID: 9385
  Gene Symbol: LRCH3
  Gene Name: leucine-rich repeats and calponin homology (CH) domain containing 3
  ENST ID: ENST00000441090
  CDS Start-End: 16-1887
gttgtcggctgggaaatggcggccgcgggcttggtcgctgtggcagcggctgccgagtactctggcacggtagcgtcgggaggtaacctccctggtgttcactgcggcccaagctccggggcaggccctggttttggcccgggctcgtggagccgctctctcgatcgagccctggaggaggcggcggtcactggggtgctgagcctgagcggccggaaactgagggagtttccccggggagcggccaaccacgacctgacggacaccacccgggcggagctggcggagttgcctttgatacggttagacttctcatgcaataaaattaccacaatccctgtttgttatcggaacctcaggcacctacagacgatcaccctagataacaatccactacaatcacctcctgcacagatatgtataaaaggcaaagtccacatatttaaatacctgaacatacaagcttgtaagattgctccagatctgccggattatgataggagaccgttgggttttggctcctgccatgaagaactgtactcaagtcgcccttatggagcccttgattcaggcttcaatagtgtggacagtggtgataagagatggtcagggaatgaacctacagatgaattttcagatctgcctcttcgagtagcagagattactaaagaacaaagactacgaagagaaagccagtaccaagagaaccgcggcagtttggtagtaacaaacggcggagtggaacatgatctggatcagattgactacatagacagctgcaccgcagaggaagaggaggccgagggttcaccagtaaagccagtagccattagggagtttcaaaaaacagaagatatgagaagatatttacatcaaaacagggttccagctgagccatcttccctcctgtcactatcagcaagtcacaatcagctgtcacacacagacctggaacttcatcagagaagggagcagttagtagagcgcactcggagagaggctcagcttgctgccctgcagtatgaggaggagaaaataaggaccaagcagatccagagagatgctgtcctggactttgtcaaacaaaaagcatcacaaagtccacaaaaacagcacccgctcctagatggcgtagatggtgagtgccccttcccatccagaaggtctcagcacactgatgatagtgccttgtgcatgtcgctgtcagggttgaatcaagtgggctgtgctgctaccctgcctcattcttctgccttcacgcctcttaagagtgatgacagacctaatgctctattaagttcacctgcaacagaaacagttcatcattcccctgcatattcttttcctgctgctatccagagaaatcagcctcagcgccctgaaagcttccttttccgagcaggtgtcagggcagaaaccaacaaaggtcatgcttcaccccttcctccatctgctgcacctaccactgattctacagattccataacaggacagaattcaagacagagagaagaagagctggaattaatagaccaactgcgtaaacatattgagtaccggttgaaagtgtctctaccttgtgatctcggagcagctctaactgacggtgttgttctttgccatttggccaatcatgtgcgacctcgatctgtcccaagcattcatgttccctcaccagctgtacctaaattaacaatggcgaaatgcaggcgaaatgtggaaaatttcctagaagcttgcagaaaaattggtgtacctcaggagcaattatgtttgcctctccacattttagaagagaaaggtttgagccaggttgcagtgacggtccaggctctcctggaacttgccccacccaagcaacagcagcaccagttatctgctgtttgaggatccccaggacggtgggcactggcctggccaaaacaaggaacaggacaccgtgattgctgctgccagctgtctgcttaaacaaagctcttgtgtgttctcagaagggaccgttcccatgattcctaacaggaatattttgcttca

SEQ ID NO: 148388 - DNA, 3205 bp, Homo sapiens
  Payload ID: 9385
  Gene Symbol: LRCH3
  Gene Name: leucine-rich repeats and calponin homology (CH) domain containing 3
  ENST ID: ENST00000428136
  CDS Start-End: 1-544
caaaggtcatgcttcaccccttcctccatctgctgcacctaccactgattctacagattccataacaggacagaattcaagacagagagaagaagagctggaattaatagaccaactgcgtaaacatattgagtaccggttgaaagtgtctctaccttgtgatctcggagcagctctaactgacggtgttgttctttgccatttggccaatcatgtgcgacctcgatctgtcccaagcattcatgttccctcaccagctgtacctaaattaacaatggcgaaatgcaggcgaaatgtggaaaatttcctagaagcttgcagaaaaattggtgtacctcaggacaatctttgttccccttccgacatccttcagctaaacctcagcgttaaaagaactgttgaaacgctcctttctcttggggcacactcagaagaatccagttttgtctgtctctctctgcagcttctgggttttgtggcattttactgtactgtgatgttaactctctgtgtgctttattactggctcttccccgctcgctgaaagattgcactccggtgactttctgcctcattcctgtgcttggtaaaggaggtttgtttctcatccagaattatttacataagtgctttttctccctgctggccctcaaagagctaacccataaaggaggtaaatcctttctttatatttgcagatgagcaccccctcacattagtaaacatttacgattgctaacaaagagtaaaagaccagcattttttctcctggtcatccgtccattctcctggcctgtggccttgtttctcttaccataaatgctgaagcatttttactaatacaattctgaacttgtacttcgaatatgacatgtagagctttatttccaagtcacacaatacaactcccatctggccatttttccgtgcctcagcacaagtgttgaattgtggagtgactgaacctttgcagcagctgctcacgaggagaaccgtcgtgccttttctggttttggccgcacccggttacttagatttctgctttgaactgtgtcctgagatcctgaatccccgctttgtcggtaggcacaggtccatataagcatttgcggtctggacgtttcaaaggtattggccataattttaataattttagtttggtcagaatgttcagtttgaagatcacccacattccctagactgctcttctgagcccagtctatacgctgtatgtgctgcacacgagcagatgggctggagctggcctctcagggtgggcaccttccagattgtgtttgttatgtgtgactgaggttcactcccagcattctgtttaaatttggaatttatgtgatttctaacatattcaaaccttcttaatagtgaaacagtagcaggagaagtattagggcagcagtccctgttctgtgctcaaggcagtgaatattgtctagctctttcagaatgcgtagcacttagctgctagacgttaatgctggaaactataattgcggttagattctagtttcataagtggtgtttctgaatattcaggaaccttctgaactctgttaacaaaattgggataaaggatgaactcaagtgtgaagagagattgtgaggagcataatatccggtttagaattcagcctgagggaggagcataacatctgggtgtagaattcagcctgaggggctcactggtttggttttcttccatatgaaatgggacagctattttcacaggtcaaaagactgttcactattaatgctgaaacactcaacactgtgatgatgaaaacttcagttttctgtgtcagtaggtgcctttcagactttggggaattgggttggttatatttttaagatgtctcagagttgaaacacctgttaaaaaacacacacaggctctcatgtggtttaggggttgtaattgtacattctcttgagaacacacggcactccctctagtccagctgggaggtgagggtgccccagaaagcacaggcttctgagtgtgaacaccggccgcgcaggtcctagggcgctgctgagaggaagagaccagggaatcagccttggagaaagcacgtctcttccgacagcaaaacactgggcaggttcattttaagtatcatttatctagacttgcagttgcactcaaagtatttctacaaagttgctagtttttttagatcaaaagattacagttacctcattttatcaaaataagtattaaataaaaagtaagcacaagtaccaataactgcctcaaaaatacttgttatatattttattgtaactggttttataaaatttcctagtaatatcgtctcaatgaaaagcaaaacaaaaaacaaaaaacaaaaaaacccaactagttgttttaacaaacatatataatctttttttagtggcaccagaattctatattctgttctttgtaagagcaatctcttttctttttggaatatttaatcttaacagaaagctagtgataaatgctgttcttaagatttgcctttttctctcacaagaaagggttaacctaacaaattaacgatgcacacattaaggaagcgtttaacttcctcaagcaaacagtgtcaacacttctcacatgttggtaatcaacatgttcctgcctaagcttacatagtagttccctggaataattcaggctgttaaataccaggatattaaatcctttacattttcaaatactgcttttaattctgtaattcagatttttaattcagacaggcccttccatgaattattcaaattagggggaagtttctcaagagctcaggatacactgagtttcttgccctatctggtctggaaaccctggttttcacagtcaggattataatgcagatagcgtagaactcatgcaggctgagttatgttttcaaactatctttcattcttgtggtagggaacttaccctcaagtgtagtatcttttactcttgagccatctggtagcgtggaattgtttttctatttttcacctgcctattttatagacctgtattgaccttttattcatcagggataaaggatgttgctttcaccctgcggtattgttttccctctgttgtatgtatagatatatgctacttgtcaattttccaattttgaaaatgatctgtatgtacttttagttgtattaataaagtgacagtgagtgtcagacacca

SEQ ID NO: 148389 - DNA, 2299 bp, Homo sapiens
  Payload ID: 9385
  Gene Symbol: LRCH3
  Gene Name: leucine-rich repeats and calponin homology (CH) domain containing 3
  Uniprot ID: Q96II8
  ENST ID: ENST00000414675
  CDS Start-End: 16-2193
gttgtcggctgggaaatggcggccgcgggcttggtcgctgtggcagcggctgccgagtactctggcacggtagcgtcgggaggtaacctccctggtgttcactgcggcccaagctccggggcaggccctggttttggcccgggctcgtggagccgctctctcgatcgagccctggaggaggcggcggtcactggggtgctgagcctgagcggccggaaactgagggagtttccccggggagcggccaaccacgacctgacggacaccacccgggcggacctgtcgcgaaatcgcctttcagaaattcctatagaagcatgtcactttgtttctctggaaaatctcaacttgtaccaaaattgtattcgttatattccagaggcaattttaaacctacaagctctaacattcttaaatattagtcggaaccaactgtcaacattgccggtacacttgtgtaatttgccattgaaagtcttaattgctagtaataacaaattggtgtcacttccagaagaaattggacaccttagacatttgatggaacttgatgtgagctgcaatgaaattcaaactataccttcccaaattggtaacctggaggccttgagagaccttaatgtaagaagaaatcacctagtacatttgcctgaagagctggcggagttgcctttgatacggttagacttctcatgcaataaaattaccacaatccctgtttgttatcggaacctcaggcacctacagacgatcaccctagataacaatccactacaatcacctcctgcacagatatgtataaaaggcaaagtccacatatttaaatacctgaacatacaagcttgtaagattgctccagatctgccggattatgataggagaccgttgggttttggctcctgccatgaagaactgtactcaagtcgcccttatggagcccttgattcaggcttcaatagtgtggacagtggtgataagagatggtcagggaatgaacctacagatgaattttcagatctgcctcttcgagtagcagagattactaaagaacaaagactacgaagagaaagccagtaccaagagaaccgcggcagtttggtagtaacaaacggcggagtggaacatgatctggatcagattgactacatagacagctgcaccgcagaggaagaggaggccgagggttcaccagtaaagccagtagccattagggagtttcaaaaaacagaagatatgagaagatatttacatcaaaacagggttccagctgagccatcttccctcctgtcactatcagcaagtcacaatcagctgtcacacacagacctggaacttcatcagagaagggagcagttagtagagcgcactcggagagaggctcagcttgctgccctgcagtatgaggaggagaaaataaggaccaagcagatccagagagatgctgtcctggactttgtcaaacaaaaagcatcacaaagtccacaaaaacagcacccgctcctagatggcgtagatggtgagtgccccttcccatccagaaggtctcagcacactgatgatagtgccttgtgcatgagtgatgacagacctaatgctctattaagttcacctgcaacagaaacagttcatcattcccctgcatattcttttcctgctgctatccagagaaatcagcctcagcgccctgaaagcttccttttccgagcaggtgtcagggcagaaaccaacaaaggtcatgcttcaccccttcctccatctgctgcacctaccactgattctacagattccataacaggacagaattcaagacagagagaagaagagctggaattaatagaccaactgcgtaaacatattgagtaccggttgaaagtgtctctaccttgtgatctcggagcagctctaactgacggtgttgttctttgccatttggccaatcatgtgcgacctcgatctgtcccaagcattcatgttccctcaccagctgtacctaaattaacaatggcgaaatgcaggcgaaatgtggaaaatttcctagaagcttgcagaaaaattggtgtacctcaggagcaattatgtttgcctctccacattttagaagagaaaggtttgagccaggttgcagtgacggtccaggctctcctggaacttgccccacccaagcaacagcagcaccagttatctgctgtttgaggatccccaggacggtgggcactggcctggccaaaacaaggaacaggacaccgtgattgctgctgccagctgtctgcttaaacaaagctcttgtgtgttctcagaa

SEQ ID NO: 148390 - DNA, 681 bp, Homo sapiens
  Payload ID: 9385
  Gene Symbol: LRCH3
  Gene Name: leucine-rich repeats and calponin homology (CH) domain containing 3
  ENST ID: ENST00000452660
  CDS Start-End: 1-681
tatgaggaggagaaaataaggaccaagcagatccagagagatgctgtcctggactttgtcaaacaaaaagcatcacaaagtccacaaaaacagcacccgctcctagatggcgtagatggtgagtgccccttcccatccagaaggtctcagcacactgatgatagtgccttgtgcatgtcgctgtcagggttgaatcaagtgggctgtgctgctaccctgcctcattcttctgccttcacgcctcttaagagtgatgacagacctaatgctctattaagttcacctgcaacagaaacaggtcatgcttcaccccttcctccatctgctgcacctaccactgattctacagattccataacaggacagaattcaagacagagagaagaagagctggaattaatagaccaactgcgtaaacatattgagtaccggttgaaagtgtctctaccttgtgatctcggagcagctctaactgacggtgttgttctttgccatttggccaatcatgtgcgacctcgatctgtcccaagcattcatgttccctcaccagctgtacctaaattaacaatggcgaaatgcaggcgaaatgtggaaaatttcctagaagcttgcagaaaaattggtgtacctcaggacaatctttgttccccttccgacatccttcagctaaacctcagcgtt

SEQ ID NO: 148391 - DNA, 7394 bp, Homo sapiens
  Payload ID: 9385
  Gene Symbol: LRCH3
  Gene Name: leucine-rich repeats and calponin homology (CH) domain containing 3
  Uniprot ID: Q96II8
  ENST ID: ENST00000438796
  CDS Start-End: 45-2456
gcgcatgcgctgagctggcgggcccgagtgttgtcggctgggaaatggcggccgcgggcttggtcgctgtggcagcggctgccgagtactctggcacggtagcgtcgggaggtaacctccctggtgttcactgcggcccaagctccggggcaggccctggttttggcccgggctcgtggagccgctctctcgatcgagccctggaggaggcggcggtcactggggtgctgagcctgagcggccggaaactgagggagtttccccggggagcggccaaccacgacctgacggacaccacccgggcggacctgtcgcgaaatcgcctttcagaaattcctatagaagcatgtcactttgtttctctggaaaatctcaacttgtaccaaaattgtattcgttatattccagaggcaattttaaacctacaagctctaacattcttaaatattagtcggaaccaactgtcaacattgccggtacacttgtgtaatttgccattgaaagtcttaattgctagtaataacaaattggtgtcacttccagaagaaattggacaccttagacatttgatggaacttgatgtgagctgcaatgaaattcaaactataccttcccaaattggtaacctggaggccttgagagaccttaatgtaagaagaaatcacctagtacatttgcctgaagagctggcggagttgcctttgatacggttagacttctcatgcaataaaattaccacaatccctgtttgttatcggaacctcaggcacctacagacgatcaccctagataacaatccactacaatcacctcctgcacagatatgtataaaaggcaaagtccacatatttaaatacctgaacatacaagcttgtaagattgctccagatctgccggattatgataggagaccgttgggttttggctcctgccatgaagaactgtactcaagtcgcccttatggagcccttgattcaggcttcaatagtgtggacagtggtgataagagatggtcagggaatgaacctacagatgaattttcagatctgcctcttcgagtagcagagattactaaagaacaaagactacgaagagaaagccagtaccaagagaaccgcggcagtttggtagtaacaaacggcggagtggaacatgatctggatcagattgactacatagacagctgcaccgcagaggaagaggaggccgaggtgagacagcccaagggaccagacccagacagccttagttcacagtttatggcgtatattgaacagcggcgaatctctcatgagggttcaccagtaaagccagtagccattagggagtttcaaaaaacagaagatatgagaagatatttacatcaaaacagggttccagctgagccatcttccctcctgtcactatcagcaagtcacaatcagctgtcacacacagacctggaacttcatcagagaagggagcagttagtagagcgcactcggagagaggctcagcttgctgccctgcagtatgaggaggagaaaataaggaccaagcagatccagagagatgctgtcctggactttgtcaaacaaaaagcatcacaaagtccacaaaaacagcacccgctcctagatggcgtagatggtgagtgccccttcccatccagaaggtctcagcacactgatgatagtgccttgtgcatgtcgctgtcagggttgaatcaagtgggctgtgctgctaccctgcctcattcttctgccttcacgcctcttaagagtgatgacagacctaatgctctattaagttcacctgcaacagaaacagttcatcattcccctgcatattcttttcctgctgctatccagagaaatcagcctcagcgccctgaaagcttccttttccgagcaggtgtcagggcagaaaccaacaaaggtcatgcttcaccccttcctccatctgctgcacctaccactgattctacagattccataacaggacagaattcaagacagagagaagaagagctggaattaatagaccaactgcgtaaacatattgagtaccggttgaaagtgtctctaccttgtgatctcggagcagctctaactgacggtgttgttctttgccatttggccaatcatgtgcgacctcgatctgtcccaagcattcatgttccctcaccagctgtacctaaattaacaatggcgaaatgcaggcgaaatgtggaaaatttcctagaagcttgcagaaaaattggtgtacctcaggacaatctttgttccccttccgacatccttcagctaaacctcagcgttaaaagaactgttgaaacgctcctttctcttggggcacactcagaagaatccagttttgtctgtctctctctgcagcttctgggttttgtggcattttactgtactgtgatgttaactctctgtgtgctttattactggctcttccccgctcgctgaaagattgcactccggtgactttctgcctcattcctgtgcttggagcaattatgtttgcctctccacattttagaagagaaaggtttgagccaggttgcagtgacggtccaggctctcctggaacttgccccacccaagcaacagcagcaccagttatctgctgtttgaggatccccaggacggtgggcactggcctggccaaaacaaggaacaggacaccgtgattgctgctgccagctgtctgcttaaacaaagctcttgtgtgttctcagaagggaccgttcccatgattcctaacaggaatattttgcttcatttctccattttaggggaggttatttccatttccattgaatttttttacgaagacaccattggttttctcagatgaaacttctcttactgaaaacccagcacctaacttggctgtgttttcctggagagcaggcgtgtttcacgtgccagaaagcacatcttctgtgttaggcacaagcatgctgtgccattgtttttacctggtctcaagacaactggtctgctggtttctaaacttggttgttcattagactctcctggagtatttgttaaaatacagattcacattcagtagagctggggtaaggcctaggaatctgcattttcaacaaccattgcacatgtttttgtttttgttggagaaggagttctgctcagtcgcccaggctagagtgcagtggcataatctcagctcactgcaacctccgcctcccgggctcaagcgattctcctgcctcagcctcccgagtagctgggacaacaggtgcccgccaccatgcctggctaattttcttgtatttttagtagagatgggattttgtcatgttggccaggctggtctcaaactcctgacttcaagtgatccacctgcctcggcctcccaaaatgctgggattacaggcgtgagccactgtgcccggcctcccagagtgctgggatgacaggcgtgagcccccgcgcccggcctccgagagtgctgggattacaggcgtgagccactgtgcccggcctctgagggtgctgggattacaggcgtgagccactgcgcccggcgcccggcccattgcacgtgtttttcatgtagtggaaccactgttcaaagctagatatttgtatgtttgcgggggagggtaatggccccctgcatttttcacccacatttaaaatcaaaagctatattatgaggagttggactgttctgtcaaaggcaaaacaaaaataatatagaaggcctaggttttgcatagtcttcttttttttaagagttggggtcttgccgtattgcccaggctggtctgaaactcctgggctcaactgatcctcccgcctcagcctcccaaagtgctgggattactggagtgagccatcgggcctggcccagattttgcatagtaaaacagtgaaacagatagagttgtatttaaggtcagtattctaggcctcccttcaactgcagtcataccatcatagaagatagttctatgtcatcctgttatctggacattataataaacaacaagccctctatacacaggttccaaaccccgttatctagacattatcaacaacaagccctctctctatacagagtttccaaattctgaagctgatagcgcacttggtctcactgagcctccctccccgccctcctgctgctcctcagacatctgggcctgcagacacattgcagttacagcacatacacttctagctcggaaaagcctagtttcttgtatttctttcaggtaactgccagtttctgtggctgaatttaagcacttacagcatcttcctagctgggtgtggtggctcacacctgtaatctcagcactttgggaggctgaggcgggcagatcacctgaagttgggagtttgagaccagcctgaccaacatggagaaaccccgtctctactaaaaatacaaaattagctgggcgtggtggtgcatgcctgtaatcccagctactcgggaggctgaggcaggagaattgcttgaacccaggaggcggaggttgtggtgagccaagatcgtgccattgcaccccagcctgggcaacaaaagcgaaattccatctcaaaaaaagaaaacgcgccccatctcgctccaccacaagcgcctttatatactcaatgatgggtggaggaaaagggcccaagggctcacaccgcacaggagcctttactcaagtttcagctagttttccttcccctgcattttgaactccttttagttgttggtgatatcctttggtgttcactgcctttgtaaaacaagtaaataaagtaagcggaagatatctcttttgtttctgtagttgttaactgttctggattttctttacaatgcatccatttgggcataatgttatccctctttttatcaggtaaatgtagcatctaaaagtagctttggatcaaatcatgttgaatacctggtcaaagtaatgttttcttccttgttcttgcagagaaacaaattcatcagaacattaccacttgaccaggtttaaaattgtataacaggctgggcatggtggctcatgcctataatcccagcactttgggaggccgaggcaagaggatcacttgagcccaggagtttgagagcagcctgggcaacatagcaagaccctgtctcccaaaaattaaaaaaaaaaaaaaaaaaccaggtgtggtggcacctgcctgtactcccagctactcaggaggctggggtgggaggatcacttgagcctgggaggttgaggctacagtgagccatggctgcaccactgcactccagcctgggcaacagagtgagaccccatctctaaaaataaattgtacaacatctaacttcaatgcccaatcttatagaacaaaagtaaaatgtctttatgtaagaccccattatatttacagttcccaacagacccaccaactcttatatacccttatataacttgtttagaatttagccatgtgcatttttaaactgtgtttgtcaacattaagcctcagtacagtctccaaattatatgccaccagaaatgaaattcagcaaaggacaggattgtttttaacatacgcaagccagcctggccaacatggtgaaaccttgtctctactaaaaatacaaaaattagctgggcgtggtggtgggcacctgtaatcccagctacttgggtggctgaggcacaagaatcgcttcaacctggaagccgaaggttgcagtgggctgagattgtgccactgcactccagcctgggcaacagagcgagactctgtctcaaaaaaaaaaaaaaaaaaaaacccaccaaaccaaaaatatactatgcaaggaataattctagaagacattacataatgcaatacttgcaacatttgcaactaattttcccatagggataaatggaaatttcaacttatttcaaattttgcacatattatgaaaccttattaatgtatttttatcaaactaaatcagatttgtatttgaattgttaggaaaaaccatgtgcagttttggctgataattgaaggaaaaatatcaaatgctttgaattttttttctcttttttcaaaccctctgcagaggtaggaaggtatgaatttcttttttatgtcaagatgcaaaaacaaatcatgatgcttttgttgggagaatttttgtattcagtattttgtatgtacctttttttttttaaattggaaagcacaattcggtttaacatttagctttgcttgactccagtgtaagatgaagatgaccttgtcacagctcccctgacctgaagcagagcccttcccatcactgacagtgttgggggttgagagccccccagcagagcccttcccatcactgacagtgtgtcggcagctgagagctcccccagcagagcccttcccatcactgaacagtgttggcggctgagagccccccagcagagcccttcccatcactgacagtgttgggggctgagagccccccagcagagcccttcccatcactgaacagtgttggcggctgagagccccccagcagagcccttcccatcactgacagtgttgggggctgagagcccccctagcagagcccttcccatcactgacagtgtctggggctgagagccccccctagcagagcccttcccatcactgacagtgttgggggctgagagccccccagcagagcccttcccatcactgacagtgtctggggctgagagccccccagcagagcccttcccatcactgacagtgtctggggctgagagccccccctagcagagcccttcccatcactgacagtgtcgggttgagagccacccccagcagagcccttgccacgtacagagattttctgtcagcagtttcccagtatttcagactcataatctgtgtttagcactccagtgttctcttgtaatagccaggtctggaaacgacccatggaaagaggggcctttgtattctgctagaacacagagcatagtagtagatcacttttctgaagagctttttaaaatacagctaatcaaggagtttgcgatttctcttactttctacagctcagcagtgactaatgatgtgtgactatgcgaatgagtttgatgaattcgtaaaaactaagcgcttaaatggttatagaaatgaaaacatggatatttagaagcctttctatatacacagtgcagttgagatggtttacagcaaatttcgttttatttctgaaaatgttgtaaacatgtaattagtgaaagattttgtaaaacattgtcctgtatttttgtctgtaaatatattgcataagttctaagtataaatatgtcagtatcatgtatgttattttaaattgcctgtacgccactttacacattgacattcaaataaaagccaacacttcagtggcgtgtaataaaa

SEQ ID NO: 148392 - DNA, 977 bp, Homo sapiens
  Payload ID: 9385
  Gene Symbol: LRCH3
  Gene Name: leucine-rich repeats and calponin homology (CH) domain containing 3
  ENST ID: ENST00000433298
  CDS Start-End: 1-645
gctgtcctggactttgtcaaacaaaaagcatcacaaagtccacaaaaacagcacccgctcctagatggcgtagatggtgagtgccccttcccatccagaaggtctcagcacactgatgatagtgccttgtgcatgagtgatgacagacctaatgctctattaagttcacctgcaacagaaacaggtcatgcttcaccccttcctccatctgctgcacctaccactgattctacagattccataacaggacagaattcaagacagagagaagaagagctggaattaatagaccaactgcgtaaacatattgagtaccggttgaaagtgtctctaccttgtgatctcggagcagctctaactgacggtgttgttctttgccatttggccaatcatgtgcgacctcgatctgtcccaagcattcatgttccctcaccagctgtacctaaattaacaatggcgaaatgcaggcgaaatgtggaaaatttcctagaagcttgcagaaaaattggtgtacctcaggagcaattatgtttgcctctccacattttagaagagaaaggtttgagccaggttgcagtgacggtccaggctctcctggaacttgccccacccaagcaacagcagcaccagttatctgctgtttgaggatccccaggacggtgggcactggcctggccaaaacaaggaacaggacaccgtgattgctgctgccagctgtctgcttaaacaaagctcttgtgtgttctcagaagggaccgttcccatgattcctaacaggaatattttgcttcatttctccattttaggggaggttatttccatttccattgaatttttttacgaagacaccattggttttctcagatgaaacttctcttactgaaaacccagcacctaacttggctgtgttttcctggagagcaggcgtgtttcacgtgccagaaagcacatcttctgtgttaggcacaagcatgctg

SEQ ID NO: 148393 - DNA, 611 bp, Homo sapiens
  Payload ID: 9385
  Gene Symbol: LRCH3
  Gene Name: leucine-rich repeats and calponin homology (CH) domain containing 3
  ENST ID: ENST00000443727
  CDS Start-End: 54-332
ggtccggccgcgcatgcgctgagctggcgggcccgagtgttgtcggctgggaaatggcggccgcgggcttggtcgctgtggcagcggctgccgagtactctggcacggtagcgtcgggaggtaacctccctggtgttcactgcggcccaagctccggggcaggccctggttttggcccgggctcgtggagccgctctctcgatcgagccctggaggaggcggcggtcactggggtgctgagcctgagcggccggaaactgagggagtttccccggggagcggccaaccacgacctgacggacaccacccgggcgggatgtgagctgcaatgaaattcaaactataccttcccaaattggtaacctggaggccttgagagaccttaatgtaagaagaaatcacctagtacatttgcctgaagagctggcggagttgcctttgatacggttagacttctcatgcaataaaattaccacaatccctgtttgttatcggaacctcaggcacctacagacgatcaccctagataacaatccactacaatcacctcctgcacagatatgtataaaaggcaaagtccacatatttaaatacctgaacatacaagcttg

SEQ ID NO: 148394 - DNA, 2552 bp, Homo sapiens
  Payload ID: 9386
  Gene Symbol: LRCH4
  Gene Name: leucine-rich repeats and calponin homology (CH) domain containing 4
  Uniprot ID: O75427
  ENST ID: ENST00000310300
  CDS Start-End: 54-2105
gaaggagggacggccggtcccgtcagtcaggcagcgggagccgccgggagcggatggcggcggccgtagcggctccactcgccgccgggggtgaggaggcggcagccacgacctccgtgcccgggtctccaggtctgccggggagacgcagtgcagagcgggccctagaggaggccgtggccaccgggaccctgaacctgtctaaccggcgcttgaagcacttcccccggggcgcggcccgtagctacgacctgtcagacatcacccaggctgacctgtcccggaaccggtttcccgaggtgcccgaggcggcgtgccagctggtgtccctggagggcctgagcctctaccacaattgcctgagatgcctgaacccagccttggggaatctcacagccctcacctacctcaacctcagccgaaaccagctgtcgctgctgccaccctacatctgccagctgcccctgagggtcctcatcgtcagcaacaacaagctgggagccctgccccctgacatcggcaccctgggaagcctgcgacagcttgacgtgagcagcaacgagctccaatccctgccctcggaactgtgtggcctctcttccctgcgggacctcaatgtccggaggaaccagctcagtacgctgcccgaagagctgggggacctccctctggtccgcctggatttctcctgtaaccgcgtctcccgaatcccagtctccttctgccgcctgaggcacctgcaggtcattctgctggacagcaaccctctgcagagtccacctgcccaggtctgcctgaaggggaaacttcacatcttcaagtatttgtccacagaggccgggcagcgtgggtcggccctgggggacctggccccttctcggcccccgagtttcagtccctgccctgcagaggatctatttccgggacatcggtacgatggtgggctggactcaggcttccacagcgttgatagtggcagcaagaggtggtctggaaatgagtcaacagatgaattttcagagctgtcattccggatctcagagctggcccgggagccccggggacccagagaacgcaaggaggatggctcagcggacggagaccctgtgcagattgacttcatcgacagccatgtccccggggaggatgaagagcgaggcactgtggaggagcagcgaccacccgaattaagccctggggcaggggacagggagagggcaccaagcagcaggcgggaggagccggcaggggaggagcggcggcgcccggacaccttgcagctgtggcaggagcgggaacggcggcagcagcagcagagcggggcgtggggggccccgaggaaggatagcctcttgaagccagggctcagggctgttgtgggaggggccgccgccgtgtccactcaagccatgcacaacggctcgcctaagtccagtgcctcccaagcaggggctgcagcggggcagggagcccccgcccctgcccctgcctcccaagagccccttcccatagctggaccagcgacagcacctgctccacggccacttggctccattcagagaccaaacagcttcctcttccgttcctcctctcagagtggctcaggcccttcctcaccagactctgtcctgagacctcggcggtacccccaggttccagatgagaaggacttaatgactcagctgcgccaggtccttgagtcccggctgcagcggcccctgcctgaggacctggccgaggctctggccagtggggtcatcctgtgccagctggccaaccagctacggccgcgctccgtgcccttcatccatgtgccctcccctgctgtgccaaaactcagtgccctcaaggctcggaagaatgtggagagttttctagaagcctgtcgaaaaatgggggtgcctgaggctgacctgtgctcgccctcggatctcctccagggcactgcccgggggctgcggaccgcgctggaggccgtgaagcgggtggggggcaaggccctaccgcccctctggcccccctctggtctgggcggcttcgtcgtcttctacgtggtcctcatgctgctgctctatgtcacctacactcggctcctgggttcctaggccccaaaatcggccctccctcacccctttcccttcctctctatttataaggtccctgctccacccgaccccacctgcggtgccttcagccccaaccaaagacactagtgcacccccttcacagacactgacctcagaggccccactctggtgcccccagaccctgggcccccagcctctggcctccctccagtagccccacgagtccccacctctcagtgctgacggtgccttcatgtccccgccggccctgcccctgccctctgtaccccgtgaggggtggcaggagctggagtctcccccttcctcctgtgccctccccttccccccccaacagctgctatgggggggctaaattatctctattttgtagagaggatctatatttgtaggggttcggggcccaggccgggtccctatctctgtgtataaactgtacagaccgtg

SEQ ID NO: 148395 - DNA, 774 bp, Homo sapiens
  Payload ID: 9386
  Gene Symbol: LRCH4
  Gene Name: leucine-rich repeats and calponin homology (CH) domain containing 4
  ENST ID: ENST00000485554
  CDS Start-End: 1-533
ctgcccctgcctcccaagagccccttcccatagctggaccagcgacagcacctgctccacggccacttggctccattcagagaccaaacagcttcctcttccgttcctcctctcagagtggctcaggcccttcctcaccagactctgtcctgagacctcggcggtacccccaggttccagatgagaaggacttaatgactcagctgcgccaggtccttgagtcccggctgcagcggcccctgcctgaggacctggccgaggctctggccagtggggtcatcctgtgccagctggccaaccagctacggccgcgctccgtgcccttcatccatgtgccctcccctgctgtgccaaaactcagtgccctcaaggctcggaagaatgtggagagttttctagaagcctgtcgaaaaatgggggtgcctgaggagtcactgtgccagccccaccacatcctggaagaggagggggccccgggaaggggcctcccctacatcgctgctgtcgtccacgccctgctggaccggccttaggggtgaaggtgggggcacagggcccaccccgcccgggaccccgggagcagaagacgcgcctgggctccgcgctctcagagaagcacgtggtgagggtggcctgggcctgggcacccttggcctgccggcctggctgcctctggggtcgagggtctgggtggaaggaccgcgggtgtcgcaggtgtcgtgtcagccgcaataaacagaagccagaagccctctgggtggccctcaggtgtaa

SEQ ID NO: 148396 - DNA, 2014 bp, Homo sapiens
  Payload ID: 9386
  Gene Symbol: LRCH4
  Gene Name: leucine-rich repeats and calponin homology (CH) domain containing 4
  ENST ID: ENST00000497245
  CDS Start-End: 1275-1970
aaatcttatctcctagctgggagtgctggccagctagagactgtccttccacgcctccacccgcaggatctgtccaaccatgcaccctccaccctggtgtctgtggatggtagggggtgggggacttaactgtgacagacctgtcccggaaccggtttcccgaggtgcccgaggcggcgtgccagctggtgtccctggagggcctgagcctctaccacaattgcctgagatgcctgaacccagccttggggaatctcacagccctcacctacctcaacctcagccgaaaccagctgtcgctgctgccaccctacatctgccagctgcccctgagggtcctcatcgtcagcaacaacaagctgggagccctgccccctgacatcggcaccctgggaagcctgcgacagcttgacgtgagcagcaacgagctccaatccctgccctcggaactgtgtggcctctcttccctgcgggacctcaatgtccggaggaaccagctcagtacgctgcccgaagagctgggggacctccctctggtccgcctggatttctcctgtaaccgcgtctcccgaatcccagtctccttctgccgcctgaggcacctgcaggtcattctgctggacagcaaccctctgcagagtccacctgcccaggtctgcctgaaggggaaacttcacatcttcaagtatttgtccacagaggccgggcagcgtgggtcggccctgggggacctggccccttctcggcccccgagtttcagtccctgccctgcagaggatctatttccgggacatcggtacgatggtgggctggactcaggcttccacagcgttgatagtggcagcaagaggtggtctggaaatgagtcaacagatgaattttcagagctgtcattccggatctcagagctggcccgggagccccggggacccagagaacgcaaggaggatggctcagcggacggagaccctgtgcagattgacttcatcgacagccatgtccccggggaggatgaagagcgaggcactgtggaggagcagcgaccacccgaattaagccctggggcaggggacagggagagggcaccaagcagcaggcgggaggagccggcaggggaggagcggcggcgcccggacaccttgcagctgtggcaggagcgggaacggcggcagcagcagcagagcggggcgtggggggccccgaggaaggatagcctcttgaagccagggctcagggctgttgtgggaggggccgccgccgtgtccactcaagccatgcacaacggctcgcctaagtccagtgcctcccaagcaggggctgcagcggggcagggagcccccgcccctgcccctgcctcccaagagccccttcccatagctggaccagcgacagcacctgctccacggccacttggctccattcagagaccaaacagcttcctcttccgttcctcctctcagagtggctcaggcccttcctcaccagactctgtcctgagacctcggcggtacccccaggttccagatgagaaggacttaatgactcagctgcgccaggtccttgagtcccggctgcagcggcccctgcctgaggacctggccgaggctctggccagtggggtcatcctgtgccagctggccaaccagctacggccgcgctccgtgcccttcatccatgtgccctcccctgctgtgccaaaactcagtgccctcaaggctcggaagaatgtggagagttttctagaagcctgtcgaaaaatgggggtgcctgaggctgacctgtgctcgccctcggatctcctccagggcactgcccgggggctgcggaccgcgctggaggccgtgaagcgggtggggggcaaggccctaccgcccctctggcccccctctggtctgggcggcttcgtcgtcttctacgtggtcctcatgctgctgctctatgtcacctacactcggctcctgggttcctaggccccaaaatcggccctccctcacccctttcccttcctctctat

SEQ ID NO: 148397 - DNA, 2098 bp, Homo sapiens
  Payload ID: 9386
  Gene Symbol: LRCH4
  Gene Name: leucine-rich repeats and calponin homology (CH) domain containing 4
  ENST ID: ENST00000619071
  CDS Start-End: 1223-1651
ggggaatctcacagccctcacctacctcaacctcagccgaaaccagctgtcgctgctgccaccctacatctgccagctgcccctgagggtcctcatcgtcagcaacaacaagctgggagccctgccccctgacatcggcaccctgggaagcctgcgacagcttgacgtgagcagcaacgagctccaatccctgccctcggaactgtgtggcctctcttccctgcgggacctcaatgtccggaggaaccagctcagtacgctgcccgaagagctgggggacctccctctggtccgcctggatttctcctgtaaccgcgtctcccgaatcccagtctccttctgccgcctgaggcacctgcaggtcattctgctggacagcaaccctctgcagagtccacctgcccaggtctgcctgaaggggaaacttcacatcttcaagtatttgtccacagaggccgggcagcgtgggtcggccctgggggacctggccccttctcggcccccgagtttcagtccctgccctgcagaggatctatttccgggacatcggtacgatggtgggctggactcaggcttccacagcgttgatagtggcagcaagaggtggtctggaaatgagtcaacagatgaattttcagagctgtcattccggatctcagagctggcccgggagccccggggacccagagaacgcaaggaggatggctcagcggacggagaccctgtgcagattgacttcatcgacagccatgtccccggggaggatgaagagcgaggcactgtggaggagcagcgaccacccgaattaagccctggggcaggggacagggagagggcaccaagcagcaggcgggaggagccggcaggggaggagcggcggcgcccggacaccttgcagctgtggcaggagcgggaacggcggcagcagcagcagagcggggcgtggggggccccgaggaaggatagcggctcgcctaagtccagtgcctcccaagcaggggctgcagcggggcagggagcccccgcccctgcccctgcctcccaagagccccttcccatagctggaccagcgacagcacctgctccacggccacttggctccattcagagaccaaacagcttcctcttccgttcctcctctcagagtggctcaggcccttcctcaccagactctgtcctgagacctcggcggtacccccaggttccagatgagaaggacttaatgactcagctgcgccaggtccttgagtcccggctgcagcggcccctgcctgaggacctggccaggctctggccagtggtcatcctgtgccagctggccaaccagctacggccgcgctccgtgcccttcatccatgtgccctcccctgctgtgccaaaactcagtgccctcaaggctcggaagaatgtggagagttttctagaagcctgtcgaaaaatgggggtgcctgaggctgacctgtgctcgccctcggatctcctccagggcactgcccgggggctgcggaccgcgctggaggccgtgaagcgggtggggggcaaggccctaccgcccctctggcccccctctggtctgggcggcttcgtcgtcttctacgtggtcctcatgctgctgctctatgtcacctacactcggctcctgggttcctaggccccaaaatcggccctccctcacccctttcccttcctctctatttataaggtccctgctccacccgaccccacctgcggtgccttcagccccaaccaaagacactagtgcacccccttcacagacactgacctcagaggccccactctggtgcccccagaccctgggcccccagcctctggcctccctccagtagccccacgagtccccacctctcagtgctgacggtgccttcatgtccccgccggccctgcccctgccctctgtaccccgtgaggggtggcaggagctggagtctcccccttcctcctgtgccctccccttccccccccaacagctgctatgggggggctaaattatctctattttgtagagaggatctatatttgtaggggttcggggcccaggccgggtccctatctctgtgtataaactgtacagaccgtg

SEQ ID NO: 148398 - DNA, 2073 bp, Homo sapiens
  Payload ID: 9387
  Gene Symbol: LRRD1
  Gene Name: leucine-rich repeats and death domain containing 1
  Uniprot ID: A4D1F6
  ENST ID: ENST00000343318
  CDS Start-End: 556-906
ggagggcctcggagcaagacaatcccaccaagatggactcgggttgattaacgtgagtgaacctctgaggaccagaatccagactagtaattctccatcccggctgctcgttagatgcccggaccgacccccccagaccaattcaatcagaacattcggaggggcttgtaaaatctcccggggagattccggtacgaaagccaaagactcagacgcccgttctccacccgcctgcagcggccagcgcgggtccctcttagggaattgaatgcaggccccaggcctcctcctcgagtatcccagtgtgaccgatggccagctcacaaacgcgcagtgggtgcggccgcgccagggcgcagcggagcagagggcccggccgctttcggcctgggaaagaggagccacggcccggagaggcgtcagtgctgggctgcgcctgcggaggtcctcgcaattgctggactcaaccgcgcgcgccccctaccggtcctgcgaaggagccgcagccgccgcgggaggccacagctaacaagacttccaggagagctatctaatatgactcaacttaaagaacttgatatctcaaataatgcaatcagagagattccaagaaatataggagaattgagaaatttggttagtttacatgcatacaataatcaaataagttatcttccaccatctttgctatctttaaatgatctgcagcaactaaacctgagtggaaataatctgacagctctacctagtgctatctacaatattttttcactgaaggagataaattttgatgacaaccctttgctgagacctccagtggaaatctgtaaaggaaaacagttgtatactattgcacgctatctacagagggcagatgaaagagatggtctgcagcttcactcttgaagccagcaagaccaggaacccaccgggagaaaggaacaactccagacgcgccgccttaagagctgtaacactcactgcgaaggtctgcagcttcactcctgagccagcgagaccacgatcccaccagaaggaagaaactccgaacacatccgaacatcagaaggaacaaactccagaggcgccatcttaagagctgtaacactgaccgtgagggtcggcttcatacttgaagtcagtgagacgaagaacccaccaattccggacacaatttgacttaagccaggccattaacagtttcttttggatctttttgcagagctactatggaagatgcactctttctgcgggtaggttatgagtcttttagtcttggtatatcatgcacagtgtgtagtagtctgccgagagctggatgccaagagagagacagaaccttgtttatgttgtctgatcctcaatccccatacttctgcactttttacttttcacccacttaaggagtgtgacctgggtttccataactttgaatggaaagagacctaatacaagtggttaagaatattgtggagcccgggcagggtggctcatgcctgtaatcccagcactttgggaggctgagacgggcagatcacgaggtcaggagatcgagaccatcctggctaacacagtgaaaccctgtctctactaaaaatacaaaaaaatagctgggcatggtggcgggcgcctgtagttccagctactcgggaggctgaggcaggagaatggcgtgaactcaggaggcagagcttgcagtgagctaaggtggcaccactgcactccatcctgggcaacagagcgagactctgtctcaaaaaaaaaaaaatattgtggacatagtgcagtttttgttaccttaaaaaataattttctatgtgagaccatattaaataaatttattttgcaggttaaaatttaaagtgtatattttgttgccattttggaagtgcaacataacattggtttaacaactatacagcctgtgtctctaatccttccctattttaaaacttcttgcagtagggatgagaacctgtgggtttatattggcttaatgatggttgttgttaatgttttccactggaggcaaggtacttccatagaacattaaagtgtgaaggaccttggaaa

SEQ ID NO: 148399 - DNA, 407 bp, Homo sapiens
  Payload ID: 9387
  Gene Symbol: LRRD1
  Gene Name: leucine-rich repeats and death domain containing 1
  ENST ID: ENST00000437357
  CDS Start-End: 231-407
cggcccggagaggcgtcagtgctgggctgcgcctgcggaggtcctcgcaattgctggactcaaccgcgcgcgccccctaccggtcctgcgaaggagccgcagccgccgcgggaggccacaggtgaagcgaagggtgtgtcttacttcagcagccctattcaaaggaaaaaacatgaaaattaaaatcaagttacaattttgtattggcataaaacatatcagcaaataagatgtctgaaaaggagggtatgtcagaagtgctagaggatactattagtcaatttaggaaagaatctagatcacagtcaatgaaggagcctggctttattaaagaaacatcaaatttgataaacgaagcttctgattacctggaagggaaatcttctaaccagatttatgaaacacat

SEQ ID NO: 148400 - DNA, 2830 bp, Homo sapiens
  Payload ID: 9387
  Gene Symbol: LRRD1
  Gene Name: leucine-rich repeats and death domain containing 1
  Uniprot ID: A4D1F6
  ENST ID: ENST00000458448
  CDS Start-End: 202-2784
gagccacggcccggagaggcgtcagtgctgggctgcgcctgcggaggtcctcgcaattgctggactcaaccgcgcgcgccccctaccggtcctgcgaaggagccgcagccgccgcgggaggccacagattcaaaggaaaaaacatgaaaattaaaatcaagttacaattttgtattggcataaaacatatcagcaaataagatgtctgaaaaggagggtatgtcagaagtgctagaggatactattagtcaatttaggaaagaatctagatcacagtcaatgaaggagcctggctttattaaagaaacatcaaatttgataaacgaagcttctgattacctggaagggaaatcttctaaccagatttatgaaacacatcctagacagaatacattagagtcaacatcttcctctggaaggaagtctaagagaaatgaagaacaaaagaaaaatcttcaattttctgaaacaagcactagaacaggaacttcacagagtttatcatcactaactgggaggactgcagaatatcaggctttggttaacttcctatctcatgaaacagtaggagaagttagtccacaagtctctgaagaaaatcagaaacaacttggcctaggggcagataactttacagttaaccttgaggccaagggtttacaggaatttcctaaggacattttaaaaatcaaatatgtaaaatatctatatttagacaagaatcaaatcaaaacatttcaaggggcagactcaggtgatctgttaggacttgaaattctatccctgcaagaaaatggattatcatcacttccatctgaaattcagttacttcataatttaaggatattaaatgtcagtcataaccacatatcacatatacctaaagaaatatctcagcttgggaatatcagacaactctttttttataacaattacattgaaaattttccttctgacttagaatgtcttggaaacttggaaattttaagtttgggtaaaaataagttaagacatataccagatactctgcctagtttaaaaaccttgagggttctcaatttggaatataatcagttaacaacatttcctaaagctctctgcttccttccaaagttaatttcactagaccttactggaaacctaataagcagtttgccaaaagaaattagagagcttaaaaatttagaaacacttttaatggatcacaataagcttacctttctggctgtagaaatttttcagttactcaaaataaaagaactccaactggccgacaataaattggaagttatttcacacaaaattgagaatttcagggaacttaggattcttatacttgataaaaatttattgaaaaatataccagagaaaatatcttgctgtgcaatgttggaatgccttagtcttagtgataataaattaacagaactccctaagtacatccataagcttaacaatttaagaaaactccatgtaaacagaaataatatggtaaaaataactgactgtatctcacatcttaataacatatgcagtctagaattttcaggaaacataatcacagatgttcccattgaaataaaaaactgccaaaaaataattaaaattgaattgagttataacaaaataatgtattttccattgggactgtgtgctttagattctctttattatttgagtgttaatggaaattatatttcagaaatacctgtggatatatctttcagtaaacaactgcttcatttagaattgagtgaaaacaaactcctcatattttctgagcacttttgttctcttattaatcttaaatacctggatcttggtaaaaaccaaataaagaaaattccagcatcaatttctaatatgatatcactccacgtacttattttatgctgtaataaatttgaaactttccctagagaattgtgtactttagaaaatttgcaagtacttgatctttcggaaaaccaattacagaaaatctcttcagacatctgtaatttaaaaggaatccagaaattaaacttctcaagcaatcaatttatacattttcctattgaactgtgccaacttcaatcactggaacagctgaatataagtcagataaaagggagaaagctaacaagacttccaggagagctatctaatatgactcaacttaaagaacttgatatctcaaataatgcaatcagagagattccaagaaatataggagaattgagaaatttggttagtttacatgcatacaataatcaaataagttatcttccaccatctttgctatctttaaatgatctgcagcaactaaacctgagtggaaataatctgacagctctacctagtgctatctacaatattttttcactgaaggagataaattttgatgacaaccctttgctgagacctccagtggaaatctgtaaaggaaaacagttgtatactattgcacgctatctacagagggcagatgaaagagatgagaaaattttagagaagatattcaagatagttgccaacaacatcactgaaaccaattttgaatttttatgtcaaaaactaaacctggcaaactcagaaactgatatgcctacaaagagcactgtttcattaagtgagagagcccaccaagcacttgttatatggaaaacacaaagtaacaagttatcactaactgctgctgctttaagagatcaactaattcgagcactaactatgataggagcatatgaaattatggacaaaataacagctttaaatctttttacgcgtgcaattaaattctaaccagtggatcaataataaaaactgaaaacttttgatgcacttataa

SEQ ID NO: 148401 - DNA, 2661 bp, Homo sapiens
  Payload ID: 9387
  Gene Symbol: LRRD1
  Gene Name: leucine-rich repeats and death domain containing 1
  Uniprot ID: A4D1F6
  ENST ID: ENST00000430130
  CDS Start-End: 75-2657
attcaaaggaaaaaacatgaaaattaaaatcaagttacaattttgtattggcataaaacatatcagcaaataagatgtctgaaaaggagggtatgtcagaagtgctagaggatactattagtcaatttaggaaagaatctagatcacagtcaatgaaggagcctggctttattaaagaaacatcaaatttgataaacgaagcttctgattacctggaagggaaatcttctaaccagatttatgaaacacatcctagacagaatacattagagtcaacatcttcctctggaaggaagtctaagagaaatgaagaacaaaagaaaaatcttcaattttctgaaacaagcactagaacaggaacttcacagagtttatcatcactaactgggaggactgcagaatatcaggctttggttaacttcctatctcatgaaacagtaggagaagttagtccacaagtctctgaagaaaatcagaaacaacttggcctaggggcagataactttacagttaaccttgaggccaagggtttacaggaatttcctaaggacattttaaaaatcaaatatgtaaaatatctatatttagacaagaatcaaatcaaaacatttcaaggggcagactcaggtgatctgttaggacttgaaattctatccctgcaagaaaatggattatcatcacttccatctgaaattcagttacttcataatttaaggatattaaatgtcagtcataaccacatatcacatatacctaaagaaatatctcagcttgggaatatcagacaactctttttttataacaattacattgaaaattttccttctgacttagaatgtcttggaaacttggaaattttaagtttgggtaaaaataagttaagacatataccagatactctgcctagtttaaaaaccttgagggttctcaatttggaatataatcagttaacaacatttcctaaagctctctgcttccttccaaagttaatttcactagaccttactggaaacctaataagcagtttgccaaaagaaattagagagcttaaaaatttagaaacacttttaatggatcacaataagcttacctttctggctgtagaaatttttcagttactcaaaataaaagaactccaactggccgacaataaattggaagttatttcacacaaaattgagaatttcagggaacttaggattcttatacttgataaaaatttattgaaaaatataccagagaaaatatcttgctgtgcaatgttggaatgccttagtcttagtgataataaattaacagaactccctaagtacatccataagcttaacaatttaagaaaactccatgtaaacagaaataatatggtaaaaataactgactgtatctcacatcttaataacatatgcagtctagaattttcaggaaacataatcacagatgttcccattgaaataaaaaactgccaaaaaataattaaaattgaattgagttataacaaaataatgtattttccattgggactgtgtgctttagattctctttattatttgagtgttaatggaaattatatttcagaaatacctgtggatatatctttcagtaaacaactgcttcatttagaattgagtgaaaacaaactcctcatattttctgagcacttttgttctcttattaatcttaaatacctggatcttggtaaaaaccaaataaagaaaattccagcatcaatttctaatatgatatcactccacgtacttattttatgctgtaataaatttgaaactttccctagagaattgtgtactttagaaaatttgcaagtacttgatctttcggaaaaccaattacagaaaatctcttcagacatctgtaatttaaaaggaatccagaaattaaacttctcaagcaatcaatttatacattttcctattgaactgtgccaacttcaatcactggaacagctgaatataagtcagataaaagggagaaagctaacaagacttccaggagagctatctaatatgactcaacttaaagaacttgatatctcaaataatgcaatcagagagattccaagaaatataggagaattgagaaatttggttagtttacatgcatacaataatcaaataagttatcttccaccatctttgctatctttaaatgatctgcagcaactaaacctgagtggaaataatctgacagctctacctagtgctatctacaatattttttcactgaaggagataaattttgatgacaaccctttgctgagacctccagtggaaatctgtaaaggaaaacagttgtatactattgcacgctatctacagagggcagatgaaagagatgagaaaattttagagaagatattcaagatagttgccaacaacatcactgaaaccaattttgaatttttatgtcaaaaactaaacctggcaaactcagaaactgatatgcctacaaagagcactgtttcattaagtgagagagcccaccaagcacttgttatatggaaaacacaaagtaacaagttatcactaactgctgctgctttaagagatcaactaattcgagcactaactatgataggagcatatgaaattatggacaaaataacagctttaaatctttttacgcgtgcaattaaattctaaccag

SEQ ID NO: 148402 - DNA, 3163 bp, Homo sapiens
  Payload ID: 9388
  Gene Symbol: LRGUK
  Gene Name: leucine-rich repeats and guanylate kinase domain containing
  Uniprot ID: Q96M69
  ENST ID: ENST00000285928
  CDS Start-End: 70-2547
acaggccccagaatcctccgcggttccccttgcctggggtcagtctcctaggcaaccccgctaaacaagatggcgacctccgagagggctctcctgaggaccagagctgcctctctcctgagaggcttgggcagatcccgaactggagcccgatcgttacagtttcgcgcagaaaaagagcgtcagccttgctggtcttttcccatggggcagaagacgaaaggcagctctaacatagcctcctcctacctgctccagcagctcatgcaccgctatcaggagctggactcggacggagatgaggaccagggcgagggcgaggcgggatccgaggagtcctcagagtccgaaatgctgaatttggaggaggaatttgatggggtcctgagagaggaggctgtggccaaagcactccatcacttggggcgctcaggctctgggactgagcaagtctacctcaatctaactttatcaggttgtaatttaattgatgttagcattctctgtggatatgttcatctacagaagttggatctttcagcgaataaaattgaagatttatcttgtgtgagttgtatgccttatctcctagaacttaatgcttctcaaaataatttgactacgttcttcaatttcaagccacccaaaaacctcaagaaggcggatttttcccacaaccaaatttctgaaatttgtgatttgtcagcgtatcatgctctcactaaactaattttggatggcaatgagatagaagaaatcagtggactagagatgtgcaacaacctaattcaccttagtttggccaacaataagatcacgacaattaatggcttaaacaagttaccaatcaaaatactttgtctgagcaataaccagattgagatgatcacaggtttggaggatctgaaagccctgcagaacctggatctgtcccacaatcagataagcagcctccaaggcttagagaatcatgacctcctggaagtgatcaacctggaggataataagattgctgagctgagagaaatagaatacattaaaaatttacccatccttcgagttctcaatcttctagaaaatccaattcaggaaaagtctgaatattggttcttcgtaatttttatgcttctgcgattaacagaattagatcagaagaagattaaagtggaagaaaaggtttcagcagtgaataaatatgatcctccccctgaagtggttgcagctcaagaccacctgacccatgttgtcaacagcgtgatgcagccgcagaggatctttgacagcactcttcccagcctggatgccccttatcccatgctgatactagctggtcctgaagcttgtgggaaacgagagcttgcccatcgcctctgcagacagtttagcacttacttcagatatggggcctgtcataccacaagaccaccttactttggagaaggggatcgagttgattatcattttatctctcaagacgtttttgatgaaatggtgaacatggggaaattcattctaacatttagttatggtaatcacaagtatggattaaatagggacaccgtagaaggtatcgcaagagatggtttggcaagctgtattcatatggaaatagaaggtgtaagaagtttgaaatattcctattttgagcctcgttatatcctggtggtgcccatgaacaaggaaaaatatgagggatatttgcggagaaaaggattattcagtcgtgcagaaattgaatttgctgtctccagagtggacctttatattaaaattaatcagaattttccgggatattttgatgaggtaatcaatgcagatgatctggatgttgcctaccaaaaactgagtcagctcattagagaataccttggattgactgaggaacctgccaagagtttggctacaactgcagatgttaagacatcccacctgaaacctgaagcgcatcctacaaagtatatttcttcgaatatgggtgatttcctgcattctacagacagaaactacctcattaaattttgggccaaactttcagccaaaaaaacaccagcggaaagagattctatacacagacagcacgaggcagcccggcaagctctaatgggaaggatacgccctgatcacacactcctatttcaaaggggtccagtaccagcacctctcaccagtggtctacactattatacaactttagaagaactctggaaaagttttgatctttgtgaagactattttaaacctccatttggaccatatcctgaaaagagtgggaaggattccttggtttccatgaaatgttcattgtttcggttctgtccgtggtcaaaagaattgcctttccagcctccggaggggagcatttcttcacacctaggatcaggagccagtgacagtgagaccgaagagacccggaaagcactacctatacaatcattttcacatgaaaaagagtctcaccaacacagacaacactcggtcccagtcatcagtcgcccaggttccaacgtcaaacccaccctccctccaatccctcagggccgcaggtagactagcacttgatgtctgatcctaacatggaaaacctgctctgctgatgtcgaattccttgccttacctggccatgggtccagctgtttctcactcaacccattacccacggaagaatgttctacctgccttaattctatcagccagtttctcttgtgattctttggctggtgtcttttagttttttaattaaaaaattgtttcttaaatgatttttaaagatgtgagtttttttaatgtgagttattcttagcttttaaaaatgtcatttcatttttttttctatagctataaataattttttccacctgctccctgctcggaaatatcagatggaaaaatctcccaagatctctgcaccgtgatatgcagagtggctttctgatatatccaactgggattgtgctcttaaaatttcaatatgtccatttacaacattcctgtatgctctagaggattgatttattttgctctgattatgaaaggattgcagagttccatttaacttgtcgccaacatgatatcgactgcatctctcaaaaggaattaatgtaattttggggggttcttgacttactttagcaacacgaaagaataaagagcaacagttgattct

SEQ ID NO: 148403 - DNA, 5273 bp, Homo sapiens
  Payload ID: 9389
  Gene Symbol: LRIG1
  Gene Name: leucine-rich repeats and immunoglobulin-like domains 1
  Uniprot ID: Q96JA1
  ENST ID: ENST00000273261
  CDS Start-End: 526-3807
gctctctggccgcggcgtggggacagcgaggcgcactggggcctcccagcgcggggccggccgcgccgtccagcccgaggtctacggctttgcgctccgagcccagaggaagatgcctgccggcaccgagctcgggctgcggggctgaacgcctgtcttccaggcgcagcggcagcactgccctcggccggtgtcggtagcggcactcggcgtgccccgggcggacgaagagcgcaggctgggtacaccttgcccgaatcggcggagttcgcagctagcgcgggcgggccggccggcccggatgggcgcggggtttgcggcccccgccgggtgctccggagcggcccgggcaccgggggcacgctgagtgccggagccgcggccgcagagagaacttggggcgggggccatgccccggtgcggagtctagagccgagcggagcgccccgcgggcccgcccgcgtctgcggccgttcgggtcctcacagtccccgcgcccggagttcgcagcgcgctccagacaagatggcgcggccggtccggggagggctcggggccccgcgccgctcgccttgccttctccttctctggctgcttttgcttcggctggagccggtgaccgccgcggccggcccgcgggcgccctgcgcggccgcctgcacttgcgctggggactcgctggactgcggtgggcgcgggctggctgcgttgcccggggacctgccctcctggacgcggagcctaaacctgagttacaacaaactctctgagattgaccctgctggttttgaggacttgccgaacctacaggaagtgtacctcaataataatgagttgacagcggtaccatccctgggcgctgcttcatcacatgtcgtctctctctttctgcagcacaacaagattcgcagcgtggaggggagccagctgaaggcctacctttccttagaagtgttagatctgagtttgaacaacatcacggaagtgcggaacacctgctttccacacggaccgcctataaaggagctcaacctggcaggcaatcggattggcaccctggagttgggagcatttgatggtctgtcacggtcgctgctaactcttcgcctgagcaaaaacaggatcacccagcttcctgtaagagcattcaagctacccaggctgacacaactggacctcaatcggaacaggattcggctgatagagggcctcaccttccaggggctcaacagcttggaggtgctgaagcttcagcgaaacaacatcagcaaactgacagatggggccttctggggactgtccaagatgcatgtgctgcacctggagtacaacagcctggtagaagtgaacagcggctcgctctacggcctcacggccctgcatcagctccacctcagcaacaattccatcgctcgcattcaccgcaagggctggagcttctgccagaagctgcatgagttggtcctgtccttcaacaacctgacacggctggacgaggagagcctggccgagctgagcagcctgagtgtcctgcgtctcagccacaattccatcagccacattgcggagggtgccttcaagggactcaggagcctgcgagtcttggatctggaccataacgagatttcgggcacaatagaggacacgagcggcgccttctcagggctcgacagcctcagcaagctgactctgtttggaaacaagatcaagtctgtggctaagagagcattctcggggctggaaggcctggagcacctgaaccttggagggaatgcgatcagatctgtccagtttgatgcctttgtgaagatgaagaatcttaaagagctccatatcagcagcgacagcttcctgtgtgactgccagctgaagtggctgcccccgtggctaattggcaggatgctgcaggcctttgtgacagccacctgtgcccacccagaatcactgaagggtcagagcattttctctgtgccaccagagagtttcgtgtgcgatgacttcctgaagccacagatcatcacccagccagaaaccaccatggctatggtgggcaaggacatccggtttacatgctcagcagccagcagcagcagctcccccatgacctttgcctggaagaaagacaatgaagtcctgaccaatgcagacatggagaactttgtccacgtccacgcgcaggacggggaagtgatggagtacaccaccatcctgcacctccgtcaggtcactttcgggcacgagggccgctaccaatgtgtcatcaccaaccactttggctccacctattcacataaggccaggctcaccgtgaatgtgttgccatcattcaccaaaacgccccacgacataaccatccggaccaccaccatggcccgcctcgaatgtgctgccacaggtcacccaaaccctcagattgcctggcagaaggatggaggcacggatttccccgctgcccgtgagcgacgcatgcatgtcatgccggatgacgacgtgtttttcatcactgatgtgaaaatagatgacgcaggggtttacagctgtactgctcagaactcagccggttctatttcagctaatgccaccctgactgtcctagagaccccatccttggtggtccccttggaagaccgtgtggtatctgtgggagaaacagtggccctccaatgcaaagccacggggaaccctccgccccgcatcacctggttcaagggggaccgcccgctgagcctcactgagcggcaccacttgacccctgacaaccagctcctggtggttcagaacgtggtggcagaggatgcgggccgatatacctgtgagatgtccaacaccctgggcacggagcgagctcacagccagctgagcgtcctgcccgcagcaggctgcaggaaggatgggaccacggtaggcatcttcaccattgctgtcgtgagcagcatcgtcctgacgtcactggtctgggtgtgcatcatctaccagaccaggaagaagagtgaagagtacagtgtcaccaacacagatgaaaccgtcgtgccaccagatgttccaagctacctctcttctcaggggaccctttctgaccgacaagaaaccgtggtcaggaccgagggtggccctcaggccaatgggcacattgagagcaatggtgtgtgtccaagagatgcaagccactttccagagcccgacactcacagcgttgcctgcaggcagccaaagctctgtgctgggtctgcgtatcacaaagagccgtggaaagcgatggagaaagctgaagggacacctgggccacataagatggaacacggtggccgggtcgtatgcagtgactgcaacaccgaagtggactgttactccaggggacaagccttccacccccagcctgtgtccagagacagcgcacagccaagtgcgccaaatggcccggagccgggtgggagtgaccaagagcattctccacatcaccagtgcagcaggactgccgctgggtcctgccccgagtgccaagggtcgctctaccccagtaaccacgatagaatgctgacggctgtgaagaaaaagccaatggcatctctagatgggaaaggggattcttcctggactttagcaaggttgtatcacccggactccacagagctacagcctgcatcttcattaacttcaggcagtccagagcgcgcggaagcccagtacttgcttgtttccaatggccacctccccaaagcatgtgacgccagtcccgagtccacgccactgacaggacagctccccgggaaacagagggtgccactgctgttggcaccaaaaagctaggttttgtctacctcagttcttgtcataccaatctctacgggaaagagaggtaggagaggctgcgaggaagcttgggttcaagcgtcactcatctgtacatagttgtaactcccatgtggagtatcagtcgctcacaggacttggatctgaagcacagtaaacgcaagaggggatttgtgtacaaaaggcaaaaaaagtatttgatatcattgtacataagagttttcagagatttcatatatatcttttacagaggctattttaatctttagtgcatggttaacagaaaaaaattatacaattttgacaatattatttttcgtatcaggttgctgtttaattttggagggggtggggaaatagttctggtgccttaacgcatggctggaatttatagaggctacaaccacatttgttcacaggagtttttggtgcggggtgggaaggatggaaggccttggatttatattgcacttcatagacccctaggctgctgtgcggtgggactccacatgcgccggaaggagcttcaggtgagcactgctcatgtgtggatgcccctgcaacaggcttccctgtctgtagagccaggggtgcaagtgccatccacacttgcagtgaatggcttttccttttaggtttaagtcctgtctgtctgtaaggcgtagaatctgtccgtctgtaaggcgtagaatgagggttgttaatccatcacaagcaaaaggtcagaacagttaaacactgcctttcctcctcctcttattttatgataaaagcaaatgtggccttctcagtatcattcgattgctatttgagacttttaaattaaggtaaaggctgctggtgttggtacctgtggatttttctatactgatgttttcgttttgccaatataatgagtattacattggccttgggggacagaaaggaggaagttctgacttttcagggctaccttatttctactaaggacccagagcaggcctgtccatgccattccttcgcacagatgaaactgagctgggactggaaaggacagcccttgacctgggttctgggtataatttgcacttttgagactggtagctaaccatcttatgagtgccaatgtgtcatttagtaaaacttaaatagaaacaaggtccttcaaatgttcctttggccaaaagctgaagggagttactgagaaaatagttaacaattactgtcaggtgtcatcactgttcaaaaggtaagcacatttagaattttgttcttgacagttaactgactaatcttacttccacaaaatatgtgaatttgctgcttctgagaggcaatgtgaaagagggagtattacttttatgtacaaagttatttatttatagaaattttggtacagtgtacattgaaaaccatgtaaaatattgaagtgtctaacaaatggcattgaagtgtctttaataaaggttcatttataaatgtca

SEQ ID NO: 148404 - DNA, 5283 bp, Homo sapiens
  Payload ID: 9389
  Gene Symbol: LRIG1
  Gene Name: leucine-rich repeats and immunoglobulin-like domains 1
  Uniprot ID: Q96JA1
  ENST ID: ENST00000383703
  CDS Start-End: 605-3817
gattgttcggctgcgaggtcggcgggactcttgctgcgcggaggagccgtgcggaacccgaggctgcgcgcgcgcgcgcgctctctggccgcggcgtggggacagcgaggcgcactggggcctcccagcgcggggccggccgcgccgtccagcccgaggtctacggctttgcgctccgagcccagaggaagatgcctgccggcaccgagctcgggctgcggggctgaacgcctgtcttccaggcgcagcggcagcactgccctcggccggtgtcggtagcggcactcggcgtgccccgggcggacgaagagcgcaggctgggtacaccttgcccgaatcggcggagttcgcagctagcgcgggcgggccggccggcccggatgggcgcggggtttgcggcccccgccgggtgctccggagcggcccgggcaccgggggcacgctgagtgccggagccgcggccgcagagagaacttggggcgggggccatgccccggtgcggagtctagagccgagcggagcgccccgcgggcccgcccgcgtctgcggccgttcgggtcctcacagtccccgcgcccggagttcgcagcgcgctccagacaagatggcgcggccggtccggggagggctcggggccccgcgccgctcgccttgccttctccttctctggctgcttttgcttcggctggagccggtgaccgccgcggccggcccgcgggcgccctgcgcggccgcctgcacttgcgctggggactcgctggactgcggtgggcgcgggctggctgcgttgcccggggacctgccctcctggacgcggagcctaaacctgagttacaacaaactctctgagattgaccctgctggttttgaggacttgccgaacctacaggaagtgtacctcaataataatgagttgacagcggtaccatccctgggcgctgcttcatcacatgtcgtctctctctttctgcagcacaacaagattcgcagcgtggaggggagccagctgaaggcctacctttccttagaagtgttagatctgagtttgaacaacatcacggaagtgcggaacacctgctttccacacggaccgcctataaaggagctcaacctggcaggcaatcggattggcaccctggagttgggagcatttgatggtctgtcacggtcgctgctaactcttcgcctgagcaaaaacaggatcacccagcttcctgtaagagcattcaagctacccaggctgacacaactggacctcaatcggaacaggattcggctgatagagggcctcaccttccaggggctcaacagcttggaggtgctgaagcttcagcgaaacaacatcagcaaactgacagatggggccttctggggactgtccaagatgcatgtgctgcacctggagtacaacagcctggtagaagtgaacagcggctcgctctacggcctcacggccctgcatcagctccacctcagcaacaattccatcgctcgcattcaccgcaagggctggagcttctgccagaagctgcatgagttggtcctgtccttcaacaacctgacacggctggacgaggagagcctggccgagctgagcagcctgagtgtcctgcgtctcagccacaattccatcagccacattgcggagggtgccttcaagggactcaggagcctgcgagtcttggatctggaccataacgagatttcgggcacaatagaggacacgagcggcgccttctcagggctcgacagcctcagcaagctccttttattagagccatcccagtctgctggctgcagctccccgtcccagccccatatgtctgctgggggaaggactctgtttggaaacaagatcaagtctgtggctaagagagcattctcggggctggaaggcctggagcacctgaaccttggagggaatgcgatcagatctgtccagtttgatgcctttgtgaagatgaagaatcttaaagagctccatatcagcagcgacagcttcctgtgtgactgccagctgaagtggctgcccccgtggctaattggcaggatgctgcaggcctttgtgacagccacctgtgcccacccagaatcactgaagggtcagagcattttctctgtgccaccagagagtttcgtgtgcgatgacttcctgaagccacagatcatcacccagccagaaaccaccatggctatggtgggcaaggacatccggtttacatgctcagcagccagcagcagcagctcccccatgacctttgcctggaagaaagacaatgaagtcctgaccaatgcagacatggagaactttgtccacgtccacgcgcaggacggggaagtgatggagtacaccaccatcctgcacctccgtcaggtcactttcgggcacgagggccgctaccaatgtgtcatcaccaaccactttggctccacctattcacataaggccaggctcaccgtgaatgtgttgccatcattcaccaaaacgccccacgacataaccatccggaccaccaccatggcccgcctcgaatgtgctgccacaggtcacccaaaccctcagattgcctggcagaaggatggaggcacggatttccccgctgcccagaccccatccttggtggtccccttggaagaccgtgtggtatctgtgggagaaacagtggccctccaatgcaaagccacggggaaccctccgccccgcatcacctggttcaagggggaccgcccgctgagcctcactgagcggcaccacttgacccctgacaaccagctcctggtggttcagaacgtggtggcagaggatgcgggccgatatacctgtgagatgtccaacaccctgggcacggagcgagctcacagccagctgagcgtcctgcccgcagcaggctgcaggaaggatgggaccacggtaggcatcttcaccattgctgtcgtgagcagcatcgtcctgacgtcactggtctgggtgtgcatcatctaccagaccaggaagaagagtgaagagtacagtgtcaccaacacagatgaaaccgtcgtgccaccagatgttccaagctacctctcttctcaggggaccctttctgaccgacaagaaaccgtggtcaggaccgagggtggccctcaggccaatgggcacattgagagcaatggtgtgtgtccaagagatgcaagccactttccagagcccgacactcacagcgttgcctgcaggcagccaaagctctgtgctgggtctgcgtatcacaaagagccgtggaaagcgatggagaaagctgaagggacacctgggccacataagatggaacacggtggccgggtcgtatgcagtgactgcaacaccgaagtggactgttactccaggggacaagccttccacccccagcctgtgtccagagacagcgcacagccaagtgcgccaaatggcccggagccgggtgggagtgaccaagagcattctccacatcaccagtgcagcaggactgccgctgggtcctgccccgagtgccaagggtcgctctaccccagtaaccacgatagaatgctgacggctgtgaagaaaaagccaatggcatctctagatgggaaaggggattcttcctggactttagcaaggttgtatcacccggactccacagagctacagcctgcatcttcattaacttcaggcagtccagagcgcgcggaagcccagtacttgcttgtttccaatggccacctccccaaagcatgtgacgccagtcccgagtccacgccactgacaggacagctccccgggaaacagagggtgccactgctgttggcaccaaaaagctaggttttgtctacctcagttcttgtcataccaatctctacgggaaagagaggtaggagaggctgcgaggaagcttgggttcaagcgtcactcatctgtacatagttgtaactcccatgtggagtatcagtcgctcacaggacttggatctgaagcacagtaaacgcaagaggggatttgtgtacaaaaggcaaaaaaagtatttgatatcattgtacataagagttttcagagatttcatatatatcttttacagaggctattttaatctttagtgcatggttaacagaaaaaaattatacaattttgacaatattatttttcgtatcaggttgctgtttaattttggagggggtggggaaatagttctggtgccttaacgcatggctggaatttatagaggctacaaccacatttgttcacaggagtttttggtgcggggtgggaaggatggaaggccttggatttatattgcacttcatagacccctaggctgctgtgcggtgggactccacatgcgccggaaggagcttcaggtgagcactgctcatgtgtggatgcccctgcaacaggcttccctgtctgtagagccaggggtgcaagtgccatccacacttgcagtgaatggcttttccttttaggtttaagtcctgtctgtctgtaaggcgtagaatctgtccgtctgtaaggcgtagaatgagggttgttaatccatcacaagcaaaaggtcagaacagttaaacactgcctttcctcctcctcttattttatgataaaagcaaatgtggccttctcagtatcattcgattgctatttgagacttttaaattaaggtaaaggctgctggtgttggtacctgtggatttttctatactgatgttttcgttttgccaatataatgagtattacattggccttgggggacagaaaggaggaagttctgacttttcagggctaccttatttctactaaggacccagagcaggcctgtccatgccattccttcgcacagatgaaactgagctgggactggaaaggacagcccttgacctgggttctgggtataatttgcacttttgagactggtagctaaccatcttatgagtgccaatgtgtcatttagtaaaacttaaatagaaacaaggtccttcaaatgttcctttggccaaaagctgaagggagttactgagaaaatagttaacaattactgtcaggtgtcatcactgttcaaaaggtaagcacatttagaattttgttcttgacagttaactgactaatcttacttccacaaaatatgtgaatttgctgcttctgagaggcaatgtgaaagagggagtattacttttatgtacaaagttatttatttatagaaattttggtacagtgtacattgaaaaccatgtaaaatattgaagtgtctaacaaatggcattgaagtgtctttaataaaggttcatttataaatgtca

SEQ ID NO: 148405 - DNA, 11555 bp, Homo sapiens
  Payload ID: 9390
  Gene Symbol: LRIG2
  Gene Name: leucine-rich repeats and immunoglobulin-like domains 2
  Uniprot ID: O94898
  ENST ID: ENST00000361127
  CDS Start-End: 199-3396
gtccgtcaggccgtgtgtcccaggccgtcgaccccgctgtcgcgctgcgtctgctccttgcatgcctttagatggtacagccttcagccggggcttcgggagacagtgcagccaccgagcatctctgctgagcttctccgccgatcctccttttctagcaggcagctcttctaggccacgtccaggtcgagggggaaaatggcgccggcgcccctaggcgtcccggaggagcagttgctggggtgtcgatctagagtgctttctcggttactcttcattgcccagaccgctctcctcctgttgcccgccgccggagcaggtctctgccccgcgccctgctcctgccgcattcctctcctggactgcagtcgcaggaaattgcccgcaccgagctggagggcgctgtcgggcttgctgccccccgacaccgctatcctggatttcagtcataatcggttgtctaactggaacatcagcttggaatcacaaacattacaggaagtgaaaatgaattacaatgaactaacagaaatcccgtattttggagaacctacatctaatattactctactttcattagtccataatataatcccagaaataaatgcacaggcactccagttttaccctgctctggagagtttagacctcagctcaaatataatatcagaaatcaagacatcttcatttcctcgcatgcagcttaaatacctgaatttaagtaataacagaataaccaccttggaggctggttgcttcgataatttatcaagttccttattagtggtaaagttaaaccgtaaccgaatgagcatgattccacctaagatcttcaagctgcctcacctccaattcttggaacttaaaagaaacagaattaaaattgtggaaggtcttacattccaagggcttgactccttaagatctttgaaaatgcagcggaatggaattagcaaacttaaggatggagcattttttggcttgaataacatggaagaactagaactggaacacaacaaccttacacgagtaaacaaggggtggttgtatggcttgcgaatgttacagcagctctatgtgagccagaatgctattgaaagaatcagccctgatgcatgggagttctgccaaagactatccgaacttgatttgtcctataaccagctgacccgcctggatgaatctgcctttgtgggtctgagcttattggagagattgaatttaggagacaacagagtcactcatattgctgatggtgtatttagatttctttccaatcttcagacattagacttaagaaacaatgaaatttcatgggccatagaagatgctagtgaagcctttgctggactcacaagtctcactaaactaatcttacaaggaaaccagattaagtcaattacaaagaaagcattcattggtcttgaatcccttgagcatctagatttgaacaataatgctataatgtctatccaagaaaatgctttttctcagactcatttaaaagaactgattctgaacacaagcagtttgctctgtgactgccatttgaagtggctacttcaatggttggttgataataactttcaacattctgtgaatgtaagctgtgcacaccctgaatggctagcagggcaaagcatcctgaatgtggatctgaaagattttgtctgtgatgattttctcaagccacagataaggacacatcctgaaaccataattgctctaagaggcatgaatgtgactctgacgtgcactgcagtgagcagcagtgattcacccatgtccactgtgtggcgcaaagacagtgaaatcctgtatgacgtggatactgagaattttgttcgttattggcagcaagctggagaagctctggaatatactagtatcttacatcttttcaatgtgaatttcacagatgaaggaaaatatcagtgtattgttactaatcactttggttctaattattctcagaaagccaaactgactgtaaatgagatgccatcttttctgaaaacgccaatggatctgactattcgcactggtgccatggccagattagaatgtgctgcagagggacaccctgcacctcagatttcctggcagaaagatggtggtactgactttcctgcggctcgagaaagacgcatgcacgtcatgcccgaggatgacgtcttctttattgccaatgtgaaaatagaagatatgggaatctatagctgcatggcacaaaatacagcaggaggtctctcagcaaatgcttccctaacagtgttagagacaccctcatttattagacccctggaggataagacagtaacacgaggtgaaactgcggtgttacagtgcatagctggagggagtcctgcccctcgtctcaactggactaaagatgatgggcctttgctggtgacagaacgacatttctttgctgcagccaatcagcttctcatcattgtagatgccgggctagaagatgctgggaaatatacctgcattatgtctaacacccttgggacagaacgtggccacatttacctaaatgtcatttcatcccccaattgtgactcttcccagagtagcattgggcatgaagatgatggctggaccacagttggcattgtcatcattgttgtggtctgctgtgttgttggcacttctttgatctgggtcattgttatttaccacatgagaaggaaaaatgaagactatagtatcacaaacacagaggagctcaatctgcctgcagacattcccagctacttgtcttcccaaggaacgctgtctgagccacaggaaggctacagcaactctgaggcaggcagtcatcagcaacttatgcctcctgccaatggatatatacacaaaggcactgacggtggcactggtacccgggtgatttgctcagattgttatgacaatgccaacatctactccaggacccgagaatactgtccatacacctatattgctgaggaggacgttcttgatcagacactgtccagcctcatggtccaaatgcctaaagagacatatttagtacatcctccccaggatactactgccctagagagcctgataccgtcagccaacagagagccatctgcctttcccaccaaccatgagaggataagtgagaagaaacttccctccacacagatgagcggtgaaacattgcagcggcccgtgtggaacataaacagagaactaggcctgcctcatcctcctttttcccagcagccagtccatgagtcaccacaacttcatcaaaatgagggcctggcagggagagagccagactgttctgcttcttccatgtcctgccacaggttacaggatcatgcttttgattttagtaggactcggaacattcaagatggtagtgagggcacatgaaactcacttcaggatgaaatctgggcagagacttattaattaattttgcatttactacctcagagctcagaagaaactccgaagtcagcatttgctttactctttctttatgattgcatctgaccgcaccaaggtgggccatgcgttgtttggtcttatacctgatgaagaaatggcaacagctgacagaaatgggtacagctcatcaaaaatgtgcagcaccggcagagggaagatacggggcaaatgtgcttcctgatgcttccatggggatgtgccctggtgtgcatctgcttgtcaggaagagtcacattgctgcttaacatgctggattgccctagtcttcagaatggtcctgagaaaacatcactacttcgatgttctactttgctttccaaggagcaaaaataactttggagccttctgggaagtgtgcctgggattcttcagtggtttcaggcagatagttgagactggggctttgatattcaaggtctttggcaagaatcccaggcttgaccaactggtaccaggtcaaagatttttgtattcttgtgaatttttttttttgtccctattgcccagggatgtcattgtaaatatatgtgcatttataaataatttttgtattcattgaccatatgtgttggctgcaatgtaaatatttttgatatgccaaaattatatgtaatatccagttataatattgacaagtagcttctcagatcacagattttaaataactcaatttagtgagatctaaaaattttatttaaagtataaaaactgtggctcacacctgtaatcccagcattttgagaggctaaggtgggaggattgcttgaggccaggaatttgagaccaggctgggcaacatggtgagaccctgtgtctgcaaaaaaataaattaaaaaaataggtggacattgtggcatgctgctgtagtcctagctacttgggaggctgaggtgggagggtcacttgagcccgggaaatcaaggctgcagtgagctgtgtgaagccactgcatcccagcctgggtgacagagtgaggccctggctcaaaagtaaaataaataaataaaaagttttaaaaacttacttgttaagaagtgtatctatagaggcagctacttagtgattgtatacacataaacacagtcttggtgtaattaaccgccttcttcatgcctagaggttcatacttctggtcatttgccatctgtttaaaagtgctaggtgatactccctttctaacataaaaagcttgttctttcagagcctggcagtcctgtcacagctgtatgcacctagaggaaaacttgtttggaaattcctttcatttcctccccctctccctccttccctctttttttttactgaaacagaaattgattgaggaaggttcagtcattccttcaggaaccaatgagttagatcgggttgttactttatgtataatgaacgcttcaaaaactggaggctgatttaaagattgcagaacttgagtcagactcataagcagtactgtgacatgaattggagccagaacagttgctgatatcagaaccatctctttcattctgtgactttgctcttgccatgttctgactggggtgagccgctaggatacaaatcactatcactgtccatatttgagtctgcaaatcttgtcattgtctgctttaatgctctttgagttgcaacaggtgtattatttaaatgagtatttgaaattctgtgaacaggaattcttttggtagtgaaataggtgctcacacctgcttgctcagaatgtgaaaatattatttctgagttctctttgttcactttctaaagtgactgttgtttggtgttggagatgttaactgggttctattaggtgtgctatatcttggcaaatattccccatgatgaactcttcctactatcacaatcaggactatgactggatttctcagtctcagtgccccagattcaccatttctgattgtgtctggagaacgttttcctggaaaggcattccatgttccaaaagctacaaaaacatgccactttgcaactatgggtcagttatttgctctctcaatgtctcatgttgctgagttctagaaaatctctgtctcatttaccaggggtcattcaaaagtctgagatgtatattatcatgaaatatttgtgaaatttctcaccatgaatttggagggaacctacttttatttctcgctctggttctccattggtctgggctcctgcttctcagtcttctctgacctctggtaagtggaactttcattaatacttctgtcgcactttgtacctgacctaggtggccttgcaaatgttgactcagattgtggattttccactttcctctgttttccctattttctcccctgggaaatcttgcagatgatgcatattcattttctgtattcagccttccattattaaggataaaattgatccctacattgaatctgaaattaccactatatggattactctggctcactgctgtccaagcttggttttctctttgcttacttcctgtcatattttcagtttgcccaaaagaggtaagccactttattacagacccattactagtgctagacgtcatccacctctgttttcacctgattcttgtggggaatcctctttaatttgttgtaaccttctcagcaactcttctgtacttcacctatagtgcctagcaaattgttatcactcataagcctgtaatcttcatcactcaggttatttgcaagtagaaagcttctggaaccatttgtccatccgacttctgcactgggccacatccatcttcttcattgtcagaatctgagttttctgtcttgaagaacagctggaaagttgtctggctgttatgacacagtattgaaataccagactgagtttcagttgtttctagttgtgttcactttgtgctttctctgaatgggaatatcttctttcagcaaagttcttcattgaccaggaaaccaaagattgcttcttttccaagtttgttttgtttttaatcttttaccaatgtgcagtatatcttaagaagggaagagtgctcttgggagtagaagaacatgcaaacattcttttttctttattattatttgagatggagtccctctcggtcacccaggctggagcgcagtggcatgatcttggcttactgcaacctccgcctcccaggttcaagcaattctcttgcctcagcctcccaagtagctgggattacaggcacaccaccatttccagctttttttttttttttttttttgatatttttagtagagatggggtttcaccatgttggccaggctggtcttgaactcctgacctcaggtgatctgcttgccttggcctcccaaagtgctgggattacaggcatgagccacttgcctggccccaaaattcttatactgtaaagccttgtagtggtccttatttttttttttttgagacggagtctcgctctgtcacccagactggagtgcagtggcacaatctcggctcactgcaacctctgcctcccgagttcaagcccttcttctgcctcagcctcccaagtacctgggattacaggcatgcaccaccatgcccggctaattttatttgtatttttagtagagacggggtttctccatgttggtcaggctggcctcgaactcctgacctcaggtgatccacccgcctcggcctcctagagtgctgggattacaggcgtgagccaccgagcccggccggtccttattttatacaagtgattaagccaaaaattttcttgaatttctgataccaaagagctttaggtaaataacttcacactctaatgcaatgtaattctttctttgtgctttcagatttccttacacttcctgtccagttctctcttctaaatccaatattactcactagataatttcagccacttaaataaaaatatctatttttaagtcctggttcaagggttccaaactcacataatttctcaactttttgccagaaagttgagcatttattcatacttattttcaatcctaagtgttctcccatgggcagcagcacttcttgagctgtttagtactgccacacctttttatgtctttactatgtcagcctctgatcattttcactttgaacttcctaaagatcacaatttcctatcccttcaatctgcgatccctcttcttcctttcttactagattatggtgtagtttgtactagactgactcattaagaccttgtacgcttcctgagtctgcttattactggctttgtaatcaagggtgagtctttttacttctctaggctagattttctcatttatgaaatgaggacatttttctagatgctgtaaagccctttccagctgtaacattctatgaatctgtaattccctcgaggagctaaggaggattatgctactttaataaaaagctgctttggtgacatttgttcgagtagaacaagagtgatgctgctcattctgacttgagccagatgtatttcctttatagcaggagtaatggtctaagaaatactcattaggagaaaaaaattctgcttctaaacagtattagtaaacaaagaatcttgactcagttgaaaaaccacccattgctctctagagcagaatgtctgaatgctggttttatagcacactagaatatcagaatgagttgacaggtataccacaactaatttgtaactagtttgtgactcacctttctaatgtattcgaagttatccctataattatattactctcgctcaaattctgatagatttcctgaatggaataggtggaattagggctaggctgccagagactgtgccaatgagcatcacccgtcatgtgtgagagagcagaagatagcctgtgagccagtgctctagaaaacatcatgtaggaggccggtcacggtggctcacgcctgtaatcccagcactttgggaggccgaggtggatggatcaagagatcgagaccatcctggccaacatggtgaaattccacctctactaaaaatacaaaaattagctgggcgtggtggtgcgcgcctgtagtcctagctgctcgggaggctaaggcaggagaatcacttgaacctgggaggcagaggttgcagtgagccgagattgcaccactgcactccagcctggtgacagagtgagactccgtctcaaaaaaaaaaaaaaaaaaacccgtgtaggagtactgcctctctgctctagcagtggtccttctactgacagtgctgtcagagtctggtctcctaaagagccaggtcattttccattgtgtcaactcagatggttgagatgtccttagatattcctagcttgcctaaataactagtcagcaatctatttaaatgtgaagagcctatctctggtctttaaataaacacacacacacacacacacccctaggaaaaggaattcctgaaacttttcattattgcatatgtttctgatcaagcaatatgttaaccctctaagtaggattagtgtcccatgagtatttcttccagcagaatcatgtctgcctaatgctaatcaggaatgttgcaaactgaaatgctcctttccccactgccccctaatgaccactttcaggaggaatacatacattctcttgatttgtttgtcccctttcaggctgattctccacttccacctggaagaaaagacagtattccttgaactccatgacctactggtacaggatctacacttatgccattggctttctgtcactccgcaacttgtacttttttttttgagacagggtttcaccctgtcagccaggctggagtgcaatggtgtgaacgtggctcactgtcgtcactgcagccttgatatctcaagcccaagtgatcctcccacctcaaccacctgagtagctgtgccaccacacccggctaatttttgtattttttgtagagatggagtttcaccttgttgcccaggctgatcacaaactcctgggctcaagcaatctccccacttaggcctcccaaagtgcagggattataggcatgagccaccgcaccccgcagtactttccctcgtatacaagctactctcctgaaaaaaatagcaggaacccattccaatgtccaagctcccctaaagtgccaactcagaataactttcatgtttaaaaacagctgtcttcacattgcccattgtgaggttgtaaaaggaagttaagatgtcaagcaatttagattctgttacccatttccctatgaaaagagatgtgttaaaagtctttaactacttaaagggtcatcatgaaaaataagaattctattccagaagacagagttatacacagggaggtgtattatatacttgctaataaatttttgtgtaggctctttagtaaatttatctgataatggaataatcagcctttttggtggaaaggtacatacagaagctaaatcatcatctgttaatagtgtttaagagatttcttcattgagatggaatatgggcaagatgacctttaaggtctttttcacttttatcattggaaatccccagaagcaatctgatagtcttaaaactttgtcctttctaagtcctttgtattcattttagagctcttcaggaaactagagaattttggactttggttgacaaaagcggtctgacctgtgttcgtagctgggaacatgaaacacaaaattctgggtttaatcttctgaagaaatctataagtagttactggcataaatggtattactatactaacaaatttaaaagcctataatgtattaaaactcttttttactcgattacttttatttttttaagacacagtctcgcttattgccccggctggagtgcagtggcacggtctcagctcactgcaatctccgcctcccaggttcaagcgattctcctgcctcagcctcccaagtagctggaattaattacagacgcccaccaccatgcccggctaatttttgtatttttagtagagatggggtttcaccgtgttgcctaggctggtcttgaactcctgacctcaagtgatcaacccaccttggcctcccaaagtgctgggattacaggcatgagccactgtgcccagccctcttgataatttttattcttgtttcttcttatctgtgggactccaattagaatggggttgagattgtggcattcagttttataccaatattttacccaagtgtgtcatggccttttttaatcattttaatatccccagaaatgctagaagtgtaaaggaataacagaggtaaatttgctgtcattttatgccacatcctcttttcttactttgcttcttgatacagattatagaggtaattgtgaagacagttgaaccttagaagattgagctaagattctttttttggcaacctgcaagtaatgtttcatttttctattacgtgatctctttgcccatacagttggcagatgttttttccccctttttctaccttaaacttttttgtttggagtacagtctaaaccaacatcagttagccttgattttctttcttttttggacaattgtctggttcattgacaaaagtaacaagtttggaactaagagatatgttacaagctgcacttaacaccacctgaaaacccaagaatcatctgaaggttttgtcagtagtaaggtaggttttgtgtgtgtgtgtgtgtgtgtgtgtgtgtgtgtgtgtgtgtgaagatggaatagggtgaaggtgaagaaacagcttgacttgtgcctgttttcagataaaggagtaaagtgatctacaaactgtaactatcttgaaagagaaattgatcatcagatggtcgagtactcttggaatgtctctttgctgtttactgtggcctctttacaatggtgagacttatttctaccctctactttccactattatttttttcccctattggataatactagtctgagcagccctaatactagatgtacctaaacagagatacaagccaagtcattgttcagtgtagtcatttcttagtatctgtttatattttgtcacacatcagaatgtatattttatagagcatgtgtttgtctacttgtttgtctactataatatgtctttaataaagctaaaaacattctga

SEQ ID NO: 148406 - DNA, 4070 bp, Homo sapiens
  Payload ID: 9391
  Gene Symbol: LRIG3
  Gene Name: leucine-rich repeats and immunoglobulin-like domains 3
  Uniprot ID: Q6UXM1
  ENST ID: ENST00000320743
  CDS Start-End: 288-3647
ggcgaaaaagtttcttttgcagacaagaaggggcttcggcgagccgacgctgctcaagctgcaactctgttgcagttggcagttcttttcggtttccctcctgctgtttgggggcatgaaagggcttcgccgccgggagtaaaagaaggaattgaccgggcagcgcgagggaggagcgcgcacgcgaccgcgagggcgggcgtgcaccctcggctggaagtttgtgccgggccccgagcgcgcgccggctgggagcttcgggtagagacctaggccgctggaccgcgatgagcgcgccgagcctccgtgcgcgcgccgcggggttggggctgctgctgtgcgcggtgctggggcgcgctggccggtcagacagcggcggtcgcggggaactcgggcagccctctggggtagccgccgagcgcccatgccccactacctgccgctgcctcggggacctgctggactgcagtcgtaagcggctagcgcgtcttcccgagccactcccgtcctgggtcgctcggctggacttaagtcacaacagattatctttcatcaaggcaagttccatgagccaccttcaaagccttcgagaagtgaaactgaacaacaatgaattggagaccattccaaatctgggaccagtctcggcaaatattacacttctctccttggctggaaacaggattgttgaaatactccctgaacatctgaaagagtttcagtcccttgaaactttggaccttagcagcaacaatatttcagagctccaaactgcatttccagccctacagctcaaatatctgtatctcaacagcaaccgagtcacatcaatggaacctgggtattttgacaatttggccaacacactccttgtgttaaagctgaacaggaaccgaatctcagctatcccacccaagatgtttaaactgccccaactgcaacatctcgaattgaaccgaaacaagattaaaaatgtagatggactgacattccaaggccttggtgctctgaagtctctgaaaatgcaaagaaatggagtaacgaaacttatggatggagctttttgggggctgagcaacatggaaattttgcagctggaccataacaacctaacagagattaccaaaggctggctttacggcttgctgatgctgcaggaacttcatctcagccaaaatgccatcaacaggatcagccctgatgcctgggagttctgccagaagctcagtgagctggacctaactttcaatcacttatcaaggttagatgattcaagcttccttggcctaagcttactaaatacactgcacattgggaacaacagagtcagctacattgctgattgtgccttccgggggctttccagtttaaagactttggatctgaagaacaatgaaatttcctggactattgaagacatgaatggtgctttctctgggcttgacaaactgaggcgactgatactccaaggaaatcggatccgttctattactaaaaaagccttcactggtttggatgcattggagcatctagacctgagtgacaacgcaatcatgtctttacaaggcaatgcattttcacaaatgaagaaactgcaacaattgcatttaaatacatcaagccttttgtgcgattgccagctaaaatggctcccacagtgggtggcggaaaacaactttcagagctttgtaaatgccagttgtgcccatcctcagctgctaaaaggaagaagcatttttgctgttagcccagatggctttgtgtgtgatgattttcccaaaccccagatcacggttcagccagaaacacagtcggcaataaaaggttccaatttgagtttcatctgctcagctgccagcagcagtgattccccaatgacttttgcttggaaaaaagacaatgaactactgcatgatgctgaaatggaaaattatgcacacctccgggcccaaggtggcgaggtgatggagtataccaccatccttcggctgcgcgaggtggaatttgccagtgaggggaaatatcagtgtgtcatctccaatcactttggttcatcctactctgtcaaagccaagcttacagtaaatatgcttccctcattcaccaagacccccatggatctcaccatccgagctggggccatggcacgcttggagtgtgctgctgtggggcacccagccccccagatagcctggcagaaggatgggggcacagacttcccagctgcacgggagagacgcatgcatgtgatgcccgaggatgacgtgttctttatcgtggatgtgaagatagaggacattggggtatacagctgcacagctcagaacagtgcaggaagtatttcagcaaatgcaactctgactgtcctagaaacaccatcatttttgcggccactgttggaccgaactgtaaccaagggagaaacagccgtcctacagtgcattgctggaggaagccctccccctaaactgaactggaccaaagatgatagcccattggtggtaaccgagaggcacttttttgcagcaggcaatcagcttctgattattgtggactcagatgtcagtgatgctgggaaatacacatgtgagatgtctaacacccttggcactgagagaggaaacgtgcgcctcagtgtgatccccactccaacctgcgactcccctcagatgacagccccatcgttagacgatgacggatgggccactgtgggtgtcgtgatcatagccgtggtttgctgtgtggtgggcacgtcactcgtgtgggtggtcatcatataccacacaaggcggaggaatgaagattgcagcattaccaacacagatgagaccaacttgccagcagatattcctagttatttgtcatctcagggaacgttagctgacaggcaggatgggtacgtgtcttcagaaagtggaagccaccaccagtttgtcacatcttcaggtgctggatttttcttaccacaacatgacagtagtgggacctgccatattgacaatagcagtgaagctgatgtggaagctgccacagatctgttcctttgtccgtttttgggatccacaggccctatgtatttgaagggaaatgtgtatggctcagatccttttgaaacatatcatacaggttgcagtcctgacccaagaacagttttaatggaccactatgagcccagttacataaagaaaaaggagtgctacccatgttctcatccttcagaagaatcctgcgaacggagcttcagtaatatatcgtggccttcacatgtgaggaagctacttaacactagttactctcacaatgaaggacctggaatgaaaaatctgtgtctaaacaagtcctctttagattttagtgcaaatccagagccagcgtcggttgcctcgagtaattctttcatgggtacctttggaaaagctctcaggagacctcacctagatgcctattcaagctttggacagccatcagattgtcagccaagagccttttatttgaaagctcattcttccccagacttggactctgggtcagaggaagatgggaaagaaaggacagattttcaggaagaaaatcacatttgtacctttaaacagactttagaaaactacaggactccaaattttcagtcttatgacttggacacatagactgaatgagaccaaaggaaaagcttaacatactacctcaagtgaacttttatttaaaagagagagaatcttatgttttttaaatggagttatgaattttaaaaggataaaaatgctttatttatacagatgaaccaaaattacaaaaagttatgaaaatttttatactgggaatgatgctcatataagaatacctttttaaactattttttaactttgttttatgcaaaaaagtatcttacgtaaattaatgatataaatcatgattattttatgtatttttataatgccagatttctttttatggaaaatgagttactaaagcattttaaataatacctgccttgtaccattttttaaatagaagttacttcattatattttgcacattatatttaataaaatgtgtcaatttgatgccaa

SEQ ID NO: 148407 - DNA, 3667 bp, Homo sapiens
  Payload ID: 9391
  Gene Symbol: LRIG3
  Gene Name: leucine-rich repeats and immunoglobulin-like domains 3
  Uniprot ID: Q6UXM1
  ENST ID: ENST00000379141
  CDS Start-End: 65-3244
gtaactgaagtcaggcttttcatttgggaagccccctcaacagaattcggtcattctccaagttatggtggacgtacttctgttgttctccctctgcttgctttttcacattagcagaccggacttaagtcacaacagattatctttcatcaaggcaagttccatgagccaccttcaaagccttcgagaagtgaaactgaacaacaatgaattggagaccattccaaatctgggaccagtctcggcaaatattacacttctctccttggctggaaacaggattgttgaaatactccctgaacatctgaaagagtttcagtcccttgaaactttggaccttagcagcaacaatatttcagagctccaaactgcatttccagccctacagctcaaatatctgtatctcaacagcaaccgagtcacatcaatggaacctgggtattttgacaatttggccaacacactccttgtgttaaagctgaacaggaaccgaatctcagctatcccacccaagatgtttaaactgccccaactgcaacatctcgaattgaaccgaaacaagattaaaaatgtagatggactgacattccaaggccttggtgctctgaagtctctgaaaatgcaaagaaatggagtaacgaaacttatggatggagctttttgggggctgagcaacatggaaattttgcagctggaccataacaacctaacagagattaccaaaggctggctttacggcttgctgatgctgcaggaacttcatctcagccaaaatgccatcaacaggatcagccctgatgcctgggagttctgccagaagctcagtgagctggacctaactttcaatcacttatcaaggttagatgattcaagcttccttggcctaagcttactaaatacactgcacattgggaacaacagagtcagctacattgctgattgtgccttccgggggctttccagtttaaagactttggatctgaagaacaatgaaatttcctggactattgaagacatgaatggtgctttctctgggcttgacaaactgaggcgactgatactccaaggaaatcggatccgttctattactaaaaaagccttcactggtttggatgcattggagcatctagacctgagtgacaacgcaatcatgtctttacaaggcaatgcattttcacaaatgaagaaactgcaacaattgcatttaaatacatcaagccttttgtgcgattgccagctaaaatggctcccacagtgggtggcggaaaacaactttcagagctttgtaaatgccagttgtgcccatcctcagctgctaaaaggaagaagcatttttgctgttagcccagatggctttgtgtgtgatgattttcccaaaccccagatcacggttcagccagaaacacagtcggcaataaaaggttccaatttgagtttcatctgctcagctgccagcagcagtgattccccaatgacttttgcttggaaaaaagacaatgaactactgcatgatgctgaaatggaaaattatgcacacctccgggcccaaggtggcgaggtgatggagtataccaccatccttcggctgcgcgaggtggaatttgccagtgaggggaaatatcagtgtgtcatctccaatcactttggttcatcctactctgtcaaagccaagcttacagtaaatatgcttccctcattcaccaagacccccatggatctcaccatccgagctggggccatggcacgcttggagtgtgctgctgtggggcacccagccccccagatagcctggcagaaggatgggggcacagacttcccagctgcacgggagagacgcatgcatgtgatgcccgaggatgacgtgttctttatcgtggatgtgaagatagaggacattggggtatacagctgcacagctcagaacagtgcaggaagtatttcagcaaatgcaactctgactgtcctagaaacaccatcatttttgcggccactgttggaccgaactgtaaccaagggagaaacagccgtcctacagtgcattgctggaggaagccctccccctaaactgaactggaccaaagatgatagcccattggtggtaaccgagaggcacttttttgcagcaggcaatcagcttctgattattgtggactcagatgtcagtgatgctgggaaatacacatgtgagatgtctaacacccttggcactgagagaggaaacgtgcgcctcagtgtgatccccactccaacctgcgactcccctcagatgacagccccatcgttagacgatgacggatgggccactgtgggtgtcgtgatcatagccgtggtttgctgtgtggtgggcacgtcactcgtgtgggtggtcatcatataccacacaaggcggaggaatgaagattgcagcattaccaacacagatgagaccaacttgccagcagatattcctagttatttgtcatctcagggaacgttagctgacaggcaggatgggtacgtgtcttcagaaagtggaagccaccaccagtttgtcacatcttcaggtgctggatttttcttaccacaacatgacagtagtgggacctgccatattgacaatagcagtgaagctgatgtggaagctgccacagatctgttcctttgtccgtttttgggatccacaggccctatgtatttgaagggaaatgtgtatggctcagatccttttgaaacatatcatacaggttgcagtcctgacccaagaacagttttaatggaccactatgagcccagttacataaagaaaaaggagtgctacccatgttctcatccttcagaagaatcctgcgaacggagcttcagtaatatatcgtggccttcacatgtgaggaagctacttaacactagttactctcacaatgaaggacctggaatgaaaaatctgtgtctaaacaagtcctctttagattttagtgcaaatccagagccagcgtcggttgcctcgagtaattctttcatgggtacctttggaaaagctctcaggagacctcacctagatgcctattcaagctttggacagccatcagattgtcagccaagagccttttatttgaaagctcattcttccccagacttggactctgggtcagaggaagatgggaaagaaaggacagattttcaggaagaaaatcacatttgtacctttaaacagactttagaaaactacaggactccaaattttcagtcttatgacttggacacatagactgaatgagaccaaaggaaaagcttaacatactacctcaagtgaacttttatttaaaagagagagaatcttatgttttttaaatggagttatgaattttaaaaggataaaaatgctttatttatacagatgaaccaaaattacaaaaagttatgaaaatttttatactgggaatgatgctcatataagaatacctttttaaactattttttaactttgttttatgcaaaaaagtatcttacgtaaattaatgatataaatcatgattattttatgtatttttataatgccagatttctttttatggaaaatgagttactaaagcattttaaataatacctgccttgtaccattttttaaatagaagttacttcattatattttgcacattatatttaataaaatgtgtcaatttgatgccaa

SEQ ID NO: 148408 - DNA, 3693 bp, Homo sapiens
  Payload ID: 9391
  Gene Symbol: LRIG3
  Gene Name: leucine-rich repeats and immunoglobulin-like domains 3
  ENST ID: ENST00000433272
  CDS Start-End: 200-2071
tcggtttccctcctgctgtttgggggcatgaaagggcttcgccgccgggagtaaaagaaggaattgaccgggcagcgcgagggaggagcgcgcacgcgaccgcgagggcgggcgtgcaccctcggctggaagtttgtgccgggccccgagcgcgcgccggctgggagcttcgggtagagacctaggccgctggaccgcgatgagcgcgccgagcctccgtgcgcgcgccgcggggttggggctgctgctgtgcgcggtgctggggcgcgctggccggtcagacagcggcggtcgcggggaactcgggcagccctctggggtagccgccgagcgcccatgccccactacctgccgctgcctcggggacctgctggactgcagtcgtaagcggctagcgcgtcttcccgagccactcccgtcctgggtcgctcggctggacttaagtcacaacagattatctttcatcaaggcaagttccatgagccaccttcaaagccttcgagaagtgaaactgaacaacaatgaattggagaccattccaaatctgggaccagtctcggcaaatattacacttctctccttggctggaaacaggattgttgaaatactccctgaacatctgaaagagtttcagtcccttgaaactttggaccttagcagcaacaatatttcagagctccaaactgcatttccagccctacagctcaaatatctgtatctcaacagcaaccgagtcacatcaatggaacctgggtattttgacaatttggccaacacactccttgtgttaaagctgaacaggaaccgaatctcagctatcccacccaagatgtttaaactgccccaactgcaacatctcgaattgaaccgaaacaagattaaaaatgtagatggactgacattccaaggccttggtgctctgaagtctctgaaaatgcaaagaaatggagtaacgaaacttatggatggagctttttgggggctgagcaacatggaaattttgcagctggaccataacaacctaacagagattaccaaaggctggctttacggcttgctgatgctgcaggaacttcatctcagccaaaatgccatcaacaggatcagccctgatgcctgggagttctgccagaagctcagtgagctggacctaactttcaatcacttatcaaggttagatgattcaagcttccttggcctaagcttactaaatacactgcacattgggaacaacagagtcagctacattgctgattgtgccttccgggggctttccagtttaaagactttggatctgaagaacaatgaaatttcctggactattgaagacatgaatggtgctttctctgggcttgacaaactgaggcgactgatactccaaggaaatcggatccgttctattactaaaaaagccttcactggtttggatgcattggagcatctagacctgagtgacaacgcaatcatgtctttacaaggcaatgcattttcacaaatgaagaaactgcaacaattgcatttaaatacatcaagccttttgtgcgattgccagctaaaatggctcccacagtgggtggcggaaaacaactttcagagctttgtaaatgccagttgtgcccatcctcagctgctaaaaggaagaagcatttttgctgttagcccagatggctttgtgtgtgatgattttcccaaaccccagatcacggttcagccagaaacacagtcggcaataaaaggttccaatttgagtttcatctgctcagctgccagcagcagtgattccccaatgacttttgcttggaaaaaagacaatgaactactgcatgatgctgaaatggaaaattatgcacacctccgggcccaaggtggcgaggtgatggagtataccaccatccttcggctgcgcgaggtggaatttgccagtgaggggaaatatcagtgtgtcatctccaatcactttggttcatcctactctgtcaaagccaagcttacagtaaatattccccacctgactcttcctttccctacctttcattccacaaaattaagattcttggttatttgtatctaaacctgcaattatgttgaagacgacaccgtactcagtgtgtgcttccctcattcaccaagacccccatggatctcaccatccgagctggggccatggcacgcttggagtgtgctgctgtggggcacccagccccccagatagcctggcagaaggatgggggcacagacttcccagctgcacgggagagacgcatgcatgtgatgcccgaggatgacgtgttctttatcgtggatgtgaagatagaggacattggggtatacagctgcacagctcagaacagtgcaggaagtatttcagcaaatgcaactctgactgtcctagaaacaccatcatttttgcggccactgttggaccgaactgtaaccaagggagaaacagccgtcctacagtgcattgctggaggaagccctccccctaaactgaactggaccaaagatgatagcccattggtggtaaccgagaggcacttttttgcagcaggcaatcagcttctgattattgtggactcagatgtcagtgatgctgggaaatacacatgtgagatgtctaacacccttggcactgagagaggaaacgtgcgcctcagtgtgatccccactccaacctgcgactcccctcagatgacagccccatcgttagacgatgacggatgggccactgtgggtgtcgtgatcatagccgtggtttgctgtgtggtgggcacgtcactcgtgtgggtggtcatcatataccacacaaggcggaggaatgaagattgcagcattaccaacacagatgagaccaacttgccagcagatattcctagttatttgtcatctcagggaacgttagctgacaggcaggatgggtacgtgtcttcagaaagtggaagccaccaccagtttgtcacatcttcaggtgctggatttttcttaccacaacatgacagtagtgggacctgccatattgacaatagcagtgaagctgatgtggaagctgccacagatctgttcctttgtccgtttttgggatccacaggccctatgtatttgaagggaaatgtgtatggctcagatccttttgaaacatatcatacaggttgcagtcctgacccaagaacagttttaatggaccactatgagcccagttacataaagaaaaaggagtgctacccatgttctcatccttcagaagaatcctgcgaacggagcttcagtaatatatcgtggccttcacatgtgaggaagctacttaacactagttactctcacaatgaaggacctggaatgaaaaatctgtgtctaaacaagtcctctttagattttagtgcaaatccagagccagcgtcggttgcctcgagtaattctttcatgggtacctttggaaaagctctcaggagacctcacctagatgcctattcaagctttggacagccatcagattgtcagccaagagccttttatttgaaagctcattcttccccagacttggactctgggtcagaggaagatgggaaagaaaggacagattttcaggaagaaaatcacatttgtacctttaaacagactttagaaaactacaggactccaaattttcagtcttatgacttggacacatagactgaatgagaccaaaggaaaagc

SEQ ID NO: 148409 - DNA, 759 bp, Homo sapiens
  Payload ID: 9391
  Gene Symbol: LRIG3
  Gene Name: leucine-rich repeats and immunoglobulin-like domains 3
  ENST ID: ENST00000552267
  CDS Start-End: 291-759
aaaaaaacatctcttaaaacatttgtgggcttaaagtatttgaatctgccagtctccctaaactaattttgtccttggagcttgtatttttgagtttggcattttggttgccatctagtttgtggacagaatagaccaattatttctcctgctctcactggtgttcatagagatacttcataagcccagttagcactattagtgatttttagaaatgacttataattttatttttgttttcttatagggacttaagtcacaacagattatctttcatcaaggcaagttccatgagccaccttcaaagccttcgagaagtgaaactgaacaacaatgaattggagaccattccaaatctgggaccagtctcggcaaatattacacttctctccttggctggaaacaggattgttgaaatactccctgaacatctgaaagagtttcagtcccttgaaactttggaccttagcagcaacaatatttcagagctccaaactgcatttccagccctacagctcaaatatctgtatctcaacagcaaccgagtcacatcaatggaacctgggtattttgacaatttggccaacacactccttgtgttaaagctgaacaggaaccgaatctcagctatcccacccaagatgtttaaactgccccaactgcaacatctcgaattgaaccgaaacaagattaaaaatgtagatggactgacattccaaggccttggtgctctgaagtctctgaaaatgcaaagaaatg

SEQ ID NO: 148410 - DNA, 923 bp, Homo sapiens
  Payload ID: 9391
  Gene Symbol: LRIG3
  Gene Name: leucine-rich repeats and immunoglobulin-like domains 3
  ENST ID: ENST00000550825
  CDS Start-End: 1-490
gacctgccatattgacaatagcagtgaagctgatgtggaagctgccacagatctgttcctttgtccgtttttgggatccacaggccctatgtatttgaagggaaatgtgtatggctcagatccttttgaaacatatcatacaggttgcagtcctgacccaagaacagttttaatggaccactatgagcccagttacataaagaaaaaggagtgctacccatgttctcatccttcagaagaatcctgcgaacggagcttcagtaatatatcgtggccttcacatgtgaggaagctacttaacactagttactctcacaatgaaggacctggaatgaaaaatctgtgtctaaacaagtcctctttagattttagtgcaaatccagagccagcgtcggttgcctcgagtaattctttcatgggtaagtttattaagttatcaggtacctcgtctgaggatccatactccaagttgtgtgtgagagagcaatgacagccttgaatgtcaaactggtaaaaaatggtttcttgaatgaggctgccatgacatccgactagttagtgtaaatgcctccaaaagcaaagtcagaggtgggattttacttgatgatgtgtttaatctataactaagcctcaggagctttctgggtagcactgtgtgtggcatctactccaagacaagggtttggggaggacttaggagctcagcttgtcagccatgtggaaaaagtggttttgggctcccacggcctttggggtggagttgtgtgctctgcatgattgtggtttggtatgtctggtggcttccaactgaacccgcagtcgaagggtggaaaacaacatcctacctagcaacaactgctagtctgacaagctggactacctttggccaagaaaaccagccttaaggtccaagtcggtggtgt

SEQ ID NO: 148411 - DNA, 555 bp, Homo sapiens
  Payload ID: 9392
  Gene Symbol: LRRIQ1
  Gene Name: leucine-rich repeats and IQ motif containing 1
  ENST ID: ENST00000393212
  CDS Start-End: 62-555
gtgtagcggctatgggcgctgtcttacaacaaagccaaggaatctcgctgctgagggaataatggacgatgatgatgcaaagctcaaagcagaaatagaagctgaattggataaactcagcatttcctccttggaaaaagaagacattgagagtgatgcaaaatcagaaacccagagtgatgatagtgatacagattcagttgaattaccagaatcagttcttcactgtattaacatcataaagaacaggagtaaagctgttgaagagctcattcttcaggacctggaagatactgatattttaagctgtagttatggagcagtttctaataatcatatgcatttaagaacaggactatcaactgaatatgaagaaagttcagagcaattaattaagatattatctgaaatagaaaaagaagaatttatgagaagtaaaaccgattgtgccactcctgattttgttcctgagcctagtcctcatgacttgcctatggatgaacatgttttaccagatgatgctgatataaattttggatactgtgaagtggaaga

SEQ ID NO: 148412 - DNA, 5394 bp, Homo sapiens
  Payload ID: 9392
  Gene Symbol: LRRIQ1
  Gene Name: leucine-rich repeats and IQ motif containing 1
  Uniprot ID: Q96JM4
  ENST ID: ENST00000393217
  CDS Start-End: 62-5230
gtcttacaacaaagccaaggaatctcgctgctgagggttctgtgctttattatgaagaataatggacgatgatgatgcaaagctcaaagcagaaatagaagctgaattggataaactcagcatttcctccttggaaaaagaagacattgagagtgatgcaaaatcagaaacccagagtgatgatagtgatacagattcagttgaattaccagaatcagttcttcactgtattaacatcataaagaacaggagtaaagctgttgaagagctcattcttcaggacctggaagatactgatattttaagctgtagttatggagcagtttctaataatcatatgcatttaagaacaggactatcaactgaatatgaagaaagttcagagcaattaattaagatattatctgaaatagaaaaagaagaatttatgagaagtaaaaccgattgtgccactcctgattttgttcctgagcctagtcctcatgacttgcctatggatgaacatgttttaccagatgatgctgatataaattttggatactgtgaagtggaagaaaaatgtagacagtcttttgaggcttggcaagagaaacagaaggaattagaagataaagagaaacaaactctcaaagctcagagggatagagaagaaaaacaatttcaagaagaagaagaaaagcgacattgctggatgaaacaatttaaagttgaaaagaagaaattagagaacattcagaagcaagaacaggacaagatgaatgatgaactctataaagaagagaaaatttggaaagagaaatttaaacagcatgaggagtatattagaaacttgcatttacaaatggaagaagaaagaacaagatttaaagaccaacaagaaaaagaaaaaaattctttgttaaaacagcagaataatgcagctgttaaaattcaagctaaatataaagcatttgttgcctatcaaaaatatggcccaattattaaagagcaaattgaaagtaagaaaaggaaagcacaagagtggaaggaaaaggaagcaaaaatacgacaaaaggaggaagaaaatcgaaaaagattagaggaggaacaaaggataaaagaagagagaaaaaagcaaaaggaagaggaaaggaaaaggagagaaaaagaatatgaagaaaaaaagaatattgtgaaacaggaaagagagcaactaataagcaaggaaaaaataatattaagagaagatgcaagccaacagctaataataagtagtgcattaaagaagagcggatataataacaaacatttaagtcttgaagatatttcaaatgataagggtgatatagccaaaaatctagtggatgaaaattcaaagaagcaggaagatgttctcctttggctagttgaggaatcaaatatgaaagaaaatgtagatagacagactatattaaaagaatcaatacaagtaaagttaaaagaatctatatcaagccaaacaattctggcagattttaaaatggaagaaaaaaatgaaaacctagcaaaaaaacgatgttcagaagaattggtcaagcaagaaagaaaatatgaaaatacagataacaaaactgaattgggaaactctgatctaaaaggaaatctgaaagaacagtttccattgcaagaattaaagtctgatgcacaaaaagaagaaaaaatcatgaaacatgtcataaatgagaatacaggacaaaaaacccagataatattaggacataaccaagaaatcagtgaggtgaaaaccaatgaagagcagaaaataatcaaagataatcagcagaaaaagatacaaaaagtagaaaaagaagagatacaagaacagaatggattattatataaagataaggatactttagttatttcagtgaaacaaagatcactctcactaacatcagaaaattccaaagatgtaagagaaaacgtaatattacaagaaaaagaaatttattcaaaatccaaagaaattgaggagaacccaaaagacaatgcttggaatagtggcattgtgatttttaacacaactgataccatgataaatatagaaggcaaaagaaatgaccaagattatgtgttaggtagacatgctccttgtgagggcttgagtaactataatgcagaaagctccatggtatctaaagaagtcaactctcttaaatctgagattagaaatatttcagaaaaatgccatgaaaatgcacctgaacctgatagcatgacctgctgtgtatcagagtcaacccttctatattctattgaagaaaggagactagcctggataaaatcatttaaaccttggcttgaaattttcaagcaaaatcaacaaaagaaaattgttagaagaaagagacctgtgaaatgcccagccaacatgacacccgctttggataaactggaaattcttcgatgtggcccttgggatactttacagcaggttacaacagttacatttcaagatttgccaggctgtgttctctccacactggcagagtgtacaaatcttcagtttctatcccttcgacgctgtggattaacttctttgcacagcctgagtaattgtaaaaaacttaagtacattgatgcacaggaaaaccatattgaggctattgagtgtgaaaatttggaaaatctctgtgttgttcttcttaataaaaatcaactgacttctcttcatggtttggatggctgtactaatattcagtgtcttgaactttcatataataaaattactcgaattggatattccttctttctggaagaaaaacttgttgacaatgcagggttctgccatcacttgggcacctccacttcttacttatccctggcacaagtctggattccaactggattatgttggtcctggatacctattacctcacttacaaaaaattcagattgtaatttccttatctcccacttatactggaattgtggtttagaatctttgaaaaatcttcaacaactaattttggaccacaatcagttaattaatacaaaaggtctttgtgatacacctaccattgtatacctagattgctcccataatcatcttactgatgtagagggcgttgaaaattgtggattgctccaaatattgaagttacagggaaattatctgagtgagcttccatccttggagaatcttgttttactaagagaattgcacttggatgataacagcatttcaactgtggaagcattttcttcatactggctgcctttactacaaaatattactatctctcaaaacagcttgactaaaatcgtaccactttttcattttgtttcattggaaaagctagatgtcagccacaattgtctttctgatcttaaaagtgccataaaatggtttgatgcatgctattctctccatgaattgtctcttactggaaacccacttcttcaagaaacaaactggagggattctctacttaaagtgttgcctgctctgagaatcctcaatggcaatatactaaactctaattcagaaagccgcactgaagaacacaatcaactgggatcagcaggtttcctggcactttgtcagtctcagattcgagaattcaacttgctaattgaaaattatataactggaaaaggagatgtatttaccttggatactgcagaaaatctctgtcattattttaagaaattgatgatacttagtactgaataccgacatgcacacgaacgaggggatgtaactatcaccaagaaagatgaatcagaagcccagaaaaatcatttggcccctacaaacagtgacagcactctgcaaaatggagtcttctactcttgtgcacgtgaaggtgagccagactcaccagatattcctgagaaatggatggactctgtctccagccactccccattaagcaaatccgccacatgtgaaaatatggaaggaagacatcaggaaatattagtatgtcagaagagagaagacagcaaggcaagcagtattcccaccataagaatcccatttaaggaagtagtaatgacaaattctttgctgaggaatcaccaaaatattgagcctagtgaaaaaattatggcagctgtggtaatccagtcatactggcgtggttacctcatgcgcagacagactcatttctccacaaggctacatactgctgcaacagaaggcctgccaaattcttccatcaagaatcagactattttaaagaaaggaaaaagagaaaatattgtgaatatccgaaaacagagggagaaggctgctattcttattcaggcagtttggaagggctttattttgcgaaagaaactgacaacagctctagaggctattaagaatgaagaatccgatgaagaatacagagaaatagatttagaggattttatatttgatgaagctgccttagaagaagaatggctagcattagattccacccgcttcccttcacaaacactgcttctttcaaaccagctgcattggccaaagattcctggaaacttaaaatgggatgatacttcatttaatttaccaagtaatccagctcaagcatggttatgtaatgacaaagaaaatttgtcttcttcagaacacacacaatttaatagcagatcagaaaataaaacttcttcctggacacctgaatcaaagaccagtagaaagagtttgctaaaatctgaaaaagaaaaaaaaatttcagaagaatggggctttaaggatatttctactgctcagcaaatgttgaagagggcacagaaaatgaaatcgaagaaactaaagaaaaaaatagattccactgtgcgtctagccttattcaaaaacaatgaaaataaagtgtctcttccaaaatcaccaaagatggtacagcccagaagagatggttactttgaaggtatagaagaagaccctatccacaaagataccactgcaaatgaaaaattagaacggaatagagaatatacataccaatggcttcacacacaggttggggttcatgaaacgactagttccagaaatatgaaatgcaatcactttttgcctgagttagatccagatgtacttaatggtggaagagttcagcttgtggcaagacttgtaagcagagaagacacggatttagaccttttttccatgaccaatggaagtgctttgtctgtgaacagagaaaaaaaaaatcaggcacacagacactcagcaggatcttcaagtaagttgtggtttccttcaaaattaatttagaaatcacaaacgaattgatggaacctaatgccaacaagcattctttttcagatagggggtaggatgccagcaacctgaactgcccaaaaatgtgtatttaaattttttctttctttaaatatcctcttttgatataaacaaaattaaattatttctaaaattaa

SEQ ID NO: 148413 - DNA, 559 bp, Homo sapiens
  Payload ID: 9392
  Gene Symbol: LRRIQ1
  Gene Name: leucine-rich repeats and IQ motif containing 1
  ENST ID: ENST00000526363
  CDS Start-End: 1-323
ccttattcaaaaacaatgaaaataaagtgtctcttccaaaatcaccaaagatggtacagcccagaagagatggttactttgaaggtatagaagaagaccctatccacaaagataccactgcaaatgaaaaattagaacggaatagagaatatacataccaatggcttcacacacaggttggggttcatgaaacgactagttccagaaatatgaaatgcaatcactttttgcctgagttagatccagatgtacttaatggtggaagagttcagcttgtggtaagaaatgtgcttaaagttacagaaaaatgttgtagacactagtgctcaaataaatggcactttaagatatgtttataattaaactatgaaaatatcacaactgtatctatttgggataatatcaaaatatcatgtgttaaaataataacatgttttcttgacttgtaatacaatttaaaatgtgacattgcttaaaaatgttaattttatgtgacagatgtaaaaatattagcatcctacaactttaaaataaaattactgtggatggaaaattgaaa

SEQ ID NO: 148414 - DNA, 432 bp, Homo sapiens
  Payload ID: 9392
  Gene Symbol: LRRIQ1
  Gene Name: leucine-rich repeats and IQ motif containing 1
  ENST ID: ENST00000533414
  CDS Start-End: 1-432
atgaagaaagttcagagcaattaattaagatattatctgaaatagaaaaagaagaatttatgagaagtaaaaccgattgtgccactcctgattttgttcctgagcctagtcctcatgacttgcctatggatgaacatgttttaccagatgatgctgatataaattttggatactgtgaagtggaagaaaaatgtagacagtcttttgaggcttggcaagagaaacagaaggaattagaagataaagagaaacaaactctcaaagctcagagggatagagaagaaaaacaatttcaagaagaagaagaaaagcgacattgctggatgaaacaatttaaagttgaaaagaagaaattagagaacattcagaaggagtatattagaaacttgcatttacaaatggaagaagaaagaacaagatttaaagaccaac

SEQ ID NO: 148415 - DNA, 2849 bp, Homo sapiens
  Payload ID: 9393
  Gene Symbol: LRRIQ3
  Gene Name: leucine-rich repeats and IQ motif containing 3
  Uniprot ID: A6PVS8
  ENST ID: ENST00000354431
  CDS Start-End: 193-2067
gtcgcccacgtaaccacgcccccggagcgccttggctggcgcccggaaaaccatgatgtggagaacttggatgttgtcttgtttctctagcaacggtctcaggagcagatggccgcccagcgatttgtctgactgtgttggggctgggccacttgtctccaactcataagggcttgcagcccagttgacccgatgtttcatggaacagtcacagaagagctaaccagtcatgaagaatggagtcactataatgaaaacataagagaaggtcaaaaagattttgtttttgtgaagttcaatggccttcatttaaagtctatggaaaatttgcagtcttgcatctctcttagagtatgcatcttctcaaacaattttattacagatattcatccacttcaaagttgtataaaattaatcaaacttgatctccatggaaatcagataaagagtctaccaaataccaaattttggaatggattgaagaacctaaaactactctatcttcatgacaatgggtttgcaaagttaaagaatatatgtgtattatctgcctgtccaaccctcattgccctcactatgtttgattgtccagtaagccttaaaaaaggatatagacatgttcttgttaacagtatatggcctctcaaagcgctggatcatcatgtgatttctgatgaagaaataattcagaactggcatcttcctgaaagattcaaagcatgtaaccatcgacttttctttaatttctgcccagctttgagaaagggaacaacctatgaagaggaaattaataatattaaacatattacttcaaaaattaatgcaattctggctcataattcaccagttttgattgttcaaagatggatacgtggtttcttagttagaaaaaatttgagccctgtgtttttccacaaaaaaaaacagcaggaaaaaattattagaggatatgaagcaaaatggatttacataaccaaagggtatgaagataagctccttaaggatctctttttcaaacctgaaactaatataaaaggaaagcttgcatattggaaacataatatatattatcctgttgatttaaaaaattccagtgaacacagaaaacatgtgtcatctattttatgtgaattaaaaccaaaagatctaggcatgaaatcaaaaacatcaagacatctcattcaaaaaggtcaggagtctgaagatgaaattgtggatgaaaaattggataccagttttaggatatcagttttcaaactacccatatacacttcaggttcattgaagaataatgcagtattgagagagaaaaaacaacatttttttcctgcatatcctcagccaatctatactactcatccaaagccaatcattaaaaaagacatacgattggagcggagtatgaaagagttttttgcaccacaaagagctggtatgaaactccgaacatttagtgatattgacaaatattacacagaacaaaagaagcaggaataccataaagaaaaagtaagagttgtagccatggcacaagttgctcgagaaagagttagagtagctgttaatgaacatttgaatcagaaaaaatatgctacacaaaaactaattgaagaaaataaagagacaattcagaacagtttacgacaagtttggcaaaacagattcaactaccttgaaaaagctagagagagaaaagctctgtttctaaaagaaaaatcccaaaaggcttcagagcgtttattagttcaaaacttaaataatgagcgcactcttttgaccagaggactacttaaaattgacagactggagaagaatgaggctgtcctaaaagagaaaagcctgattgttaagcaaaaactaaaagcagaaaaatatagaaagaatttacttaaagaaatgaaaaaagttagatctcaagaaatatataaaagacattgtgaagaaaaatttgttatggatatgattgcctttgaaaaagcctgtgaaagacttcaagatgctaaaacaaaagtagcaattgtgaaaacaaatttagactttaaagttcccaatggactgataaaatgaatcaatgccagatcacatcctatgatcatcttaaattatagtcattatttttagttgaaggaatttgaaataatactctaaagcaagaaatactctacatcacaagatggatttatatataagtcttctaaaaatataaagattagttaaaatgtttctcttattggtcataatttaacttaaagttgacttagcacctctgaaaaatttcttagatcagatgcctaaggaacaattaaactgatttaatgtattgcagacaatgttgcaatgacattgctgatattctgtttcatattctttctaaatatagcaattcataagctaatttaggtttttctggaaaccttagaatagtaatttctactccaactgctgacttttattaagacactgtgtacgttgatgacttttattacctgcttttatatatttcctgcttattttgttaaaacaatttctgaatttattttttaaagtatggtttcaatattttgtcagtgatatatgctgttataaaaattcagaaaatatgaactatgaaaagtaaattaaacattcttatcaccttccttgaagactgtaagatttttgtatatttacttttgatgggtttgccctgtttggtatacatgtgaagacagggaaaagacagaggagagaagcaagagacaacccatataattatatattggaatcataaaatatacagaaatggtatatattaaccataagtctgtttaatacataccaatggtagaaaatttgaaaaataaactgtt

SEQ ID NO: 148416 - DNA, 793 bp, Homo sapiens
  Payload ID: 9393
  Gene Symbol: LRRIQ3
  Gene Name: leucine-rich repeats and IQ motif containing 3
  ENST ID: ENST00000370909
  CDS Start-End: 161-736
tggctggcgcccggaaaaccatgatgtggagaacttggatgttgtcttgtttctctagcaacggtctcaggagcagatggccgcccagcgatttgtctgactgtgttggggctgggccacttgtctccaactcataagggcttgcagcccagttgacccgatgtttcatggaacagtcacagaagagctaaccagtcatgaagaatggagtcactataatgaaaacataagagaaggtcaaaaagattttgtttttgtgaagttcaatggccttcatttaaagtctatggaaaatttgcagtcttgcatctctcttagagtatgcatcttctcaaacaattttattacagatattcatccacttcaaagttgtataaaattaatcaaacttgatctccatggaaatcagggaacaacctatgaagaggaaattaataatattaaacatattacttcaaaaattaatgcaattctggctcataattcaccagttttgattgttcaaagatggatacgtggtttcttagttagaaaaaatttgagccctgtgtttttccacaaaaaaaaacagcaggaaaaaattattagaggatatgaagcaaaatggatttacataaccaaagggtatgaagataagctccttaaggatctctttttcaaacctgaaactaatataaaaggaaagcttgcatattggaaacatgataaaaaaaaattatgggtcaattttcactgaagtgggctggatgtgtgtattcatctctcatcagtgccaaaaggaattatgcacatc

SEQ ID NO: 148417 - DNA, 1591 bp, Homo sapiens
  Payload ID: 9393
  Gene Symbol: LRRIQ3
  Gene Name: leucine-rich repeats and IQ motif containing 3
  Uniprot ID: A6PVS8
  ENST ID: ENST00000370911
  CDS Start-End: 153-752
gcccggaaaaccatgatgtggagaacttggatgttgtcttgtttctctagcaacggtctcaggagcagatggccgcccagcgatttgtctgactgtgttggggctgggccacttgtctccaactcataagggcttgcagcccagttgacccgatgtttcatggaacagtcacagaagagctaaccagtcatgaagaatggagtcactataatgaaaacataagagaaggtcaaaaagattttgtttttgtgaagttcaatggccttcatttaaagtctatggaaaatttgcagtcttgcatctctcttagagtatgcatcttctcaaacaattttattacagatattcatccacttcaaagttgtataaaattaatcaaacttgatctccatggaaatcagataaagagtctaccaaataccaaattttggaatggattgaagaacctaaaactactctatcttcatgacaatgggtttgcaaagttaaagaatatatgtgtattatctgcctgtccaaccctcattgccctcactatgtttgattgtccagtaagccttaaaaaaggatatagacatgttcttgttaacagtatatggcctctcaaagcgctggatcatcatgtgatttctgatgaagaaataattcagaactggcatcttcctgaaagattcaaagcatgtaaccatcgacttttctttaatttctgcccagctttgagaaaggagaaaatgaagcatagtgaggtttaggaacttacccaatattggacagcaaatgagtcatgaggtgggatttcaacaagtctgcagtcaacattgcatcacaaatgacagacagtgcagagatttgagtgtacttttcacactgagtgtggaaagaggagaagaataagtgtggaaatactcctctactattttgaagctggataactgggacagaaaagaacttatttaacagaaatggcagcacttaaagacttttggtgaaaagataagtttggtcatacttctttgaggcaggatattaaagaagaaataataactagacattggaaatgaaaaacaaaaattcagaaatagtgttctggacttgattgtaaattcaggagtatttgcttggggtcatagttaaagcctagttctctcaggtaaatacagggatcaataaaggctgaaaactaaggacacaaccttggggcactgtctcattttgtgggtagaaagcagtgtaaccaatgaagataaaggataattgatctcagcaggtaagagtaaaaaaaaaattaaatagaaaagaaaaaaacatattggaagaattttttatggtaaagaggatgtcgcatctttagaatttcaatagcttgcagttgttggacatgaaattgtggtgggttatatataactgccaagtatagaacctttactgagaatattttggacagaagaaaaataaagctttaactataggaaatagaatttatgaaagatttattaaagtgaagtggtacttgcctcactttaacttaccaaatatataatttaccatatttataaactgaggataaatgagttttgattagaaagagaaa

SEQ ID NO: 148418 - DNA, 2673 bp, Homo sapiens
  Payload ID: 9393
  Gene Symbol: LRRIQ3
  Gene Name: leucine-rich repeats and IQ motif containing 3
  Uniprot ID: A6PVS8
  ENST ID: ENST00000395089
  CDS Start-End: 1-1875
atgtttcatggaacagtcacagaagagctaaccagtcatgaagaatggagtcactataatgaaaacataagagaaggtcaaaaagattttgtttttgtgaagttcaatggccttcatttaaagtctatggaaaatttgcagtcttgcatctctcttagagtatgcatcttctcaaacaattttattacagatattcatccacttcaaagttgtataaaattaatcaaacttgatctccatggaaatcagataaagagtctaccaaataccaaattttggaatggattgaagaacctaaaactactctatcttcatgacaatgggtttgcaaagttaaagaatatatgtgtattatctgcctgtccaaccctcattgccctcactatgtttgattgtccagtaagccttaaaaaaggatatagacatgttcttgttaacagtatatggcctctcaaagcgctggatcatcatgtgatttctgatgaagaaataattcagaactggcatcttcctgaaagattcaaagcatgtaaccatcgacttttctttaatttctgcccagctttgagaaagggaacaacctatgaagaggaaattaataatattaaacatattacttcaaaaattaatgcaattctggctcataattcaccagttttgattgttcaaagatggatacgtggtttcttagttagaaaaaatttgagccctgtgtttttccacaaaaaaaaacagcaggaaaaaattattagaggatatgaagcaaaatggatttacataaccaaagggtatgaagataagctccttaaggatctctttttcaaacctgaaactaatataaaaggaaagcttgcatattggaaacataatatatattatcctgttgatttaaaaaattccagtgaacacagaaaacatgtgtcatctattttatgtgaattaaaaccaaaagatctaggcatgaaatcaaaaacatcaagacatctcattcaaaaaggtcaggagtctgaagatgaaattgtggatgaaaaattggataccagttttaggatatcagttttcaaactacccatatacacttcaggttcattgaagaataatgcagtattgagagagaaaaaacaacatttttttcctgcatatcctcagccaatctatactactcatccaaagccaatcattaaaaaagacatacgattggagcggagtatgaaagagttttttgcaccacaaagagctggtatgaaactccgaacatttagtgatattgacaaatattacacagaacaaaagaagcaggaataccataaagaaaaagtaagagttgtagccatggcacaagttgctcgagaaagagttagagtagctgttaatgaacatttgaatcagaaaaaatatgctacacaaaaactaattgaagaaaataaagagacaattcagaacagtttacgacaagtttggcaaaacagattcaactaccttgaaaaagctagagagagaaaagctctgtttctaaaagaaaaatcccaaaaggcttcagagcgtttattagttcaaaacttaaataatgagcgcactcttttgaccagaggactacttaaaattgacagactggagaagaatgaggctgtcctaaaagagaaaagcctgattgttaagcaaaaactaaaagcagaaaaatatagaaagaatttacttaaagaaatgaaaaaagttagatctcaagaaatatataaaagacattgtgaagaaaaatttgttatggatatgattgcctttgaaaaagcctgtgaaagacttcaagatgctaaaacaaaagtagcaattgtgaaaacaaatttagactttaaagttcccaatggactgataaaatgaatcaatgccagatcacatcctatgatcatcttaaattatagtcattatttttagttgaaggaatttgaaataatactctaaagcaagaaatactctacatcacaagatggatttatatataagtcttctaaaaatataaagattagttaaaatgtttctcttattggtcataatttaacttaaagttgacttagcacctctgaaaaatttcttagatcagatgcctaaggaacaattaaactgatttaatgtattgcagacaatgttgcaatgacattgctgatattctgtttcatattctttctaaatatagcaattcataagctaatttaggtttttctggaaaccttagaatagtaatttctactccaactgctgacttttattaagacactgtgtacgttgatgacttttattacctgcttttatatatttcctgcttattttgttaaaacaatttctgaatttattttttaaagtatggtttcaatattttgtcagtgatatatgctgttataaaaattcagaaaatatgaactatgaaaagtaaattaaacattcttatcaccttccttgaagactgtaagatttttgtatatttacttttgatgggtttgccctgtttggtatacatgtgaagacagggaaaagacagaggagagaagcaagagacaacccatataattatatattggaatcataaaatatacagaaatggtatatattaaccataagtctgtttaatacataccaatggtagaaaatttgaaaaataaactgttaaaaaagacagaaaaa

SEQ ID NO: 148419 - DNA, 1085 bp, Homo sapiens
  Payload ID: 9393
  Gene Symbol: LRRIQ3
  Gene Name: leucine-rich repeats and IQ motif containing 3
  ENST ID: ENST00000417067
  CDS Start-End: 1-183
aatatatattatcctgttgatttaaaaaattccagtgaacacagaaaacatgtgtcatctattttatgtgaattaaaaccaaaagatctaggcatgaaatcaaaaacatcaagacatctcattcaaaaagatctcaagaaatatataaaagacattgtgaagaaaaatttgttatggatatgattgcctttgaaaaagcctgtgaaagacttcaagatgctaaaacaaaagtagcaattgtgaaaacaaatttagactttaaagttcccaatggactgataaaatgaatcaatgccagatcacatcctatgatcatcttaaattatagtcattatttttagttgaaggaatttgaaataatactctaaagcaagaaatactctacatcacaagatggatttatatataagtcttctaaaaatataaagattagttaaaatgtttctcttattggtcataatttaacttaaagttgacttagcacctctgaaaaatttcttagatcagatgcctaaggaacaattaaactgatttaatgtattgcagacaatgttgcaatgacattgctgatattctgtttcatattctttctaaatatagcaattcataagctaatttaggtttttctggaaaccttagaatagtaatttctactccaactgctgacttttattaagacactgtgtacgttgatgacttttattacctgcttttatatatttcctgcttattttgttaaaacaatttctgaatttattttttaaagtatggtttcaatattttgtcagtgatatatgctgttataaaaattcagaaaatatgaactatgaaaagtaaattaaacattcttatcaccttccttgaagactgtaagatttttgtatatttacttttgatgggtttgccctgtttggtatacatgtgaagacagggaaaagacagaggagagaagcaagagacaacccatataattatatattggaatcataaaatatacagaaatggtatatattaaccataagtctgtttaatacataccaatggtagaaaatttgaaaaataaactgttaaaaaagacagaaaaa

SEQ ID NO: 148420 - DNA, 372 bp, Homo sapiens
  Payload ID: 9393
  Gene Symbol: LRRIQ3
  Gene Name: leucine-rich repeats and IQ motif containing 3
  ENST ID: ENST00000444984
  CDS Start-End: 1-316
aaacaattttattacagatattcatccacttcaaagttgtataaaattaatcaaacttgatctccatggaaatcagggaacaacctatgaagaggaaattaataatattaaacatattacttcaaaaattaatgcaattctggctcataattcaccagttttgattgttcaaagatggatacgtggtttcttagttagaaaaaatttgagactgttacagtcctctgaatttaaggattgcttgaagatgtgtccaagaaagcgagaaaaaaaaaacattttttttctaatttttaagttgatagaaaaatattaatctagtttccttgaaatataaaatctattgaaaataaagaaatgtttcatgttaaa

SEQ ID NO: 148421 - DNA, 4524 bp, Homo sapiens
  Payload ID: 9393
  Gene Symbol: LRRIQ3
  Gene Name: leucine-rich repeats and IQ motif containing 3
  Uniprot ID: A6PVS8
  ENST ID: ENST00000415760
  CDS Start-End: 193-1092
gtcgcccacgtaaccacgcccccggagcgccttggctggcgcccggaaaaccatgatgtggagaacttggatgttgtcttgtttctctagcaacggtctcaggagcagatggccgcccagcgatttgtctgactgtgttggggctgggccacttgtctccaactcataagggcttgcagcccagttgacccgatgtttcatggaacagtcacagaagagctaaccagtcatgaagaatggagtcactataatgaaaacataagagaaggtcaaaaagattttgtttttgtgaagttcaatggccttcatttaaagtctatggaaaatttgcagtcttgcatctctcttagagtatgcatcttctcaaacaattttattacagatattcatccacttcaaagttgtataaaattaatcaaacttgatctccatggaaatcagataaagagtctaccaaataccaaattttggaatggattgaagaacctaaaactactctatcttcatgacaatgggtttgcaaagttaaagaatatatgtgtattatctgcctgtccaaccctcattgccctcactatgtttgattgtccagtaagccttaaaaaaggatatagacatgttcttgttaacagtatatggcctctcaaagcgctggatcatcatgtgatttctgatgaagaaataattcagaactggcatcttcctgaaagattcaaagcatgtaaccatcgacttttctttaatttctgcccagctttgagaaagggaacaacctatgaagaggaaattaataatattaaacatattacttcaaaaattaatgcaattctggctcataattcaccagttttgattgttcaaagatggatacgtggtttcttagttagaaaaaatttgagccctgtgtttttccacaaaaaaaaacagcaggaaaaaattattagaggatatgaagcaaaatggatttacataaccaaagggtatgaagataagctccttaaggatctctttttcaaacctgaaactaatataaaaggaaagcttgcatattggaaacatgataaaaaaaaattatgggtcaattttcactgaagtgggctggatgtgtgtattcatctctcatcagtgccaaaaggaattatgcacatcattcattggacaacaggatgaaaacttgtctctgattggacactagggatatcagctgtacacacaagataagtgtaaagttgaaaagagaaatacacttagtaattcactcaagctagcatttattaacactttaaaacttgcattaaaatgttcatgatattatttccttcctcatataagaaagctaacattacaattcttaaattgaatgaaacataccatcataaaaattgctttgcagagactgctaatgcaaaaacttttaagctgttcatccttttttaatgaaaaagataataagatcaataaaagcaccattctttaccacttacttagaatgaatttttatttgttcaatgtaagagagattggctatttcaatgtgtttcaatattggtataagctttaaatgacaaagatttgtgttttatgacttacctatacatcaacagcactgaattttctcaaaacttatttaggcagcatgacttggaaggaaaatattaactattgaatcacactgatgctctctggtctagttaagatagttttttagatactccatataagcctgggttttgctgacaaaattcacctacaaagcccagagagacttacagtcacttgcaggcatttctttatattaaggcctttaaaaataaaatatacaagattctgacaacacttgccttaattgcttaagaacttaaaataagcttgttggtagaaatggtttgccaactagggcagttttgagtcaccttatccagtccccggaatattggagtcttgtaaataattaacatttgggcagtggctgaaatatttctgaccagagcagtaggcataaagttattaagcaagctatgctgaatacaatgtggagtgaaacagactaagatttgtactgaggctgtagaattttcaggctgcctaccttgggtgagtgatagcagtttactgagactgagcctcaggagatatatatgtacatacataagcacgtgtgtttgtgtgtgtgtattttctgccttgttatataatccatcatttgataaaaagagtccctgaagttttagagatacatgtggcatttggcggagaagaaacataactatacttcatatgagacagtcattttaggcttcagtattgtaataaaaacttacatgaagtaacacttaagaaatattctgaaatcctaaaatgaatatattgttccaagttgcagggggataaaacctcaattttagaaaatattattcaagtaattgttattgagtcaatttcataatttatcaatatgtgtttataaagtacatgcaagtagattgtaatatgccttactttagagatataattatatatatatagctactttgttaataggagacatttttctcatgaaaaaatataaatccctcctcagattcaaactcaaacttaaaacacataaattctaaattgctggattacttaaggtgtttaggtaaagtaagagcaaactaatcagtaataaaatattggcaagtccccgtttgtggcttttttctaaatctttcataaatatagacattgttcaaatatacttagaaatatagagtcttgagctatgtattttattgttaagaaaaaagaatttccctcttgaaaattccattttattgcccatcattaaattttacatgaccctatgaacttttcagaattgcaaattacttaagcagtgtaaactcatattactcatatacgtatgtctctttcattaaaatgattagatttataaattgaaaatattatcgtaactaattggcctaaaacatgaggtttaataaaatgcagattttaatcaggagcttaagaatttagcctatgctttctactatgtttttctcactttcaatgcctttttttcttgttttcacatctacatagggaaataatcagtaaattatgaaatattttgaaaaagacataatttaaatatttactaataataactttgtgcctatgtttaatattatgccatggatatagctgccattcaatacatagttgttgaataaactaatcaaatttattatccttttttgttgtttgtgacttgataatacaacagattgaagaatacaatcaaactggtgcggaaatatcaagataagtaaaccacaacctcagtcctcagagagagtaatttttactaggggttatccaaaatcatctgaagatatgttttcctgatctgacatagttcttcagaagtgaatatgaatatatattatcctgttgatttaaaaaattccagtgaacacagaaaacatgtgtcatctattttatgtgaattaaaaccaaaagatctaggcatgaaatcaaaaacatcaagacatctcattcaaaaaggtcaggagtctgaagatgaaattgtggatgaaaaattggataccagttttaggatatcagttttcaaactacccatatacacttcaggttcattgaagaataatgcagtattgagagagaaaaaacaacatttttttcctgcatatcctcagccaatctatactactcatccaaagccaatcattaaaaaagacatacgattggagcggagtatgaaagagttttttgcaccacaaagagctgatctcaagaaatatataaaagacattgtgaagaaaaatttgttatggatatgattgcctttgaaaaagcctgtgaaagacttcaagatgctaaaacaaaagtagcaattgtgaaaacaaatttagactttaaagttcccaatggactgataaaatgaatcaatgccagatcacatcctatgatcatcttaaattatagtcattatttttagttgaaggaatttgaaataatactctaaagcaagaaatactctacatcacaagatggatttatatataagtcttctaaaaatataaagattagttaaaatgtttctcttattggtcataatttaacttaaagttgacttagcacctctgaaaaatttcttagatcagatgcctaaggaacaattaaactgatttaatgtattgcagacaatgttgcaatgacattgctgatattctgtttcatattctttctaaatatagcaattcataagctaatttaggtttttctggaaaccttagaatagtaatttctactccaactgctgacttttattaagacactgtgtacgttgatgacttttattacctgcttttatatatttcctgcttattttgttaaaacaatttctgaatttattttttaaagtatggtttcaatattttgtcagtgatatatgctgttataaaaattcagaaaatatgaactatgaaaagtaaattaaacattcttatcaccttc

SEQ ID NO: 148422 - DNA, 1827 bp, Homo sapiens
  Payload ID: 9394
  Gene Symbol: LRRIQ4
  Gene Name: leucine-rich repeats and IQ motif containing 4
  Uniprot ID: A6NIV6
  ENST ID: ENST00000340806
  CDS Start-End: 1-1683
atgtcaaaagacataaaatcagtagaacattcacctaaaattcatcagagaaatgatccacagcacgtcaatgatagaacatttttcattgatgcctctaatcagagcttgactgccattcctttggagatcttcacattcacagaattagaagaagtgcatttggagaataaccagattgaagaaattccccaggagattcagcgtttaaagaacatcagggtcctctacctggataagaacaacctgaggagcctgtgcccggcgctggggctgctgagcagcctggagagcctggacctgagctacaaccccatcttctcctcctcccttgtcgttgtcagcttcctccacgccctgcgcgagctccggctctaccagaccgacctgaaggaaattcccgtcgtcatctttaaaaacctccaccatctcgagctgctcggactgaccggaaaccacctgaaatgtctgcccaaggaaatagtgaaccagaccaagctgagggagatctacctgaagcgaaaccagtttgaagttttcccccaggagctctgtgttctctacaccctggaaatcattgacctggacgagaacaaaataggtgccatcccagaagagatcggacacctgacggggctgcagaagttctatatggcttctaacaaccttcccgttctgcccgcgtccttgtgccagtgtagccaactgtcggtgctcgatttatcccacaacctcctccactccatcccgaagagcttcgccgagctcaggaagatgacggaaatcgggctgagcgggaaccgcctggagaaggtgccacgcctcatttgcaggtggacctcgctgcacctgctctacctgggaaacaccggcctgcacaggctgcggggctccttcaggtgcctggtcaacttgcgcttcctggacctaagccagaaccatctgcaccactgcccgctgcagatctgtgcactgaagaaccttgaagtcctgggactggatgacaataaaataggacagttaccttcagaattgggctcactttcaaaactgaagatacttggactaacaggaaatgagttcctttcctttccggaggaagtcctttctttagcgtctttagagaaattatacattgggcaagaccagggattcaaacttacctatgtgccagaacacattaggaaactgcagagtctcaaagagctatatatagagaacaatcatctggagtacctgcccgtatccttggggtcaatgcctaacctagaagttcttgattgccggcacaatttgcttaagcaacttccagatgccatttgccaagcacaagctttgaaagaattacggctggaggacaacttgctcacccatcttccagagaatttggattccctagtgaatcttaaggttctgacactgatggacaatcccatggaagaacccccaaaagaagtgtgtgctgaaggcaatgaggccatatggaaatacctcaaggaaaacagaaacaggaatataatggcaacaaagattcaggcatggtggcgtggaacaatggtacagagaggatttgggaaattcggtgaactactaaaaccacaaaagaaaggaaagacctctccaaaagataagaaaggaaagaaggatgtaaaaggaaaaccaggaaagggaaaaaagaaataatcctgtaaattgataaattggggtaatggaccttgatagattaagaagacaaaatatctaggaattagatgcctactacattaaaattattcataaaattacacttatgtgtaaaaataaatgattcttacttttactgaaata

SEQ ID NO: 148423 - DNA, 1423 bp, Homo sapiens
  Payload ID: 9395
  Gene Symbol: LRTM1
  Gene Name: leucine-rich repeats and transmembrane domains 1
  Uniprot ID: Q9HBL6
  ENST ID: ENST00000273286
  CDS Start-End: 164-1201
ttgaaagcaacaactgttttctgcattgaagaaaagcaagggcagggttcagaaagactgaatgtaaagctgggctctgagtctgccatgcccttcgtgtgttgctctgcacattaattaaagggtctacgaggtcagcaaggacgcccaaggagactcagtcatgaaaggtgaactgctcctgttttccagtgtgattgtcctgctccaggtggtatgcagctgcccggacaagtgttactgtcagtcatctacaaattttgtagactgcagccagcagggtctggccgaaatcccttcccatttacctcctcagactcgaacgctgcatttacaagataatcagatacaccatcttcctgcttttgcatttaggtcagtgccatggctcatgaccttaaacttgtccaacaattccctttcaaatctggcccctggagctttccatgggcttcagcacttgcaggttttaaatctaacccagaattcactcctttccctggaaagcagacttttccattccctccctcagctgagggagcttgatttgtcatcaaacaacataagccaccttcccacatccttgggagagacttgggagaacctaactatacttgcggttcaacaaaaccagcttcagcagcttgatcgagcgctcctggaatccatgcccagtgtgaggcttttacttctcaaggacaacctctggaaatgcaattgccacttgctcggtcttaaactctggctggagaaatttgtctataaagggggactaacagacggcatcatctgtgaatcaccagacacctggaagggaaaggacctccttaggatccctcatgagctgtaccagccctgccctcttcctgctcctgatccagtgtcctcgcaggctcagtggcccggctctgcccacggtgtggtcctgaggcctcctgagaaccacaacgcgggggagcgagaactcttggagtgcgagctcaaacccaagccaaggccggccaacctgcgtcatgccattgccactgtcatcatcactggcgttgtgtgtgggattgtgtgtctcatgatgttggcagctgccatctatggctgcacctatgcggcaatcacagcccagtaccatgggggacccttggctcaaaccaatgatcctgggaaggtggaagaaaaagagcgatttgacagctcaccagcctgagagcttttgtctcaaataggattggtcattgcaggccagaagatagtgtctgagtagggctgatgtgtttcctgttagtctgattttgcttttgccaaaagacaaaaaaaaaaaaaaaaaaaaaaagaaaaaaaaaagatgtgtctgtaaaaaatatttctggggaggaatttatgttgcgatttttaaaatactataggtaaaataaagatgatacttgtg

SEQ ID NO: 148424 - DNA, 1318 bp, Homo sapiens
  Payload ID: 9395
  Gene Symbol: LRTM1
  Gene Name: leucine-rich repeats and transmembrane domains 1
  Uniprot ID: Q9HBL6
  ENST ID: ENST00000493075
  CDS Start-End: 383-1192
aagcctctgaaatgcaccatgtcggtgcccaggctcattctgctctgccttaagtgtccttcgttctctggaccacagccttcccaagaatgaggacctgttcttgctccctgctggacccctgcctccagcaagatgctgagtacacagacgacccataggtgaactgctcctgttttccagtgtgattgtcctgctccaggtggtatgcagctgcccggacaagtgttactgtcagtcatctacaaattttgtagactgcagccagcagggtctggccgaaatcccttcccatttacctcctcagactcgaacgctgcatttacaagataatcagatacaccatcttcctgcttttgcatttaggtcagtgccatggctcatgaccttaaacttgtccaacaattccctttcaaatctggcccctggagctttccatgggcttcagcacttgcaggttttaaatctaacccagaattcactcctttccctggaaagcagacttttccattccctccctcagctgagggagcttgatttgtcatcaaacaacataagccaccttcccacatccttgggagagacttgggagaacctaactatacttgcggttcaacaaaaccagcttcagcagcttgatcgagcgctcctggaatccatgcccagtgtgaggcttttacttctcaaggacaacctctggaaatgcaattgccacttgctcggtcttaaactctggctggagaaatttgtctataaagggggactaacagacggcatcatctgtgaatcaccagacacctggaagggaaaggacctccttaggatccctcatgagctgtaccagccctgccctcttcctgctcctgatccagtgtcctcgcaggctcagtggcccggctctgcccacggtgtggtcctgaggcctcctgagaaccacaacgcgggggagcgagaactcttggagtgcgagctcaaacccaagccaaggccggccaacctgcgtcatgccattgccactgtcatcatcactggcgttgtgtgtgggattgtgtgtctcatgatgttggcagctgccatctatggctgcacctatgcggcaatcacagcccagtaccatgggggacccttggctcaaaccaatgatcctgggaaggtggaagaaaaagagcgatttgacagctcaccagcctgagagcttttgtctcaaataggattggtcattgcaggccagaagatagtgtctgagtagggctgatgtgtttcctgttagtctgattttgcttttgccaaaagacaaaaaaaaaaaaaaaaaaaaaaa

SEQ ID NO: 148425 - DNA, 3688 bp, Homo sapiens
  Payload ID: 9396
  Gene Symbol: LRTM2
  Gene Name: leucine-rich repeats and transmembrane domains 2
  Uniprot ID: Q8N967
  ENST ID: ENST00000299194
  CDS Start-End: 545-1657
ccctttcttccctctctcctctctctctctccctccatccctctctttccttctcagtttgtgactgacccagcagccccgtcccccgtctgccacaagcagtccacctcctggtgctgtgtgctgcgtgccagccgctgctcccgctgagtggagactctggcaccagtgcccactgcgctctgcctgccggtggtgtctggatttctataggaatcccaggagggtcttactggagggttgagagccacctgattgaaggcgtttgcagtcagagtaaagacggctgccgcagcatgaacccctgagctgatgagtcttattatagcccggctggcggaagacagagtgctgctattcacctctgcgtgggcgtcggtggtgcagggggaagcagcaggccatccagcggctcacaccctacgcggctgcagctgccaagggcctggcccctgcctccctcgggccatggactgacaggcggcgcacccaggggctcctctctccccagagcgacagggcccggagagccgtgggcctcaccatgctggcgccgggcagcagccctgggcagaggggcaggctcgccctgcagtggaggcaagtctcctggatcacctgctggatcgccctgtatgctgtggaggccctccccacctgccctttctcctgcaagtgtgacagccgcagcctggaggtggactgcagtggccttggcctcaccacggtgcccccagacgtgcccgcagccacccgaaccctcttgctcttgaacaataagctgagtgccctgccaagctgggctttcgccaacctctccagcctgcagcggttggacctgtccaacaacttcctggaccggctgccccgctccattttcggggacctgacgaatctgactgagcttcagctgcgcaataacagcatcaggaccctggacagggacctgctgcggcactcgccgctgctccgccacctggacctgtccatcaacggcctggcccagttgccccctggtcttttcgacgggctcctggctctgcgctccctctcgcttcgctccaaccgtctgcagaatctggaccggctgacatttgaacccctagcaaacctgcagctgctgcaggtcggggataacccctgggagtgtgactgtaacctgcgtgagttcaaacactggatggagtggttctcctaccgagggggacgcttggaccagcttgcctgcaccctgcccaaggagctgagggggaaggacatgcggatggtccccatggagatgttcaactactgctcccagctggaggacgagaatagctcagctgggctggatattcctgggccaccctgcaccaaggccagtccagagcctgctaagcccaagcccggggctgagccggagccggagcccagcacagcctgcccacagaagcagaggcaccggccggcgagcgtgaggcgagccatgggcacggtgatcattgcaggggtcgtgtgcggcgtcgtctgcatcatgatggtggtggccgctgcctatggctgcatctacgcctccctcatggccaagtaccaccgggagctcaaaaagcgccagcccctgatgggggaccccgagggcgagcacgaggaccagaagcagatctcttctgtggcctgagcgcccatccccacccggccaggtaggaagggcggggagagcacacggcattgctcagccacagctcccaccttgacccggcgctggccactgcctccccgagtccaccctcctccccgccctccagcagacaagccacaccgggttctctccctgcactttcgaggctccctgaaagccaccgtgctgggggctcctgctgatgctcctgtctgggccagtaaatctttggaacatgtgggggatctccctaagctctggccacagcaaagcaaggaggtgtgtgcaagaggaggcttccggactgggcattcccctgtcgcccttcctgccctggggtggccatagctggtgactcttcctaccttgctggtcccacctcacctgcattgaggggacggggagggagggatctgagggatgaaggtagatttctgagactctctcctaagccagaaagacgttcttaacacccctgcagtgtgaaagctggtccagctctacaactgttggtaccaatgtgcaaacacaccagccctgccatctggacccagcactcagaaacaccatacacccctggccgacgccatcatgcccctggatctgctataggccacactgaccacatgctcctggattcgctaattcactcacacacccattgcatcaccagtgcggtcacatggattgaaagaattaatacacacacacacacacacacactcacacggtcacacggagaccgaggctatgagcgctcgaacagcagagacatgctcttccccaggggtctccctgagaccacagagcctctcgcgtgctcactgcaatcttctcaagtcaacagcaggaaggaactcaaccagtaacaccaggatcctttgagatcctctaaagtgggccaaagtggtgcccctggaggagccctcctgtcaccatggtaaccctctcacacctctcctgctgggctttcccgggataccacccaggggcctggagcggctgcatgtgtgcatggcggcctcctgaggacccagccacacaccactggtgttgcctcggtcctgcccacgcatctcacagcaccaggccctgtggggcccccactgattcctccacagcctgcagcctggcaccgtgactctgtgcctctcgccctccatcttcagtactcctggcctgtgacttcagggctgggacttggtggtgctttgccattggtggcaccctctggggaaagcaggtggcaggcagagaacacggtggctcccctgaggctcattgcctgccagcttattgcagacagagcccaggagcaggagcgggtggccacgtgctgcccagaggctcccaggatggggcctctgttcccgggctttgtctgctcagtgtggctccctagagcacccagccggggccaaaccagagagtgggtggggagcctgtctgggacagagccacctgctgccaaggcagtgcaagttttccaggttacctgtccccctccctagctctgcccctcctcagagtgtgaagatggtgggtacctaggtgtcatgctcacaggctcaggaggcatcaggctcgtccctggctctgggatggaatctcgatgggggctcaggaagaggccagcaagaaccctgaagccaagggtctgagcagagggagttggcaggcctagctcctgtgccccactccgaccctccctgctcatgcggcagtgggtgggtgaggtgggctgggggcctggaggagtgcctttgaggaggtcagtcctggcaggtggacagaggacgcctggcatgggctgcttactgggaccccaggcggccctggccatggccacagtcttccttcttttggcgtgtgggctggtaccagatctggggattttctaaagggactggggggaggggagggcattgtcaatggtggtatctttagcctgagacagaagatttttaaaggcaaaattatatttctggtttgttgtttcagaagaccaataaagactgtattttcctatgt

SEQ ID NO: 148426 - DNA, 597 bp, Homo sapiens
  Payload ID: 9396
  Gene Symbol: LRTM2
  Gene Name: leucine-rich repeats and transmembrane domains 2
  ENST ID: ENST00000546167
  CDS Start-End: 319-597
aaagaaagtctcagcactgccaaaagagggagaccaggaaagccaggcccgcggggagggctgccgcagcatgaacccctgagctgatgagtcttattatagcccggctggcggaagacagagtgctgctattcacctctgcgtgggcgtcggtggtgcagggggaagcagcaggccatccagcggctcacaccctacgcggctgcagctgccaagggcctggcccctgcctccctcgggccatggactgacaggcggcgcacccaggggctcctctctccccagagcgacagggcccggagagccgtgggcctcaccatgctggcgccgggcagcagccctgggcagaggggcaggctcgccctgcagtggaggcaagtctcctggatcacctgctggatcgccctgtatgctgtggaggccctccccacctgccctttctcctgcaagtgtgacagccgcagcctggaggtggactgcagtggccttggcctcaccacggtgcccccagacgtgcccgcagccacccgaaccctcttgctcttgaacaataagctgagtgccctgccaagctgggctttcgccaacctctccagc

SEQ ID NO: 148427 - DNA, 587 bp, Homo sapiens
  Payload ID: 9396
  Gene Symbol: LRTM2
  Gene Name: leucine-rich repeats and transmembrane domains 2
  ENST ID: ENST00000543694
  CDS Start-End: 301-587
gcgcagaagcctgagaggaagggtgcggacaccaggtctgtgctgccgcagcatgaacccctgagctgatgagtcttattatagcccggctggcggaagacagagtgctgctattcacctctgcgtgggcgtcggtggtgcagggggaagcagcaggccatccagcggctcacaccctacgcggctgcagctgccaagggcctggcccctgcctccctcgggccatggactgacaggcggcgcacccaggggctcctctctccccagagcgacagggcccggagagccgtgggcctcaccatgctggcgccgggcagcagccctgggcagaggggcaggctcgccctgcagtggaggcaagtctcctggatcacctgctggatcgccctgtatgctgtggaggccctccccacctgccctttctcctgcaagtgtgacagccgcagcctggaggtggactgcagtggccttggcctcaccacggtgcccccagacgtgcccgcagccacccgaaccctcttgctcttgaacaataagctgagtgccctgccaagctgggctttcgccaacctctccagcctgcagcg

SEQ ID NO: 148428 - DNA, 3236 bp, Homo sapiens
  Payload ID: 9396
  Gene Symbol: LRTM2
  Gene Name: leucine-rich repeats and transmembrane domains 2
  Uniprot ID: Q8N967
  ENST ID: ENST00000535041
  CDS Start-End: 446-1558
tccacctcctggtgctgtgtgctgcgtgccagccgctgctcccgctgagtggagactctggcaccagtgcccactgcgctctgcctgccggtggtgtctggatttctataggaatcccaggagggtcttactggagggttgagagccacctgattgaaggcgtttgcagtcagagtaaagacggcagctgccgcagcatgaacccctgagctgatgagtcttattatagcccggctggcggaagacagagtgctgctattcacctctgcgtgggcgtcggtggtgcagggggaagcagcaggccatccagcggctcacaccctacgcggctgcagctgccaagggcctggcccctgcctccctcgggccatggactgacaggcggcgcacccaggggctcctctctccccagagcgacagggcccggagagccgtgggcctcaccatgctggcgccgggcagcagccctgggcagaggggcaggctcgccctgcagtggaggcaagtctcctggatcacctgctggatcgccctgtatgctgtggaggccctccccacctgccctttctcctgcaagtgtgacagccgcagcctggaggtggactgcagtggccttggcctcaccacggtgcccccagacgtgcccgcagccacccgaaccctcttgctcttgaacaataagctgagtgccctgccaagctgggctttcgccaacctctccagcctgcagcggttggacctgtccaacaacttcctggaccggctgccccgctccattttcggggacctgacgaatctgactgagcttcagctgcgcaataacagcatcaggaccctggacagggacctgctgcggcactcgccgctgctccgccacctggacctgtccatcaacggcctggcccagttgccccctggtcttttcgacgggctcctggctctgcgctccctctcgcttcgctccaaccgtctgcagaatctggaccggctgacatttgaacccctagcaaacctgcagctgctgcaggtcggggataacccctgggagtgtgactgtaacctgcgtgagttcaaacactggatggagtggttctcctaccgagggggacgcttggaccagcttgcctgcaccctgcccaaggagctgagggggaaggacatgcggatggtccccatggagatgttcaactactgctcccagctggaggacgagaatagctcagctgggctggatattcctgggccaccctgcaccaaggccagtccagagcctgctaagcccaagcccggggctgagccggagccggagcccagcacagcctgcccacagaagcagaggcaccggccggcgagcgtgaggcgagccatgggcacggtgatcattgcaggggtcgtgtgcggcgtcgtctgcatcatgatggtggtggccgctgcctatggctgcatctacgcctccctcatggccaagtaccaccgggagctcaaaaagcgccagcccctgatgggggaccccgagggcgagcacgaggaccagaagcagatctcttctgtggcctgagcgcccatccccacccggccaggtaggaagggcggggagagcacacggcattgctcagccacagctcccaccttgacccggcgctggccactgcctccccgagtccaccctcctccccgccctccagcagacaagccacaccgggttctctccctgcactttcgaggctccctgaaagccaccgtgctgggggctcctgctgatgctcctgtctgggccagtaaatctttggaacatgtgggggatctccctaagctctggccacagcaaagcaaggaggtgtgtgcaagaggaggcttccggactgggcattcccctgtcgcccttcctgccctggggtggccatagctggtgactcttcctaccttgctggtcccacctcacctgcattgaggggacggggagggagggatctgagggatgaaggtagatttctgagactctctcctaagccagaaagacgttcttaacacccctgcagtgtgaaagctggtccagctctacaactgttggtaccaatgtgcaaacacaccagccctgccatctggacccagcactcagaaacaccatacacccctggccgacgccatcatgcccctggatctgctataggccacactgaccacatgctcctggattcgctaattcactcacacacccattgcatcaccagtgcggtcacatggattgaaagaattaatacacacacacacacacacacactcacacggtcacacggagaccgaggctatgagcgctcgaacagcagagacatgctcttccccaggggtctccctgagaccacagagcctctcgcgtgctcactgcaatcttctcaagtcaacagcaggaaggaactcaaccagtaacaccaggatcctttgagatcctctaaagtgggccaaagtggtgcccctggaggagccctcctgtcaccatggtaaccctctcacacctctcctgctgggctttcccgggataccacccaggggcctggagcggctgcatgtgtgcatggcggcctcctgaggacccagccacacaccactggtgttgcctcggtcctgcccacgcatctcacagcaccaggccctgtggggcccccactgattcctccacagcctgcagcctggcaccgtgactctgtgcctctcgccctccatcttcagtactcctggcctgtgacttcagggctgggacttggtggtgctttgccattggtggcaccctctggggaaagcaggtggcaggcagagaacacggtggctcccctgaggctcattgcctgccagcttattgcagacagagcccaggagcaggagcgggtggccacgtgctgcccagaggctcccaggatggggcctctgttcccgggctttgtctgctcagtgtggctccctagagcacccagccggggccaaaccagagagtgggtggggagcctgtctgggacagagccacctgctgccaaggcagtgcaagttttccaggttacctgtccccctccctagctctgcccctcctcagagtgtgaagatggtgggtacctaggtgtcatgctcacaggctcaggaggcatcaggctcgtccctggctctgggatggaatctcgatgggggctcaggaagaggccagcaagaaccctgaagccaagggtctgagcagagggagttggcag

SEQ ID NO: 148429 - DNA, 3986 bp, Homo sapiens
  Payload ID: 9396
  Gene Symbol: LRTM2
  Gene Name: leucine-rich repeats and transmembrane domains 2
  Uniprot ID: Q8N967
  ENST ID: ENST00000543818
  CDS Start-End: 843-1955
ggaggcgcaggatggaagatggaggtggtggtgaaaccgctttcctcctccctgtggtcggcagcgattcatccacaggcgcctttttccactgaaatgtgagcgtggccagggtgagcgctgccctcgcggccggccgtggtgcctctggtgtgcgcctgtgtgtgctgctgccgctgtcatcacagatgcaccccagctgtcactccccgctccactctggctcgctgctcgcgcacacgcgtgcgctctcctccctcgcccctttcttccctctctcctctctctctctccctccatccctctctttccttctcagtttgtgactgacccagcagccccgtcccccgtctgccacaagcagtccacctcctggtgctgtgtgctgcgtgccagccgctgctcccgctgagtggagactctggcaccagtgcccactgcgctctgcctgccggtggtgtctggatttctataggaatcccaggagggtcttactggagggttgagagccacctgattgaaggcgtttgcagtcagagtaaagacggctgccgcagcatgaacccctgagctgatgagtcttattatagcccggctggcggaagacagagtgctgctattcacctctgcgtgggcgtcggtggtgcagggggaagcagcaggccatccagcggctcacaccctacgcggctgcagctgccaagggcctggcccctgcctccctcgggccatggtgagctgtggcggggctagaggaaccgggacccaggactgacaggcggcgcacccaggggctcctctctccccagagcgacagggcccggagagccgtgggcctcaccatgctggcgccgggcagcagccctgggcagaggggcaggctcgccctgcagtggaggcaagtctcctggatcacctgctggatcgccctgtatgctgtggaggccctccccacctgccctttctcctgcaagtgtgacagccgcagcctggaggtggactgcagtggccttggcctcaccacggtgcccccagacgtgcccgcagccacccgaaccctcttgctcttgaacaataagctgagtgccctgccaagctgggctttcgccaacctctccagcctgcagcggttggacctgtccaacaacttcctggaccggctgccccgctccattttcggggacctgacgaatctgactgagcttcagctgcgcaataacagcatcaggaccctggacagggacctgctgcggcactcgccgctgctccgccacctggacctgtccatcaacggcctggcccagttgccccctggtcttttcgacgggctcctggctctgcgctccctctcgcttcgctccaaccgtctgcagaatctggaccggctgacatttgaacccctagcaaacctgcagctgctgcaggtcggggataacccctgggagtgtgactgtaacctgcgtgagttcaaacactggatggagtggttctcctaccgagggggacgcttggaccagcttgcctgcaccctgcccaaggagctgagggggaaggacatgcggatggtccccatggagatgttcaactactgctcccagctggaggacgagaatagctcagctgggctggatattcctgggccaccctgcaccaaggccagtccagagcctgctaagcccaagcccggggctgagccggagccggagcccagcacagcctgcccacagaagcagaggcaccggccggcgagcgtgaggcgagccatgggcacggtgatcattgcaggggtcgtgtgcggcgtcgtctgcatcatgatggtggtggccgctgcctatggctgcatctacgcctccctcatggccaagtaccaccgggagctcaaaaagcgccagcccctgatgggggaccccgagggcgagcacgaggaccagaagcagatctcttctgtggcctgagcgcccatccccacccggccaggtaggaagggcggggagagcacacggcattgctcagccacagctcccaccttgacccggcgctggccactgcctccccgagtccaccctcctccccgccctccagcagacaagccacaccgggttctctccctgcactttcgaggctccctgaaagccaccgtgctgggggctcctgctgatgctcctgtctgggccagtaaatctttggaacatgtgggggatctccctaagctctggccacagcaaagcaaggaggtgtgtgcaagaggaggcttccggactgggcattcccctgtcgcccttcctgccctggggtggccatagctggtgactcttcctaccttgctggtcccacctcacctgcattgaggggacggggagggagggatctgagggatgaaggtagatttctgagactctctcctaagccagaaagacgttcttaacacccctgcagtgtgaaagctggtccagctctacaactgttggtaccaatgtgcaaacacaccagccctgccatctggacccagcactcagaaacaccatacacccctggccgacgccatcatgcccctggatctgctataggccacactgaccacatgctcctggattcgctaattcactcacacacccattgcatcaccagtgcggtcacatggattgaaagaattaatacacacacacacacacacacactcacacggtcacacggagaccgaggctatgagcgctcgaacagcagagacatgctcttccccaggggtctccctgagaccacagagcctctcgcgtgctcactgcaatcttctcaagtcaacagcaggaaggaactcaaccagtaacaccaggatcctttgagatcctctaaagtgggccaaagtggtgcccctggaggagccctcctgtcaccatggtaaccctctcacacctctcctgctgggctttcccgggataccacccaggggcctggagcggctgcatgtgtgcatggcggcctcctgaggacccagccacacaccactggtgttgcctcggtcctgcccacgcatctcacagcaccaggccctgtggggcccccactgattcctccacagcctgcagcctggcaccgtgactctgtgcctctcgccctccatcttcagtactcctggcctgtgacttcagggctgggacttggtggtgctttgccattggtggcaccctctggggaaagcaggtggcaggcagagaacacggtggctcccctgaggctcattgcctgccagcttattgcagacagagcccaggagcaggagcgggtggccacgtgctgcccagaggctcccaggatggggcctctgttcccgggctttgtctgctcagtgtggctccctagagcacccagccggggccaaaccagagagtgggtggggagcctgtctgggacagagccacctgctgccaaggcagtgcaagttttccaggttacctgtccccctccctagctctgcccctcctcagagtgtgaagatggtgggtacctaggtgtcatgctcacaggctcaggaggcatcaggctcgtccctggctctgggatggaatctcgatgggggctcaggaagaggccagcaagaaccctgaagccaagggtctgagcagagggagttggcaggcctagctcctgtgccccactccgaccctccctgctcatgcggcagtgggtgggtgaggtgggctgggggcctggaggagtgcctttgaggaggtcagtcctggcaggtggacagaggacgcctggcatgggctgcttactgggaccccaggcggccctggccatggccacagtcttccttcttttggcgtgtgggctggtaccagatctggggattttctaaagggactggggggaggggagggcattgtcaatggtggtatctttagcctgagacagaagatttttaaaggcaaaattatatttctggtttgttgtttcagaagaccaataaagactgtattttcctatgt

SEQ ID NO: 148430 - DNA, 2215 bp, Homo sapiens
  Payload ID: 9397
  Gene Symbol: LRWD1
  Gene Name: leucine-rich repeats and WD repeat domain containing 1
  Uniprot ID: Q9UFC0
  ENST ID: ENST00000292616
  CDS Start-End: 153-2096
gcttccttccggtcgttaacgcccacgggctcgcgcggcgccgcctcctgggctcagttaccgcggacgccagtgccgggctccaggagacgcagggcgacgccacacgccggggtggccgactgggtcagcgcgggctgcgcctcctcgccatgggccccctctcggcgcggctgctaatgcagcgcgggcgccccaagagcgaccggctggggaagatccggagtctggacctgtcaggattggagctgctttccgagcacctggaccccaaactcctgtgccgcctgacgcagctgcaggagcttgacctgtctaacaaccacctggagacgctgccggacaacctgggcctgtcccacctgcgtgtcctccgctgcgccaacaaccagctgggggatgttactgccttgtgccagttccccaagctcgaggaactcagcctggagggcaaccccttcctgacggtcaatgacaacctgaaagtctcctttctcctgcccacgctccgtaaggtcaatggcaaggatgcgtcctcaacttactctcaggtggagaacctgaatcgggagctgaccagcagggtcacagctcactgggagaagttcatggccacactgggtcctgaagaggaggctgagaaggcccaggcggactttgtgaagtcggctgtcagggatgtccgctacgggcccgagtccctcagcgagttcacccagtggcgggtgcggatgatctctgaggagctggtggccgccagtaggacccaggtgcaaaaggctaacagcccagagaagcccccagaagctggagctgcccacaagcccagggccagactggcggccttgaaacggccagacgacgtcccactcagcctctctcccagcaagcgggcgtgtgcctccccgtcggcccaggtggagggcagccctgtggcaggctccgatggcagccagcctgctgtgaagctggagcccctgcacttcctgcagtgccacagcaagaacaacagcccccaggacctcgagacccagctgtgggcctgtgccttcgagccggcctgggaggagggggccacatcccagaccgtggccacgtgcggcggggaggctgtgtgcgtaattgattgccagacgggcatcgtgctccacaagtacaaggcacccggcgaggagttcttttctgtggcctggaccgctctgatggtggtcacacaggctggccacaagaagcgctggagtgtgctggcggctgcaggcctacggggcctggtccggctgctgcacgtgcgtgccggcttctgctgcggggtcatccgagcccacaagaaggccatcgccaccctgtgcttcagccccgcccacgagacccatctcttcacggcctcctatgacaagcggatcatcctctgggacatcggggtgcccaaccaggactacgaattccaggccagccagctgctcacactggacaccacctctatccccctgcgcctctgccctgtcgcctcctgcccggacgcccgcctgctggccggctgcgagggcggctgctgctgctgggacgtgcggctggaccagccccaaaagaggagggtgtgtgaagtggaattcgtcttctctgagggctccgaggcatctggacggagagtggatgggctggcatttgtgaatgaggacatcgtggcctccaaggggagcggcctgggcaccatctgcctgtggagctggaggcagacgtgggggggccggggcagccagtccacggtggcagtggtggtcctggcgcggctgcaatggtcgtccaccgagttggcctacttctcgctcagcgcctgccctgataaggggattgtgctctgtggggatgaggagggcaacgtgtggctctacgacgtcagcaacatcctgaagcagccacccctgctgccggcagccctgcaggcccccacacagatcctgaagtggccccagccctgggcccttggccaggtggtgaccaagaccatggtgaacacagtggtggccaatgcctccttcacctacctcaccgccctgacggactccaacatcgtagccatctgggggaggatgtagcctcacaccatcgcaaaggaccagggacacagctaactaacttattcagctttgggccgatgggggtgggggggggtctttcagtgaatatttttattaaactctactgtggacaagaa

SEQ ID NO: 148431 - DNA, 703 bp, Homo sapiens
  Payload ID: 9397
  Gene Symbol: LRWD1
  Gene Name: leucine-rich repeats and WD repeat domain containing 1
  ENST ID: ENST00000476270
  CDS Start-End: 1-124
ggcgcggctgctaatgcagcgcgggcgccccaagagcgaccggctggggaagatccggagtctggatggtgtggagtcgggagtagtggcgcgcgcttctagtcccagctactcgagaggctgaggcgggaggatccctcagcccaggagttggaggcagctgtgagctatgatcgcgcctaggcgactgagtgacaccccgtctctaaaaataaagtaacggggggatgggcggggcggctacacttgtacgagaaatgtcaggtgaaaaagccttctgaggtacccggggcagattggtgtagggtgcaaagcctgcccgccccctaagccttctgcccccaactccagcctgtcaggattggagctgctttccgagcacctggaccccaaactcctgtgccgcctgacgcagctgcaggagcttgacctgtctaacaaccacctggagacgctgccggacaacctgggcctgtcccacctgcgtgtcctccgctgcgccaacaaccagctgggggatgttactgccttgtgccagttccccaagctcgaggaactcagcctggagggcaaccccttcctgacggtcaatgacaacctgaaagtctcctttctcctgcccacgctccgtaaggtcaatggcaaggatgcgtcctcaacttactctcaggtggagaacctgaatcgggagctgaccagcagg

SEQ ID NO: 148432 - DNA, 646 bp, Homo sapiens
  Payload ID: 9397
  Gene Symbol: LRWD1
  Gene Name: leucine-rich repeats and WD repeat domain containing 1
  ENST ID: ENST00000464107
  CDS Start-End: 81-218
gtgccgggctccaggagacgcagggcgacgccacacgccggggtggccgactgggtcagcgcgggctgcgcctcctcgccatgggccccctctcggcgcggctgctaatgcagcgcgggcgccccaagagcgaccggctggggaagatccggagtctggatggtgtggagtcgggagtagtggcgcgcgcttctagtcccagctactcgagaggctgaggcgggaggatccctcagcccaggagttggaggcagctcctgtcaggattggagctgctttccgagcacctggaccccaaactcctgtgccgcctgacgcagctgcaggagcttgacctgtctaacaaccacctggagacgctgccggacaacctgggcctgtcccacctgcgtgtcctccgctgcgccaacaaccagctgggggatgttactgccttgtgccagttccccaagctcgaggaactcagcctggagggcaaccccttcctgacggtcaatgacaacctgaaagtctcctttctcctgcccacgctccgtaaggtcaatggcaaggatgcgtcctcaacttactctcaggtggagaacctgaatcgggagctgaccagcagggtcacagctcactgggagaagttcatggccacactggg

SEQ ID NO: 148433 - DNA, 847 bp, Homo sapiens
  Payload ID: 9397
  Gene Symbol: LRWD1
  Gene Name: leucine-rich repeats and WD repeat domain containing 1
  ENST ID: ENST00000468175
  CDS Start-End: 1-728
agcggatcatcctctgggacatcggggtgcccaaccaggactacgaattccaggccagccagctgctcacactggacaccacctctatccccctgcgcctctgccctgtcgcctcctgcccggacgcccgcctgctggccggctgcgagggcggctgctgctgctgggacgtgcggctggaccagccccaaaagaggagggtgtgtgaagtggaattcgtcttctctgagggctccgaggcatctggacggagagtggatgggctggcatttgtgaatgaggacatcgtggcctccaaggggagcggcctgggcaccatctgcctgtggagctggaggcagacgtgggggggccggggcagccagtccacggtggcagtggtggtcctggcgcggctgcaatggtcgtccaccgagttggcctacttctcgctcagcgcctgccctgataaggggattgtgctctgtggggatgaggagggcaacgtgtggctctacgacgtcagcaacatcctgaagcagccacccctgctgccggcagccctgcaggcccccacacagcccagccctcccctctctccccaccagatcctgaagtggccccagccctgggcccttggccaggtggtgaccaagaccatggtgaacacagtggtggccaatgcctccttcacctacctcaccgccctgacggactccaacatcgtagccatctgggggaggatgtagcctcacaccatcgcaaaggaccagggacacagctaactaacttattcagctttgggccgatgggggtgggggggggtctttcagtgaatatttttattaaactctactgtggacaagaa

SEQ ID NO: 148434 - DNA, 1062 bp, Homo sapiens
  Payload ID: 9397
  Gene Symbol: LRWD1
  Gene Name: leucine-rich repeats and WD repeat domain containing 1
  ENST ID: ENST00000463739
  CDS Start-End: 600-1062
ggctcgcgcggcgccgcctcctgggctcagttaccgcggacgccagtgccgggctccaggagacgcagggcgacgccacacgccggggtggccgactgggtcagcgcgggctgcgcctcctcgccatgggccccctctcggcgcggctgctaatgcagcgcgggcgccccaagagcgaccggctggggaagatccggagtctggagtaagagccgggcagcggcctgtcaggattggagctgctttccgagcacctggaccccaaactcctgtgccgcctgacgcagctgcaggagcttgacctgtctaacaaccacctggagacgctgccggacaacctgggcctgtcccacctgcgtgtcctccgctgcgccaacaaccagctgggggatgttactgccttgtgccagttccccaagctcgaggaactcagcctggagggcaaccccttcctgacggtcaatgacaacctgaaagtctcctttctcctgcccacgctccgtaaggtcaatggcaaggatgcgtcctcaacttactctcaggtggagaacctgaatcgggagctgaccagcagggtcacagctcactgggagaagttcatggccacactgggtcctgaagaggaggctgagaaggcccaggcggactttgtgaagtcggctgtcagggatgtccgctacgggcccgagtccctcagcgagttcacccagtggcgggtgcggatgatctctgaggagctggtggccgccagtaggacccaggtgcaaaaggctaacagcccagagaagcccccagaagctggagctgcccacaagcccagggccagactggcggccttgaaacggccagacgacgtcccactcagcctctctcccagcaagcgggcgtgtgcctccccgtcggcccaggtggagggcagccctgtggcaggctccgatggcagccagcctgctgtgaagctggagcccctgcacttcctgcagtgccacagcaagaacaacagcccccaggacctcgagacccagctgtgggcctgtgccttcgagccggcctgggaggagg

SEQ ID NO: 148435 - DNA, 908 bp, Homo sapiens
  Payload ID: 9397
  Gene Symbol: LRWD1
  Gene Name: leucine-rich repeats and WD repeat domain containing 1
  ENST ID: ENST00000485808
  CDS Start-End: 1-538
gagtctggacctgtcaggattggagctgctttccgagcacctggaccccaaactcctgtgccgcctgacgcagctgcaggagcttgacctgtctaacaaccacctggagacgctgccggacaacctgggcctgtcccacctgcgtgtcctccgctgcgccaacaaccagctgggggatgttactgccttgtgccagttccccaagctcgaggaactcagcctggagggcaaccccttcctgacggtcaatgacaacctgaaagtctcctttctcctgcccacgctccgtaaggtcaatggcaaggatgcgtcctcaacttactctcaggtggagaacctgaatcgggagctgaccagcagggtcacagctcactgggagaagttcatggccacactgggtcctgaagaggaggctgagaaggcccaggcggactttgtgaagtcggctgtcagggatgtccgctacgggcccgagtccctcagcgagttcacccagtggcggggctgggggcacctgggactctgcccagcttcctgatggcctggccccacccaggtgcggatgatctctgaggagctggtggccgccagtaggacccaggtgcaaaaggctaacagcccagagaagcccccagaagctggagctgcccacaagcccagggccagactggcggccttgaaacggccagacgacgtcccactcagcctctctcccagcaagcgggcgtgtgcctccccgtcggcccaggtggagggcagccctgtggcaggctccgatggcagccagcctgctgtgaagctggagcccctgcacttcctgcagtgccacagcaagaacaacagcccccaggacctcgagacccagctgtgggcctgtgccttcgagccggcctgggaggagggggcca

SEQ ID NO: 148436 - DNA, 138 bp, Homo sapiens
  Payload ID: 9397
  Gene Symbol: LRWD1
  Gene Name: leucine-rich repeats and WD repeat domain containing 1
  ENST ID: ENST00000626402
  CDS Start-End: 1-138
atgggccccctctcggcgcggctgctaatgcagcgcgggcgccccaagagcgaccggctggggaagatccggagtctggatggtgtggagtcgggagtagtggcgcgcgcttctagtcccagctactcgagaggctga

SEQ ID NO: 148437 - DNA, 1870 bp, Homo sapiens
  Payload ID: 9398
  Gene Symbol: LSMEM1
  Gene Name: leucine-rich single-pass membrane protein 1
  Uniprot ID: Q8N8F7
  ENST ID: ENST00000312849
  CDS Start-End: 362-757
agtccaataaaaacctcatcagttaccaactaaatcagggcatggtgtttttttgttgttttctttttaaagcatagttttagtaatatatttactaaaaaccttagacattatgaaaaaagtcaggatttggaatcttacactgcttggctaaattgacacaatatagaccaacagtttcatcctggggcttatgggtctcataggagcacccgtatgctgaagaaaggcaaagagagaactacagaatttgtagaaaagttttgttgtagttgcttctgaacaattagtttttgtttgtttgttttgttttgttttgtttttctggtaacctagcagtcaaagctcacatttttggacaatgactcattcttcccaggacactggttcttgtggcattcaggaagatggaaagctttatgtggtggattccataaatgacttaaacaaactaaacctctgtccagccggatcgcagcatctgttccctctagaggacaaaatcccagtccttggcacaaactcaggaaatggaagccggagtctgttttttgtggggctgctaattgtgctgattgtcagcctggcactggtttttttcgtgatatttctaatagttcaaactggaaacaagatggatgatgtgtcaagaagactaacagctgaaggaaaagacatagatgatcttaagagaatcaataacatgatcgtaaagcgactcaaccaactcaaccaactggactctgaacaaaactaaaggaatgattttctgaaagcacctgctaacaccttgagctttttactttcctgggagtgtacagggttaggaactgagaaagtgcacttcctcaggcaacagatgatctggtcaggcaacccacccctggggcccactttctgcagcaagatgggagcaattccaaggcaagtgggtatgggaatagcaactaaaaaggggtgaacttgtctcagcccccttttatggtagggcacttcaactttaatggggtgggcggctagcagggaggagaatcaacaaagcaagagaacttgactatgtacgtccaacttcttacagaaggagctttgctaccagaacaagttcactgtgtcaatgaagttcatgacacctcatgcacctttacagatatctgggaaagcctgagaaattcattgagttttatgtattgaagggaaccaggtgattactcttttcaataagagggattctgctcaggtgattagactttgactctatttccccagggacagtgatgggtgggccccagagctagttgctgtctggtgtttgctggtgaaaacatgagcagtagttatgtggggctgagagtcaaaagggaaagcctaattaattcaactaatgtttattaagctcctactctgtgcaaatcactctactcaagaggagctcacataagagtgcaggataaagaaaggagatggacagttatatgtaattatataaactttgtgtattttgtttctcatgaaaaaacccctttggcaccctgctgattgatttggaagaaatctgatagatttgtggcctttcctaaattgcactaggaaattatgtagttagaatatttggaacctgcattagttccagcaatgaaagtaagacacacagcatatgacataagacacagtgtgaaataaatgagtttaaaaagcatatgagtcttagaaaatcttttatttaatataaaaatattctaccggtcaattgaagaatgtattatgattctatcattttggattgatcaaaaacatttgggtttactacgatattaagcattcactttacaatactaaatagttaatgaaataaacacattttgcttaccca

SEQ ID NO: 148438 - DNA, 730 bp, Homo sapiens
  Payload ID: 9398
  Gene Symbol: LSMEM1
  Gene Name: leucine-rich single-pass membrane protein 1
  Uniprot ID: Q8N8F7
  ENST ID: ENST00000439068
  CDS Start-End: 136-531
agtgtttgcaagtcagtcatcatagtggcagcttccgcctgctacaggatatttatatatggaagcataccatggcaggagtgctggaaaggtggtgtcagctaacagttgcttcagccagataaggacgggacaatgactcattcttcccaggacactggttcttgtggcattcaggaagatggaaagctttatgtggtggattccataaatgacttaaacaaactaaacctctgtccagccggatcgcagcatctgttccctctagaggacaaaatcccagtccttggcacaaactcaggaaatggaagccggagtctgttttttgtggggctgctaattgtgctgattgtcagcctggcactggtttttttcgtgatatttctaatagttcaaactggaaacaagatggatgatgtgtcaagaagactaacagctgaaggaaaagacatagatgatcttaagagaatcaataacatgatcgtaaagcgactcaaccaactcaaccaactggactctgaacaaaactaaaggaatgattttctgaaagcacctgctaacaccttgagctttttactttcctgggagtgtacagggttaggaactgagaaagtgcacttcctcaggcaacagatgatctggtcaggcaacccacccctggggcccactttctgcagcaagatgggagcaattccaaggcaagtgggtatgggaatagcaactaaaaagg

SEQ ID NO: 148439 - DNA, 819 bp, Homo sapiens
  Payload ID: 9398
  Gene Symbol: LSMEM1
  Gene Name: leucine-rich single-pass membrane protein 1
  Uniprot ID: Q8N8F7
  ENST ID: ENST00000455302
  CDS Start-End: 315-494
agtcatcatagtggcagcttccgcctgctacaggatatttatatatggaagcataccatggcaggagtgctggaaaggtggtgtcagctaacagttgcttcagccagataaggacggtgttccatcttaacataagtcaccaacttctaaacctggcactgggcatttgaagaataggattcgtccctactctaaggagttttcagtctatcgggaaatcaaagatgtaagcaaatagatgcaataaaatactacagatgttctgatagaagaatgtaaagaatccagcaaaggcaaaaggaaagacagggacaatgactcattcttcccaggacactggttcttgtggcattcaggaagatggaaagctttatgtggtggattccataaatgacttaaacaaactaaacctctgtccagccggatcgcagcatctgttcctgttaagacagtcttcaaagaactttccaaagaggtctaaggagatagcttaaccctgcttattccttgaataccaatagagaagaagctctagaggacaaaatcccagtccttggcacaaactcaggaaatggaagccggagtctgttttttgtggggctgctaattgtgctgattgtcagcctggcactggtttttttcgtgatatttctaatagttcaaactggaaacaagatggatgatgtgtcaagaagactaacagctgaaggaaaagacatagatgatcttaagagaatcaataacatgatcgtaaagcgactcaaccaactcaaccaactggactctgaacaaaactaaaggaatgattttctgaaagca

SEQ ID NO: 148440 - DNA, 1494 bp, Homo sapiens
  Payload ID: 9399
  Gene Symbol: LSMEM2
  Gene Name: leucine-rich single-pass membrane protein 2
  Uniprot ID: Q8N112
  ENST ID: ENST00000316436
  CDS Start-End: 88-582
ctattttaggccaaggctgggaggcagccaggccttccctgggctcacaaaggagccactgctgcatttgtccagtcctgctactggatgccatcattggcccccgactgcccactgcttgccatgcctgaggagacccaagaagactccgtggcgccaatgatgcccagccagaggagcagggggccattggcccccaaccacgtgcatgaggtatgcctgcaccaggtggagtccatcagcgacctacatagtggagcaggcacactgcgcccctatctaactgaagaggcacgaccgtgggatgagctgctgggcgttttgccgccgtcactgtgtgcccaggctggctgcagccctgtgtacagacgaggagggttcctgctgctgctcgcgctgctggtgctcacttgcctagtgctcgcactcctggctgtctacctgagcgtgctgcagagtgaatccctgcgcatcctggcacacacgctccgcacgcaggaggagacactactcaaactccgcttggccagcctcagccagcttcggaggctcaactccagtgaggcccaagcacccagctgagatgccatttggatctggggcctgggggtgtgtgttggtgggggaataaagtggctatgggcaggtctctccttccctactgctggctgccacatctacactatttccttggtgagatttttgtacaagaacctgttgttaacttaatggctgcctccctctcctgatctcttcaagccaggcctagccaagcctctggtgccaaagcctcgctttgggtggcccaaggtcaggggaaggggcaccagcctcctggctcctcctgtggcctgtcaacactctctggccaccccagatggcaggttctgaagtctagaaatagctgcccccatagcaatcacccaaactctgccagggctcccagtgagggtccagcctcagctcttaaagacaggctgggctctgagtagggggagaggcaccacctggggaagactgccttggagggcaaaggtgacatcgtggaagaccagttgggcccaagcctgggatagtagatggggagggagaacagaaaaatacccaggggttaagaccacagaaggctgaccgttctgtttaattatctgtaataatccttaaaaatcagcacacaaatccattccaggtagctttgccaccccacctgctgtggtggcatttgtccagatgccaccacccccctaagagtgggtcatcctgggggagcaaggcctgagaaaggaaaggaagggaaaggccccctagtgcctgccccacagccctgaggaaggcacatatttagcctggcctgagacaggacaggaaggggccacagggctgagtgcagggacaaaggggtcagggtcccaagtgtccgggcccccagctacccaccccatgtctgtttttggttttgtcattaaaaaaaataaagtgacaaatactggtgga

SEQ ID NO: 148441 - DNA, 1247 bp, Homo sapiens
  Payload ID: 9400
  Gene Symbol: LGI1
  Gene Name: leucine-rich, glioma inactivated 1
  Uniprot ID: O95970
  ENST ID: ENST00000371413
  CDS Start-End: 1-876
atggaatcagaaagaagcaaaaggatgggaaatgcctgcattcccctgaaaagaattgcttatttcctatgtctcttatctgcgcttttgctgactgaggggaagaaaccagcgaagccaaaatgccctgccgtgtgtacttgtaccaaagataatgctttatgtgagaatgccagatccattccacgcaccgttcctcctgatgttatctcattatcctttgtgagatctggttttactgaaatctcagaagggagttttttattcacgccatcgctgcagctcttgttattcacatcgaactcctttgatgtgatcagtgatgatgcttttattggtcttccacatctagagtatttattcatagaaaacaacaacatcaagtcaatttcaagacatactttccggggactaaagtcattaattcacttgagccttgcaaacaacaatctccagacactcccaaaagatattttcaaaggcctggattctttaacaaatgtggacctgaggggtaattcatttaattgtgactgtaaactgaaatggctagtggaatggcttggccacaccaatgcaactgttgaagacatctactgcgaaggccccccagaatacaagaagcgcaaaatcaatagtctctcctcgaaggattttgattgcatcattacagaatttgcaaagtctcaagacctgccttatcaatcattgtccatagacactttttcttatttgaatgatgagtatgtagtcatcgctcagccttttactggaaaatgcattttccttgaatgggaccatgtggaaaagaccttccggaattatgacaacattacagttttaagggaaatacacagatttacaaacatgtcatagttgacttaagcgcatgagacaccaaattctgtggctgccatcagaaattttctacagtacatgacccggatgaactcaatgcatgatgactcttcttatcacacttgcaaatgaatgcctttcaaacattgagactgctagaaccaagcactaccagtatctccatccttaactgtccagtccagtgatgtgggaagttaccttttataagacaaaatttaattgtgtaactgttctttgcagtgaagatgtgtaaataagcgtttaatggtatctgttactccaaaaagaaatattaatatgtacttttccatttatttattcatgtgtacagaaacaactgccaaataaaatgtttacattttctttca

SEQ ID NO: 148442 - DNA, 2381 bp, Homo sapiens
  Payload ID: 9400
  Gene Symbol: LGI1
  Gene Name: leucine-rich, glioma inactivated 1
  Uniprot ID: O95970
  ENST ID: ENST00000371418
  CDS Start-End: 337-2010
gaaagcagaaagctgtttattttctgtgacatcacttcactttgccttcgaaggctggtctgtgctcagtgttttcgtggtgatgcaagtcggctctctcctccagcagttggatccctcccatctcacagtacctcacaggtctcttcccccgagcagtgcattgctggagcgaggagaagctcacgaatcagctgcaggtctctgttttgaaaaagcagagatacagaggcagaggaaaagggtggactcctatgtgacctgttcttagagcaagacaatcaccatctgaattccagaagccctgttcatggttggggatattttctcgactgcatggaatcagaaagaagcaaaaggatgggaaatgcctgcattcccctgaaaagaattgcttatttcctatgtctcttatctgcgcttttgctgactgaggggaagaaaccagcgaagccaaaatgccctgccgtgtgtacttgtaccaaagataatgctttatgtgagaatgccagatccattccacgcaccgttcctcctgatgttatctcattatcctttgtgagatctggttttactgaaatctcagaagggagttttttattcacgccatcgctgcagctcttgttattcacatcgaactcctttgatgtgatcagtgatgatgcttttattggtcttccacatctagagtatttattcatagaaaacaacaacatcaagtcaatttcaagacatactttccggggactaaagtcattaattcacttgagccttgcaaacaacaatctccagacactcccaaaagatattttcaaaggcctggattctttaacaaatgtggacctgaggggtaattcatttaattgtgactgtaaactgaaatggctagtggaatggcttggccacaccaatgcaactgttgaagacatctactgcgaaggccccccagaatacaagaagcgcaaaatcaatagtctctcctcgaaggattttgattgcatcattacagaatttgcaaagtctcaagacctgccttatcaatcattgtccatagacactttttcttatttgaatgatgagtatgtagtcatcgctcagccttttactggaaaatgcattttccttgaatgggaccatgtggaaaagaccttccggaattatgacaacattacaggcacatccactgtagtatgcaagcctatagtcattgaaactcagctctatgttattgtggcccagctgtttggtggctctcacatctataagcgagacagttttgcaaataaattcataaaaatccaggatattgaaattctcaaaatccgaaaacccaatgacattgaaacattcaagattgaaaacaactggtactttgttgttgctgacagttcaaaagctggttttactaccatttacaaatggaacggaaacggattctactcccatcaatccttacacgcgtggtacagggacactgatgtggaatatctagaaatagtcagaacacctcagacactcagaacgcctcatttaattctgtctagtagttcccagcgtcctgtaatttatcagtggaacaaagcaacacaattattcactaaccaaactgacattcctaacatggaggatgtgtacgcagtgaagcacttctcagtgaaaggggacgtgtacatttgcttgacaagattcattggtgattccaaagtcatgaaatggggaggctcctcgttccaggatattcagaggatgccatcgcgaggatccatggtgttccagcctcttcaaataaataattaccaatatgcaattcttggaagtgattactcctttactcaagtgtataactgggatgcagagaaagccaaatttgtgaaatttcaggaattaaatgttcaggcaccaagatcattcacacatgtgtccattaataagcgtaattttctttttgcttccagttttaagggaaatacacagatttacaaacatgtcatagttgacttaagcgcatgagacaccaaattctgtggctgccatcagaaattttctacagtacatgacccggatgaactcaatgcatgatgactcttcttatcacacttgcaaatgaatgcctttcaaacattgagactgctagaaccaagcactaccagtatctccatccttaactgtccagtccagtgatgtgggaagttaccttttataagacaaaatttaattgtgtaactgttctttgcagtgaagatgtgtaaataagcgtttaatggtatctgttactccaaaaagaaatattaatatgtacttttccatttatttattcatgtgtacagaaacaactgccaaataaaatgtttacattttctttcatatcccagaggtaatta

SEQ ID NO: 148443 - DNA, 664 bp, Homo sapiens
  Payload ID: 9400
  Gene Symbol: LGI1
  Gene Name: leucine-rich, glioma inactivated 1
  ENST ID: ENST00000627699
  CDS Start-End: 70-288
ttagagcaagacaatcaccatctgaattccagaagccctgttcatggttggggatattttctcgactgcatggaatcagaaagaagcaaaaggatgggaaatgcctgcattcccctgaaaagaattgcttatttcctatgtctcttatctgcgcttttgctgactgaggggaagaaaccagcgaagccaaaatgccctgccgtgtgtacttgtaccaaagataatgctttatgtgagaatgccagatccattccacgcaccgttcctcctgatgttatctcattgtaaggcccatcctttgtgagatctggttttactgaaatctcagaagggagttttttattcacgccatcgctgcagctcttgtgagaaatatttatatcatgactatttttaatatggcatatatttggataagccttctagtaaaatgatctcaatattaattttgtcaaatgtgattctatttctgagaaaacagaatatccgtaaagtgagaggtagatgggtttgtttgcgacttcacaccaacagtgcaggttgattcttacaatggtaaatctgttaacctgtcatgctgtctactttaatggctatttatgaagttgttggaatcttgcaacaatgatcccaattccattccactattttactttcattttta

SEQ ID NO: 148444 - DNA, 1751 bp, Homo sapiens
  Payload ID: 9400
  Gene Symbol: LGI1
  Gene Name: leucine-rich, glioma inactivated 1
  Uniprot ID: O95970
  ENST ID: ENST00000630047
  CDS Start-End: 175-1704
attgctggagcgaggagaagctcacgaatcagctgcaggtctctgttttgaaaaagcagagatacagaggcagaggaaaagggtggactcctatgtgacctgttcttagagcaagacaatcaccatctgaattccagaagccctgttcatggttggggatattttctcgactgcatggaatcagaaagaagcaaaaggatgggaaatgcctgcattcccctgaaaagaattgcttatttcctatgtctcttatctgcgcttttgctgactgaggggaagaaaccagcgaagccaaaatgccctgccgtgtgtacttgtaccaaagataatgctttatgtgagaatgccagatccattccacgcaccgttcctcctgatgttatctcattatcctttgtgagatctggttttactgaaatctcagaagggagttttttattcacgccatcgctgcagctcttgagccttgcaaacaacaatctccagacactcccaaaagatattttcaaaggcctggattctttaacaaatgtggacctgaggggtaattcatttaattgtgactgtaaactgaaatggctagtggaatggcttggccacaccaatgcaactgttgaagacatctactgcgaaggccccccagaatacaagaagcgcaaaatcaatagtctctcctcgaaggattttgattgcatcattacagaatttgcaaagtctcaagacctgccttatcaatcattgtccatagacactttttcttatttgaatgatgagtatgtagtcatcgctcagccttttactggaaaatgcattttccttgaatgggaccatgtggaaaagaccttccggaattatgacaacattacaggcacatccactgtagtatgcaagcctatagtcattgaaactcagctctatgttattgtggcccagctgtttggtggctctcacatctataagcgagacagttttgcaaataaattcataaaaatccaggatattgaaattctcaaaatccgaaaacccaatgacattgaaacattcaagattgaaaacaactggtactttgttgttgctgacagttcaaaagctggttttactaccatttacaaatggaacggaaacggattctactcccatcaatccttacacgcgtggtacagggacactgatgtggaatatctagaaatagtcagaacacctcagacactcagaacgcctcatttaattctgtctagtagttcccagcgtcctgtaatttatcagtggaacaaagcaacacaattattcactaaccaaactgacattcctaacatggaggatgtgtacgcagtgaagcacttctcagtgaaaggggacgtgtacatttgcttgacaagattcattggtgattccaaagtcatgaaatggggaggctcctcgttccaggatattcagaggatgccatcgcgaggatccatggtgttccagcctcttcaaataaataattaccaatatgcaattcttggaagtgattactcctttactcaagtgtataactgggatgcagagaaagccaaatttgtgaaatttcaggaattaaatgttcaggcaccaagatcattcacacatgtgtccattaataagcgtaattttctttttgcttccagttttaagggaaatacacagatttacaaacatgtcatagttgacttaagcgcatgagacaccaaattctgtggctgccatcagaaattttctacagtacatga

SEQ ID NO: 148445 - DNA, 600 bp, Homo sapiens
  Payload ID: 9400
  Gene Symbol: LGI1
  Gene Name: leucine-rich, glioma inactivated 1
  ENST ID: ENST00000478763
  CDS Start-End: 233-523
agcagttggatccctcccatctcacagtacctcacaggtctcttcccccgagcagtgcattgctggagcgaggagaagctcacgaatcagctgcaggtctctgttttgaaaaagcagagatacagaggcagaggaaaagggtggactcctatgtgacctgttcttagagcaagacaatcaccatctgaattccagaagccctgttcatggttggggatattttctcgactgcatggaatcagaaagaagcaaaaggatgggaaatgcctgcattcccctgaaaagaattgcttatttcctatgtctcttatctgcgcttttgctgactgaggggaagaaaccagcgaagccaaaatgccctgccgtgtgtacttgtaccaaagataatgctttatgtgagaatgccagatccattccacgcaccgttcctcctgatgttatctcattatcctttgtgagatctggttttactgaaatctcagaagggagttttttattcacgccatcgctgcagctcttgtgagaaatatttatatcatgactatttttaatatggcatatatttggataagccttctagtaaaatgatctcaatattaa

SEQ ID NO: 148446 - DNA, 2936 bp, Homo sapiens
  Payload ID: 9400
  Gene Symbol: LGI1
  Gene Name: leucine-rich, glioma inactivated 1
  ENST ID: ENST00000630184
  CDS Start-End: 208-714
agtacctcacaggtctcttcccccgagcagtgcattgctggagcgaggagaagctcacgaatcagctgcaggtctctgttttgaaaaagcagagatacagaggcagaggaaaagggtggactcctatgtgacctgttcttagagcaagacaatcaccatctgaattccagaagccctgttcatggttggggatattttctcgactgcatggaatcagaaagaagcaaaaggatgggaaatgcctgcattcccctgaaaagaattgcttatttcctatgtctcttatctgcgcttttgctgactgaggggaagaaaccagcgaagccaaaatgccctgccgtgtgtacttgtaccaaagataatgctttatgtgagaatgccagatccattccacgcaccgttcctcctgatgttatctcattatcctttgtgagatctggttttactgaaatctcagaagggagttttttattcacgccatcgctgcagctcttgttattcacatcgaactcctttgatgtgatcagtgatgatgcttttattggtcttccacatctagagtatttattcatagaaaacaacaacatcaagtcaatttcaagacatactttccggggactaaagtcattaattcacttgagccttgcaaacaacaatctccagacactcccaaaagatattttcaaaggcctggattctttaacaaatgtgtaagaggacctaagaaatcactgaacaattaattaatttgcagtcattaacaaggaagcctggtattgattattataatttttaattggcttttaaattaaaattaggatttttaaatctaaattttaactggccaaaaatttaaatttacatggactaacatttgagtcttctatggtatttatcattgggaattctgaatacatggcacccaggcattcctttgacaaagtgtgtgtcaatacggcagggagcgatgataaaggactttgacggggtgggaagagacccggctagaaatttcaaaatcccttttttctcatgaggtccaggaaatagggctacaaaggaaaaacataaaggagtctgggaaactgacagaataaagatgaaaggttacatccttgggttggtcaatcaacagagaaatggaacaggaagtgggggaagggagaaaagtttgccttttttctcattagactgaacaacaactctaagcttaatccccaggaatttggcttaagccccaggaagggaatgaacttaattatttttgaccctttttcaaacaaaagagctttcaaactttgacttttaagcctccgagtgaaagatctttgcaaggaatttgtatattttgctgtaagcaaagcaagtaatatatgcctaaacttctcaaaagcaattcagcttcattatttgccttccagaacattagaaaggtatttaaatgtcataaggtggaagacaggaacaaatgaaaggatatatgaaaacaaaagcttttttaaaaaattattcaggtacttgtctgtagaatatatattcaaaacaacttttctccaataacaaacaaaaagaaaatctgagtcaagtactttcttccaagcccagtatttaacttcaaatcagtagcctaatgaaaaactttctttgttccttgcagtatttccccagcccctcctccatgtctattacctcaattcctgaatgatatggtttaattccaggagaatgcccaaatcaggattcttccaagagagtcctggacagaccatagttatcctctctggtttacagtagcctgaaaggttgccactcattagtgtgggtcagagttctcttgggagactaggtcagttctgggagtgtcttggaagttagaacacactccatgggtgacgtgggatgtagctcattgggggtcctttaccccatttttgtgtcagtctataccctacactagtgaaagacaaaacaaaaaaatattgaaattggctcagtctctcatgggaatcccaagatgggtttagccttttggacctactctaatatgcccaaatcaagaattatcttagaagtacaaggatccatgccaacttgccttttagtggatttcttggctttcttgaaagtatcctctaaaaaacatttttaaatgtttgggcgtttaaaaattatttatgtgtggtgtgaagagtaggcagcacctatcttaagaattctgtgtgaccaggaaaggaggtggaattcctgaacagaagcaatgcaaatacacagagaacttggtgagttggggtcatatgtggatatgtaaatggtctatgctgtataacttattacaggcatgagcgattgtatgcctgtgttaactctgctgtgtcaaagtcatttcctatttaaactgaatttgtagaccacggaagaggatcaggattaattatgtctgtgaggaagaagaaaagcaaatagctcacttgattaaatacattacaataatcactacattctgtcctttagacctgtgctgtccaatagggtagccaccagaccttatggtcactgagcacctaaaatgtgctcctagtacaactgagagactgaattttaaattttacttaattttttaacagttaaatttaaatttaaaagctgattctcagctcaattattggaaaatgttaagtacgcttggaataatttgggtatatacacctatttttttcaattatgaattttatgacatctaaatatagatcacctatttctggtaaaatttagcatctgaattgagatatattgtaggtataaaatacacactggacttcaaagacttagtataaaaaaggaatgtaaaatatctcaataatgtttatattgatgatgtgtcaaaatgataatcttttgtatgtattgggttaaataaaacatattattaaaatgaa

SEQ ID NO: 148447 - DNA, 1114 bp, Homo sapiens
  Payload ID: 9400
  Gene Symbol: LGI1
  Gene Name: leucine-rich, glioma inactivated 1
  ENST ID: ENST00000630487
  CDS Start-End: 271-489
cagtgttttcgtggtgatgcaagtcggctctctcctccagcagttggatccctcccatctcacagtacctcacaggtctcttcccccgagcagtgcattgctggagcgaggagaagctcacgaatcagctgcaggtctctgttttgaaaaagcagagatacagaggcagaggaaaagggtggactcctatgtgacctgttcttagagcaagacaatcaccatctgaattccagaagccctgttcatggttggggatattttctcgactgcatggaatcagaaagaagcaaaaggatgggaaatgcctgcattcccctgaaaagaattgcttatttcctatgtctcttatctgcgcttttgctgactgaggggaagaaaccagcgaagccaaaatgccctgccgtgtgtacttgtaccaaagataatgctttatgtgagaatgccagatccattccacgcaccgttcctcctgatgttatctcattgtaaggcccatcctttgtgagatctggttttactgaaatctcagaagggagttttttattcacgccatcgctgcagctcttgttattcacatcgaactcctttgatgtgatcagtgatgatgcttttattggtcttccacatctagagtatttattcatagaaaacaacaacatcaagtcaatttcaagacatactttccggggactaaagtcattaattcacttgagccttgcaaacaacaatctccagacactcccaaaagatattttcaaaggcctggattctttaacaaatgtggacctgaggggtaattcatttaattgtgactgtaaactgaaatggctagtggaatggcttggccacaccaatgcaactgttgaagacatctactgcgaaggccccccagaatacaagaagcgcaaaatcaatagtctctcctcgaaggattttgattgcatcattacagaatttgcaaagtctcaagacctgccttatcaatcattgtccatagacactttttcttatttgaatgatgagtatgtagtcatcgctcagccttttactggaaaatgcattttccttgaatgggaccatgtggaaaagaccttccggaattatgacaacatta

SEQ ID NO: 148448 - DNA, 2251 bp, Homo sapiens
  Payload ID: 9400
  Gene Symbol: LGI1
  Gene Name: leucine-rich, glioma inactivated 1
  ENST ID: ENST00000629035
  CDS Start-End: 295-1896
tgccttcgaaggctggtctgtgctcagtgttttcgtggtgatgcaagtcggctctctcctccagcagttggatccctcccatctcacagtacctcacaggtctcttcccccgagcagtgcattgctggagcgaggagaagctcacgaatcagctgcaggtctctgttttgaaaaagcagagatacagaggcagaggaaaagggtggactcctatgtgacctgttcttagagcaagacaatcaccatctgaattccagaagccctgttcatggttggggatattttctcgactgcatggaatcagaaagaagcaaaaggatgggaaatgcctgcattcccctgaaaagaattgcttatttcctatgtctcttatctgcgcttttgctgactgaggggaagaaaccagcgaagccaaaatgccctgccgtgtgtacttgtaccaaagataatgctttatgtgagaatgccagatccattccacgcaccgttcctcctgatgttatctcattgttattcacatcgaactcctttgatgtgatcagtgatgatgcttttattggtcttccacatctagagtatttattcatagaaaacaacaacatcaagtcaatttcaagacatactttccggggactaaagtcattaattcacttgagccttgcaaacaacaatctccagacactcccaaaagatattttcaaaggcctggattctttaacaaatgtggacctgaggggtaattcatttaattgtgactgtaaactgaaatggctagtggaatggcttggccacaccaatgcaactgttgaagacatctactgcgaaggccccccagaatacaagaagcgcaaaatcaatagtctctcctcgaaggattttgattgcatcattacagaatttgcaaagtctcaagacctgccttatcaatcattgtccatagacactttttcttatttgaatgatgagtatgtagtcatcgctcagccttttactggaaaatgcattttccttgaatgggaccatgtggaaaagaccttccggaattatgacaacattacaggcacatccactgtagtatgcaagcctatagtcattgaaactcagctctatgttattgtggcccagctgtttggtggctctcacatctataagcgagacagttttgcaaataaattcataaaaatccaggatattgaaattctcaaaatccgaaaacccaatgacattgaaacattcaagattgaaaacaactggtactttgttgttgctgacagttcaaaagctggttttactaccatttacaaatggaacggaaacggattctactcccatcaatccttacacgcgtggtacagggacactgatgtggaatatctagaaatagtcagaacacctcagacactcagaacgcctcatttaattctgtctagtagttcccagcgtcctgtaatttatcagtggaacaaagcaacacaattattcactaaccaaactgacattcctaacatggaggatgtgtacgcagtgaagcacttctcagtgaaaggggacgtgtacatttgcttgacaagattcattggtgattccaaagtcatgaaatggggaggctcctcgttccaggatattcagaggatgccatcgcgaggatccatggtgttccagcctcttcaaataaataattaccaatatgcaattcttggaagtgattactcctttactcaagtgtataactgggatgcagagaaagccaaatttgtgaaatttcaggaattaaatgttcaggcaccaagatcattcacacatgtgtccattaataagcgtaattttctttttgcttccagttttaagggaaatacacagatttacaaacatgtcatagttgacttaagcgcatgagacaccaaattctgtggctgccatcagaaattttctacagtacatgacccggatgaactcaatgcatgatgactcttcttatcacacttgcaaatgaatgcctttcaaacattgagactgctagaaccaagcactaccagtatctccatccttaactgtccagtccagtgatgtgggaagttaccttttataagacaaaatttaattgtgtaactgttctttgcagtgaagatgtgtaaataagcgtttaatggtatctgttactccaaaaagaaatattaatatgtacttttccatttatttattcatgtgtacagaaacaactgccaaataaaatgtttacattttctttcat

SEQ ID NO: 148449 - DNA, 2278 bp, Homo sapiens
  Payload ID: 9400
  Gene Symbol: LGI1
  Gene Name: leucine-rich, glioma inactivated 1
  ENST ID: ENST00000627420
  CDS Start-End: 306-524
tcacttcactttgccttcgaaggctggtctgtgctcagtgttttcgtggtgatgcaagtcggctctctcctccagcagttggatccctcccatctcacagtacctcacaggtctcttcccccgagcagtgcattgctggagcgaggagaagctcacgaatcagctgcaggtctctgttttgaaaaagcagagatacagaggcagaggaaaagggtggactcctatgtgacctgttcttagagcaagacaatcaccatctgaattccagaagccctgttcatggttggggatattttctcgactgcatggaatcagaaagaagcaaaaggatgggaaatgcctgcattcccctgaaaagaattgcttatttcctatgtctcttatctgcgcttttgctgactgaggggaagaaaccagcgaagccaaaatgccctgccgtgtgtacttgtaccaaagataatgctttatgtgagaatgccagatccattccacgcaccgttcctcctgatgttatctcattgtaaggcccatcctttgtgagatctggttttactgaaatctcagaagggagttttttattcacgccatcgctgcagctcttgagccttgcaaacaacaatctccagacactcccaaaagatattttcaaaggcctggattctttaacaaatgtgtaagaggacctaagaaatcactgaacaattaattaatttgcagtcattaacaaggaagcctgggacctgaggggtaattcatttaattgtgactgtaaactgaaatggctagtggaatggcttggccacaccaatgcaactgttgaagacatctactgcgaaggccccccagaatacaagaagcgcaaaatcaatagtctctcctcgaaggattttgattgcatcattacagaatttgcaaagtctcaagacctgccttatcaatcattgtccatagacactttttcttatttgaatgatgagtatgtagtcatcgctcagccttttactggaaaatgcattttccttgaatgggaccatgtggaaaagaccttccggaattatgacaacattacaggcacatccactgtagtatgcaagcctatagtcattgaaactcagctctatgttattgtggcccagctgtttggtggctctcacatctataagcgagacagttttgcaaataaattcataaaaatccaggatattgaaattctcaaaatccgaaaacccaatgacattgaaacattcaagattgaaaacaactggtactttgttgttgctgacagttcaaaagctggttttactaccatttacaaatggaacggaaacggattctactcccatcaatccttacacgcgtggtacagggacactgatgtggaatatctagaaatagtcagaacacctcagacactcagaacgcctcatttaattctgtctagtagttcccagcgtcctgtaatttatcagtggaacaaagcaacacaattattcactaaccaaactgacattcctaacatggaggatgtgtacgcagtgaagcacttctcagtgaaaggggacgtgtacatttgcttgacaagattcattggtgattccaaagtcatgaaatggggaggctcctcgttccaggatattcagaggatgccatcgcgaggatccatggtgttccagcctcttcaaataaataattaccaatatgcaattcttggaagtgattactcctttactcaagtgtataactgggatgcagagaaagccaaatttgtgaaatttcaggaattaaatgttcaggcaccaagatcattcacacatgtgtccattaataagcgtaattttctttttgcttccagttttaagggaaatacacagatttacaaacatgtcatagttgacttaagcgcatgagacaccaaattctgtggctgccatcagaaattttctacagtacatgacccggatgaactcaatgcatgatgactcttcttatcacacttgcaaatgaatgcctttcaaacattgagactgctagaaccaagcactaccagtatctccatccttaactgtccagtccagtgatgtgggaagttaccttttataagacaaaatttaattgtgtaactgttctttgcagtgaagatgtgtaaataagcgtttaatggtatctgttactccaaaaagaaatattaatatgtacttttccatttatttattcatgtgtacagaaacaactgccaaataaaatgtttacattttctttcatatcccagaggtaatta

SEQ ID NO: 148450 - DNA, 4572 bp, Homo sapiens
  Payload ID: 9401
  Gene Symbol: LZTR1
  Gene Name: leucine-zipper-like transcription regulator 1
  Uniprot ID: Q8N653
  ENST ID: ENST00000215739
  CDS Start-End: 360-2882
ggccgcgggtcttcgggctgcgtgggcctgggaggcgccgggaagagcagtcgcgacggggctagggacgacacactgcattcactggaagggacaacgcagcgccagtacatagcctgaaacgctccccagaaggtcccacgctcgccgcgcggtcgacaaccgcatcctgcgctcgcccgcggtgtctcggcaagcggtaggcttgtcgggaagagctggagggcgcaagtgcggcgctggccggacgtgccgcaccgtcagcgcagggctcgccgggaaatgtggtttctccagccggcccggggcggtggccgcaagttgggcttacagcgcggccgatccggcgtggacccgggatggctggaccgggcagcacgggggggcagatcggggctgcggccctggcaggcggcgcgcggtccaaggtagccccgagcgtggacttcgaccatagctgctcggacagtgtcgagtacctgacgctcaacttcgggcccttcgaaacagtgcatcgctggcggcgcctcccgccctgcgacgagttcgtgggtgcccggcgcagcaagcacacagtggtggcctataaagatgccatttatgtatttggtggagacaatgggaagaccatgctcaatgacctcctgcggttcgatgtgaaagactgctcctggtgcagggcctttaccactgggaccccaccggccccccgttaccaccactcggccgtcgtctatgggagcagcatgtttgtctttgggggttacactggggacatttattccaattctaacttgaagaataaaaacgacctctttgaatacaagtttgcaactggccagtggacggagtggaaaattgaaggacggttgccagtcgctaggtcagcccatggggccacggtgtacagtgacaagctgtggatctttgctggctatgacggcaacgccaggttgaatgacatgtggacaattggcctccaggaccgagagctcacctgctgggaggaggtggcccagagtggcgagatccccccatcttgctgcaacttccccgtggctgtgtgccgggacaagatgtttgtattctctgggcaaagcggagccaaaataaccaacaacctcttccagtttgaattcaaggacaagacgtggacacgcatcccaactgaacacctgctccggggctccccaccacccccgcagcggcgctacgggcataccatggtggcctttgaccgccacctctatgtgtttgggggtgcggccgacaacacgctgcccaacgagctgcactgctatgacgtggacttccagacctgggaggtcgtccagcccagctccgacagcgaggttggtggggctgaagtgcccgagcgagcctgtgcttccgaggaggtgcccaccctgacctatgaggagcgggttggcttcaagaagtcccgagatgtgtttggcctggactttggcaccacctcagccaagcagcccacccagcctgcctcggagctgcccagtgggaggctcttccacgcggctgctgtcatctcggacgccatgtacatcttcgggggcacggtggacaacaacatccgcagcggggagatgtacaggttccagttctcctgttaccctaaatgcacgctgcacgaggactacgggcggctgtgggagagccgccagttctgcgacgtggagttcgtgctgggtgagaaggaggagtgcgtgcagggccacgtagccattgtcacagcgcggagccgctggcttcgcaggaagatcacgcaggcgcgggagaggctggcccagaagctggagcaggaggccgccccagttcccagggaggcccccggcgtggctgctggtggggcccggccgcccctgctgcacgtggccatccgggaggccgaggcccggcccttcgaggtgctcatgcagttcctctacaccgacaagatcaaatacccacggaaaggccatgtggaggatgtgctgctcatcatggatgtgtacaaactggcactgagcttccagttgtgccgcctggagcagctgtgccgccagtacatcgaggcctccgtggacctgcagaacgtgctggttgtgtgcgagagtgccgcccggctgcagctgagccaactcaaggagcactgcctgaacttcgtggtaaaggagtcccacttcaaccaggtgatcatgatgaaggagttcgagcgcctctcctctccactgatagtggagattgtgcggcggaagcagcagccgccccctcgcactcccttggaccagccagtggacattggcacatctctgatccaggacatgaaggcatacctggagggagcgggcgcggaattctgtgacatcactctgttgcttgacgggcacccacggccagcccacaaggctatcctggccgcccgctccagctactttgaagccatgttccggtccttcatgcccgaagatgggcaggtgaacatctccatcggggagatggtgcccagcaggcaggccttcgagtccatgctgcgctacatctactacggcgaggtcaacatgccgcccgaggactcgctctacttgtttgcggccccctactactacggcttctacaacaaccggctgcaggcgtactgcaagcagaacctggagatgaacgtgacggtgcagaacgtgctgcagatcctggaggcagctgacaaaacgcaggcactggacatgaagcggcactgcctgcacatcattgtgcaccagttcaccaaggtctccaagttgcccaccctgcggtcgctgagccagcagctgctgctggacatcatagactccctggcctcccacatctcagacaagcagtgcgcagagctgggcgccgacatctgaggccctgtggcgcctgcccattgtgaagaatcgccgtgcctgcctgccctgcctactgagaagactaccggctatgcgcatgcctatggcagtgggtgcacctgccaggccaagggtcagggtgcccagagcctccaaagagagctgaggggatgtggggccccaaactcattaattcactgaagacacaggtcccacagggagcggatgatgaagcagaccccctcctgtcatcaccctctcctggtgtagtgtggatgcgaggccacggctcagtgatgggctcaccacccagaagtggggagagactttgggcctcccacccagtggggcttggcctggcttctgtggcctgggcgtgttgtggactcaggcactggggcctgtcaccaaggctcctccaacatgcgggaggaggcttagcagacttgcgctgcaccagcgaatctgcctgggctgctcctgtcccacccaccctcactgagatccatgtaaggggctcctcttcccacctggaacttgtgagtggggacccatgatgtatgggtctcacctgacttgaggtgaattttggagtgaagggccctgaggtcagctcccaggtcggtcgtgctgggccaggcctggttttcacaggggctgaaggatcccagtccacctgtgtgcatgtcagggctcggccgggaagaagccagcaaagtcccccgtgtcccttgctgagtattctgtcacagacaagcctccattaaagccacagcagtgctacccaccacacacaccttgctggcccggccaccactgctggcttcagccccttgagcagcccatggcttagcagacccccagatgtaggtcagtggccttacctgtctctatccatgctgtcaactcctgcctccacctggggtcacccagtcacattgggaagggctgtgaaggcctccaggctggccccttccaggggaatcctggaggcctggggtgggctcctgccccttctgccctgccttgcccctgcactatgctcttggctcctgtggaaggagggctgccctcttgccctagtgagggccccatgtggatccactctagtgctgggagccagcgctcccttactgggaacaggattccaggacccctttcttgttgtggctgccatgaagccacagctccttggggaagtgacctgctctcctttgggtgtatgcaggtgtgtggggggccctgagtggcaagttgcttagctaacaggagatccataggcagcctgcaggctaggaagtggcctagtgcaagatgagctgggaacaagggaggagagagcaggagctggggcagaggctgagccgggaggcccttgaggtgaggacacagcaggcccaggaccatggctggggaggatatgtcagcacctggaagtggagtgcaggctgcagcgcccagccatgtgggccaggtgcattcactcagagtggggccacacacccatctacccagtttccacaagatgtggctcctgccacacccacagggcagcctcctccaaatccctcctggaggggcctacccagaagcctccttgaaccagtctgcaaccctgctctatgctgacccttgtcactgaaccctgatctagacttatatgaataaatgaaattacatgccaagggccctaaaaagcaaattttac

SEQ ID NO: 148451 - DNA, 635 bp, Homo sapiens
  Payload ID: 9401
  Gene Symbol: LZTR1
  Gene Name: leucine-zipper-like transcription regulator 1
  ENST ID: ENST00000439171
  CDS Start-End: 1-334
cgtggacctgcagaacgtgctggttgtgtgcgagagtgccgcccggctgcagctgagccaactcaaggagcactgcctgaacttcgtggtaaaggagtcccacttcaaccaggtgatcatgatgaaggagttcgagcgcctctcctctccactgatagtggagattgtgcggcggaagcagcagccgccccctcgcactcccttggaccagccagtggacattggccccttcattcccccagctctccctggggcttgtgctgaccccggttgctggctcttggtgatgtctgcaggcaccagaggccatgcagtgggcctggagggggcttgatcatgaggcacatctctgatccaggacatgaaggcatacctggagggagcgggcgcggaattctgtgacatcactctgttgcttgacgggcacccacggccagcccacaaggctatcctggccgcccgctccagctactttgaagccatgttccggtccttcatgcccgaagatgggcaggtgaacatctccatcggggagatggtgcccagcaggcaggccttcgagtccatgctgcgctacatctactacggcgaggtcaacatgccgcccgaggactcgctctacttgtttgcggccc

SEQ ID NO: 148452 - DNA, 648 bp, Homo sapiens
  Payload ID: 9401
  Gene Symbol: LZTR1
  Gene Name: leucine-zipper-like transcription regulator 1
  ENST ID: ENST00000415354
  CDS Start-End: 1-294
atgcagttcctctacaccgacaagatcaaatacccacggaaagaacgtgctggttgtgtgcgagagtgccgcccggctgcagctgagccaactcaaggagcactgcctgaacttcgtggtaaaggagtcccacttcaaccaggtgatcatgatgaaggagttcgagcgcctctcctctccactgatagtggagattgtgcggcggaagcagcagccgccccctcgcactcccttggaccagccagtggacattggccccttcattcccccagctctccctggggcttgtgctgaccccggttgctggctcttggtgatgtctgcaggcaccagaggccatgcagtgggcctggagggggcttgatcatgaggcacatctctgatccaggacatgaaggcatacctggagggagcgggcgcggaattctgtgacatcactctgttgcttgacgggcacccacggccagcccacaaggctatcctggccgcccgctccagctactttgaagccatgttccggtccttcatgcccgaagatgggcaggtgaacatctccatcggggagatggtgcccagcaggcaggccttcgagtccatgctgcgctacatctactacggcgaggtcaacatgccgcccgaggactcgct

SEQ ID NO: 148453 - DNA, 872 bp, Homo sapiens
  Payload ID: 9401
  Gene Symbol: LZTR1
  Gene Name: leucine-zipper-like transcription regulator 1
  ENST ID: ENST00000414985
  CDS Start-End: 104-457
accgtcagcgcagggctcgccgggaaatgtggtttctccagccggcccggggcggtggccgcaagttgggcttacagcgcggccgatccggcgtggacccgggatggctggaccgggcagcacgggggggcagatcggggctgcggccctggcaggcggcgcgcggtccaaggtagccccgagcgtggacttcgaccatagctgctcggacagtgtcgagtacctgacgctcaacttcgggcccttcgaaacagtgcatcgctggcggcgcctcccgccctgcgacgagttcgtgggtgcccggcgcagcaagcacacagtggtggcctataaagatgccatttatgtatttggtggagacaatgggaagaccatgctcaatgacctcctgcggttcgatgtgaaagactgctcctggtgcagggggttacactggggacatttattccaattctaacttgaagaataaaaacgacctctttgaatacaagtttgcaactggccagtggacggagtggaaaattgaaggacggttgccagtcgctaggtcagcccatggggccacggtgtacagtgacaagctgtggatctttgctggctatgacggcaacgccaggttgaatgacatgtggacaattggcctccaggaccgagagctcacctgctgggaggaggtggcccagagtggcgagatccccccatcttgctgcaacttccccgtggctgtgtgccgggacaagatgtttgtattctctgggcaaagcggagccaaaataaccaacaacctcttccagtttgaattcaaggacaagacgtggacacgcatcccaactgaacacctgctccggggctccccaccacccccgcagcgg

SEQ ID NO: 148454 - DNA, 2323 bp, Homo sapiens
  Payload ID: 9401
  Gene Symbol: LZTR1
  Gene Name: leucine-zipper-like transcription regulator 1
  ENST ID: ENST00000415817
  CDS Start-End: 1-475
cgaagatgggcaggtgaacatctccatcggggagatggtgcccagcaggcaggccttcgagtccatgctgcgctacatctactacggcgaggtcaacatgccgcccgaggactcgctctacttgtttgcggccccctactactacggcttctacaacaaccggctgcaggcgtactgcaagcagaacctggagatgaacgtgacggtgcagaacgtgctgcagatcctggaggcagctgacaaaacgcaggcactggacatgaagcggcactgcctgcacatcattgtgcaccagttcaccaaggtcagggctctggcctccccttcaggactcgcttccccttggcagtggccatgcccaggcagggagggtgcccaggctctgtggtcccctgcagtggtgggccctgggggtgagagaagcagagcagcccatcactggccgcaccttgcttcatccttgggaccagcctgagccctgagcagggtaggccccacagggctccactgcccaccatggcccttaggtggatctggtcccatctccttccggcctgcttgccttacaggtctccaagttgcccaccctgcggtcgctgagccagcagctgctgctggacatcatagactccctggcctcccacatctcagacaagcagtgcgcagagctgggcgccgacatctgaggccctgtggcgcctgcccattgtgaagaatcgccgtgcctgcctgccctgcctactgagaagactaccggctatgcgcatgcctatggcagtgggtgcacctgccaggccaagggtcagggtgcccagagcctccaaagagagctgaggggatgtggggccccaaactcattaattcactgaagacacaggtcccacagggagcggatgatgaagcagaccccctcctgtcatcaccctctcctggtgtagtgtggatgcgaggccacggctcagtgatgggctcaccacccagaagtggggagagactttgggcctcccacccagtggggcttggcctggcttctgtggcctgggcgtgttgtggactcaggcactggggcctgtcaccaaggctcctccaacatgcgggaggaggcttagcagacttgcgctgcaccagcgaatctgcctgggctgctcctgtcccacccaccctcactgagatccatgtaaggggctcctcttcccacctggaacttgtgagtggggacccatgatgtatgggtctcacctgacttgaggtgaattttggagtgaagggccctgaggtcagctcccaggtcggtcgtgctgggccaggcctggttttcacaggggctgaaggatcccagtccacctgtgtgcatgtcagggctcggccgggaagaagccagcaaagtcccccgtgtcccttgctgagtattctgtcacagacaagcctccattaaagccacagcagtgctacccaccacacacaccttgctggcccggccaccactgctggcttcagccccttgagcagcccatggcttagcagacccccagatgtaggtcagtggccttacctgtctctatccatgctgtcaactcctgcctccacctggggtcacccagtcacattgggaagggctgtgaaggcctccaggctggccccttccaggggaatcctggaggcctggggtgggctcctgccccttctgccctgccttgcccctgcactatgctcttggctcctgtggaaggagggctgccctcttgccctagtgagggccccatgtggatccactctagtgctgggagccagcgctcccttactgggaacaggattccaggacccctttcttgttgtggctgccatgaagccacagctccttggggaagtgacctgctctcctttgggtgtatgcaggtgtgtggggggccctgagtggcaagttgcttagctaacaggagatccataggcagcctgcaggctaggaagtggcctagtgcaagatgagctgggaacaagggaggagagagcaggagctggggcagaggctgagccgggaggcccttgaggtgaggacacagcaggcccaggaccatggctggggaggatatgtcagcacctggaagtggagtgcaggctgcagcgcccagccatgtgggccaggtgcattcactcagagtggggccacacacccatctacccagtttccacaagatgtggctcctgccacacccacagggcagcctcctccaaatccctcctggaggggcctacccagaagcctccttgaaccagtctgcaaccctgctctatgctgacccttgtcactgaaccctgatctaga

SEQ ID NO: 148455 - DNA, 698 bp, Homo sapiens
  Payload ID: 9401
  Gene Symbol: LZTR1
  Gene Name: leucine-zipper-like transcription regulator 1
  ENST ID: ENST00000443265
  CDS Start-End: 50-355
gtggccgcaagttgggcttacagcgcggccgatccggcgtggacccgggatggctggaccgggcagcacgggggggcagatcggggctgcggccctggcaggcggcgcgcggtccaaggtagccccgagcgtggacttcgaccatagctgctcggacagtgtcgagtacctgacgctcaacttcgggcccttcgaaacagtgcatcgctggcggcgcctcccgccctgcgacgagttcgtgggtgcccggtacggcgcagcaagcacacagtggtggcctataaagatgccatttatgtatttggtggagacaatgggaagaccatgctcaatgacctcctgcggttcgatgtgaaagactgctcctggtgcagggcctttaccactgggaccccaccggccccccgttaccaccactcggccgtcgtctatgggagcagcatgtttgtctttgggggttacactggggacatttattccaattctaacttgaagaataaaaacgacctctttgaatacaagtttgcaactggccagtggacggagtggaaaattgaaggacggttgccagtcgctaggtcagcccatggggccacggtgtacagtgacaagctgtggatctttgctggctatgacggcaacgccaggttgaatgacatgtggacaattggcctccaggaccgagagctcacctgctg

SEQ ID NO: 148456 - DNA, 878 bp, Homo sapiens
  Payload ID: 9401
  Gene Symbol: LZTR1
  Gene Name: leucine-zipper-like transcription regulator 1
  ENST ID: ENST00000452988
  CDS Start-End: 1-165
ttcaaccaggtgatcatgatgaaggagttcgagcgcctctcctctccactgatagtggagattgtgcggcggaagcagcagccgccccctcgcactcccttggaccagccagtggacattggacatgaaggcatacctggagggagcgggcgcggaattctgtgacatcactctgttgcttgacgggcacccacggccagcccacaaggctatcctggccgcccgctccagctactttgaagccatgttccggtccttcatgcccgaagatgggcaggtgaacatctccatcggggagatggtgcccagcaggcaggccttcgagtccatgctgcgctacatctactacggcgaggtcaacatgccgcccgaggactcgctctacttgtttgcggccccctactactacggcttctacaacaaccggctgcaggcgtactgcaagcagaacctggagatgaacgtgacggtgcagaacgtgctgcagatcctggaggcagctgacaaaacgcaggcactggacatgaagcggcactgcctgcacatcattgtgcaccagttcaccaaggtctccaagttgcccaccctgcggtcgctgagccagcagctgctgctggacatcatagactccctggcctcccacatctcagacaagcagtgcgcagagctgggcgccgacatctgaggccctgtggcgcctgcccattgtgaagaatcgccgtgcctgcctgccctgcctactgagaagactaccggctatgcgcatgcctatggcagtgggtgcacctgccaggccaagggtcagggtgcccagagcctccaaagagagctgaggggatgtggggccccaaactcattaattcactgaagacacaggt

SEQ ID NO: 148457 - DNA, 12752 bp, Homo sapiens
  Payload ID: 9402
  Gene Symbol: LNPEP
  Gene Name: leucyl/cystinyl aminopeptidase
  Uniprot ID: Q9UIQ6
  ENST ID: ENST00000231368
  CDS Start-End: 693-3770
tccgcggccaacctccccagggaaaccagcgattcgcggttcagatagcgaccttcgcccgcaggttcctgctctgccttcagacttcggcttcagtggcacctgctcagcgaggcctcgtctaaccaagccatccgaattaactacccactcactcgccatcacatcaccccgatttaattcgcagcggggcactgactttacactcgtgtgtcttctgtgtttatttatggtctgtttctggaatgtccgctcctgggactgggaccatgattttctggcgcagtgcgggtgtctcggcgtccgggatcgggcgggtcgcagtagggctccacatttgttgagtgactgaacaccgttcccggccggggagagcgccgcagccgggtccacttcaggtaggggctgggctttcccggccccgcctaggccccgcccccagcgcgaacccgctcccacctcgcctgtccacggagcagcagggggtttgactgtgcttttccctcttgcttccctcgctctttctgcagctgccacgaaaacccggaacggcggagcggcgccgcccctcgcggcacctccctggcagcccttggaggccgcgctgggcatgctcagtcagctgggccgcctcagctctcggagtaggaagctcgggcgctccggctgtaaggagccgcggcggggggaaaatggagcccttcaccaatgatcggcttcagctccccaggaatatgattgaaaacagcatgtttgaggaagaaccagatgtggtggatttagccaaagagccttgtttacatcctctagagcctgatgaggtggaatatgagccccggggttcccgactgctggtgcggggtcttggtgagcatgagatggaggaggatgaagaggattatgagtcatcagcaaagctgctgggcatgtccttcatgaatagaagctcaggccttcggaacagtgcaactggttacaggcagagcccagatggggcttgttcagtaccctctgcaaggaccatggtggtctgtgcttttgtcatcgtggttgctgtttctgtaatcatggtgatttacttactgcccagatgtacctttaccaaagaaggctgccataaaaaaaaccagtcaattggactaattcagccatttgcaacaaatgggaaattgtttccatgggcacagatcaggcttcccactgccgttgtgccactacgctatgaactcagcctacacccgaacctaacctcgatgacattcaggggttctgtgacaatttcagttcaggctcttcaggtcacatggaatatcattcttcatagcacaggtcataatatttcaagagtgacctttatgtcagcagtttcaagccaagaaaaacaagctgagatcctggaatatgcatatcatggacagatcgccattgttgcccccgaagcccttctagcagggcacaattatacgttgaagatagagtactcggcaaatatatctagttcttattatgggttttatggcttctcctacacagatgaaagtaatgagaaaaagtactttgcagcaactcagtttgaacccctggcagcaagatctgcttttccttgttttgatgaaccagcatttaaagccacttttatcatcaagatcataagggatgagcaatacaccgctttatcaaatatgcctaagaagtcatcagtcgttctagatgatggacttgttcaggatgagttttctgagagtgtgaagatgagcacttacttggttgctttcattgtgggagagatgaagaacctgagtcaggacgtaaatggaaccctggtttctatatatgctgtaccagaaaagattggtcaagttcattatgccttggaaacaactgtgaagcttcttgagttttttcaaaactactttgaaattcagtacccacttaagaaattggatttggtggctattcctgactttgaagcaggagcaatggaaaattggggtttgctcaccttccgagaggagacacttctgtatgacagtaacacttcttcaatggcggatagaaagctggtgactaaaatcattgctcatgagctggcccaccagtggtttggcaatctggtaacaatgaagtggtggaatgacctatggctaaatgaaggttttgccactttcatggagtatttctctttggaaaaaatattcaaagagctttctagttatgaagatttcttagatgctcgatttaaaaccatgaagaaagattccttaaattcatctcatccaatatcatcatctgttcagtcttcagaacaaattgaagaaatgtttgattctctttcctattttaagggatcttctctcttgttgatgttgaaaacttaccttagtgaagatgtgtttcaacatgctgttgtcctttacctgcataatcacagctatgcatctattcaaagtgatgatctgtgggatagttttaatgaggtcacaaaccaaacactagatgtaaagagaatgatgaaaacctggaccctgcagaaaggatttcctttagtgactgttcaaaagaaaggaaaggaactttttatacaacaagagagattctttttaaatatgaagcctgaaattcagccttcagatacaagctacctgtggcatattccactatcctatgtcactgaaggaagaaattattcaaaatatcaatcggtatcattactggataagaaatcaggtgtcatcaatcttacagaagaagtgctgtgggtcaaagtgaatataaacatgaatggttattatattgtacactatgcagatgatgattgggaagcactaatccatcagttgaaaataaatccttatgttctgagtgacaaagaccgagccaaccttatcaacaacatctttgaacttgcaggcctaggcaaggtacctctcaagagggcctttgatttgattaattatcttggaaatgagaaccatactgcacccatcaccgaagccctgtttcagacagacctcatctataacctccttgaaaaactgggatacatggatctggcctcaagactggtgactagggtatttaaattacttcaaaaccaaattcaacaacaaacttggactgatgagggcactccatctatgcgagagcttcggtcagccctgctagagtttgcttgcacccacaacctggggaactgctctactactgccatgaaactgtttgatgactggatggcatccaatggaactcaaagcctacctactgatgtcatgacaactgtgttcaaagttggagcaaaaactgacaaaggctggtcattccttttgggcaaatacatttctataggctctgaagcagagaagaacaaaatactagaagcacttgccagctcagaggatgtgcggaagctttactggttaatgaaaagtagcctgaatggagataacttccgaacacagaagctgtcttttatcattagaacagtgggtcgacattttcctggacacttactggcatgggattttgtcaaagagaactggaataagcttgtacagaagttccctctggggtcctataccatacaaaatattgttgctggatcaacttacctgttttcaacaaagacacatttatctgaggttcaggcattctttgaaaatcagtcagaggcaaccttccggcttcgttgtgtccaggaggctttggaagtcattcagttgaatatccagtggatggagaagaacctcaaaagtctcacatggtggctgtagcatgcacaaccgcacctcattttgttgcccattcagagagcttgtaagcttgggctctgccgcttttgcaaaagccaaggtaaagccaggatcgctgccaagttgtttgcactctttggagttctagttagctcagggcctgactgtatttttcatccatcttttctgaagtgtctttgggcagtatgtagttatttattacaaaattatattcacctaaatgccaaccatctacaaaaacaatgagtaatttttctactttgaagatacacagatggggacaaaaaccctgttttggaattctgttctattcctcagtatccagaaagttactgacacagtaaaacaaggaaagttctaccctaagagccgccatcacttcaggccgctggtttgtcagccatctgttgcttcttattgatagatggcattggaatgtggtacaaagttagctctgaagaatatggtaacgaagacaataaagcatgcactgtaagaactgacctcaggtgtgcagatctactttgatttggggttttgattaattctttatttttctgaaaaaaagtttaaataatgtctgtaactattgtgtttttttcctgccgaatagccaggtgctacagatttttaaaatttttgttgtattgaaaagctaaacaaggccaaaaggttaaattttttgaatatttaagactttctttttcatcttttatagcgttaccataggaaactgttccaaactgagttagctttaattataattattttattcataaatggtgatagtccccagatctgtacacctttatcactccctgccgtagatatactttaggttagtatttctacattcgtggcaagcattttggtaacaccagtggttttcattgtgacttttatcactatcactaagaatgcaatttaagttgccttttggcatcatagatcatagaaactttctctctgaatcatacccatgtgtgaattttcattttatatgatagtgtagcatattagaagcatattttaaaacagagcctttgagaaattgaaaaacaattatttgaagttcaccatagtaccttaaaggaacaaagagaatgtgggataggagtaacttgaattcgtgtttagtatggtgggctttgaatttttttcactatcaaaaatagtgcttttgtttagttaaaaattgtagtttttctttttttgtgtgtccaaactaacataaaaggagtggtcaaagaaggaaagaagaaaaatgagggaggatgtccgaaactgtatggcattttactccttctgaaagagaaatactgtacttgaatttttgagctatgcagacttatacctagattgttgtgtttctttgattcttaggagaaaagctttcttcctaataattcttgagaactttatattttgtttgaaaacagtttctatgtacataaaaagggtatttacccatttgtgagcacttaaaacactccacagagtcagacagtgggaaaggtcaccctttttttattcggcaggtatcaagttagaatgtatggaattgtgaataaaattatattttattttatgaaaatatttttatataataaaatttaaaaggctggtaagctaaaaaaatagtcttctttaatcctagtgtgttttccccaatttagtcttttctaaaatttatctgttttagagtagaaaatattatatcctgagaatcacagaatcatctaaatatgtcttattcaactgaagtgattgtaagtctttattcttgtgctttggttaaatgaatgataatttagttgatagtgaaagttaatgtgtttttatatttttagagtgagggaaaaatactaaacttttgagagttttgttgtcgttgctggttttttaccatgtggtactaaattccactttgatacaaaatttaaattttgtaacttctcaaaatcacttaagattcttcagttttacctgtgcttcttgacatcgctcctataatgtatgttagttaactctgcatatggcaaatcttgtcttgaattatatcatttctctccctctctctctctctctgtgtgtgtgtgtgtgtgtgtgtgtgtgtgtgtgtgtgtgtgtgtgtgtagtgtggggggtattgttatgagtaaaactttatcaaaacttggcctgaaaaagagataactcatgatccattgctatctttattactcaaaggctgttcattcccataataccagatccataatagttgtagtttttttgatgttgttgcccttaccttaattatttgtagttttagtaggccttgcctcagtttttcccacagaattccataattttaatgttgaactaacccatctatataggacttctaaaaactacgtcaggaatgtaaggttaaatgagaggtagaacttgtagtgtaataggtataatggtagctttcaaagttttatcttctcaaaacattgtcttagccagtgtatttctgagaactcagactgaagcacagaagtcacagtatgcttcttttatttaagcacacagattcatgacacaagtacttgttgaacaagtgttctcattgcagagagatctacttgaatataaaagggtcatcatactagattattaaaaaagaattggaaatcttgagttgtggaagaaatgtttatgctttggagatctaaaaaagttatgaatgtaggaattagataagtccagtttgttctgttaatataaaatggttagatatattaaactgcaagtagtatcagcttcaccataagcttgggccttcctccatcttgttttatttaagtctctttaaatgaaattttgttgtcattgtttcagcattcatgaactttcttactatcacaggttctactttaattttccttgccatatgtgtttccattttgtgggacattagccaccacaggaacacaagagttgtcagaagactcctgggtgtacagagcaaatcaagctgcatcagtattataggataccaaacagaatcctttctattaggaaataagaaatcagttaagtgttggctgggcgcggtggcttatgcctgtaatcccagcattttgggatgccaaggtgggcagaccatttgaggccaggagttctaaaccagtttggccgacatggcaaaaccccatctctactaaaaatataaaaattagctgggcatggtggtgcacacctgtaatcccagctacctgggaggcacgagaatcacttgaacccaggaggcggaggttgcagtgagccaaggttgtgccactgcactccagcctgggtgacaaagcgagactgtctcaaaaaacaaaaaacaaaaaaaaaagagttaagtgttgattttgttggattactgacagtttgttgagatggattttaaaaagagtctatttaaaccaaagtacctggaaccataatctgccatcagattgctaaacattcacataatccccatgtttcatggggcttcagggaaggcaaatacatctgagatgagccacctccaaggacagcatttcctgggctgcaaaactagatgtggattttgttacttaggcctctctaaaaactgaggccatggatatgacatagcttttcttctcacctatgcctttgttacttttgtatttattggaattaaatctctttttaaagagcttccttcccccttcatcccatttgtatttttaaaaactaagttatatatatatttgcttgtttttgcattcttttattttgtgctccattccctgctttgccagttaagtactacctgaaaagtagcggttcaaaagtatggtaaatctcctcccttaaccttattgcctgtgtgggtgacagctaatggaaaagttgatcgatttttttcagtggtttttttgggagtatatactttaaaaatgtacatacatgtttttgatagtttttatattatttcattttgtatatttttttcctgatgaagagtgatatatcatcctatgaaaatttcatctacccttcccattttacctgtatgggcagtagctacagactagttatttggtttccttctttggaagaaggtggtgatgttgagaggagagcaagctatattcttttaaaagtgtgtacagatgtttttgctattttgtgttatttcattttgtatttcattcatccattttgtggacgtgtagataaaacgcggtggtccaaaagcatgacagatgtcccctttgcgtttctccttattgttcgcatggacaataactgacagagtagtcctagttgctgttgttttgatctagtcttggggctggggttgtatattattctttcaagtgtgtataaatattgtgccacctttttatacttcattttatacttgtttccttgtatggatgcatatatacttaatgaaaattgaggttcagagtatgacaaatctcttttcccttttccttactgcctatttaggcaatagctaatagagtagtttgttttgttttggggtgtgggggagagtggagtatgtacttaatgtatataaataaacttgctactacattgtattactaatttggttcacactgtgtccttctcatggatgtgaaagtaccaatgaaatgtggagatctcgatgtataacagtctcccattctcctcatcccttattgactgctgggcagtagctaacagagtagttgtcaagtggcgtatttgaggtgagggggagggacggggaaggtaggaaaatgcacttaatgtatatacatgtttttactactacattgtattaattcatcgggtgcccagactgaaaggtacctaatgaaccatggagttccggatgtataacagtctcctcttttccctttcccttattgcccatgtgggcaatacttaagagtagtttgggtttattgaagattttttgctaggagagagaaaattttttgctaggagaggtttcaaggtaagagtatatactttaaacatgtatataaatgtttttgctacttttctgtcactacctttcttaccttgtcctttacatggatatatgaagaaaattgaggttcagcctgtagcagctctcctcttctgcccttcccttagattgtctgtgtgggcaggtgtctaagagagtagttgattagcttcagggattctttggtgggtgttggggtatatacttttgtatatgtatgtacatatttttatttctttattatagtgtttcattgggtacccggtccttcacttggatgtgtaggttcctaatgagccatggagttatggatgtataacaatctgttctccctttacccttttaatgtatatgggcaataattttaaagtagtttggatttttttaagttttgaggggtgggaggggtctaaggcagaatatatcctttttaaaaatgtatatatacttttcattaactatattgtattatttcatgctgtacccagtccattgcttggacttacgggtacctaatgaaacgtggaggtccggatgtatgaaaatctcctcttttcccctttccttattgcctctgtaggcaataattatagagtagtatagatggtttttcttttttatccatctgcctatctccaggaggatggggtgtgcacttttagaaatgtatataaatgttcttgctcctttttcctgttacttcattgtgtgccaaggcctttccatggatacttaggtacgtaatgaaaattgaggttcattctatgaaaaaatctccccttctccccttcccttattgcctgtcttggcaatggccagtagagtagttatttaagggattttgtttttttgtttttttgttttttttttggtaggggaggtggggaatttctgggtttgtcttttttttaatgtatataaaagtttgctagttgttgttattgttgttctttcactctcaacacagttttttgtttggagttgtaggaatcaaatgtaatgagggacccagacccgagagtgtggtaaatattctttgccttcctcagagcctgtatacacaagcaagtagtatgtgagcactacagggcttgggttttggttttttgcttttgagggttttaatgaggagtgggattgttgagaggaaaaggcaagatatataatttttttaatgtatataaatgttttgctcctttttgatgttaacttcattttgaatctggtcctttgtatgaccacttaggtacttaatagtaataaagttgagattgactctatgaaaaatatcccatactccccatccctcattgcctagggggcaatggtagaatagatgtttggtttcttttgggggtgtctgagtgtatatgtgtgtgtatatacacacaagaacacacatatttatatactatacacacacattttaatgtatataaatatttgctacattctgtgtgttatataatgtggtacccagtcctctgctgggacatggatgtacataatgaaacatggaggtccagacgtatgataactctcctgtttcccttccctcattgcctacaggggcaatagtttcatatcttgggttttttattgtttaatttttttttatggggaggggttctttgggtgggtaatagtcagggggaaaggacagtgtctatactttttaaagatgtatataaatgtttcatgttattggttttgtacctagtcctttgcatggatatataggtacctaatgaaaatcgaggatcagtgtatgacaaatctcccatcctcccctttccttattgcctgtgtcggcaataggaagtagaatagttgtgtgttgtttacttacttgtctgttttagagagatttctatttttggtaggggaatattcttaatatgttttcatatctttatttcattttgtagtcttttgcatggctatgtagggacctaatgaaagtcgagtttcataatatgacagctcacttcttttcctacatatttcctcacttagcagtagctagtgtagttattttgtggttattttatttcattctctaggatctattccattaaggatgcaagtgtgtagatgcatatatatcatttgcttctttcttccgccattattttcctttaacacttagtcccttgcaaggggtctgactatacctaacaaaaataaagacctactaaatccctgccatctggctggaaggtgtagcagtgtattaatgtaactaatagcaacaggtgtgcagcagataagacaggagaagacactcagctatggttgagttgtgaaagctaattagatccagcatttcttatgttgattcagattgaatgaggtagtgaaaagggacctgtgcttttgtaaattctagaaaggcaagaggacaatattgaataaagctgtgtttaaacttcattgctcatatatcttttagtaactggtaaaccggcgaagctgataagccaataagagtgctgtctagaacgcatttgcaaaccgttaagagtagcttctttttgaggcctggacttctgattcatctatagaagtctattatgattccatcaattgcatagcttgtgtacctggtagaaattgtgtcttggaatgaccctttcgagttattgacatggctctgatgaatagaacatgagccccaaaactaaatccaaaaggaattttctatctttcatcccccacatgtggcaagacaagttggccctttcttacccagaggtcttttgtgtgactgcatctttctcctccgttctccattgtgtgctttccattttgtctttagtgcctatactgttaggtgttttcttcactggcattcacaaatttaagccattgctgcctcattagccttgtattttgtgtgcatatcatgtatccagacctgtatgttcgctttaagcattcttatatcacactgtctcctcatctaccatatggtaaatgttaaaactccacatttgtctgcatcagggaaaatgcatgggcacacatcctccctccctccctctctgctctcctcccttccttcaggcctcttagcattgtttgttttcccatttctgatactactactccatgctgaagatttgccatattactattttggaaacattgagtgatagaactcctagaaaatttgcaaagaaatgttacatactgtatatcaaactctcagattctagtgttgaaaaagtagcctatactttgctattacttatacctgctgccatagaaaaaaataagtttattcatgacacatttacatttgatcataaataaaagaaaaaagggcacctttttggagttagtcatggtagtcattagtgatatttctgaacagttcttaatttaaaatacttcaaaggaagtaaaggtcatggcttagctgaaggaaatgctccagaaattggactgtgtaaaccatcagtacaataatacgctgtgtatgtatgtgtatataaaatgagaattatggcataattggagcatttgcattaatcaacaaactcacattgagacaaaacttagttttacagctgtcttgattaaagccaagtgttccatgttgctgtgaagaatagcctctttcaaatactttggaaagtagttacttggaaacttgtaaaggtattacatttttatatttaaacacctatagagatcttcaattccttgagtctgagcttgtgggtggaattctaaatttgtatcataatctgtcttttgtgaaacattttgaaaatatgtatatataatattgtatatgcaaattgtgttgtttcacttgtaaagggaaaaggcttatttttctttatatttctgataacttgttttgcatatgaccagcactgactgaaaggcatgtgtagctgcaaacactgttgctttttttgtgaaatgaaaataaaagtatttaaatacaaaca

SEQ ID NO: 148458 - DNA, 3888 bp, Homo sapiens
  Payload ID: 9402
  Gene Symbol: LNPEP
  Gene Name: leucyl/cystinyl aminopeptidase
  Uniprot ID: Q9UIQ6
  ENST ID: ENST00000395770
  CDS Start-End: 350-3385
gctcctaactccactaagtacagaagtggagccgtacagccatgaatgtcaggcatgttgtggggactagttgtattagttttctattgccaccataacaaattaccacaaacttaagcaatatagtacaaatttatcttaaagttattggcaggtcagaagcctgatacggatctcattgggctaaaacgaaggagttggcagggctgtgtgttcctttctgtaggctctgggcaggatccatttcctgcacttttttggcttttggaggtcgtccacattccttggctcctggccctgctccttcatcttcaaagctaccaaagatcggcttcagctccccaggaatatgattgaaaacagcatgtttgaggaagaaccagatgtggtggatttagccaaagagccttgtttacatcctctagagcctgatgaggtggaatatgagccccggggttcccgactgctggtgcggggtcttggtgagcatgagatggaggaggatgaagaggattatgagtcatcagcaaagctgctgggcatgtccttcatgaatagaagctcaggccttcggaacagtgcaactggttacaggcagagcccagatggggcttgttcagtaccctctgcaaggaccatggtggtctgtgcttttgtcatcgtggttgctgtttctgtaatcatggtgatttacttactgcccagatgtacctttaccaaagaaggctgccataaaaaaaaccagtcaattggactaattcagccatttgcaacaaatgggaaattgtttccatgggcacagatcaggcttcccactgccgttgtgccactacgctatgaactcagcctacacccgaacctaacctcgatgacattcaggggttctgtgacaatttcagttcaggctcttcaggtcacatggaatatcattcttcatagcacaggtcataatatttcaagagtgacctttatgtcagcagtttcaagccaagaaaaacaagctgagatcctggaatatgcatatcatggacagatcgccattgttgcccccgaagcccttctagcagggcacaattatacgttgaagatagagtactcggcaaatatatctagttcttattatgggttttatggcttctcctacacagatgaaagtaatgagaaaaagtactttgcagcaactcagtttgaacccctggcagcaagatctgcttttccttgttttgatgaaccagcatttaaagccacttttatcatcaagatcataagggatgagcaatacaccgctttatcaaatatgcctaagaagtcatcagtcgttctagatgatggacttgttcaggatgagttttctgagagtgtgaagatgagcacttacttggttgctttcattgtgggagagatgaagaacctgagtcaggacgtaaatggaaccctggtttctatatatgctgtaccagaaaagattggtcaagttcattatgccttggaaacaactgtgaagcttcttgagttttttcaaaactactttgaaattcagtacccacttaagaaattggatttggtggctattcctgactttgaagcaggagcaatggaaaattggggtttgctcaccttccgagaggagacacttctgtatgacagtaacacttcttcaatggcggatagaaagctggtgactaaaatcattgctcatgagctggcccaccagtggtttggcaatctggtaacaatgaagtggtggaatgacctatggctaaatgaaggttttgccactttcatggagtatttctctttggaaaaaatattcaaagagctttctagttatgaagatttcttagatgctcgatttaaaaccatgaagaaagattccttaaattcatctcatccaatatcatcatctgttcagtcttcagaacaaattgaagaaatgtttgattctctttcctattttaagggatcttctctcttgttgatgttgaaaacttaccttagtgaagatgtgtttcaacatgctgttgtcctttacctgcataatcacagctatgcatctattcaaagtgatgatctgtgggatagttttaatgaggtcacaaaccaaacactagatgtaaagagaatgatgaaaacctggaccctgcagaaaggatttcctttagtgactgttcaaaagaaaggaaaggaactttttatacaacaagagagattctttttaaatatgaagcctgaaattcagccttcagatacaagctacctgtggcatattccactatcctatgtcactgaaggaagaaattattcaaaatatcaatcggtatcattactggataagaaatcaggtgtcatcaatcttacagaagaagtgctgtgggtcaaagtgaatataaacatgaatggttattatattgtacactatgcagatgatgattgggaagcactaatccatcagttgaaaataaatccttatgttctgagtgacaaagaccgagccaaccttatcaacaacatctttgaacttgcaggcctaggcaaggtacctctcaagagggcctttgatttgattaattatcttggaaatgagaaccatactgcacccatcaccgaagccctgtttcagacagacctcatctataacctccttgaaaaactgggatacatggatctggcctcaagactggtgactagggtatttaaattacttcaaaaccaaattcaacaacaaacttggactgatgagggcactccatctatgcgagagcttcggtcagccctgctagagtttgcttgcacccacaacctggggaactgctctactactgccatgaaactgtttgatgactggatggcatccaatggaactcaaagcctacctactgatgtcatgacaactgtgttcaaagttggagcaaaaactgacaaaggctggtcattccttttgggcaaatacatttctataggctctgaagcagagaagaacaaaatactagaagcacttgccagctcagaggatgtgcggaagctttactggttaatgaaaagtagcctgaatggagataacttccgaacacagaagctgtcttttatcattagaacagtgggtcgacattttcctggacacttactggcatgggattttgtcaaagagaactggaataagcttgtacagaagttccctctggggtcctataccatacaaaatattgttgctggatcaacttacctgttttcaacaaagacacatttatctgaggttcaggcattctttgaaaatcagtcagaggcaaccttccggcttcgttgtgtccaggaggctttggaagtcattcagttgaatatccagtggatggagaagaacctcaaaagtctcacatggtggctgtagcatgcacaaccgcacctcattttgttgcccattcagagagcttgtaagcttgggctctgccgcttttgcaaaagccaaggtaaagccaggatcgctgccaagttgtttgcactctttggagttctagttagctcagggcctgactgtatttttcatccatcttttctgaagtgtctttgggcagtatgtagttatttattacaaaattatattcacctaaatgccaaccatctacaaaaacaatgagtaatttttctactttgaagatacacagatggggacaaaaaccctgttttggaattctgttctattcctcagtatccagaaagttactgacacagtaaaacaaggaaagttctaccctaagagccgccatcacttcaggccgctggtttgtcagccatctgttgcttcttattgatagatggcattggaatgtggtacaaagttagctctgaagaatatggtaacgaagacaataaagcatgcactgtaagaactga

SEQ ID NO: 148459 - DNA, 2213 bp, Homo sapiens
  Payload ID: 9403
  Gene Symbol: LARS
  Gene Name: leucyl-tRNA synthetase
  Uniprot ID: Q9P2J5
  ENST ID: ENST00000274562
  CDS Start-End: 546-2003
cgtggatttgcacagtcggctgggcggtgcaatggcggaaagaaaaggaacagccaaagtggactttttgaagaagattgagaaagaaatccaacagaaatgggatactgagagagtgtttgaggtcaatgcatctaatttagagaaacagaccagcaagggcaagtattttgtaaccttcccatatccatatatgaatggacgccttcatttgggacacacgttttctttatccaaatgtgagtttgctgtagggtaccagcgattgaaaggaaaatgttgtctgtttccctttggcctgcactgtactggaatgcctattaaggcatgtgctgataagttgaaaagagaaatagagctgtatggttgcccccctgattttccagatgaagaagaggaagaggaagaaaccagtgttaaaacagaagatataataattaaggttaaagcaggagtttgaattctggtatcctgttgatcttcgcgtctctggcaaggatcttgttccaaatcatctttcatattacctttataatcatgtggctatgtggccggaacaaagtgacaaatggcctacagctgtgagagcaaatggacatctcctcctgaactctgagaagatgtcaaaatccacaggcaacttcctcactttgacccaagctattgacaaattttcagcagatggaatgcgtttggctctggctgatgctggtgacactgtagaagatgccaactttgtggaagccatggcagatgcaggtattctccgtctgtacacctgggtagagtgggtgaaagaaatggttgccaactgggacagcctaagaagtggtcctgccagcactttcaatgatagagtttttgccagtgaattgaatgcaggaattataaaaacagatcaaaactatgaaaagatgatgtttaaagaagctttgaaaacagggttttttgagtttcaggccgcaaaagataagtaccgtgaattggctgtggaagggatgcacagagaacttgtgttccggtttattgaagttcagacacttctcctcgctccattctgtccacatttgtgtgagcacatctggacactcctgggaaagcctgactcaattatgaatgcttcatggcctgtggcaggtcctgttaatgaagttttaatacactcctcacagtatcttatggaagtaacacatgaccttagactacgactcaagaactatatgatgccagctaaagggaagaagactgacaaacaacccctgcagaagccctcacattgcaccatctatgtggcaaagaactatccaccttggcaacataccaccctgtctgttctacgtaaacactttgaggccaataacggaaaactgcctgacaacaaagtcattgctagtgaactaggcagtatgccagaactgaagaaatacatgaagaaagtcatgccatttgttgccatgattaaggaaaatctggagaagatggggcctcgtattctggatttgcaattagaatttgatgaaaaggctgtgcttatggagaatatagtctatctgactaattcgcttgagctagaacacatagaagtcaagtttgcctccgaagcagaagataaaatcagggaagactgctgtcctgggaaaccacttaatgtttttagaatagaacctggtgtgtccgtttctctggtgaatccccagccatccaatggccacttctcaaccaaaattgaaatcaggcaaggagataactgtgattccataatcaggcgtttaatgaaaatgaatcgaggaattaaagacctttccaaagtgaaactgatgagatttgatgatccactgttggggcctcgacgagttcctgtcctgggaaaggagtacaccgagaagacccccatttctgagcatgctgttttcaatgtggacctcatgagcaagaaaattcatctgactgagaatgggataagggtggatattggcgatacaataatctatctggttcattaaactcatgcacattggagatttatcctggtttcttaggaatactactactctgattgtgtctactgattggctatcagaaccttaggctggacctaaatagattgatttcatttctaaccatccaattctgcatgtattcataattctatcaagtcatctttgattcctggacctaataaattttttttccctttctttgggtgtccaaga

SEQ ID NO: 148460 - DNA, 4766 bp, Homo sapiens
  Payload ID: 9403
  Gene Symbol: LARS
  Gene Name: leucyl-tRNA synthetase
  Uniprot ID: Q9P2J5
  ENST ID: ENST00000394434
  CDS Start-End: 168-3698
ggctgtagttagtaaggagccggatgattgcctcagcaggtgtgaagcgtgtgctttagtttcgtgggaggcctggcatccccgagagggaggggaaaggtaaccactcctttgtggaggtcgccagggtcattgtcgtggatttgcacagtcggctgggcggtgcaatggcggaaagaaaaggaacagccaaagtggactttttgaagaagattgagaaagaaatccaacagaaatgggatactgagagagtgtttgaggtcaatgcatctaatttagagaaacagaccagcaagggcaagtattttgtaaccttcccatatccatatatgaatggacgccttcatttgggacacacgttttctttatccaaatgtgagtttgctgtagggtaccagcgattgaaaggaaaatgttgtctgtttccctttggcctgcactgtactggaatgcctattaaggcatgtgctgataagttgaaaagagaaatagagctgtatggttgcccccctgattttccagatgaagaagaggaagaggaagaaaccagtgttaaaacagaagatataataattaaggataaagctaaaggaaaaaagagtaaagctgctgctaaagctggatcttctaaataccagtggggcattatgaaatcccttggcctgtctgatgaagagatagtaaaattttctgaagcagaacattggcttgattatttcccgccactggctattcaggatttaaaaagaatgggtttgaaggtagactggcgtcgttccttcatcaccactgatgttaatccttactatgattcatttgtcagatggcaatttttaacattaagagaaagaaacaaaattaaatttgggaagcggtatacaatttactctccgaaagatggacagccttgcatggatcatgatagacaaactggagagggtgttggacctcaggaatatactttactcaaattgaaggtgcttgagccatacccatctaaattaagtggcctgaaaggtaaaaatattttcttggtggctgctactctcagacctgagaccatgtttgggcagacaaattgttgggttcgtcctgatatgaagtacattggatttgagacggtgaatggtgatatattcatctgtacccaaaaagcagccaggaatatgtcataccagggctttaccaaagacaatggcgtggtgcctgttgttaaggaattaatgggggaggaaattcttggtgcatcactttctgcacctttaacatcatacaaggtgatctatgttctcccaatgctaactattaaggaggataaaggcactggtgtggttacaagtgttccttccgactcccctgatgatattgctgccctcagagacttgaagaaaaagcaagccttacgagcaaaatatggaattagagatgacatggtcttgccatttgagccggtgccagtcattgaaatcccaggttttggaaatctttctgctgtaaccatttgtgatgagttgaaaattcagagccagaatgaccgggaaaaacttgcagaagcaaaggagaagatatatctaaaaggattttatgagggtatcatgttggtggatggatttaaaggacagaaggttcaagatgtaaagaagactattcagaaaaagatgattgacgctggagatgcacttatttacatggaaccagagaaacaagtgatgtccaggtcgtcagatgaatgtgttgtggctctgtgtgaccagtggtacttggattatggagaagagaattggaagaaacagacatctcagtgcttgaagaacctggaaacattctgtgaggagaccaggaggaattttgaagccaccttaggttggctacaagaacatgcttgctcaagaacttatggtctaggcactcacctgccttgggatgagcagtggctgattgaatcactttctgactccactatttacatggcattttacacagttgcacacctattgcaggggggtaacttgcatggacaggcagagtctccgctgggcattagaccgcaacagatgaccaaggaagtttgggattatgttttcttcaaggaggctccatttcctaagactcagattgcaaaggaaaaattagatcagttaaagcaggagtttgaattctggtatcctgttgatcttcgcgtctctggcaaggatcttgttccaaatcatctttcatattacctttataatcatgtggctatgtggccggaacaaagtgacaaatggcctacagctgtgagagcaaatggacatctcctcctgaactctgagaagatgtcaaaatccacaggcaacttcctcactttgacccaagctattgacaaattttcagcagatggaatgcgtttggctctggctgatgctggtgacactgtagaagatgccaactttgtggaagccatggcagatgcaggtattctccgtctgtacacctgggtagagtgggtgaaagaaatggttgccaactgggacagcctaagaagtggtcctgccagcactttcaatgatagagtttttgccagtgaattgaatgcaggaattataaaaacagatcaaaactatgaaaagatgatgtttaaagaagctttgaaaacagggttttttgagtttcaggccgcaaaagataagtaccgtgaattggctgtggaagggatgcacagagaacttgtgttccggtttattgaagttcagacacttctcctcgctccattctgtccacatttgtgtgagcacatctggacactcctgggaaagcctgactcaattatgaatgcttcatggcctgtggcaggtcctgttaatgaagttttaatacactcctcacagtatcttatggaagtaacacatgaccttagactacgactcaagaactatatgatgccagctaaagggaagaagactgacaaacaacccctgcagaagccctcacattgcaccatctatgtggcaaagaactatccaccttggcaacataccaccctgtctgttctacgtaaacactttgaggccaataacggaaaactgcctgacaacaaagtcattgctagtgaactaggcagtatgccagaactgaagaaatacatgaagaaagtcatgccatttgttgccatgattaaggaaaatctggagaagatggggcctcgtattctggatttgcaattagaatttgatgaaaaggctgtgcttatggagaatatagtctatctgactaattcgcttgagctagaacacatagaagtcaagtttgcctccgaagcagaagataaaatcagggaagactgctgtcctgggaaaccacttaatgtttttagaatagaacctggtgtgtccgtttctctggtgaatccccagccatccaatggccacttctcaaccaaaattgaaatcaggcaaggagataactgtgattccataatcaggcgtttaatgaaaatgaatcgaggaattaaagacctttccaaagtgaaactgatgagatttgatgatccactgttggggcctcgacgagttcctgtcctgggaaaggagtacaccgagaagacccccatttctgagcatgctgttttcaatgtggacctcatgagcaagaaaattcatctgactgagaatgggataagggtggatattggcgatacaataatctatctggttcattaaactcatgcacattggagatttatcctggtttcttaggaatactactactctgattgtgtctactgattggctatcagaaccttaggctggacctaaatagattgatttcatttctaaccatccaattctgcatgtattcataattctatcaagtcatctttgattcctggacctaataaattttttttccctttctttgggtgtccaagagaaatggtttttgccaaactctttttaaaaaacaaattgttgctatttcctagaagtttctggtttttaagatgaacataaaagtgtcagtatgcttcttttatgaggtgtactttatactttgatgaaggctaaggtgtacctaacagctttttatagtatattcatttatggagttagctgtatttttttttaaaaaagaaaagtagtaaattagcagcttttttttttaaatgaagagaacttcatgatgatttaaaagaactaatgagaatattttgacttgacttcaattactaagtattttgtataaagaacaaataggtcctgcattttataagactttttaaagctttaattattcaactaagaaccaataatggcttcttcaaggctaatatcaatagtttataagcagtatatttcacctacactaaatatgggcattttaaaagaagattccccccttcccccccagaaatctgcatttactaaatttgtcttaagtccaattgtgtttaaaggtcatgctggtcgggtgtggtggctcacacctataatcccagcactttgggaggccaaggtgggcagtcacctgaggtcaggagtttgagaccagcctgaccaacatggtgaaaccccgtctctactaaaaatacaaaaattagcttggcatggtggcgggtacctgtaatcccagctgcttgggagtgtgaggcaggagaatcgcttgaacctgggagaccgaggttgcagtgagctgaaaccgtgccattgcactccagcttaggcaacaagagtgaaactctgtctcaatcaatccatcaatcaatcaataaaatagaggtcatgctgact

SEQ ID NO: 148461 - DNA, 3737 bp, Homo sapiens
  Payload ID: 9403
  Gene Symbol: LARS
  Gene Name: leucyl-tRNA synthetase
  Uniprot ID: Q9P2J5
  ENST ID: ENST00000510191
  CDS Start-End: 174-3542
aggtgtgaagcgtgtgctttagtttcgtgggaggcctggcatccccgagagggaggggaaaggtaaccactcctttgtggaggtcgccagggtcattgtcgtggatttgcacagtcggctgggcggtgcaatggcgcaagggcaagtattttgtaaccttcccatatccatatatgaatggacgccttcatttgggacacacgttttctttatccaaatgtgagtttgctgtagggtaccagcgattgaaaggaaaatgttgtctgtttccctttggcctgcactgtactggaatgcctattaaggcatgtgctgataagttgaaaagagaaatagagctgtatggttgcccccctgattttccagatgaagaagaggaagaggaagaaaccagtgttaaaacagaagatataataattaaggataaagctaaaggaaaaaagagtaaagctgctgctaaagctggatcttctaaataccagtggggcattatgaaatcccttggcctgtctgatgaagagatagtaaaattttctgaagcagaacattggcttgattatttcccgccactggctattcaggatttaaaaagaatgggtttgaaggtagactggcgtcgttccttcatcaccactgatgttaatccttactatgattcatttgtcagatggcaatttttaacattaagagaaagaaacaaaattaaatttgggaagcggtatacaatttactctccgaaagatggacagccttgcatggatcatgatagacaaactggagagggtgttggacctcaggaatatactttactcaaattgaaggtgcttgagccatacccatctaaattaagtggcctgaaaggtaaaaatattttcttggtggctgctactctcagacctgagaccatgtttgggcagacaaattgttgggttcgtcctgatatgaagtacattggatttgagacggtgaatggtgatatattcatctgtacccaaaaagcagccaggaatatgtcataccagggctttaccaaagacaatggcgtggtgcctgttgttaaggaattaatgggggaggaaattcttggtgcatcactttctgcacctttaacatcatacaaggtgatctatgttctcccaatgctaactattaaggaggataaaggcactggtgtggttacaagtgttccttccgactcccctgatgatattgctgccctcagagacttgaagaaaaagcaagccttacgagcaaaatatggaattagagatgacatggtcttgccatttgagccggtgccagtcattgaaatcccaggttttggaaatctttctgctgtaaccatttgtgatgagttgaaaattcagagccagaatgaccgggaaaaacttgcagaagcaaaggagaagatatatctaaaaggattttatgagggtatcatgttggtggatggatttaaaggacagaaggttcaagatgtaaagaagactattcagaaaaagatgattgacgctggagatgcacttatttacatggaaccagagaaacaagtgatgtccaggtcgtcagatgaatgtgttgtggctctgtgtgaccagtggtacttggattatggagaagagaattggaagaaacagacatctcagtgcttgaagaacctggaaacattctgtgaggagaccaggaggaattttgaagccaccttaggttggctacaagaacatgcttgctcaagaacttatggtctaggcactcacctgccttgggatgagcagtggctgattgaatcactttctgactccactatttacatggcattttacacagttgcacacctattgcaggggggtaacttgcatggacaggcagagtctccgctgggcattagaccgcaacagatgaccaaggaagtttgggattatgttttcttcaaggaggctccatttcctaagactcagattgcaaaggaaaaattagatcagttaaagcaggagtttgaattctggtatcctgttgatcttcgcgtctctggcaaggatcttgttccaaatcatctttcatattacctttataatcatgtggctatgtggccggaacaaagtgacaaatggcctacagctgtgagagcaaatggacatctcctcctgaactctgagaagatgtcaaaatccacaggcaacttcctcactttgacccaagctattgacaaattttcagcagatggaatgcgtttggctctggctgatgctggtgacactgtagaagatgccaactttgtggaagccatggcagatgcaggtattctccgtctgtacacctgggtagagtgggtgaaagaaatggttgccaactgggacagcctaagaagtggtcctgccagcactttcaatgatagagtttttgccagtgaattgaatgcaggaattataaaaacagatcaaaactatgaaaagatgatgtttaaagaagctttgaaaacagggttttttgagtttcaggccgcaaaagataagtaccgtgaattggctgtggaagggatgcacagagaacttgtgttccggtttattgaagttcagacacttctcctcgctccattctgtccacatttgtgtgagcacatctggacactcctgggaaagcctgactcaattatgaatgcttcatggcctgtggcaggtcctgttaatgaagttttaatacactcctcacagtatcttatggaagtaacacatgaccttagactacgactcaagaactatatgatgccagctaaagggaagaagactgacaaacaacccctgcagaagccctcacattgcaccatctatgtggcaaagaactatccaccttggcaacataccaccctgtctgttctacgtaaacactttgaggccaataacggaaaactgcctgacaacaaagtcattgctagtgaactaggcagtatgccagaactgaagaaatacatgaagaaagtcatgccatttgttgccatgattaaggaaaatctggagaagatggggcctcgtattctggatttgcaattagaatttgatgaaaaggctgtgcttatggagaatatagtctatctgactaattcgcttgagctagaacacatagaagtcaagtttgcctccgaagcagaagataaaatcagggaagactgctgtcctgggaaaccacttaatgtttttagaatagaacctggtgtgtccgtttctctggtgaatccccagccatccaatggccacttctcaaccaaaattgaaatcaggcaaggagataactgtgattccataatcaggcgtttaatgaaaatgaatcgaggaattaaagacctttccaaagtgaaactgatgagatttgatgatccactgttggggcctcgacgagttcctgtcctgggaaaggagtacaccgagaagacccccatttctgagcatgctgttttcaatgtggacctcatgagcaagaaaattcatctgactgagaatgggataagggtggatattggcgatacaataatctatctggttcattaaactcatgcacattggagatttatcctggtttcttaggaatactactactctgattgtgtctactgattggctatcagaaccttaggctggacctaaatagattgatttcatttctaaccatccaattctgcatgtattcataattctatcaagtcatctttgattcctggacctaataaattttttttccctttc

SEQ ID NO: 148462 - DNA, 720 bp, Homo sapiens
  Payload ID: 9403
  Gene Symbol: LARS
  Gene Name: leucyl-tRNA synthetase
  ENST ID: ENST00000618084
  CDS Start-End: 133-615
gcaggtgtgaagcgtgtgctttagtttcgtgggaggcctggcatccccgagagggaggggaaaggtaaccactcctttgtggaggtcgccagggtcattgtcgtggatttgcacagtcggctgggcggtgcaatggcggaaagaaaaggaacagccaaagtggactttttgaagaagattgagaaagaaatccaacagaaatgggatactgagagagtgtttgaggtcaatgcatctaatttagagaaacagaccagcaagggcaagtattttgtaaccttcccatatccatatatgaatggacgccttcatttgggacacacgttttctttatccaaatgtgagtttgctgtagggtaccagcgattgaaaggaaaatgttgtctgtttccctttggcctgcactgtactggaatgcctattaaggcatgtgctgataagttgaaaagagaaatagagctgtatggttgcccccctgattttccagatgaagaagaggaagaggaagaaaccagtgttaaaacagaagatataataattaaggataaagctaaaggaaaaaagagtaaagctgctctaaagctggatcttctaaataccagtggggcattatgaaatcccttggcctgtctgatgaagagatagtaaaattttctgaagcagaacattggcttgattatttcccgccactggctattcaggatttaaaaagaatgggtt

SEQ ID NO: 148463 - DNA, 4281 bp, Homo sapiens
  Payload ID: 9404
  Gene Symbol: LARS2
  Gene Name: leucyl-tRNA synthetase 2, mitochondrial
  Uniprot ID: Q15031
  ENST ID: ENST00000265537
  CDS Start-End: 263-2974
gttgctctcctcccttccccggtcccgcccccgtctgtctgtgtcgactgcggacgctatcgataaagttgctgttttgacaacatggcggcgcccatggtccgtggcccggcagtgctcgcctaaaggtggagaacgaggagtagaggagccgcaggccagagcctgtgagcagatccagacctacagataaaaaacattatttaatctatctgggatttactccggcttatgatttgagggccttctcaccttctgaagaatggcttctgtttggcagagattgggtttttatgcctctcttctgaaaagacagctaaatggtgggccagatgtcatcaagtgggaaaggagagtaattcccggatgtaccagaagcatctacagtgccacgggaaagtggacaaaagagtatacattgcagacaagaaaggatgttgagaaatggtggcatcaacgaataaaagaacaggcctccaaaatttcagaagctgataaatcgaagccaaaattttacgtgctttccatgttcccttatccttctggtaagctgcacatgggccatgtgcgtgtctacaccatcagcgacaccatagcacggttccagaagatgagagggatgcaggtcatcaaccccatgggatgggatgcttttggattgcctgctgaaaatgccgcagtcgagaggaatctacatccacaaagttggacacaaagtaatattaaacacatgaggaaacagcttgatcgtctgggcctgtgtttcagctgggatagggaaataactacgtgtttgccagattactacaagtggactcagtatctctttattaaactgtatgaggctgggctggcctatcaaaaggaggccctggttaactgggacccagtggatcaaacagtgcttgccaatgagcaggtggatgaacatggctgttcatggcgttctggagcaaaggtggaacagaagtacctcagacaatggtttattaagacaaccgcttatgcaaaggccatgcaggacgcgttggcagaccttccagaatggtatggaataaaaggcatgcaagcccactggattggggactgtgtgggctgccacctggacttcacattaaaggttcatgggcaagccacgggcgaaaagctgactgcctatacggccacccctgaagccatttatggcacctcccacgtggccatctcgcccagccacagactcctacatgggcacagctctctgaaggaagccttgaggatggcccttgtccctggcaaagattgcctcacgcctgtaatggctgtgaacatgcttacccagcaggaggtccctgtcgttattttggccaaagctgacttggaaggctctctggattcaaaaataggaattcccagtactagctcagaggacaccatcttagcccaaaccctgggcctggcctactctgaagtcattgaaactttgccagatggcacagagagactgagcagctctgctgagttcacaggtatgacccggcaggatgcttttctagccctgactcagaaagcccgggggaagagagtgggtggagacgtgacaagtgataaactgaaagactggctgatttcacggcagcggtactggggcacaccaatccccattgtccactgcccagtctgtggccccacacctgtgcccctggaggacttgcctgtgaccctgcccaacatcgcgtctttcactggcaagggaggccccccactggccatggcttcagagtgggtgaactgctcctgcccaaggtgcaagggagcagccaagagagagacagacacgatggatacctttgttgattctgcttggtactacttcagatacactgaccctcataatccacacagcccttttaacacagcagtggccgattactggatgcctgtggatttgtacattggagggaaagaacatgccgtcatgcacttgttctatgcaagattctttagtcatttttgccatgatcaaaaaatggttaaacatagggagccttttcataagctgctggcccaaggccttatcaaggggcagacattccgcctaccatctggacagtatctacagagagaggaagtggatctcacaggttccgttcctgttcatgcaaaaacgaaagagaagttagaggtgacgtgggagaagatgagtaagtccaaacacaacggggtggacccagaggaagttgtggagcagtatgggatcgacacgattcggctctacatcctttttgctgcccctcctgagaaggatatcttgtgggatgtgaaaactgatgctctccctggggtgctgagatggcaacaacgactgtggaccttgacaactcggtttattgaggccagggcttctgggaagtctccccagcctcagctgctgagtaacaaggagaaagctgaggccaggaagctctgggagtacaagaactccgtcatctctcaggtgaccacccatttcacagaggacttctcactgaattctgcaatttctcagctgatgggactcagcaatgccctctcgcaagcctctcagagcgtcattctccacagccccgagtttgaggatgctttgtgtgccctgatggtaatggctgctccactggcccctcatgtaacctcagagatctgggcaggcctggcgctggtgccgaggaagctctgtgcccactacacttgggatgccagtgtgctgctccaggcatggcctgctgtggacccggagttcctgcagcagcctgaggttgtccagatggcagttctgatcaacaataaagcttgtggcaaaattcctgtgccccaacaagttgcccgggaccaggacaaagtccacgaatttgttcttcaaagcgagctgggtgtcaggcttttgcaaggacgaagcatcaagaagtccttcctttccccgagaactgccctcatcaacttcctggtgcaagattgacagccaggaggctgcagctaccacgagggcctctgaggaacctccttccaggcctgggatgagggggcgatgtctgctggcccaggggaagggaaaagacaaatgtcttgactgttgacctcggtcctgtggcagactgcagtcaacagtgtgcctctgtagtgtggcctggtgctggggtgaaggtgagctgggcaaaggagaaatatgagctactgaggagggggttggacatcctgcccctcaccccccacccacactgcaggtagaggaggccatctgatcccatgggaagccatcagagacactgctggtgggagcaggaaggagcagtgcccctcgagcagccaggaagcctgcggatctgggaaatggctctgccttaggcacttctcgggaatttgaggccagcctgaggaactgcaggactcaggtgcaatgtgccagccacttggaactgctaactgagcctccagatggtagtgaatggtctctttgccttcaggctggatgaggaagtcatttaggaaatgttcaaataaccaatatgtggaaatggacacagggatcttctgaagttgctttgaatcaaaaggcaggcagtgctggttcctctgcctgtgtccccaccactccccagctctgtcatgcaggcctgtcctccccaaccccagctggatgtgcctcccaggcctgctgtggttctgacacacaggatcccaggcaaggcaccacttcctcacatgaatgaggagcagcaagtcataaccactcccttgggtatacaatttgctgtgtagtgaagtggaaccaggctcaggctgctggtcccaacctcagagccccaccgcagcccagtagggatgcagcacgccccagagggctcatgtgggccccagatggcaatgccaccattgttgatgtgactccagagccagttattaggaagagcaagctcaccacagaggagtggaactgaggccccccagatgttgcctccggtgtccaagccacagcggtctggctgttgggaagatggccaggaatggactcataccattggcacattaggctaatcctggttttatgtgaagtcagcaattaagtgttcccactagaactgacctaagccactgattaatatttaatgagggaaggtaggggagaatctagccattttataatgccagaaatctatatatgttatctgatgccatttttctgaagtagcctcacatgtggtccccctgcagttcagcagttaacagatgacttttttagtgtaataaaatgtttatcatctatga

SEQ ID NO: 148464 - DNA, 566 bp, Homo sapiens
  Payload ID: 9404
  Gene Symbol: LARS2
  Gene Name: leucyl-tRNA synthetase 2, mitochondrial
  ENST ID: ENST00000430399
  CDS Start-End: 224-566
agtgctcgcctaaaggtggagaacgaggagtagaggagccgcaggccagagcctgtgagcaggtcgttttcacgttagggctcggaggtcctcagaaagatgaggttccagacgagaaatccgcctgaggtcacagatccagacctacagataaaaaacattatttaatctatctgggatttactccggcttatgatttgagggccttctcaccttctgaagaatggcttctgtttggcagagattgggtttttatgcctctcttctgaaaagacagctaaatggtgggccagatgtcatcaagtgggaaaggagagtaattcccggatgtaccagaagcatctacagtgccacgggaaagtggacaaaagagtatacattgcagacaagaaaggatgttgagaaatggtggcatcaacgaataaaagaacaggcctccaaaatttcagaagctgataaatcgaagccaaaattttacgtgctttccatgttcccttatccttctggtaagctgcacatgggccatgtgcgtgtctacaccatcagcgacaccatagcacggttcc

SEQ ID NO: 148465 - DNA, 570 bp, Homo sapiens
  Payload ID: 9404
  Gene Symbol: LARS2
  Gene Name: leucyl-tRNA synthetase 2, mitochondrial
  ENST ID: ENST00000431023
  CDS Start-End: 139-570
atcgataaagttgctgttttgacaacatggcggcgcccatggtccgtggcccggcagtgctcgcctaaaggtggagaacgaggagtagaggagccgcaggccagagcctgtgagcagggccttctcaccttctgaagaatggcttctgtttggcagagattgggtttttatgcctctcttctgaaaagacagctaaatggtgggccagatgtcatcaagtgggaaaggagagtaattcccggatgtaccagaagcatctacagtgccacgggaaagtggacaaaagagtatacattgcagacaagaaaggatgttgagaaatggtggcatcaacgaataaaagaacaggcctccaaaatttcagaagctgatgtcatcaaccccatgggatgggatgcttttggattgcctgctgaaaatgccgcagtcgagaggaatctacatccacaaagttggacacaaagtaatattaaacacatgaggaaacagcttgatcgtctgggcctgtgtttcagctgggatagggaaataactacgtgtttgccagattactacaagtggactcagtat

SEQ ID NO: 148466 - DNA, 4744 bp, Homo sapiens
  Payload ID: 9404
  Gene Symbol: LARS2
  Gene Name: leucyl-tRNA synthetase 2, mitochondrial
  Uniprot ID: Q15031
  ENST ID: ENST00000415258
  CDS Start-End: 142-2853
gctatcgataaagttgctgttttgacaacatggcggcgcccatggtccgtggcccggcagtgctcgcctaaaggtggagaacgaggagtagaggagccgcaggccagagcctgtgagcagggccttctcaccttctgaagaatggcttctgtttggcagagattgggtttttatgcctctcttctgaaaagacagctaaatggtgggccagatgtcatcaagtgggaaaggagagtaattcccggatgtaccagaagcatctacagtgccacgggaaagtggacaaaagagtatacattgcagacaagaaaggatgttgagaaatggtggcatcaacgaataaaagaacaggcctccaaaatttcagaagctgataaatcgaagccaaaattttacgtgctttccatgttcccttatccttctggtaagctgcacatgggccatgtgcgtgtctacaccatcagcgacaccatagcacggttccagaagatgagagggatgcaggtcatcaaccccatgggatgggatgcttttggattgcctgctgaaaatgccgcagtcgagaggaatctacatccacaaagttggacacaaagtaatattaaacacatgaggaaacagcttgatcgtctgggcctgtgtttcagctgggatagggaaataactacgtgtttgccagattactacaagtggactcagtatctctttattaaactgtatgaggctgggctggcctatcaaaaggaggccctggttaactgggacccagtggatcaaacagtgcttgccaatgagcaggtggatgaacatggctgttcatggcgttctggagcaaaggtggaacagaagtacctcagacaatggtttattaagacaaccgcttatgcaaaggccatgcaggacgcgttggcagaccttccagaatggtatggaataaaaggcatgcaagcccactggattggggactgtgtgggctgccacctggacttcacattaaaggttcatgggcaagccacgggcgaaaagctgactgcctatacggccacccctgaagccatttatggcacctcccacgtggccatctcgcccagccacagactcctacatgggcacagctctctgaaggaagccttgaggatggcccttgtccctggcaaagattgcctcacgcctgtaatggctgtgaacatgcttacccagcaggaggtccctgtcgttattttggccaaagctgacttggaaggctctctggattcaaaaataggaattcccagtactagctcagaggacaccatcttagcccaaaccctgggcctggcctactctgaagtcattgaaactttgccagatggcacagagagactgagcagctctgctgagttcacaggtatgacccggcaggatgcttttctagccctgactcagaaagcccgggggaagagagtgggtggagacgtgacaagtgataaactgaaagactggctgatttcacggcagcggtactggggcacaccaatccccattgtccactgcccagtctgtggccccacacctgtgcccctggaggacttgcctgtgaccctgcccaacatcgcgtctttcactggcaagggaggccccccactggccatggcttcagagtgggtgaactgctcctgcccaaggtgcaagggagcagccaagagagagacagacacgatggatacctttgttgattctgcttggtactacttcagatacactgaccctcataatccacacagcccttttaacacagcagtggccgattactggatgcctgtggatttgtacattggagggaaagaacatgccgtcatgcacttgttctatgcaagattctttagtcatttttgccatgatcaaaaaatggttaaacatagggagccttttcataagctgctggcccaaggccttatcaaggggcagacattccgcctaccatctggacagtatctacagagagaggaagtggatctcacaggttccgttcctgttcatgcaaaaacgaaagagaagttagaggtgacgtgggagaagatgagtaagtccaaacacaacggggtggacccagaggaagttgtggagcagtatgggatcgacacgattcggctctacatcctttttgctgcccctcctgagaaggatatcttgtgggatgtgaaaactgatgctctccctggggtgctgagatggcaacaacgactgtggaccttgacaactcggtttattgaggccagggcttctgggaagtctccccagcctcagctgctgagtaacaaggagaaagctgaggccaggaagctctgggagtacaagaactccgtcatctctcaggtgaccacccatttcacagaggacttctcactgaattctgcaatttctcagctgatgggactcagcaatgccctctcgcaagcctctcagagcgtcattctccacagccccgagtttgaggatgctttgtgtgccctgatggtaatggctgctccactggcccctcatgtaacctcagagatctgggcaggcctggcgctggtgccgaggaagctctgtgcccactacacttgggatgccagtgtgctgctccaggcatggcctgctgtggacccggagttcctgcagcagcctgaggttgtccagatggcagttctgatcaacaataaagcttgtggcaaaattcctgtgccccaacaagttgcccgggaccaggacaaagtccacgaatttgttcttcaaagcgagctgggtgtcaggcttttgcaaggacgaagcatcaagaagtccttcctttccccgagaactgccctcatcaacttcctggtgcaagattgacagccaggaggctgcagctaccacgagggcctctgaggaacctccttccaggcctgggatgagggggcgatgtctgctggcccaggggaagggaaaagacaaatgtcttgactgttgacctcggtcctgtggcagactgcagtcaacagtgtgcctctgtagtgtggcctggtgctggggtgaaggtgagctgggcaaaggagaaatatgagctactgaggagggggttggacatcctgcccctcaccccccacccacactgcaggtagaggaggccatctgatcccatgggaagccatcagagacactgctggtgggagcaggaaggagcagtgcccctcgagcagccaggaagcctgcggatctgggaaatggctctgccttaggcacttctcgggaatttgaggccagcctgaggaactgcaggactcaggtgcaatgtgccagccacttggaactgctaactgagcctccagatggtagtgaatggtctctttgccttcaggctggatgaggaagtcatttaggaaatgttcaaataaccaatatgtggaaatggacacagggatcttctgaagttgctttgaatcaaaaggcaggcagtgctggttcctctgcctgtgtccccaccactccccagctctgtcatgcaggcctgtcctccccaaccccagctggatgtgcctcccaggcctgctgtggttctgacacacaggatcccaggcaaggcaccacttcctcacatgaatgaggagcagcaagtcataaccactcccttgggtatacaatttgctgtgtagtgaagtggaaccaggctcaggctgctggtcccaacctcagagccccaccgcagcccagtagggatgcagcacgccccagagggctcatgtgggccccagatggcaatgccaccattgttgatgtgactccagagccagttattaggaagagcaagctcaccacagaggagtggaactgaggccccccagatgttgcctccggtgtccaagccacagcggtctggctgttgggaagatggccaggaatggactcataccattggcacattaggctaatcctggttttatgtgaagtcagcaattaagtgttcccactagaactgacctaagccactgattaatatttaatgagggaaggtaggggagaatctagccattttataatgccagaaatctatatatgttatctgatgccatttttctgaagtagcctcacatgtggtccccctgcagttcagcagttaacagatgacttttttagtgtaataaaatgtttatcatctatgacttcaggacatatgtgtgatcctggaatacaccatattccaatttcagagttaattacaaacagattgaggtattccatcatcatcggaagcattggctgtgtgtctgactccacatggaatgctataaagtgggatacatgtggttcttcttgttccagaacttacagtccatggtagacaacactgatacaggcaaactagcaacagcaattaagtcactggttctcagacttaatactctgcctggtcctcatgcccagatattccaatttaattggtccatggtgtggcttgaacaccaggaatctttaaaactccacaagtgattctaatgggcagcaaagtttgagaatcactggacacattgatgcacttgagccatcatttctatctagttcttcctcttcctaatcttcaggttagcggggataagtttggtccaggaccaagagttggaccaaaagggaagacaggggccagaagtctagagtgctagagccgacttgaatgtactcagtctcattgcacatggcagtgaatatggattaaatataagcccatgaaaatatttggtacaaggaa

SEQ ID NO: 148467 - DNA, 2800 bp, Homo sapiens
  Payload ID: 9404
  Gene Symbol: LARS2
  Gene Name: leucyl-tRNA synthetase 2, mitochondrial
  ENST ID: ENST00000414984
  CDS Start-End: 139-2721
atcgataaagttgctgttttgacaacatggcggcgcccatggtccgtggcccggcagtgctcgcctaaaggtggagaacgaggagtagaggagccgcaggccagagcctgtgagcagggccttctcaccttctgaagaatggcttctgtttggcagagattgggtttttatgcctctcttctgaaaagacagctaaatggtgggccagatgtcatcaagtgggaaaggagagtaattcccggatgtaccagaagcatctacagtgccacgggaaagtggacaaaagagtatacattgcagacaagaaaggatgttgagaaatggtggcatcaacgaataaaagaacaggcctccaaaatttcagaagctgatgtcatcaaccccatgggatgggatgcttttggattgcctgctgaaaatgccgcagtcgagaggaatctacatccacaaagttggacacaaagtaatattaaacacatgaggaaacagcttgatcgtctgggcctgtgtttcagctgggatagggaaataactacgtgtttgccagattactacaagtggactcagtatctctttattaaactgtatgaggctgggctggcctatcaaaaggaggccctggttaactgggacccagtggatcaaacagtgcttgccaatgagcaggtggatgaacatggctgttcatggcgttctggagcaaaggtggaacagaagtacctcagacaatggtttattaagacaaccgcttatgcaaaggccatgcaggacgcgttggcagaccttccagaatggtatggaataaaaggcatgcaagcccactggattggggactgtgtgggctgccacctggacttcacattaaaggttcatgggcaagccacgggcgaaaagctgactgcctatacggccacccctgaagccatttatggcacctcccacgtggccatctcgcccagccacagactcctacatgggcacagctctctgaaggaagccttgaggatggcccttgtccctggcaaagattgcctcacgcctgtaatggctgtgaacatgcttacccagcaggaggtccctgtcgttattttggccaaagctgacttggaaggctctctggattcaaaaataggaattcccagtactagctcagaggacaccatcttagcccaaaccctgggcctggcctactctgaagtcattgaaactttgccagatggcacagagagactgagcagctctgctgagttcacaggtatgacccggcaggatgcttttctagccctgactcagaaagcccgggggaagagagtgggtggagacgtgacaagtgataaactgaaagactggctgatttcacggcagcggtactggggcacaccaatccccattgtccactgcccagtctgtggccccacacctgtgcccctggaggacttgcctgtgaccctgcccaacatcgcgtctttcactggcaagggaggccccccactggccatggcttcagagtgggtgaactgctcctgcccaaggtgcaagggagcagccaagagagagacagacacgatggatacctttgttgattctgcttggtactacttcagatacactgaccctcataatccacacagcccttttaacacagcagtggccgattactggatgcctgtggatttgtacattggagggaaagaacatgccgtcatgcacttgttctatgcaagattctttagtcatttttgccatgatcaaaaaatggttaaacatagggagccttttcataagctgctggcccaaggccttatcaaggggcagacattccgcctaccatctggacagtatctacagagagaggaagtggatctcacaggttccgttcctgttcatgcaaaaacgaaagagaagttagaggtgacgtgggagaagatgagtaagtccaaacacaacggggtggacccagaggaagttgtggagcagtatgggatcgacacgattcggctctacatcctttttgctgcccctcctgagaaggatatcttgtgggatgtgaaaactgatgctctccctggggtgctgagatggcaacaacgactgtggaccttgacaactcggtttattgaggccagggcttctgggaagtctccccagcctcagctgctgagtaacaaggagaaagctgaggccaggaagctctgggagtacaagaactccgtcatctctcaggtgaccacccatttcacagaggacttctcactgaattctgcaatttctcagctgatgggactcagcaatgccctctcgcaagcctctcagagcgtcattctccacagccccgagtttgaggatgctttgtgtgccctgatggtaatggctgctccactggcccctcatgtaacctcagagatctgggcaggcctggcgctggtgccgaggaagctctgtgcccactacacttgggatgccagtgtgctgctccaggcatggcctgctgtggacccggagttcctgcagcagcctgaggttgtccagatggcagttctgatcaacaataaagcttgtggcaaaattcctgtgccccaacaagttgcccgggaccaggacaaagtccacgaatttgttcttcaaagcgagctgggtgtcaggcttttgcaaggacgaagcatcaagaagtccttcctttccccgagaactgccctcatcaacttcctggtgcaagattgacagccaggaggctgcagctaccacgagggcctctgaggaacctccttccaggcctgggatgagggggcgatgtctgctg

SEQ ID NO: 148468 - DNA, 3969 bp, Homo sapiens
  Payload ID: 9405
  Gene Symbol: LIF
  Gene Name: leukemia inhibitory factor
  Uniprot ID: P15018
  ENST ID: ENST00000249075
  CDS Start-End: 157-765
cttcctggactggggatcccggctaaatatagctgtttctgtcttacaacacaggctccagtatataaatcaggcaaattccccatttgagcatgaacctctgaaaactgccggcatctgaggtttcctccaaggccctctgaagtgcagcccataatgaaggtcttggcggcaggagttgtgcccctgctgttggttctgcactggaaacatggggcggggagccccctccccatcacccctgtcaacgccacctgtgccatacgccacccatgtcacaacaacctcatgaaccagatcaggagccaactggcacagctcaatggcagtgccaatgccctctttattctctattacacagcccagggggagccgttccccaacaacctggacaagctatgtggccccaacgtgacggacttcccgcccttccacgccaacggcacggagaaggccaagctggtggagctgtaccgcatagtcgtgtaccttggcacctccctgggcaacatcacccgggaccagaagatcctcaaccccagtgccctcagcctccacagcaagctcaacgccaccgccgacatcctgcgaggcctccttagcaacgtgctgtgccgcctgtgcagcaagtaccacgtgggccatgtggacgtgacctacggccctgacacctcgggtaaggatgtcttccagaagaagaagctgggctgtcaactcctggggaagtataagcagatcatcgccgtgttggcccaggccttctagcaggaggtcttgaagtgtgctgtgaaccgagggatctcaggagttgggtccagatgtgggggcctgtccaagggtggctggggcccagggcatcgctaaacccaaatgggggctgctggcagaccccgagggtgcctggccagtccactccactctgggctgggctgtgatgaagctgagcagagtggaaacttccatagggagggagctagaagaaggtgccccttcctctgggagattgtggactggggagcgtgggctggacttctgcctctacttgtccctttggccccttgctcactttgtgcagtgaacaaactacacaagtcatctacaagagccctgaccacagggtgagacagcagggcccaggggagtggaccagcccccagcaaattatcaccatctgtgcctttgctgccccttaggttgggacttaggtgggccagaggggctaggatcccaaaggactccttgtcccctagaagtttgatgagtggaagatagagaggggcctctgggatggaaggctgtcttcttttgaggatgatcagagaacttgggcataggaacaatctggcagaagtttccagaaggaggtcacttggcattcaggctcttggggaggcagagaagccaccttcaggcctgggaaggaagacactgggaggaggagaggcctggaaagctttggtaggttcttcgttctcttccccgtgatcttccctgcagcctgggatggccagggtctgatggctggacctgcagcaggggtttgtggaggtgggtagggcaggggcaggttgctaagtcaggtgcagaggttctgagggacccaggctcttcctctgggtaaaggtctgtaagaaggggctggggtagctcagagtagcagctcacatctgaggccctgggaggccttgtgaggtcacacagaggtacttgagggggactggaggccgtctctggtccccagggcaagggaacagcagaacttagggtcagggtctcagggaaccctgagctccaagcgtgctgtgcgtctgacctggcatgatttctatttattatgatatcctatttatattaacttattggtgctttcagtggccaagttaattcccctttccctggtccctactcaacaaaatatgatgatggctcccgacacaagcgccagggccagggcttagcagggcctggtctggaagtcgacaatgttacaagtggaataagccttacgggtgaagctcagagaagggtcggatctgagagaatggggaggcctgagtgggagtggggggccttgctccacccccccccatcccctactgtgacttgctttagggtgtcagggtccaggctgcaggggctgggccaatttgtggagaggccgggtgcctttctgtcttgattccagggggctggttcacactgttcttgggcgccccagcattgtgttgtgaggcgcactgttcctggcagatattgtgccccctggagcagtgggcaagacagtccttgtggcccaccctgtccttgtttctgtgtccccatgctgcctctgaaatagcgccctggaacaaccctgcccctgcacccagcatgctccgacacagcagggaagctcctcctgtggcccggacacccatagacggtgcggggggcctggctgggccagaccccaggaaggtggggtagactggggggatcagctgcccattgctcccaagaggaggagagggaggctgcagatgcctgggactcagaccaggaagctgtgggccctcctgctccacccccatcccactcccacccatgtctgggctcccaggcagggaacccgatctcttcctttgtgctggggccaggcgagtggagaaacgccctccagtctgagagcaggggagggaaggaggcagcagagttggggcagctgctcagagcagtgttctggcttcttctcaaaccctgagcgggctgccggcctccaagttcctccgacaagatgatggtactaattatggtacttttcactcactttgcacctttccctgtcgctctctaagcactttacctggatggcgcgtgggcagtgtgcaggcaggtcctgaggcctggggttggggtggagggtgcggcccggagttgtccatctgtccatcccaacagcaagacgaggatgtggctgttgagatgtgggccacactcacccttgtccaggatgcagggactgccttctccttcctgcttcatccggcttagcttggggctggctgcattcccccaggatgggcttcgagaaagacaaacttgtctggaaaccagagttgctgattccacccggggggcccggctgactcgcccatcacctcatctccctgtggacttgggagctctgtgccaggcccaccttgcggccctggctctgagtcgctctcccacccagcctggacttggccccatgggacccatcctcagtgctccctccagatcccgtccggcagcttggcgtccaccctgcacagcatcactgaatcacagagcctttgcgtgaaacagctctgccaggccgggagctgggtttctcttccctttttatctgctggtgtggaccacacctgggcctggccggaggaagagagagtttaccaagagagatgtctccgggcccttatttattatttaaacatttttttaaaaagcactgctagtttacttgtctctcctccccatcgtccccatcgtcctccttgtccctgacttggggcacttccaccctgacccagccagtccagctctgccttgccggctctccagagtagacatagtgtgtggggttggagctctggcacccggggaggtagcatttccctgcagatggtacagatgttcctgccttagagtcatctctagttccccacctcaatcccggcatccagccttcagtcccgcccacgtgctagctccgtgggcccaccgtgcggccttagaggtttccctccttcctttccactgaaaagcacatggccttgggtgacaaattcctctttgatgaatgtaccctgtggggatgtttcatactgacagattatttttatttattcaatgtcatatttaaaatatttattttttataccaaatgaatacttttttttttaagaaaaaaaagagaaatgaataaagaatctactcttggctggc

SEQ ID NO: 148469 - DNA, 592 bp, Homo sapiens
  Payload ID: 9405
  Gene Symbol: LIF
  Gene Name: leukemia inhibitory factor
  Uniprot ID: P15018
  ENST ID: ENST00000403987
  CDS Start-End: 45-311
ggcatctgaggtttcctccaaggccctctgaagtgcagcccataatgaaggtcttggcggcagtacacagcccagggggagccgttccccaacaacctggacaagctatgtggccccaacgtgacggacttcccgcccttccacgccaacggcacggagaaggccaagctggtggagctgtaccgcatagtcgtgtaccttggcacctccctgggcaacatcacccgggaccagaagatcctcaaccccagtgccctcagcctccacagcaagctcaacgccaccgccgacatcctgcgaggcctccttagcaacgtgctgtgccgcctgtgcagcaagtaccacgtgggccatgtggacgtgacctacggccctgacacctcgggtaaggatgtcttccagaagaagaagctgggctgtcaactcctggggaagtataagcagatcatcgccgtgttggcccaggccttctagcaggaggtcttgaagtgtgctgtgaaccgagggatctcaggagttgggtccagatgtgggggcctgtccaagggtggctggggcccagggcatcgctaaacccaaatgggggctgctg

SEQ ID NO: 148470 - DNA, 10089 bp, Homo sapiens
  Payload ID: 9406
  Gene Symbol: LIFR
  Gene Name: leukemia inhibitory factor receptor alpha
  Uniprot ID: P42702
  ENST ID: ENST00000263409
  CDS Start-End: 164-3457
aatcctaaccctctctcccagaacgtgtctctgctgcaaggcaccgggccctttcgctctgcagaactgcacttgcaagaccattatcaactcctaatcccagctcagaaagggagcctctgcgactcattcatcgccctccaggactgactgcattgcacagatgatggatatttacgtatgtttgaaacgaccatcctggatggtggacaataaaagaatgaggactgcttcaaatttccagtggctgttatcaacatttattcttctatatctaatgaatcaagtaaatagccagaaaaagggggctcctcatgatttgaagtgtgtaactaacaatttgcaagtgtggaactgttcttggaaagcaccctctggaacaggccgtggtactgattatgaagtttgcattgaaaacaggtcccgttcttgttatcagttggagaaaaccagtattaaaattccagctctttcacatggtgattatgaaataacaataaattctctacatgattttggaagttctacaagtaaattcacactaaatgaacaaaacgtttccttaattccagatactccagagatcttgaatttgtctgctgatttctcaacctctacattatacctaaagtggaacgacaggggttcagtttttccacaccgctcaaatgttatctgggaaattaaagttctacgtaaagagagtatggagctcgtaaaattagtgacccacaacacaactctgaatggcaaagatacacttcatcactggagttgggcctcagatatgcccttggaatgtgccattcattttgtggaaattagatgctacattgacaatcttcatttttctggtctcgaagagtggagtgactggagccctgtgaagaacatttcttggatacctgattctcagactaaggtttttcctcaagataaagtgatacttgtaggctcagacataacattttgttgtgtgagtcaagaaaaagtgttatcagcactgattggccatacaaactgccccttgatccatcttgatggggaaaatgttgcaatcaagattcgtaatatttctgtttctgcaagtagtggaacaaatgtagtttttacaaccgaagataacatatttggaaccgttatttttgctggatatccaccagatactcctcaacaactgaattgtgagacacatgatttaaaagaaattatatgtagttggaatccaggaagggtgacagcgttggtgggcccacgtgctacaagctacactttagttgaaagtttttcaggaaaatatgttagacttaaaagagctgaagcacctacaaacgaaagctatcaattattatttcaaatgcttccaaatcaagaaatatataattttactttgaatgctcacaatccgctgggtcgatcacaatcaacaattttagttaatataactgaaaaagtttatccccatactcctacttcattcaaagtgaaggatattaattcaacagctgttaaactttcttggcatttaccaggcaactttgcaaagattaattttttatgtgaaattgaaattaagaaatctaattcagtacaagagcagcggaatgtcacaatcaaaggagtagaaaattcaagttatcttgttgctctggacaagttaaatccatacactctatatacttttcggattcgttgttctactgaaactttctggaaatggagcaaatggagcaataaaaaacaacatttaacaacagaagccagtccttcaaaggggcctgatacttggagagagtggagttctgatggaaaaaatttaataatctattggaagcctttacccattaatgaagctaatggaaaaatactttcctacaatgtatcgtgttcatcagatgaggaaacacagtccctttctgaaatccctgatcctcagcacaaagcagagatacgacttgataagaatgactacatcatcagcgtagtggctaaaaattctgtgggctcatcaccaccttccaaaatagcgagtatggaaattccaaatgatgatctcaaaatagaacaagttgttgggatgggaaaggggattctcctcacctggcattacgaccccaacatgacttgcgactacgtcattaagtggtgtaactcgtctcggtcggaaccatgccttatggactggagaaaagttccctcaaacagcactgaaactgtaatagaatctgatgagtttcgaccaggtataagatataattttttcctgtatggatgcagaaatcaaggatatcaattattacgctccatgattggatatatagaagaattggctcccattgttgcaccaaattttactgttgaggatacttctgcagattcgatattagtaaaatgggaagacattcctgtggaagaacttagaggctttttaagaggatatttgttttactttggaaaaggagaaagagacacatctaagatgagggttttagaatcaggtcgttctgacataaaagttaagaatattactgacatatcccagaagacactgagaattgctgatcttcaaggtaaaacaagttaccacctggtcttgcgagcctatacagatggtggagtgggcccggagaagagtatgtatgtggtgacaaaggaaaattctgtgggattaattattgccattctcatcccagtggcagtggctgtcattgttggagtggtgacaagtatcctttgctatcggaaacgagaatggattaaagaaaccttctaccctgatattccaaatccagaaaactgtaaagcattacagtttcaaaagagtgtctgtgagggaagcagtgctcttaaaacattggaaatgaatccttgtaccccaaataatgttgaggttctggaaactcgatcagcatttcctaaaatagaagatacagaaataatttccccagtagctgagcgtcctgaagatcgctctgatgcagagcctgaaaaccatgtggttgtgtcctattgtccacccatcattgaggaagaaataccaaacccagccgcagatgaagctggagggactgcacaggttatttacattgatgttcagtcgatgtatcagcctcaagcaaaaccagaagaagaacaagaaaatgaccctgtaggaggggcaggctataagccacagatgcacctccccattaattctactgtggaagatatagctgcagaagaggacttagataaaactgcgggttacagacctcaggccaatgtaaatacatggaatttagtgtctccagactctcctagatccatagacagcaacagtgagattgtctcatttggaagtccatgctccattaattcccgacaatttttgattcctcctaaagatgaagactctcctaaatctaatggaggagggtggtcctttacaaacttttttcagaacaaaccaaacgattaacagtgtcaccgtgtcacttcagtcagccatctcaataagctcttactgctagtgttgctacatcagcactgggcattcttggagggatcctgtgaagtattgttaggaggtgaacttcactacatgttaagttacactgaaagtgttcatgtgcttttaatgtagtctaaaagccaaagtatagtgactcagaatcctcaatccacaaaactcaagattgggagctctttgtgatcaagccaaagaattctcatgtactctaccttcaagaagcatttcaaggctaatacctacttgtacgtacatgtaaaacaaatcccgccgcaactgttttctgttctgttgtttgtggttttctcatgtgtatacttggtggaattgtaagtggatttgcaggccagggagaaaatgtccaagtaacaggtgaagtttatttgcctgacgtttactcctttctagatgaaaaccaagcacagattttaaaacttctaagattattctcctctatccacagcattcacaaaaattaatataatttttaatgtagtgacagcgatttagtgttttgtttgataaagtatgcttatttctgtgcctactgtataatggttatcaaacagttgtctcaggggtacaaactttgaaaacaagtgtgacactgaccagcccaaatcataatcatgttttcttgctgtgataggttttgcaagccttttcattattttttagcttttatgcttgcttccattatttcagttggttgccctaatatttaaaatttacacttctaagactagagacccacattttttaaaaatcattttattttgtgatacagtgacagctttatatgagcaaattcaatattattcataagcatgtaattccagtgacttactatgtgagatgactactaagcaatatctagcagcgttagctgtccatatagttctgattggatttcgttcctcctgaggagaccatgccgttgagcttggctacccaggcagtggtgatctttgacaccttctggtggatgttcctcccactcatgagtcttttcatcatgccacattatctgatccagtcctcacatttttaaatataaaactaaagagagaatgcttcttacaggaacagttacccaagggctgtttcttagtaactgtcataaactgatctgaatccatgggcatacctgtgttgcaggtgcagcaattgcttggtgagctgtgcagaattgattgccttcagcacagcatcctctgcccacccttgtttctcataagcgatgtctggagtgattgtggttcttggaaaagcagaaggaaaaactaaaaagtgtatcttgtattttccctgccctcaggttgcctatgtattttaccttttcatatttaaggcaaaagtacttgaaaattttaagtgtccgaataagatatgtcttttttgtttgttttttttggttgtttgtttgttttttatcatctgagattctgtaatgtatttgcaaataatggatcaattaattttttttgaagctcatattgtatctttttaaaaaccatgttgtggaaaaaagccagagtgacaagtgacaaaatctatttaggttctctgtgtatgaatcctgattttaactgctaggattcagctaaatttctgagctttatgatctgtggaaatttggaatgaaatgcaattcattttgtacatacatagtatattaaaactatataatagttcatagaaatgttcagtaatgaaaaatatatccaatcagagccatccctaaagagtgttctcttgtcttcctttgtatcctctttggctccttcccttagcttccaccccagacatcagacctggggctgccttctctccctgccaaagcttgctgttagcattgtctgcttgccctcaactcctgccttgttccctgttgaaatgtatcaatcccgtactttatctctccaggacaaggataagtgtggctacagtaaaagtttattgctctaaacggcgctaacctgagataatgagaaaaggccagaagagattgtttgatctctgtctgtcaatatatatgcatttcaactgtgaccatctggatccagggccctttctaacctatataacgactcatttgtttggttaatgatgaatatcactggggctcttaagtcctttcgttctatccaagacttcattgtttttttctgtatgaaaaaagtgcagaatatcactcacctttcccctacttttggatcccctacacgaggatcactagcttaatgagaagcagagtaacgctattaagtctgggcaagctccttataagttgctgtgtgcttaaaagaatgtgatttatgtctggggccaaagcagttttccttcttttccctcattgaattcaagacagctagacccttgtgtagatcccaggatattacctctactccccccaacctgtgtgtgtagggagagtaacaacacgggaagaggggagggaagttggaaggagattggtcacatgttcagttgtctgagatactggtaaatgtgcgctgtttgtcaatgaaggttgcatgcctgcatttacaaggtggtctcatactgattgtgctctgtccagttagattcgtggcttctcccttggaagctacaattaaggactagttagaagcagaggctagatgtgttctctccagcccttactaactgggaaaataattgagaaatccctcttttcctcagtgaaagcccagtcattggttagaaaaatctaattgtcaaactagcattatgttccatcatatctgtgggatagtaattcatgtaagacacatttttacctctcttacaagtcaattcacttacaagccagtttcaaatcaagcttcccttgcgaggaatggagatcattatggggcttattatgactacatttcttttatgagtgaccattttaaataattaatattttatttaatattaaattattaaagacttagctagacttttaacattagatgaaccttgtgaatcatatattgcatagattagcacatgtatgcaatctaggtcatcaatttgttgaatttatacagccctagatttgagattgtggccctgagtatctggatagttgagttgtgtgtttatgtgcttatatgatagaggtgctttgttcctgcagcttagaaacagaagcagccattcactgagaagcttaagagaggaagtatcaacctcattttccaaaccagcattactttcaccgctcgtggatctgaaagattacatttagaacatttagtactattacactctcagaaactgtggtaaaaagtcacattttcaaaacttcatgcatattgtattcttgttggaaataagtcctatagtttcttaattgtcttcatgccgtccatatttaacaaacattgcaagtcctttttatatttgggtaattatttgtaatttagtgaaggagactaggggatgttttcttccaaagggaatttaaaatcaattttatggtattttgaaagtaaaatactccttaacgtgtcaatatttttaaaatgttatctcgaagttttctattgctcaggtatataatctaataaaattttttgtttgctctaaggttatttttgctattctctattttgaattatgttaaaatttgtgtgcattttatgaaatgccttttttcttattttgaaagtgtaaaattgggcatctcagagtaaaatgtgggattattagctacaaagactaggcacatcgtgaaagctcagtaactaattttcttgactgagtcctatcccagagtgtcacagattcaacagaattttcctgaagggtgatacacaccaaaatctagcttgtgtggatctgagactattgactcaaagattcaaatctacttcggaagtgactccacggtttgagtgaaaactgaggaaggactcatgcctgtatatcactagatatcttatttctccataattttaagtgttcataatttcttcttctttgatgggtgtgcaactggggcatgtttgtaccagccagcatgtgttctgcccaacagtgtgtccgtgtgtgaggttaactgattcagaactcattctcttgataaactatttcttgaaagcatttattttaagtctttatttcctgctgaaatgaagtttcatgctgtcatgcccatcttatttattctagaagaaaattttcatagaagaaaatgatttatggccaaagttacagaacattcatcttttagacttagccttagaatatcattggaaattacttggcttgaatttggttcgtttttatctttatggattatgtaccagggctattaataatacttaaaccccttattttgctatggtggttagatttttttattccttttcaattagtgctattaattattacatggtcgtattcatgcttattacagatgaactatttttagtgccagtgtaaaggattaagaataacattcaattagttggctatttcaggctttattgtacatggtaatgtttcagggagtgtgatttggtctagaatatatccagatccttgtaattatgatattgggttatgacaggattctattatttttagctatgaatggtgcttatttttccctatattaggaatgttaatatttggattatcagagtccatgttataaacagaatttacctatgcaagacaaattctaactgtgcaacattttcatgagaattaaaagttgtgtgttaaggggaaaaccctctgaatgtttttatgtgtaagtgcctaaagaaccgtagaaacagtacatcaaaagctcttataaaagaaaaactgattgaacattagccagaaacaaaatatgatttacatttttttttttggttgctgggactgaataccctaaaaactaagagatgtgagtggggaaaatgtctaattgataagaaagttgatttatattatatttacatgcatcttctaagattgcctttacagtagccaatcagaactttaaaaaaaaaaaagctaacaacatagatcctatgtgttgcccttaagactaaaatactttgcacacgtgattgaatggctcacttaagttgttgaatttccttatacatttaaagtgtacttccgttaagaattattccattttaaatgggtaactttcagcttccgaactattttcctaaacattccagttgtgtattataaaagatcaaaatatctctaggtggtagtacaattttcatttataacgtggaaaagttaactgttaggtttaacattagtattagtgtttttgcaattgctcatagaaaagaacactgaataatggttttcatacaatttttgtaaaacattcttctcccagtttgattccaaatgcttttccccaaattgtctaatatatcataagctagtgtttccttgtatttaatttttccttccaacacaatatttaggaaaaatatgaataacattgtgagtagcgggagacaacacgaaaaagaaacctttcattgttgtggaggggtaggtgttatgtgattgatgcccttcctggcgtttgttttatcctgttattttctcaaaaaagagcacggctttttcttaaatacatttaaattcagaattgcttgcaaaagattggcctggatagatagacatcctagatttaagatagtaccatcttaaaagtatgttgaaaggtaaaataaatcatttcaaaatacttaactttcctaataaggatgttaggttttcttctctttcattagctggccataagtcaaggtccttataacactaggaaattacctttttttactttcaaaattgcattatagtgaattactgtttacaaaatacacatactgtgaacagatataagtttctgtcttttataaggtttgtagaatgaatgtttttttaaagtgagtattatatgttaaatattttaagttttttataaatactagtaactgtttactaatttttgtttggtcaaatgcttgtaaatgtagctgaaagaagatagggagaaactgcggatcccaaactgttccctttttcatttcttgaaatgttaccactacagacatttttttaaggtgaataaacagttgtgatgtgctgtacctaaaatcatgtttaatcgtataaggaaacatttcaatacacttatacaggaagaaaactatagatgaagtacatgtgtgtgattcagtctgattcacagaattctgagagtaatatggaataaaacaactccacttagatgataactgaagcatttcctgccttgtgaaaatttggattttaaattgctgttagaatgggaaatttggacactttatatcattgtataatttcagaatttagtttctgtatcttttggaaaacatgattatagcaaaaacatagaaaataatctattactaaaacaccataaatgtaaaactagtatgcttggctgttaactctaaagatgttacttatgtctgtttttaaaacatgcatgtatttaacaattttatcatagtattgtcatggaaaaaataaatatattttcttacatctta

SEQ ID NO: 148471 - DNA, 4253 bp, Homo sapiens
  Payload ID: 9406
  Gene Symbol: LIFR
  Gene Name: leukemia inhibitory factor receptor alpha
  Uniprot ID: P42702
  ENST ID: ENST00000453190
  CDS Start-End: 333-3626
agtcccggctggagcgactcggccgtggcggtggccgttaccgttgcctctgggaggctctggcggcggcggcggcccgcggggttcgcggagcgcagcgggccgcccttcgcccgtggccgcctcaagcagcctcgcgccgacacaggggaggcgagacggcggctgcggaggcggcggcgcattgtgcccggccccctccttggcggctcctgcccccgggcggctgtgggatctgggcagccccggggcggcggccgaggctacagagccggcggcaggggatggcaagatagcggcgcgggagcgtaccgactgactgcattgcacagatgatggatatttacgtatgtttgaaacgaccatcctggatggtggacaataaaagaatgaggactgcttcaaatttccagtggctgttatcaacatttattcttctatatctaatgaatcaagtaaatagccagaaaaagggggctcctcatgatttgaagtgtgtaactaacaatttgcaagtgtggaactgttcttggaaagcaccctctggaacaggccgtggtactgattatgaagtttgcattgaaaacaggtcccgttcttgttatcagttggagaaaaccagtattaaaattccagctctttcacatggtgattatgaaataacaataaattctctacatgattttggaagttctacaagtaaattcacactaaatgaacaaaacgtttccttaattccagatactccagagatcttgaatttgtctgctgatttctcaacctctacattatacctaaagtggaacgacaggggttcagtttttccacaccgctcaaatgttatctgggaaattaaagttctacgtaaagagagtatggagctcgtaaaattagtgacccacaacacaactctgaatggcaaagatacacttcatcactggagttgggcctcagatatgcccttggaatgtgccattcattttgtggaaattagatgctacattgacaatcttcatttttctggtctcgaagagtggagtgactggagccctgtgaagaacatttcttggatacctgattctcagactaaggtttttcctcaagataaagtgatacttgtaggctcagacataacattttgttgtgtgagtcaagaaaaagtgttatcagcactgattggccatacaaactgccccttgatccatcttgatggggaaaatgttgcaatcaagattcgtaatatttctgtttctgcaagtagtggaacaaatgtagtttttacaaccgaagataacatatttggaaccgttatttttgctggatatccaccagatactcctcaacaactgaattgtgagacacatgatttaaaagaaattatatgtagttggaatccaggaagggtgacagcgttggtgggcccacgtgctacaagctacactttagttgaaagtttttcaggaaaatatgttagacttaaaagagctgaagcacctacaaacgaaagctatcaattattatttcaaatgcttccaaatcaagaaatatataattttactttgaatgctcacaatccgctgggtcgatcacaatcaacaattttagttaatataactgaaaaagtttatccccatactcctacttcattcaaagtgaaggatattaattcaacagctgttaaactttcttggcatttaccaggcaactttgcaaagattaattttttatgtgaaattgaaattaagaaatctaattcagtacaagagcagcggaatgtcacaatcaaaggagtagaaaattcaagttatcttgttgctctggacaagttaaatccatacactctatatacttttcggattcgttgttctactgaaactttctggaaatggagcaaatggagcaataaaaaacaacatttaacaacagaagccagtccttcaaaggggcctgatacttggagagagtggagttctgatggaaaaaatttaataatctattggaagcctttacccattaatgaagctaatggaaaaatactttcctacaatgtatcgtgttcatcagatgaggaaacacagtccctttctgaaatccctgatcctcagcacaaagcagagatacgacttgataagaatgactacatcatcagcgtagtggctaaaaattctgtgggctcatcaccaccttccaaaatagcgagtatggaaattccaaatgatgatctcaaaatagaacaagttgttgggatgggaaaggggattctcctcacctggcattacgaccccaacatgacttgcgactacgtcattaagtggtgtaactcgtctcggtcggaaccatgccttatggactggagaaaagttccctcaaacagcactgaaactgtaatagaatctgatgagtttcgaccaggtataagatataattttttcctgtatggatgcagaaatcaaggatatcaattattacgctccatgattggatatatagaagaattggctcccattgttgcaccaaattttactgttgaggatacttctgcagattcgatattagtaaaatgggaagacattcctgtggaagaacttagaggctttttaagaggatatttgttttactttggaaaaggagaaagagacacatctaagatgagggttttagaatcaggtcgttctgacataaaagttaagaatattactgacatatcccagaagacactgagaattgctgatcttcaaggtaaaacaagttaccacctggtcttgcgagcctatacagatggtggagtgggcccggagaagagtatgtatgtggtgacaaaggaaaattctgtgggattaattattgccattctcatcccagtggcagtggctgtcattgttggagtggtgacaagtatcctttgctatcggaaacgagaatggattaaagaaaccttctaccctgatattccaaatccagaaaactgtaaagcattacagtttcaaaagagtgtctgtgagggaagcagtgctcttaaaacattggaaatgaatccttgtaccccaaataatgttgaggttctggaaactcgatcagcatttcctaaaatagaagatacagaaataatttccccagtagctgagcgtcctgaagatcgctctgatgcagagcctgaaaaccatgtggttgtgtcctattgtccacccatcattgaggaagaaataccaaacccagccgcagatgaagctggagggactgcacaggttatttacattgatgttcagtcgatgtatcagcctcaagcaaaaccagaagaagaacaagaaaatgaccctgtaggaggggcaggctataagccacagatgcacctccccattaattctactgtggaagatatagctgcagaagaggacttagataaaactgcgggttacagacctcaggccaatgtaaatacatggaatttagtgtctccagactctcctagatccatagacagcaacagtgagattgtctcatttggaagtccatgctccattaattcccgacaatttttgattcctcctaaagatgaagactctcctaaatctaatggaggagggtggtcctttacaaacttttttcagaacaaaccaaacgattaacagtgtcaccgtgtcacttcagtcagccatctcaataagctcttactgctagtgttgctacatcagcactgggcattcttggagggatcctgtgaagtattgttaggaggtgaacttcactacatgttaagttacactgaaagtgttcatgtgcttttaatgtagtctaaaagccaaagtatagtgactcagaatcctcaatccacaaaactcaagattgggagctctttgtgatcaagccaaagaattctcatgtactctaccttcaagaagcatttcaaggctaatacctacttgtacgtacatgtaaaacaaatcccgccgcaactgttttctgttctgttgtttgtggttttctcatgtgtatacttggtggaattgtaagtggatttgcaggccagggagaaaatgtccaagtaacaggtgaagtttatttgcctgacgtttactcctttctagatgaaaaccaagcacagattttaaaacttctaagattattctcctctatccacagcattcacaaaaattaatataatttttaatgtagtgacagcgatttagtgttttgtttgataaagtatgcttatttctgtgcctactgtataatggttatcaaacagttgtctc

SEQ ID NO: 148472 - DNA, 760 bp, Homo sapiens
  Payload ID: 9406
  Gene Symbol: LIFR
  Gene Name: leukemia inhibitory factor receptor alpha
  ENST ID: ENST00000506990
  CDS Start-End: 384-760
ggagcgactcggccgtggcggtggccgttaccgttgcctctgggaggctctggcggcggcggcggcccgcggggttcgcggagcgcagcgggccgcccttcgcccgtggccgcctcaagcagcctcgcgccgacacaggggaggcgagacggcggctgcggaggcggcggcgcattgtgcccggccccctccttggcggctcctgcccccgggcggctgtgggatctgggcagccccggggcggcggccgaggctacagagccggcggcaggggatggcaagatagcggcgcgggagcgtaccgtgatcggagcagctatttcctcttcaagaattgaattgagacttctttgctttgtaataggactgactgcattgcacagatgatggatatttacgtatgtttgaaacgaccatcctggatggtggacaataaaagaatgaggactgcttcaaatttccagtggctgttatcaacatttattcttctatatctaatgaatcaagtaaatagccagaaaaagggggctcctcatgatttgaagtgtgtaactaacaatttgcaagtgtggaactgttcttggaaagcaccctctggaacaggccgtggtactgattatgaagtttgcattgaaaacaggtcccgttcttgttatcagttggagaaaaccagtattaaaattccagctctttcacatggtgattatgaaataacaataaattctctacatgattttggaagttctacaagtaaattcac

SEQ ID NO: 148473 - DNA, 757 bp, Homo sapiens
  Payload ID: 9406
  Gene Symbol: LIFR
  Gene Name: leukemia inhibitory factor receptor alpha
  ENST ID: ENST00000506003
  CDS Start-End: 1-200
aatggagcaataaaaaacaacatttaacaacagaagccagtccttcaaaggggcctgatacttggagagagtggagttctgatggaaaaaatttaataatctattggaagatgaggaaacacagtccctttctgaaatccctgatcctcagcacaaagcagagatacgacttgataagaatgactacatcatcagcgtagtggctaaaaattctgtgggctcatcaccaccttccaaaatagcgagtatggaaattccaaatgatgatctcaaaatagaacaagttgttgggatgggaaaggggattctcctcacctggcattacgaccccaacatgacttgcgactacgtcattaagtggtgtaactcgtctcggtcggaaccatgccttatggactggagaaaagttccctcaaacagcactgaaactgtaatagaatctgatgagtttcgaccaggtataagatataattttttcctgtatggatgcagaaatcaaggatatcaattattacgctccatgattggatatatagaagaattggctcccattgttgcaccaaattttactgttgaggatacttctgcagattcgatattagtaaaatgggaagacattcctgtggaagaacttagaggctttttaagaggatatttgttttactttggaaaaggagaaagagacacatctaagatgagggttttagaatcaggtcgttctgacataaaagttaagaatattactgacatatcccag

SEQ ID NO: 148474 - DNA, 574 bp, Homo sapiens
  Payload ID: 9406
  Gene Symbol: LIFR
  Gene Name: leukemia inhibitory factor receptor alpha
  ENST ID: ENST00000511561
  CDS Start-End: 351-574
caaacgcgtccggcatacagcgtaaacatcttcagaccgtgattctgcgccatcaaacgctctccagctaatttcatttggtgattactctgctagaaaaccgaggccaagtgaaactgcggaaatgggaacaatgtacggaggaaaaatctcaccccattaagagatccgtttcttctccgcacaaataagcccaccccgcctccgaggcaagactagatggctccaggatactctcggcgcgcccgctggccatctcgggcaggggagccccacacccggcaggaggaccaggacgcgagcggcggcgcctcggccctgggctgtttaggactgactgcattgcacagatgatggatatttacgtatgtttgaaacgaccatcctggatggtggacaataaaagaatgaggactgcttcaaatttccagtggctgttatcaacatttattcttctatatctaatgaatcaagtaaatagccagaaaaagggggctcctcatgatttgaagtgtgtaactaacaatttgcaagtgtggaactgttcttggaaagcaccctctggaacaggccg

SEQ ID NO: 148475 - DNA, 2210 bp, Homo sapiens
  Payload ID: 9407
  Gene Symbol: LNP1
  Gene Name: leukemia NUP98 fusion partner 1
  Uniprot ID: A1A4G5
  ENST ID: ENST00000383693
  CDS Start-End: 1281-1817
ggttaagggaaagcgtgggtgtgagtaggagtcttcggaaaccctttttctttcttttcgccccgctgctgttcgggagatggacttctggagtccccgtcgtagctggtgttgtcccctctaccttcaggaaagaagggcagatggccctcttgcctactgaagccgaggaggggcgcgtatacagcgggctaagggcgctcaagagatccgagtggaagaaaaagcagcggcacagcactggaatgggcgggagtggcagaagagttgtgaaggctattggctagcaagggtggtgggcggggcgtagaccgagctacccagtttactggtcgatttcggatccagttttccagttatagccacgttggcacctcttgaacctctgtggccgttagcacggttttctgcccgcgtgcccgagaaaccaacggattagaaggacttttaaagatgtgtgaggaaagagctcaccgctgaagaaggctgctgcatcactgaacttcttatcactaacatagcgagattttagtttggacgaatttgaggttataggggagatagcgatggcagaagactaggtggaaatggcacatctaggttggctgcagtcgaaacggtttgagcgtggtcgctgtggctcatcgtcggcaccaattaacgaagcgatgacatctgcgttgttaggggtttcttaaactgagttggtagaaatgcgaagcgtcagggttcccgccggcttcgagcctttcttggcgtatttgtatcttgagctgatttctgcgtcagcccacatctcgctctgatccgcacgccccccgggttgttttgcagtagcagtctcagccctcttctcgtctcattcccaaatcgtaatttcagttcacagctttttatctataatagctttatcaactctttttccgatgctctgcaccagatctcttaaaatataaaattaccttgcaaggtattgtttggaatacacggtattttcatgaagacaactattaatagaaaaatcagagtccagaactatggttctccatttctggtatactggtttgcagaagccttacattaagatttcataaatgattgttttgctgttaagtgcaacaacatcacagtagagctacataaagattgaaaggagatattttatcaagtggcaccagaatggactgattaaaatagaatggcctaattggaaagaatttcaggatcaccggtttctcctgcttcatggacaggccttcagtatttggcatcacctttacatggagcacaaagatgatgatgatgatgatgtgtcttttgccaaatggatgagcagcttctggggccacagctggagagaggaggatcagagaggactccgggaacgccaccgactgcaagccaccagtcacaggaaaacctccctgccctgcccacttcctgtgcttcccagaattccatcatctgactgccatcctagaaggcattctcatgaggaccaagaatttcgatgccgtagccacgtacgggattacagaaaatactcagaggatgggtcattcaaggagccactggaatcaaaaggaagatcccattccaaaattgagaaattttcagagtcctttgaacggcaactgtgctttagaaccaagcgttctgcctctttgggacctgaaagcagaaaggagagaaatgaaagagaatgcctgaggatggagataaaatcccgaaagaaagtagaggaagaaaggagctctaggaaagaagagcatggagaagcacacatggctcccctgtttgaaaaagggcctgaataatactctgcttctgcctcatgacatcagatgctactgttttggtttttttctttgagccccaattcaccatttcaggatgtggatgggggcggggttgggggtaaaaacagctataaaaagcaactgcagatgctgactgactgcagtgggcagggtatgtagctgctccaagatgacttgcatcataccccaattactgctggcatcttagttgagagtataatctgcttggttgcctttttatgggaataaagagaataaaaggtattttaatagaataaagaaaaatttgaaaatataatggaaggtatttaaagagccacccacatagcttcaccaacccttctcacacatcaactcataaatcatcttaaataaaagtcattggtatga

SEQ ID NO: 148476 - DNA, 1813 bp, Homo sapiens
  Payload ID: 9407
  Gene Symbol: LNP1
  Gene Name: leukemia NUP98 fusion partner 1
  ENST ID: ENST00000489752
  CDS Start-End: 863-1438
cccgagaaaccaacggattagaaggacttttaaagatgtgtgaggaaagagctcaccgctgaagaaggctgctgcatcactgaacttcttatcactaacatagcgagattttagtttggacgaatttgaggttataggggagatagcgatggcagaagactaggtggaaatggcacatctaggttggctgcagtcgaaacggtttgagcgtggtcgctgtggctcatcgtcggcaccaattaacgaagcgatgacatctgcgttgttaggggtttcttaaactgagttggtagaaatgcgaagcgtcagggttcccgccggcttcgagcctttcttggcgtatttgtatcttgagctgatttctgcgtcagcccacatctcgctctgatccgcacgccccccgggttgttttgcagtagcagtctcagccctcttctcgtctcattcccaaatcgtaatttcagttcacagctttttatctataatagctttatcaactctttttccgatgctctgcaccagatctcttaaaatataaaattaccttgcaaggtattgtttggaatacacggtattttcatgaagacaactattaatagaaaaatcagagtccagaactatggttctccatttctggtatactggtttgcagaagccttacattaagatttcataaatgattgttttgctgttaagtgcaacaacatcacagtagagctacataaagattgaaaggagatattttatcaagtggcaccagaatggactgattaaaatagaatggcctaattggaaagaatttcaggatcaccggtttctcctgcttcatggacaggccttcagtatttggcatcacctttacatggagcacaaagatgatgatgatgatgatgtgtcttttgccaaatggatgagcagcttctggggccacagctggagagaggaggatcagagaggactccgggaacgccaccgactgcaagccaccagtcacaggaaaacctccctgccctgcccatccttttatactgtaaattttttcattctgtattctcagcttcctgtgcttcccagaattccatcatctgactgccatcctagaaggcattctcatgaggaccaagaatttcgatgccgtagccacgtacgggattacagaaaatactcagaggatgggtcattcaaggagccactggaatcaaaaggaagatcccattccaaaattgagaaattttcagagtcctttgaacggcaactgtgctttagaaccaagcgttctgcctctttgggacctgaaagcagaaaggagagaaatgaaagagaatgcctgaggatggagataaaatcccgaaagaaagtagaggaagaaaggagctctaggaaagaagagcatggagaagcacacatggctcccctgtttgaaaaagggcctgaataatactctgcttctgcctcatgacatcagatgctactgttttggtttttttctttgagccccaattcaccatttcaggatgtggatgggggcggggttgggggtaaaaacagctataaaaagcaactgcagatgctgactgactgcagtgggcagggtatgtagctgctccaagatgacttgcatcataccccaattactgctggcatcttagttgagagtataatctgcttggttgcctttttatgggaataaagagaataaaaggtattttaatagaataaagaaaaatttgaaaatataatggaaggtatttaaagagccacccacatagcttcaccaacccttctcacacatcaactcataaatcatcttaaa

SEQ ID NO: 148477 - DNA, 1723 bp, Homo sapiens
  Payload ID: 9407
  Gene Symbol: LNP1
  Gene Name: leukemia NUP98 fusion partner 1
  ENST ID: ENST00000466996
  CDS Start-End: 942-1112
cggatccagttttccagttatagccacgttggcacctcttgaacctctgtggccgttagcacggttttctgcccgcgtgcccgagaaaccaacggattagaaggacttttaaagatgtgtgaggaaagagctcaccgctgaagaaggctgctgcatcactgaacttcttatcactaacatagcgagattttagtttggacgaatttgaggttataggggagatagcgatggcagaagactaggtggaaatggcacatctaggttggctgcagtcgaaacggtttgagcgtggtcgctgtggctcatcgtcggcaccaattaacgaagcgatgacatctgcgttgttaggggtttcttaaactgagttggtagaaatgcgaagcgtcagggttcccgccggcttcgagcctttcttggcgtatttgtatcttgagctgatttctgcgtcagcccacatctcgctctgatccgcacgccccccgggttgttttgcagtagcagtctcagccctcttctcgtctcattcccaaatcgtaatttcagttcacagctttttatctataatagctttatcaactctttttccgatgctctgcaccagatctcttaaaatataaaattaccttgcaaggtattgtttggaatacacggtattttcatgaagacaactattaatagaaaaatcagagtccagaactatggttctccatttctggtatactggtttgcagaagccttacattaagatttcataaatgattgttttgctgttaagtgcaacaacatcacagtagagctacataaagattgaaaggagatattttatcaagtggcaccagaatggactgattaaaatagaatggcctaattggaaagaatttcaggatcaccggtttctcctgcttcatggacaggccttcagtatttggcatcacctttacatggagcacaaagatgatgatgatgatgatgtgtcttttgccaaatggatgagcagcttctggggccacagctggagagaggaggatcagagaggactccgggaacgccaccgactgcaagccaccagtcacaggaaaacctccctgccctgcccaaattccatcatctgactgccatcctagaaggcattctcatgaggaccaagaatttcgatgccgtagccacgtacgggattacagaaaatactcagaggatgggtcattcaaggagccactggaatcaaaaggaagatcccattccaaaattgagaaattttcagagtcctttgaacggcaactgtgctttagaaccaagcgttctgcctctttgggacctgaaagcagaaaggagagaaatgaaagagaatgcctgaggatggagataaaatcccgaaagaaagtagaggaagaaaggagctctaggaaagaagagcatggagaagcacacatggctcccctgtttgaaaaagggcctgaataatactctgcttctgcctcatgacatcagatgctactgttttggtttttttctttgagccccaattcaccatttcaggatgtggatgggggcggggttgggggtaaaaacagctataaaaagcaactgcagatgctgactgactgcagtgggcagggtatgtagctgctccaagatgacttgcatcataccccaattactgctggcatcttagttgagagtataatctgcttggttgcctttttatgggaataaagagaataaa

SEQ ID NO: 148478 - DNA, 1410 bp, Homo sapiens
  Payload ID: 9408
  Gene Symbol: LECT1
  Gene Name: leukocyte cell derived chemotaxin 1
  Uniprot ID: O75829
  ENST ID: ENST00000377962
  CDS Start-End: 80-1084
gccctgcacgtcggggcagcgggacagatcccagggtgcccagggagtctccaagtgcctcactcctcccgccgcaaacatgacagagaactccgacaaagttcccattgccctggtgggacctgatgacgtggaattctgcagccccccggcgtacgctacgctgacggtgaagccctccagccccgcgcggctgctcaaggtgggagccgtggtcctcatttcgggagctgtgctgctgctctttggggccatcggggccttctacttctggaaggggagcgacagtcacatttacaatgtccattacaccatgagtatcaatgggaaattacaagatgggtcaatggaaatagacgctgggaacaacttggagacctttaaaatgggaagtggagctgaagaagcaattgcagttaatgatttccagaatggcatcacaggaattcgttttgctggaggagagaagtgctacattaaagcgcaagtgaaggctcgtattcctgaggtgggcgccgtgaccaaacagagcatctcctccaaactggaaggcaagatcatgccagtcaaatatgaagaaaattctcttatctgggtggctgtagatcagcctgtgaaggacaacagcttcttgagttctaaggtgttagaactctgcggtgaccttcctattttctggcttaaaccaacctatccaaaagaaatccagagggaaagaagagaagtggtaagaaaaattgttccaactaccacaaaaagaccacacagtggaccacggagcaacccaggcgctggaagactgaataatgaaaccagacccagtgttcaagaggactcacaagccttcaatcctgataatccttatcatcagcaggaaggggaaagcatgacattcgaccctagactggatcacgaaggaatctgttgtatagaatgtaggcggagctacacccactgccagaagatctgtgaacccctggggggctattacccatggccttataattatcaaggctgccgttcggcctgcagagtcatcatgccatgtagctggtgggtggcccgtatcttgggcatggtgtgaaatcacttcatatatcatgtgctgtaaaataagaactagctgaagagacaaccaaagaagcattaaggcaggttgatgctgataggaccacaaaatatttttacactcaacctgagcggttattcttgacactcttaacagaattttttcaattgttttccagaactttagtatatgcaaatgtactgaaagggtagttcaagtctaaaatgccataacccctttattatttgttattttttatttgcattgctttgccataagtcttcccttgcttgtatcttccaaagctattttgaaataaacatgaaaatttacagtttgcc

SEQ ID NO: 148479 - DNA, 1444 bp, Homo sapiens
  Payload ID: 9408
  Gene Symbol: LECT1
  Gene Name: leukocyte cell derived chemotaxin 1
  Uniprot ID: O75829
  ENST ID: ENST00000448904
  CDS Start-End: 112-1113
ccgtgcaccgtgtgtgcgcgcggcgttgaaatgccctgcacgtcggggcagcgggacagatcccagggtgcccagggagtctccaagtgcctcactcctcccgccgcaaacatgacagagaactccgacaaagttcccattgccctggtgggacctgatgacgtggaattctgcagccccccggcgtacgctacgctgacggtgaagccctccagccccgcgcggctgctcaaggtgggagccgtggtcctcatttcgggagctgtgctgctgctctttggggccatcggggccttctacttctggaaggggagcgacagtcacatttacaatgtccattacaccatgagtatcaatgggaaattacaagatgggtcaatggaaatagacgctgggaacaacttggagacctttaaaatgggaagtggagctgaagaagcaattgcagttaatgatttccagaatggcatcacaggaattcgttttgctggaggagagaagtgctacattaaagcgcaagtgaaggctcgtattcctgaggtgggcgccgtgaccaaacagagcatctcctccaaactggaaggcaagatcatgccagtcaaatatgaagaaaattctcttatctgggtggctgtagatcagcctgtgaaggacaacagcttcttgagttctaaggtgttagaactctgcggtgaccttcctattttctggcttaaaccaacctatccaaaagaaatccagagggaaagaagagaagtggtaagaaaaattgttccaactaccacaaaaagaccacacagtggaccacggagcaacccaggcgctggaagactgaataatgaaaccagacccagtgttcaagaggactcacaagccttcaatcctgataatccttatcatcaggaaggggaaagcatgacattcgaccctagactggatcacgaaggaatctgttgtatagaatgtaggcggagctacacccactgccagaagatctgtgaacccctggggggctattacccatggccttataattatcaaggctgccgttcggcctgcagagtcatcatgccatgtagctggtgggtggcccgtatcttgggcatggtgtgaaatcacttcatatatcatgtgctgtaaaataagaactagctgaagagacaaccaaagaagcattaaggcaggttgatgctgataggaccacaaaatatttttacactcaacctgagcggttattcttgacactcttaacagaattttttcaattgttttccagaactttagtatatgcaaatgtactgaaagggtagttcaagtctaaaatgccataacccctttattatttgttattttttatttgcattgctttgccataagtcttcccttgcttgtatcttccaaagctattttgaaataaacatgaaaatttacagtttgccaaaaa

SEQ ID NO: 148480 - DNA, 731 bp, Homo sapiens
  Payload ID: 9408
  Gene Symbol: LECT1
  Gene Name: leukocyte cell derived chemotaxin 1
  ENST ID: ENST00000431550
  CDS Start-End: 344-731
ccgactgcaaaggaccctcgggagggagcgcggcgaaaggggcacccgtaggagcccgggcgagctgtttcccgcccgactccccactccctgggggctaccgcgtggggcccgggtgcgctgggggccgcaggtgctggcggcacaaacgcgacggtccctctcccgccccggcccgcaggcgtacgctacgctgacggtgaagccctccagccccgcgcggctgctcaaggtgggagccgtggtcctcatttcgggagctgtgctgctgctctttggggccatcggggccttctacttctggaaggggagcgacagtcacatttacaatgtccattacaccatgagtatcaatgggaaattacaagatgggtcaatggaaatagacgctgggaacaacttggagacctttaaaatgggaagtggagctgaagaagcaattgcagttaatgatttccagaatggcatcacaggaattcgttttgctggaggagagaagtgctacattaaagcgcaagtgaaggctcgtattcctgaggtgggcgccgtgaccaaacagagcatctcctccaaactggaaggcaagatcatgccagtcaaatatgaagaaaattctcttatctgggtggctgtagatcagcctgtgaaggacaacagcttcttgagttctaaggtgttagaactctgcggtgaccttcctattttctggcttaaaccaacctatccaaaag

SEQ ID NO: 148481 - DNA, 1077 bp, Homo sapiens
  Payload ID: 9409
  Gene Symbol: LECT2
  Gene Name: leukocyte cell-derived chemotaxin 2
  Uniprot ID: O14960
  ENST ID: ENST00000274507
  CDS Start-End: 202-657
aaatcaaatagctatccatggaatattagaacttgacttgctccatcctcttaaactttttgtgtctcacactaaagaaatgagagatgcagaattctaaggctaaatagctaggaagtattcattcaaacttgaatattcttcaaagagagtgtgggggcaactctaatcagaggaagaaactaaaggaagtaaaaccagatgttttccaccaaagccctccttttggctggtctgatttctaccgcactggcagggccatgggctaatatatgtgctggcaagtcttccaatgagatccggacgtgtgaccgccatggctgtggacagtactctgctcaaagaagtcagaggcctcaccagggtgtggacatcttgtgctctgctggatctactgtgtacgcaccattcactggaatgattgtgggccaggagaaaccttatcaaaacaagaatgctatcaataatggtgttcgaatatctggaagaggtttttgtgtcaaaatgttctacattaagccaattaagtataaaggtcctattaagaagggagaaaaacttggaactctattgcccttgcagaaagtttatcctggcatacaatcgcatgtgcacattgaaaactgtgactcgagtgaccctactgcatacctgtaaatcgaaggccaatggtcagatcttcaaaataaaaagtcatcttaaaaacctggatgcatacccttctcttcaagaaatttgtgttcacaaaggaaaaatgcatgaagggatggataccccattttccatgacatgattattacacattgcatgcctgtatcaaaacatctcacgtacctcataaacaaatacacctatgtacccacaaaaattttttaattaaaaaaaggaaatttgagtttaaatagaaacatgataaatgcaagaaagaaaacattttgattttaactcattgtcactctgatgttcatgtgaactggttgcttcgggctctttgatctgtcacctatggaatctgagtggttttattttttagatttctcagtcccgaagatctaagataaataaacaagagaactt

SEQ ID NO: 148482 - DNA, 789 bp, Homo sapiens
  Payload ID: 9409
  Gene Symbol: LECT2
  Gene Name: leukocyte cell-derived chemotaxin 2
  ENST ID: ENST00000514447
  CDS Start-End: 150-485
aaactttttgtgtctcacactaaagaaatgagagatgcagaattctaaggctaaatagctaggaagtattcattcaaacttgaatattcttcaaagagagtgtgggggcaactctaatcagaggaagaaactaaaggaagtaaaaccagatgttttccaccaaagccctccttttggctggtctgatttctaccgcactggcagggccatgggctaatatatgtgctggcaagtcttccaatgagatccggacgtgtgaccgccatggctgtggacagtactctgctcaaagaagtcagaggcctcaccagggtgtggacatcttgtgctctgctggatctactgtgtacgcaccattcactggaatgattgtgggccaggagaaaccttatcaaaacaagaatgctatcaataatggtgttcgaatatctggaagaggtaagagaggtggagtctacacctggggtgcctcctggagatgttgatgctcatttatttaatgcaggttccatacgtagagattttgtacttctttcaaaatgataaaacctggaacagaaagaatatagagtgtacccaaactagctgatgcattttttaaaaaacttttattttaggttcaggggtacatgtgcacatttgttatataggtaaaccacatgtcacagacatttggtgtacagattattttgtcacccaggtaataagcatagtacccgatagatatttttttctgatcctctcccagctgaggcactttcaaggacgtttcaccattttctctgaaaa

SEQ ID NO: 148483 - DNA, 762 bp, Homo sapiens
  Payload ID: 9409
  Gene Symbol: LECT2
  Gene Name: leukocyte cell-derived chemotaxin 2
  ENST ID: ENST00000512872
  CDS Start-End: 342-581
ctgaatcaggaaataaaattctggaaggacgatcttcccataaatacataaagtccagggaaaactacagtgaaaacagaattgtcaggatcaactgtgtgactgataaggcaaatggggataggaaatgtctgaggccaggagctctgctctcacttttctcctttttagcactggcagggccatgggctaatatatgtgctggcaagtcttccaatgagatccggacgtgtgaccgccatggctgtggacagtactctgctcaaagaagtcagaggcctcaccagggtgtggacatcttgtgctctgctggatctactgtgtacgcaccattcactggaatgattgtgggccaggagaaaccttatcaaaacaagaatgctatcaataatggtgttcgaatatctggaagaggtttttgtgtcaaaatgttctacattaagccaattaagtataaaggtcctattaagaagggagaaaaacttggaactctattgcccttgcagaaagtttatcctggcatacaatcgcatgtgcacattgaaaactgtgactcgagtgaccctactgcatacctgtaaatcgaaggccaatggtcagatcttcaaaataaaaagtcatcttaaaaacctggatgcatacccttctcttcaagaaatttgtgttcacaaaggaaaaatgcatgaagggatggataccccattttccatgacatgattattacacattgcatgcctgtatcaaaacatctcacgtacctca

SEQ ID NO: 148484 - DNA, 574 bp, Homo sapiens
  Payload ID: 9409
  Gene Symbol: LECT2
  Gene Name: leukocyte cell-derived chemotaxin 2
  ENST ID: ENST00000522943
  CDS Start-End: 130-525
taaagaaatgagagatgcagaattctaaggctaaatagctaggaagtattcattcaaacttgaatattcttcaaagagagtgtgggggcaactctaatcagaggaagaaactaaaggaagtaaaaccagatgttttccaccaaagccctccttttggctggtctgatttctaccgcactggcagggccatgggctaatatatgtgctggcaagtcttccaatgagatccggacgtgtgaccgccatggctgtggacagtactctgctcaaagaagtcagaggcctcaccagggtgtggacatcttgtgctctgctggatctactgtgtacgcaccattcactggaatgattgtgggccaggagaaaccttatcaaaacaagaatgctatcaataatggtgttcgaatatctggaagagaaattaccacagacaccccaatcttcaacaactactaccctgatcagtcagcggccgtcaacatcaagacgagatcctccaccagcaagaagatgatgactcactgaaggttcagatgatggttagcatttttttttcagtcaagcatttttaaat

SEQ ID NO: 148485 - DNA, 1910 bp, Homo sapiens
  Payload ID: 9410
  Gene Symbol: LILRA1
  Gene Name: leukocyte immunoglobulin-like receptor, subfamily A (with TM domain), member 1
  Uniprot ID: O75019
  ENST ID: ENST00000251372
  CDS Start-End: 183-1652
ctcactgccacacgcagctcaacctgagctacacagccagatgcgagatgcttctctgctgatctgagtctgcctgcagcatggaccttggtcttccctgaagcatctccagggctggagggacgactgccatgcaccgagggctcatccatccgcagagcagggcagtgggaggagacgctatgacccccatcgtcacagtcctgatctgtctcaggctgagtctgggcccccggacccacgtgcaggcagggaccctccccaagcccacactctgggctgagccaggctctgtgatcacccaggggagtcccgtgaccctctggtgtcaggggatcctggagacccaggagtaccgtctgtatagagaaaagaaaacagcaccctggattacacggatcccacaggagattgtgaagaagggccagttccccatcccatccatcacctgggaacacacagggcggtatcgctgtttctacggtagccacactgcaggctggtcagagcccagtgaccccctggagctggtggtgacaggagcctacatcaaacccaccctctcagctctacccagccctgtggtgacctcaggagggaacgtgaccctccattgtgtctcacaggtggcatttggcagcttcattctgtgtaaggaaggagaagatgaacacccacaatgcctgaactcacagccccgtacccatgggtggtcccgggccatcttctctgtgggccccgtgagcccgagtcgcaggtggtcgtacaggtgctatgcttatgactcgaactctccccatgtgtggtctctacccagtgatctcctggagctcctggtcctaggtgtttctaagaagccatcactctcagtgcagccaggtcctatagtggcccctggggagagcctgaccctccagtgtgtttctgatgtcagctacgacagatttgttctgtataaggagggagaacgtgacttcctccagctccctggcccacagccccaggctgggctctcccaggccaacttcaccctgggccctgtgagccgctcctacgggggccagtacagatgctccggtgcatacaacctctcctccgagtggtcggcccccagcgaccccctggacatcctgatcgcaggacagttccgtggcagacccttcatctcggtgcatccgggccccacggtggcctcaggagagaacgtgaccctgctgtgtcagtcatgggggccgttccacactttccttctgaccaaggcgggagcagctgatgcccccctccgtctcagatcaatacacgaatatcctaagtaccaggctgaattccctatgagtcctgtgacctcagcccactcggggacctacaggtgctacggctcactcagctccaacccctacctgctgtctcaccccagtgactccctggagctcatggtctcaggagcagctgagaccctcagcccaccacaaaacaagtccgattccaaggctggagcagctaacaccctcagcccatcacaaaacaagactgcctcacacccccaggattacacagtggagaatctcatccgcatgggcatagctggcttggtcctggtggtcctcgggattctgctatttgaggctcagcacagccagagaagcctctgagatgcagccgggaggtgaacagcagagagaagaatgtacccttcagagtggtggagccttgggaacagatctgatgatgccaggaggttccgggagacaatttagggctgatgctatctggactgtctgccaatcatttttagagggaggaatcagtgttggattgcagagacattttctggagtgatccatgaaggaccattaacctgtgatacctttcctctctattaatgttgacttcccttggttggatcctct

SEQ ID NO: 148486 - DNA, 2313 bp, Homo sapiens
  Payload ID: 9410
  Gene Symbol: LILRA1
  Gene Name: leukocyte immunoglobulin-like receptor, subfamily A (with TM domain), member 1
  Uniprot ID: O75019
  ENST ID: ENST00000453777
  CDS Start-End: 171-1040
cgcagctcaacctgagctacacagccagatgcgagatgcttctctgctgatctgagtctgcctgcagcatggaccttggtcttccctgaagcatctccagggctggagggacgactgccatgcaccgagggctcatccatccgcagagcagggcagtgggaggagacgctatgacccccatcgtcacagtcctgatctgtctcaggctgagtctgggcccccggacccacgtgcaggcagggaccctccccaagcccacactctgggctgagccaggctctgtgatcacccaggggagtcccgtgaccctctggtgtcaggggatcctggagacccaggagtaccgtctgtatagagaaaagaaaacagcaccctggattacacggatcccacaggagattgtgaagaagggccagttccccatcccatccatcacctgggaacacacagggcggtatcgctgtttctacggtagccacactgcaggctggtcagagcccagtgaccccctggagctggtggtgacaggagcctacatcaaacccaccctctcagctctacccagccctgtggtgacctcaggagggaacgtgaccctccattgtgtctcacaggtggcatttggcagcttcattctgtgtaaggaaggagaagatgaacacccacaatgcctgaactcacagccccgtacccatgggtggtcccgggccatcttctctgtgggccccgtgagcccgagtcgcaggtggtcgtacaggtgctatgcttatgactcgaactctccccatgtgtggtctctacccagtgatctcctggagctcctggtcctaggagcagctgagaccctcagcccaccacaaaacaagtccgattccaaggctggagcagctaacaccctcagcccatcacaaaacaagactgcctcacacccccaggattacacagtggagaatctcatccgcatgggcatagctggcttggtcctggtggtcctcgggattctgctatttgaggctcagcacagccagagaagcctctgagatgcagccgggaggtgaacagcagagagaagaatgtacccttcagagtggtggagccttgggaacagatctgatgatgccaggaggttccgggagacaatttagggctgatgctatctggactgtctgccaatcatttttagagggaggaatcagtgttggattgcagagacattttctggagtgatccatgaaggaccattaacctgtgatacctttcctctctattaatgttgacttcccttggttggatcctcttctttccccacccccagacagacatgaggctacatcccacatggcagcgttgggtccacacctctgcacatctgtgtgctctggtccatggtgtgtaacacagtcttctttattactcattgccatactccctggtgtgctttactgagcctccatctcttcaattcagagttccaaacgtgcttcagtaactaaatcaatgggagagtatcggatttcaaccaggaaaagataaatccaccctgatgccctgacaccctctctgaaccctacgagcccttccctccttctcacatgctacctgtgcagcttctccttagatcattgtgtaaccatcactgccatcctgttccacacatggtcatcaccctacacccattcagcagccactccccattccctcttccctccagcacctgctaaccacaaatgtgctttctgtctctacggatttgcctattctgtctgaaaacatttcaatctcctttgacctgtgagctcctcacttcgagacttcctgcctttccaggcagaaccaaagtacaccacgtcaaaagcaatgataggcatttgcagtgtgttggtgatccacgaaaggaaaatcacggaagcaggatagaaatccagctgcagacaagacctcaggtcgatgaatcttgacaagcagttgagctgtttttttctactcacctaggacagtcaggcagaagtatgcaaaatgactggggctgattcttttctgaattgtcgcaaacagcaagaggacttgagtcctagcattaaagagttcaacatgtctaggtccaagaccactgttgtgtttgaaggatgtaaaaccctgctgcataggatggaatatttggagggaggatcctgaaaaacatgagggatcaaatagtcctcaactttctaggacaaagggagcagctatttgccatctaccctccagaataaagaaatcttatcattcaccatctaccctctagaataaagaaatcttatcattcgccatcta

SEQ ID NO: 148487 - DNA, 1910 bp, Homo sapiens; identical to SEQ ID NO: 148485
  Payload ID: 9410
  Gene Symbol: LILRA1
  Gene Name: leukocyte immunoglobulin-like receptor, subfamily A (with TM domain), member 1
  Uniprot ID: O75019
  ENST ID: ENST00000617170
  CDS Start-End: 183-1652

SEQ ID NO: 148488 - DNA, 2313 bp, Homo sapiens; identical to SEQ ID NO: 148486
  Payload ID: 9410
  Gene Symbol: LILRA1
  Gene Name: leukocyte immunoglobulin-like receptor, subfamily A (with TM domain), member 1
  Uniprot ID: O75019
  ENST ID: ENST00000620606
  CDS Start-End: 171-1040

SEQ ID NO: 148489 - DNA, 1510 bp, Homo sapiens
  Payload ID: 9410
  Gene Symbol: LILRA1
  Gene Name: leukocyte immunoglobulin-like receptor, subfamily A (with TM domain), member 1
  ENST ID: ENST00000614904
  CDS Start-End: 1-1320
atgacccccatcctcacggtcctgatctgtctcgggctgagtctgggccccaggacccacgtgcaggcagggaccctccccaagcccacactctgggctgagccaggctctgtgatcacccaggggagtcccgtgaccctctggtgtcaggggatcctggagacccaggagtaccgtctgtatagagaaaagaaaacagcaccctggattacacggatcccacaggagattgtgaagaagggccagttccccatcccatccatcacctgggaacacacagggcggtatcgctgtttctacggtagccacactgcaggctggtcagagcccagtgaccccctggagctggtggtgacaggagcctacatcaaacccaccctctcagctctacccagccctgtggtgacctcaggagggaacgtgaccctccattgtgtctcacaggtggcatttggcagcttcattctgtgtaaggaaggagaagatgaacacccacaatgcctgaactcacagccccgtacccatgggtggtcccgggccatcttctctgtgggccccgtgagcccgagtcgcaggtggtcgtacaggtgctatgcttatgactcgaactctccccatgtgtggtctctacccagtgatctcctggagctcctggtcctaggtgtttctaagaagccatcactctcagtgcagccaggtcctatagtggcccctggggagagcctgaccctccagtgtgtttctgatgtcagctacgacagatttgttctgtataaggagggagaacgtgacttcctccagctccctggcccacagccccaggctgggctctcccaggccaacttcaccctgggccctgtgagccgctcctacgggggccagtacagatgctccggtgcatacaacctctcctccgagtggtcggcccccagcgaccccctggacatcctgatcgcaggacagttccgtggcagacccttcatctcggtgcatccgggccccacggtggcctcaggagagaacgtgaccctgctgtgtcagtcatgggggccgttccacactttccttctgaccaaggcgggagcagctgatgcccccctccgtctcagatcaatacacgaatatcctaagtaccaggctgaattccctatgagtcctgtgacctcagcccactcggggacctacaggtgctacggctcactcagctccaacccctacctgctgtctcaccccagtgactccctggagctcatggtctcaggagcagctgagaccctcagcccaccacaaaacaagtccgattccaaggctggtgagtgaggagatgcttgccgtgatgacgctgggcacagagggtcaggtcctgtcaaggggagctgggtgtcctgggtggacattttaaaaaattacattcattctaatttaaagaattcttcaacacctttaatgatttataagtgaagtatttcattcctttacatttttaaaataagagataactatccatgag

SEQ ID NO: 148490 - DNA, 1510 bp, Homo sapiens; identical to SEQ ID NO: 148489
  Payload ID: 9410
  Gene Symbol: LILRA1
  Gene Name: leukocyte immunoglobulin-like receptor, subfamily A (with TM domain), member 1
  ENST ID: ENST00000618665
  CDS Start-End: 1-1320

SEQ ID NO: 148491 - DNA, 2000 bp, Homo sapiens
  Payload ID: 9410
  Gene Symbol: LILRA1
  Gene Name: leukocyte immunoglobulin-like receptor, subfamily A (with TM domain), member 1
  ENST ID: ENST00000613536
  CDS Start-End: 222-1742
gggactatttggttgaaagaaaacccacaatccagtgtcaagaaagaagtcaacttttcttcccctatttccctgcatttctcctctgtgctcactgccacacgcagctcaacctgagctacacagccagatgcgagatgcttctctgctgatctgagtctgcctgcagcatggaccttggtcttccctgaagcatctccagggctggagggacgactgccatgcaccgagggctcatccatccgcagagcagggcagtgggaggagacgctatgacccccatcgtcacagtcctgatctgtctcaggctgagtctgggcccccggacccacgtgcaggcagggaccctccccaagcccacactctgggctgagccaggctctgtgatcacccaggggagtcccgtgaccctctggtgtcaggggatcctggagacccaggagtaccgtctgtatagagaaaagaaaacagcaccctggattacacggatcccacaggagattgtgaagaagggccagttccccatcccatccatcacctgggaacacacagggcggtatcgctgtttctacggtagccacactgcaggctggtcagagcccagtgaccccctggagctggtggtgacaggagcctacatcaaacccaccctctcagctctacccagccctgtggtgacctcaggagggaacgtgaccctccattgtgtctcacaggtggcatttggcagcttcattctgtgtaaggaaggagaagatgaacacccacaatgcctgaactcacagccccgtacccatgggtggtcccgggccatcttctctgtgggccccgtgagcccgagtcgcaggtggtcgtacaggtgctatgcttatgactcgaactctccccatgtgtggtctctacccagtgatctcctggagctcctggtcctaggtgtttctaagaagccatcactctcagtgcagccaggtcctatagtggcccctggggagagcctgaccctccagtgtgtttctgatgtcagctacgacagatttgttctgtataaggagggagaacgtgacttcctccagctccctggcccacagccccaggctgggctctcccaggccaacttcaccctgggccctgtgagccgctcctacgggggccagtacagatgctccggtgcatacaacctctcctccgagtggtcggcccccagcgaccccctggacatcctgatcgcaggacagttccgtggcagacccttcatctcggtgcatccgggccccacggtggcctcaggagagaacgtgaccctgctgtgtcagtcatgggggccgttccacactttccttctgaccaaggcgggagcagctgatgcccccctccgtctcagatcaatacacgaatatcctaagtaccaggctgaattccctatgagtcctgtgacctcagcccactcggggacctacaggtgctacggctcactcagctccaacccctacctgctgtctcaccccagtgactccctggagctcatggtctcaggagcagctgagaccctcagcccaccacaaaacaagtccgattccaaggctggagcagctaacaccctcagcccatcacaaaacaagactgcctcacacccccaggattacacagtggagaatctcatccgcatgggcatagctggcttggtcctggtggtcctcgggattctgctatttgaggctcagcacagccagagaagcctctgagatgcagccgggaggtgaacagcagagagaagaatgtacccttcagagtggtggagccttgggaacagatctgatgatgccaggaggttccgggagacaatttagggctgatgctatctggactgtctgccaatcatttttagagggaggaatcagtgttggattgcagagacattttctggagtgatccatgaaggaccattaacatgtgatacctttcctctctattaatgttgacttcccttggttggatcctct

SEQ ID NO: 148492 - DNA, 1510 bp, Homo sapiens; identical to SEQ ID NO: 148489
  Payload ID: 9410
  Gene Symbol: LILRA1
  Gene Name: leukocyte immunoglobulin-like receptor, subfamily A (with TM domain), member 1
  ENST ID: ENST00000613222
  CDS Start-End: 1-1320

SEQ ID NO: 148493 - DNA, 1910 bp, Homo sapiens; identical to SEQ ID NO: 148485
  Payload ID: 9410
  Gene Symbol: LILRA1
  Gene Name: leukocyte immunoglobulin-like receptor, subfamily A (with TM domain), member 1
  ENST ID: ENST00000616368
  CDS Start-End: 132-1652

SEQ ID NO: 148494 - DNA, 1510 bp, Homo sapiens; identical to SEQ ID NO: 148489
  Payload ID: 9410
  Gene Symbol: LILRA1
  Gene Name: leukocyte immunoglobulin-like receptor, subfamily A (with TM domain), member 1
  ENST ID: ENST00000618884
  CDS Start-End: 1-1320

SEQ ID NO: 148495 - DNA, 2688 bp, Homo sapiens
  Payload ID: 9410
  Gene Symbol: LILRA1
  Gene Name: leukocyte immunoglobulin-like receptor, subfamily A (with TM domain), member 1
  Uniprot ID: O75019
  ENST ID: ENST00000631007
  CDS Start-End: 255-1124
gaaaacccacaatccagtgtcaagaaagaagtcaacttttcttcccctatttccctgcatttctcctctgtgctcactgccacacgcagctcaacctgagctacacagccagatgcgagatgcttctctgctgatctgagtctgcctgcagcatggaccttggtcttccctgaagcatctccagggctggagggacgactgccatgcaccgagggctcatccatccgcagagcagggcagtgggaggagacgctatgacccccatcgtcacagtcctgatctgtctcaggctgagtctgggcccccggacccacgtgcaggcagggaccctccccaagcccacactctgggctgagccaggctctgtgatcacccaggggagtcccgtgaccctctggtgtcaggggatcctggagacccaggagtaccgtctgtatagagaaaagaaaacagcaccctggattacacggatcccacaggagattgtgaagaagggccagttccccatcccatccatcacctgggaacacacagggcggtatcgctgtttctacggtagccacactgcaggctggtcagagcccagtgaccccctggagctggtggtgacaggagcctacatcaaacccaccctctcagctctacccagccctgtggtgacctcaggagggaacgtgaccctccattgtgtctcacaggtggcatttggcagcttcattctgtgtaaggaaggagaagatgaacacccacaatgcctgaactcacagccccgtacccatgggtggtcccgggccatcttctctgtgggccccgtgagcccgagtcgcaggtggtcgtacaggtgctatgcttatgactcgaactctccccatgtgtggtctctacccagtgatctcctggagctcctggtcctaggagcagctgagaccctcagcccaccacaaaacaagtccgattccaaggctggagcagctaacaccctcagcccatcacaaaacaagactgcctcacacccccaggattacacagtggagaatctcatccgcatgggcatagctggcttggtcctggtggtcctcgggattctgctatttgaggctcagcacagccagagaagcctctgagatgcagccgggaggtgaacagcagagagaagaatgtacccttcagagtggtggagccttgggaacagatctgatgatgccaggaggttccgggagacaatttagggctgatgctatctggactgtctgccaatcatttttagagggaggaatcagtgttggattgcagagacattttctggagtgatccatgaaggaccattaacatgtgatacctttcctctctattaatgttgacttcccttggttggatcctcttctttccccacccccagacagacatgaggctacatcccacatggcagcgttgggtccacacctctgcacatctgtgtgctctggtccatggtgtgtaacacagtcttctttattactcattgccatactccctggtgtgctttactgagcctccatctcttcaattcagagttccaaacgtgcttcagtaactaaatcaatgggagagtatcggatttcaaccaggaaaagataaatccaccctgatgccctgacaccctctctgaaccctacgagcccttccctccttctcacatgctacctgtgcagcttctccttagatcattgtgtaaccatcactgccatcctgttccacacatggtcatcaccctacacccattcagcagccactccccattccctcttccctccagcacctgctaaccacaaatgtgctttctgtctctacggatttgcctattctgtctgaaaacatttcaatctcctttgacctgtgagctcctcacttcgagacttcctgcctttccaggcagaaccaaagtacaccacgtcaaaagcaatgataggcatttgcagtgtgttggtgatccacgaaaggaaaatcacggaagcaggatagaaatccagctgcagacaagacctcaggtcgatgaatcttgacaagcagttgagctgtttttttctactcacctaggacagtcaggcagaagtatgcaaaatgactggggctgattcttttctgaattgtcgcaaacagcaagaggacttgagtcctagcattaaagagttcaacatgtctaggtccaagaccactgttgtgtttgaaggatgtaaaaccctgctgcataggatggaatatttggagggaggatcctgaaaaacatgagggatcaaatagtcctcaactttctaggacaaagggagcagctatttgccatctaccctccagaataaagaaatcttatcattcaccatctaccctctagaataaagaaatcttatcattcgccatctaccctgtagaataaagaaatcttatcattcaccgtctaccctctagagtaaacaaatcttatcattcaccatctaccctctagaataaagaaatcttatcattcgccatctaccctctagaataaagaaatcttatcattcaccgtctaccctctagagtaaacaaatcttatcattcgccatctaccctctagaatagagaaatcttatcattcatcatctaccctccagaataaagaaatgttatcatttgccatctaccctctagaataaagaaatcttattaaggaca

SEQ ID NO: 148496 - DNA, 2688 bp, Homo sapiens
  Payload ID: 9410
  Gene Symbol: LILRA1
  Gene Name: leukocyte immunoglobulin-like receptor, subfamily A (with TM domain), member 1
  Uniprot ID: O75019
  ENST ID: ENST00000628480
  CDS Start-End: 255-1124
gaaaacccacaatccagtgtcaagaaagaagtcaacttttcttcccctatttccctgcatttctcctctgtgctcactgccacacgcagctcaacctgagctacacagccagatgcgagatgcttctctgctgatctgagtctgcctgcagcatggaccttggtcttccctgaagcatctccagggctggagggacgactgccatgcaccgagggctcatccatccgcagagcagggcagtgggaggagacgctatgacccccatcgtcacagtcctgatctgtctcaggctgagtctgggcccccggacccacgtgcaggcagggaccctccccaagcccacactctgggctgagccaggctctgtgatcacccaggggagtcccgtgaccctctggtgtcaggggatcctggagacccaggagtaccgtctgtatagagaaaagaaaacagcaccctggattacacggatcccacaggagattgtgaagaagggccagttccccatcccatccatcacctgggaacacacagggcggtatcgctgtttctacggtagccacactgcaggctggtcagagcccagtgaccccctggagctggtggtgacaggagcctacatcaaacccaccctctcagctctacccagccctgtggtgacctcaggagggaacgtgaccctccattgtgtctcacaggtggcatttggcagcttcattctgtgtaaggaaggagaagatgaacacccacaatgcctgaactcacagccccgtacccatgggtggtcccgggccatcttctctgtgggccccgtgagcccgagtcgcaggtggtcgtacaggtgctatgcttatgactcgaactctccccatgtgtggtctctacccagtgatctcctggagctcctggtcctaggagcagctgagaccctcagcccaccacaaaacaagtccgattccaaggctggagcagctaacaccctcagcccatcacaaaacaagactgcctcacacccccaggattacacagtggagaatctcatccgcatgggcatagctggcttggtcctggtggtcctcgggattctgctatttgaggctcagcacagccagagaagcctctgagatgcagccgggaggtgaacagcagagagaagaatgtacccttcagagtggtggagccttgggaacagatctgatgatgccaggaggttccgggagacaatttagggctgatgctatctggactgtctgccaatcatttttagagggaggaatcagtgttggattgcagagacattttctggagtgatccatgaaggaccattaacctgtgatacctttcctctctattaatgttgacttcccttggttggatcctcttctttccccacccccagacagacatgaggctacatcccacatggcagcgttgggtccacacctctgcacatctgtgtgctctggtccatggtgtgtaacacagtcttctttattactcattgccatactccctggtgtgctttactgagcctccatctcttcaattcagagttccaaacgtgcttcagtaactaaatcaatgggagagtatcggatttcaaccaggaaaagataaatccaccctgatgccctgacaccctctctgaaccctacgagcccttccctccttctcacatgctacctgtgcagcttctccttagatcattgtgtaaccatcactgccatcctgttccacacatggtcatcaccctacacccattcagcagccactccccattccctcttccctccagcacctgctaaccacaaatgtgctttctgtctctacggatttgcctattctgtctgaaaacatttcaatctcctttgacctgtgagctcctcacttcgagacttcctgcctttccaggcagaaccaaagtacaccacgtcaaaagcaatgataggcatttgcagtgtgttggtgatccacgaaaggaaaatcacggaagcaggatagaaatccagctgcagacaagacctcaggtcgatgaatcttgacaagcagttgagctgtttttttctactcacctaggacagtcaggcagaagtatgcaaaatgactggggctgattcttttctgaattgtcgcaaacagcaagaggacttgagtcctagcattaaagagttcaacatgtctaggtccaagaccactgttgtgtttgaaggatgtaaaaccctgctgcataggatggaatatttggagggaggatcctgaaaaacatgagggatcaaatagtcctcaactttctaggacaaagggagcagctatttgccatctaccctccagaataaagaaatcttatcattcaccatctaccctctagaataaagaaatcttatcattcgccatctaccctgtagaataaagaaatcttatcattcaccgtctaccctctagagtaaacaaatcttatcattcaccatctaccctctagaataaagaaatcttatcattcgccatctaccctctagaataaagaaatcttatcattcaccgtctaccctctagagtaaacaaatcttatcattcgccatctaccctctagaatagagaaatcttatcattcatcatctaccctccagaataaagaaatgttatcatttgccatctaccctctagaataaagaaatcttattaaggaca

SEQ ID NO: 148497 - DNA, 4429 bp, Homo sapiens
  Payload ID: 9411
  Gene Symbol: LILRA2
  Gene Name: leukocyte immunoglobulin-like receptor, subfamily A (with TM domain), member 2
  Uniprot ID: Q8N149
  ENST ID: ENST00000251376
  CDS Start-End: 88-1488
ccgagtgtccacaccctgtgcgtctctctgtcctgccagcactgagggctcatccatccgcagagcagggcagtgggaggagacgccatgacccccatcctcacggtcctgatctgtctcgggctgagtctgggccccaggacccacgtgcaggcagggcacctccccaagcccaccctctgggctgagccaggctctgtgatcatccagggaagtcctgtgaccctcaggtgtcaggggagccttcaggctgaggagtaccatctatatagggaaaacaaatcagcatcctgggttagacggatacaagagcctgggaagaatggccagttccccatcccatccatcacctgggaacacgcagggcggtatcactgtcagtactacagccacaatcactcatcagagtacagtgaccccctggagctggtggtgacaggagcctacagcaaacccaccctctcagctctgcccagccctgtggtgacctcaggagggaacgtgaccctccagtgtgtctcacaggtggcatttgacggcttcattctgtgtaaggaaggagaagatgaacacccacaacgcctgaactcccattcccatgcccgtgggtggtcctgggccatcttctccgtgggccccgtgagcccgagtcgcaggtggtcgtacaggtgctatgcttatgactcgaactctccctatgtgtggtctctacccagtgatctcctggagctcctggtcccaggtgtttctaagaagccatcactctcagtgcagccaggtcctatggtggcccctggggagagcctgaccctccagtgtgtctctgatgtcggctacgacagatttgttctgtataaggagggagaacgtgacttcctccagcgccctggttggcagccccaggctgggctctcccaggccaacttcaccctgggccctgtgagcccctcccacgggggccagtacagatgctacagtgcacacaacctctcctccgagtggtcggcccccagtgaccccctggacatcctgatcacaggacagttctatgacagaccctctctctcggtgcagccggtccccacagtagccccaggaaagaacgtgaccctgctgtgtcagtcacgggggcagttccacactttccttctgaccaaggagggggcaggccatcccccactgcatctgagatcagagcaccaagctcagcagaaccaggctgaattccgcatgggtcctgtgacctcagcccacgtggggacctacagatgctacagctcactcagctccaacccctacctgctgtctctccccagtgaccccctggagctcgtggtctcagcatccctaggccaacacccccaggattacacagtggagaatctcatccgcatgggtgtggctggcttggtcctggtggtcctcgggattctgctatttgaggctcagcacagccagagaagcctacaagatgcagccgggaggtgaacagcagagaggacaatgcatccttcagcgtggtggagcctcagggacagatctgatgatcccaggaggctctggaggacaatctaggacctacattatctggactgtatgctggtcatttctagagacagcaatcaatatttgagtgtaaggaaactgtctggggtgattcctagaagatcattaaactgtggtacatttttttgtctatgaatgttgacttcccttgactggatcccctttttttcccatccccagacatgaggctccatcccacatggcaccgttgggtccacacctccacacacctgtgtgctctggtccacggcatgtgacacagtcttccttattcctcattgtcacactccttgatgtcacttactgagtccccgtctcttcagttcagagatccaaacctgaaccaccaactaaatcaacgacaggagatcagattccaaccaggaaaacataaatccaccctgctgccctgacaccctctctgtaccttatgagcccttccctctttctcagatgctatctgtgtaatttctcctgaaatatcaccacttggaatcatcacactggcatttcaagtgacaccacagctatgctgattcagaaaaagacatctctaaaatactgtaattagtggtatctaccaatttctgtgacataaatatttttctcatggcccaaatcaaggtgccaatgggttctcactgaatacagggttgggaagcaagggacagaactgtcttcactaatgagcaccagggacctgtggcacatcccactgagagctcacccatatacctacagtcctttctatttcagaggcaatgatcacttctacttcagtgttatggcacaggtcaaatgaaattctgacactgttatcctagcatatccacaaaagacaaacctattaatatctgatgtgggagataacacggctcacctaaaaatcaaagtacatgccgggcgcggtggctcacgcctgtaatcccagcactttgggaggccaaggcaggcagatcacgaggtcaggagatctagaccatcctggctaacatggtgaaaccccgtctctactaaatacacaaaaaaatattggccgggcgtggtggtgggcgcctgtagtcccagctactcaggaggctgaggcaggagaatggcgtgaacctgggaggcggagcttgcaatgggccgagattgcgacactgccctccagcctgggcgacagagcaagactccgtctcaaaaaaaaaaaaaaatccaagtacaacataagaaaaatgttaacagaactatgcagtttcgatgaaagaattttttttgagatggagttttgctttgttgcccaggctggagtgcaatggtgcaatctcggctcactgcaacctccacttcccaggttcaagcaattctcctgcctctgcctcccgagttactggactacaggtgtgcaccaccattcccggctattttttgtatttttagtagagacgggggtctcgccatgttagtgaggctggtcttgaactcctgacctcaggttatccacctgcctcagcctcccagagtgctgggattacaggtgtaagccactgtgcccggctgatggaagaattcttaaatgactcgttctactttctgctggtccaggcactccttggcttggggcagcatcccaccagtttctgcctccatcttctcaatgcttacacctacctggttgcctctgtcttcacacccattcttctgtgtgtgtcttttctcttcttcagattatgatatcactcagatcagattaggactcatcctaattcgttatgatcccttgatcataacttaaatgcatttgcaaagactctatttccaactatgttcacatttatagctaatggggctcaggatttcaacgtgtatattagggggaacaagtcaatttatgacagtgtctacaagaaaagtatgcatagaaatacatttaaccaaatacaaaaattaggtgggtgtggtggtacacgcctgtaatcccagctactcaggaggctgagacaggagaatcgcgtcaacccaggaaacagaggttgcagtgagctgagatcttgccattgcactccagcctgggcaacagagtgagactctgtctcaaaaaaagagaaatacatttaaccaaagagatgcaatacgtatacattgacaattttaaaatactgctcaaagaaataacaaaagacctaaatgaggaaaaagtcatcccagtatcataaatcaaaaggcttaaaattagttatctccctctagggaacctagactaatacactcaccccgtctccttgttcggaggctctcctgcctatcagcttttctcctctgtgctttccatgtccctgtggttctctggtgagccccatcatgctgtcctagaagatccacttagaatttcggtatttactcaccattttgactcctcttaacgagacaggcacatgccagctgtttccattcatccaacctgaacctgagcccccgatcattttttctaccacttttcagtcctgggaaactcagtcccaatgtgcttgtcattcatttgagaataattttcattttctccagtagttttaaaattactttgtatctattctagatatcgtttgctctatcatagttaagacattaatgttatttatgaatttgtgcacattaaactcatgatctttcatttctgtaaaaatgtcaactatttcctttgcaagtatttattgactaacatactccttatttccttcattctgaaagtgtgacacatagagatatatctgtttcctcttctcactctattctttgtgtgcattaattatcttttctatttttttcatttctagtttttctccgatgactaatgaaaaatttaataaatattctacaccaa

SEQ ID NO: 148498 - DNA, 1799 bp, Homo sapiens
  Payload ID: 9411
  Gene Symbol: LILRA2
  Gene Name: leukocyte immunoglobulin-like receptor, subfamily A (with TM domain), member 2
  Uniprot ID: Q8N149
  ENST ID: ENST00000251377
  CDS Start-End: 134-1585
gcgtctctgctgatctgagtctaactgcagcatggacctgggttttccctgaagcatctccagggctggagggacgaccgccatgcactgagggctcatccatccgcagagcagggcagtgggaggagacgccatgacccccatcctcacggtcctgatctgtctcgggctgagtctgggccccaggacccacgtgcaggcagggcacctccccaagcccaccctctgggctgagccaggctctgtgatcatccagggaagtcctgtgaccctcaggtgtcaggggagccttcaggctgaggagtaccatctatatagggaaaacaaatcagcatcctgggttagacggatacaagagcctgggaagaatggccagttccccatcccatccatcacctgggaacacgcagggcggtatcactgtcagtactacagccacaatcactcatcagagtacagtgaccccctggagctggtggtgacaggagcctacagcaaacccaccctctcagctctgcccagccctgtggtgacctcaggagggaacgtgaccctccagtgtgtctcacaggtggcatttgacggcttcattctgtgtaaggaaggagaagatgaacacccacaacgcctgaactcccattcccatgcccgtgggtggtcctgggccatcttctccgtgggccccgtgagcccgagtcgcaggtggtcgtacaggtgctatgcttatgactcgaactctccctatgtgtggtctctacccagtgatctcctggagctcctggtcccaggtgtttctaagaagccatcactctcagtgcagccaggtcctatggtggcccctggggagagcctgaccctccagtgtgtctctgatgtcggctacgacagatttgttctgtataaggagggagaacgtgacttcctccagcgccctggttggcagccccaggctgggctctcccaggccaacttcaccctgggccctgtgagcccctcccacgggggccagtacagatgctacagtgcacacaacctctcctccgagtggtcggcccccagtgaccccctggacatcctgatcacaggacagttctatgacagaccctctctctcggtgcagccggtccccacagtagccccaggaaagaacgtgaccctgctgtgtcagtcacgggggcagttccacactttccttctgaccaaggagggggcaggccatcccccactgcatctgagatcagagcaccaagctcagcagaaccaggctgaattccgcatgggtcctgtgacctcagcccacgtggggacctacagatgctacagctcactcagctccaacccctacctgctgtctctccccagtgaccccctggagctcgtggtctcagaagcagctgagaccctcagcccatcacaaaacaagacagactccacgactacatccctaggccaacacccccaggattacacagtggagaatctcatccgcatgggtgtggctggcttggtcctggtggtcctcgggattctgctatttgaggctcagcacagccagagaagcctacaagatgcagccgggaggtgaacagcagagaggacaatgcatccttcagcgtggtggagcctcagggacagatctgatgatcccaggaggctctggaggacaatctaggacctacattatctggactgtatgctggtcatttctagagacagcaatcaatatttgagtgtaaggaaactgtctggggtgattcctagaagatcattaaactgtggtacatttttttgtctatgaa

SEQ ID NO: 148499 - DNA, 1452 bp, Homo sapiens
  Payload ID: 9411
  Gene Symbol: LILRA2
  Gene Name: leukocyte immunoglobulin-like receptor, subfamily A (with TM domain), member 2
  ENST ID: ENST00000391737
  CDS Start-End: 39-1403
tcatccatccgcagagcagggcagtgggaggagacgccatgacccccatcctcacggtcctgatctgtctcgggcacctccccaagcccaccctctgggctgagccaggctctgtgatcatccagggaagtcctgtgaccctcaggtgtcaggggagccttcaggctgaggagtaccatctatatagggaaaacaaatcagcatcctgggttagacggatacaagagcctgggaagaatggccagttccccatcccatccatcacctgggaacacgcagggcggtatcactgtcagtactacagccacaatcactcatcagagtacagtgaccccctggagctggtggtgacaggagcctacagcaaacccaccctctcagctctgcccagccctgtggtgacctcaggagggaacgtgaccctccagtgtgtctcacaggtggcatttgacggcttcattctgtgtaaggaaggagaagatgaacacccacaacgcctgaactcccattcccatgcccgtgggtggtcctgggccatcttctccgtgggccccgtgagcccgagtcgcaggtggtcgtacaggtgctatgcttatgactcgaactctccctatgtgtggtctctacccagtgatctcctggagctcctggtcccaggtgtttctaagaagccatcactctcagtgcagccaggtcctatggtggcccctggggagagcctgaccctccagtgtgtctctgatgtcggctacgacagatttgttctgtataaggagggagaacgtgacttcctccagcgccctggttggcagccccaggctgggctctcccaggccaacttcaccctgggccctgtgagcccctcccacgggggccagtacagatgctacagtgcacacaacctctcctccgagtggtcggcccccagtgaccccctggacatcctgatcacaggacagttctatgacagaccctctctctcggtgcagccggtccccacagtagccccaggaaagaacgtgaccctgctgtgtcagtcacgggggcagttccacactttccttctgaccaaggagggggcaggccatcccccactgcatctgagatcagagcaccaagctcagcagaaccaggctgaattccgcatgggtcctgtgacctcagcccacgtggggacctacagatgctacagctcactcagctccaacccctacctgctgtctctccccagtgaccccctggagctcgtggtctcagcatccctaggccaacacccccaggattacacagtggagaatctcatccgcatgggtgtggctggcttggtcctggtggtcctcgggattctgctatttgaggctcagcacagccagagaagcctacaagatgcagccgggaggtgaacagcagagaggacaatgcatccttcagcgtggtggagcctcagggaca

SEQ ID NO: 148500 - DNA, 1753 bp, Homo sapiens
  Payload ID: 9411
  Gene Symbol: LILRA2
  Gene Name: leukocyte immunoglobulin-like receptor, subfamily A (with TM domain), member 2
  Uniprot ID: Q8N149
  ENST ID: ENST00000391738
  CDS Start-End: 90-1541
ctccgagtgtccacaccctgtgcgtctctctgtcctgccagcactgagggctcatccatccgcagagcagggcagtgggaggagacgccatgacccccatcctcacggtcctgatctgtctcgggctgagtctgggccccaggacccacgtgcaggcagggcacctccccaagcccaccctctgggctgagccaggctctgtgatcatccagggaagtcctgtgaccctcaggtgtcaggggagccttcaggctgaggagtaccatctatatagggaaaacaaatcagcatcctgggttagacggatacaagagcctgggaagaatggccagttccccatcccatccatcacctgggaacacgcagggcggtatcactgtcagtactacagccacaatcactcatcagagtacagtgaccccctggagctggtggtgacaggagcctacagcaaacccaccctctcagctctgcccagccctgtggtgacctcaggagggaacgtgaccctccagtgtgtctcacaggtggcatttgacggcttcattctgtgtaaggaaggagaagatgaacacccacaacgcctgaactcccattcccatgcccgtgggtggtcctgggccatcttctccgtgggccccgtgagcccgagtcgcaggtggtcgtacaggtgctatgcttatgactcgaactctccctatgtgtggtctctacccagtgatctcctggagctcctggtcccaggtgtttctaagaagccatcactctcagtgcagccaggtcctatggtggcccctggggagagcctgaccctccagtgtgtctctgatgtcggctacgacagatttgttctgtataaggagggagaacgtgacttcctccagcgccctggttggcagccccaggctgggctctcccaggccaacttcaccctgggccctgtgagcccctcccacgggggccagtacagatgctacagtgcacacaacctctcctccgagtggtcggcccccagtgaccccctggacatcctgatcacaggacagttctatgacagaccctctctctcggtgcagccggtccccacagtagccccaggaaagaacgtgaccctgctgtgtcagtcacgggggcagttccacactttccttctgaccaaggagggggcaggccatcccccactgcatctgagatcagagcaccaagctcagcagaaccaggctgaattccgcatgggtcctgtgacctcagcccacgtggggacctacagatgctacagctcactcagctccaacccctacctgctgtctctccccagtgaccccctggagctcgtggtctcagaagcagctgagaccctcagcccatcacaaaacaagacagactccacgactacatccctaggccaacacccccaggattacacagtggagaatctcatccgcatgggtgtggctggcttggtcctggtggtcctcgggattctgctatttgaggctcagcacagccagagaagcctacaagatgcagccgggaggtgaacagcagagaggacaatgcatccttcagcgtggtggagcctcagggacagatctgatgatcccaggaggctctggaggacaatctaggacctacattatctggactgtatgctggtcatttctagagacagcaatcaatatttgagtgtaaggaaactgtctggggtgattcctagaagatcattaaactgtggtacatttttttgtctatg

SEQ ID NO: 148501 - DNA, 1571 bp, Homo sapiens
  Payload ID: 9411
  Gene Symbol: LILRA2
  Gene Name: leukocyte immunoglobulin-like receptor, subfamily A (with TM domain), member 2
  ENST ID: ENST00000439534
  CDS Start-End: 590-1571
ggctggaatgctaaggggtgatcatagctccctgcagcctccgcctcccaggccgaagtattcctcccacctcagcctcctgagtagctgggactagagatgtgagctgccatgcctggctaattttttgctttttttatacagacaaggtcttgctatgtggcccagggtaatctgaagctcctggcctctagccttcacccacctcagcctcctgaagtgctgggattccaggcatgagccaccatggtagaccctgcattactcctctgtgctcactgccacacgcagctcaacctgagctacacagccaggtgtcaggtgcgtctctgctgatctgagtctaactgcagcatggacctgggttttccctgaagcatctccagggctggagggacgaccgccatgccctaaaggtatgacagccaggctcctgagagggcagttgcacttcctgtgtggttgcacataacaaaaccccatgacaagaaggatccagcctccgagtgtccacaccctgtgcgtctctctgtcctgccagcactgagggctcatccatccgcagagcagggcagtgggaggagacgccatgacccccatcctcacggtcctgatctgtctcgggctgagtctgggccccaggacccacgtgcaggcagggcacctccccaagcccaccctctgggctgagccaggctctgtgatcatccagggaagtcctgtgaccctcaggtgtcaggggagccttcaggctgaggagtaccatctatatagggaaaacaaatcagcatcctgggttagacggatacaagagcctgggaagaatggccagttccccatcccatccatcacctgggaacacgcagggcggtatcactgtcagtactacagccacaatcactcatcagagtacagtgaccccctggagctggtggtgacaggagcctacagcaaacccaccctctcagctctgcccagccctgtggtgacctcaggagggaacgtgaccctccagtgtgtctcacaggtggcatttgacggcttcattctgtgtaaggaaggagaagatgaacacccacaacgcctgaactcccattcccatgcccgtgggtggtcctgggccatcttctccgtgggccccgtgagcccgagtcgcaggtggtcgtacaggtgctatgcttatgactcgaactctccctatgtgtggtctctacccagtgatctcctggagctcctggtcccaggtgtttctaagaagccatcactctcagtgcagccaggtcctatggtggcccctggggagagcctgaccctccagtgtgtctctgatgtcggctacgacagatttgttctgtataaggagggagaacgtgacttcctccagcgccctggttggcagccccaggctgggctctcccaggccaacttcaccctgggccctgtgagcccctcccacgggggccagtacagatgctacagtgcacacaacctctcctccgagtggtcggcccccagtgaccccctggacatcctgatcacaggacagttctatgacagaccctctctctcgg

SEQ ID NO: 148502 - DNA, 644 bp, Homo sapiens
  Payload ID: 9411
  Gene Symbol: LILRA2
  Gene Name: leukocyte immunoglobulin-like receptor, subfamily A (with TM domain), member 2
  ENST ID: ENST00000472992
  CDS Start-End: 1-256
gtctctccccagtgaccccctggagctcgtggtctcagagcccctgagtataagcccttcacccacacctgcggggtccctgggccatctcaagacaagagaggaggctgcttgggcctcggtgggatctgactgtgatgaggctggagtccaccccagatgtgctcctttagagagaagcaccccagctgtgggtgccgctcacactgcccctcctgtgctcacctggaggcctctgtgctcagggcatccctgagaataaggaggggccctgcacctgctccctggacaagtcagcatccctaggccaacacccccaggattacacagtggagaatctcatccgcatgggtgtggctggcttggtcctggtggtcctcgggattctgctatttgaggctcagcacagccagagaagcctacaagatgcagccgggaggtgaacagcagagaggacaatgcatccttcagcgtggtggagcctcagggacagatctgatgatcccaggaggctctggaggacaatctaggacctacattatctggactgtatgctggtcatttctagagacagcaatcaatatttgagtgtaaggaaactgtctggggtgattcctagaagatcattaaactgtggtacattt

SEQ ID NO: 148503 - DNA, 2046 bp, Homo sapiens
  Payload ID: 9411
  Gene Symbol: LILRA2
  Gene Name: leukocyte immunoglobulin-like receptor, subfamily A (with TM domain), member 2
  ENST ID: ENST00000612908
  CDS Start-End: 470-1942
actctgtcactgaggctggaatgctaaggggtgatcatagctccctgcagcctccgcctcccaggccgaagtattcctcccacctcagcctcctgagtagctgggactagagatgtgagctgccatgcctggctaattttttgctttttttatacagacaaggtcttgctatgtggcccagggtaatctgaagctcctggcctctagccttcacccacctcagcctcctgaagtgctgggattccaggcatgagccaccatggtagaccctgcattactcctctgtgctcactgccacacgcagctcaacctgagctacacagccaggtgtcaggtgcgtctctgctgatctgagtctaactgcagcatggacctgggttttccctgaagcatctccagggctggagggacgaccgccatgcactgagggctcatccatccgcagagcagggcagtgggaggagacgccatgacccccatcctcacggtcctgatctgtctcgggctgagtctgggccccaggacccacgtgcaggcagggcacctccccaagcccaccctctgggctgagccaggctctgtgatcatccagggaagtcctgtgaccctcaggtgtcaggggagccttcaggctgaggagtaccatctatatagggaaaacaaatcagcatcctgggttagacggatacaagagcctgggaagaatggccagttccccatcccatccatcacctgggaacacgcagggcggtatcactgtcagtactacagccacaatcactcatcagagtacagtgaccccctggagctggtggtgacaggagcctacagcaaacccaccctctcagctctgcccagccctgtggtgaccttaggagggaacgtgaccctccagtgtgtctcacaggtggcatttgacggcttcattctgtgtaaggaaggagaagatgaacacccacaacgcctgaactcccattcccatgcccgtgggtggtcctgggccatcttctccgtgggccccgtgagcccgagtcgcaggtggtcgtacaggtgctatgcttatgactcgaactctccctatgtgtggtctctacccagtgatctcctggagctcctggtcccaggtgtttctaagaagccatcactctcagtgcagccaggtcctatggtggcccctggggagagcctgaccctccagtgtgtctctgatgtcggctacgacagatttgttctgtataaggagggagaacgtgacttcctccagcgccctggttggcagccccaggctgggctctcccaggccaacttcaccctgggccctgtgagcccctcccacgggggccagtacagatgctacagtgcacacaacctctcctccgagtggtcggcccccagtgaccccctggacatcctgatcacaggacagttctatgacagaccctctctctcggtgcagccggtccccacagtagccccaggaaagaacgtgaccctgctgtgtcagtcacgggggcagttccacactttccttctgaccaaggagggggcaggccatcccccactgcatctgagatcagagcaccaagctcagcagaaccaggctgaattccgcatgggtcctgtgacctcagcccacgtggggacctacagatgctacagctcactcagctccaacccctacctgctgtctctccccagtgaccccctggagctcgtggtctcagagcccctgagtataagcccttcacccacacctgcggggtccctgggccatctcaagacaagagaggaggctgcttgggcctcggtgggatctgactgtgatgaggctggagtccaccccagatgtgctcctttagagagaagcaccccagctgtgggtgccgctcacactgcccctcctgtgctcacctggaggcctctgtgctcagggcatccctgagaataaggaggggccctgcacctgctccctggacaagtcaccctaggccaacacccccaggattacacagtggagaatctcatccgcatgggtgtggctggctt

SEQ ID NO: 148504 - DNA, 1799 bp, Homo sapiens
  Payload ID: 9411
  Gene Symbol: LILRA2
  Gene Name: leukocyte immunoglobulin-like receptor, subfamily A (with TM domain), member 2
  Uniprot ID: Q8N149
  ENST ID: ENST00000611940
  CDS Start-End: 134-1585
gcgtctctgctgatctgagtctaactgcagcatggacctgggttttccctgaagcatctccagggctggagggacgaccgccatgcactgagggctcatccatccgcagagcagggcagtgggaggagacgccatgacccccatcctcacggtcctgatctgtctcgggctgagtctgggccccaggacccacgtgcaggcagggcacctccccaagcccaccctctgggctgagccaggctctgtgatcatccagggaagtcctgtgaccctcaggtgtcaggggagccttcaggctgaggagtaccatctatatagggaaaacaaatcagcatcctgggttagacggatacaagagcctgggaagaatggccagttccccatcccatccatcacctgggaacacgcagggcggtatcactgtcagtactacagccacaatcactcatcagagtacagtgaccccctggagctggtggtgacaggagcctacagcaaacccaccctctcagctctgcccagccctgtggtgaccttaggagggaacgtgaccctccagtgtgtctcacaggtggcatttgacggcttcattctgtgtaaggaaggagaagatgaacacccacaacgcctgaactcccattcccatgcccgtgggtggtcctgggccatcttctccgtgggccccgtgagcccgagtcgcaggtggtcgtacaggtgctatgcttatgactcgaactctccctatgtgtggtctctacccagtgatctcctggagctcctggtcccaggtgtttctaagaagccatcactctcagtgcagccaggtcctatggtggcccccggggagagcctgaccctccagtgtgtctctgatgtcggctacgacagatttgttctgtataaggagggagaacgtgacttcctccagcgccctggttggcagccccaggctgggctctcccaggccaacttcaccctgggccctgtgagcccctcccacgggggccagtacagatgctacagtgcacacaacctctcctccgagtggtcggcccccagtgaccccctggacatcctgatcacaggacagttctatgacagaccctctctctcggtgcagccggtccccacagtagccccaggaaagaacgtgaccctgctgtgtcagtcacgggggcagttccacactttccttctgaccaaggagggggcaggccatcccccactgcatctgagatcagagcaccaagctcagcagaaccaggctgaattccgcatgggtcctgtgacctcagcccacgtggggacctacagatgctacagctcactcagctccaacccctacctgctgtctctccccagtgaccccctggagctcgtggtctcagaagcagctgagaccctcagcccatcacaaaacaagacagactccacgactacatccctaggccaacacccccaggattacacagtggagaatctcatccgcatgggtgtggctggcttggtcctggtggtcctcgggattctgctatttgaggctcagcacagccagagaagcctacaagatgcagccgggaggtgaacagcagagaggacaatgcatccttcagcgtggtggagcctcagggacagatctgatgatcccaggaggctctggaggacaatctaggacctacattatctggactgtatgctggtcatttctagagacagcaatcaatatttgagtgtaaggaaactgtctggggtgattcctagaagatcattaaactgtggtacatttttttgtctatgaa

SEQ ID NO: 148505 - DNA, 2330 bp, Homo sapiens
  Payload ID: 9411
  Gene Symbol: LILRA2
  Gene Name: leukocyte immunoglobulin-like receptor, subfamily A (with TM domain), member 2
  ENST ID: ENST00000612001
  CDS Start-End: 470-1942
actctgtcactgaggctggaatgctaaggggtgatcatagctccctgcagcctccgcctcccaggccgaagtattcctcccacctcagcctcctgagtagctgggactagagatgtgagctgccatgcctggctaattttttgctttttttatacagacaaggtcttgctatgtggcccagggtaatctgaagctcctggcctctagccttcacccacctcagcctcctgaagtgctgggattccaggcatgagccaccatggtagaccctgcattactcctctgtgctcactgccacacgcagctcaacctgagctacacagccaggtgtcaggtgcgtctctgctgatctgagtctaactgcagcatggacctgggttttccctgaagcatctccagggctggagggacgaccgccatgcactgagggctcatccatccgcagagcagggcagtgggaggagacgccatgacccccatcctcacggtcctgatctgtctcgggctgagtctgggccccaggacccacgtgcaggcagggcacctccccaagcccaccctctgggctgagccaggctctgtgatcatccagggaagtcctgtgaccctcaggtgtcaggggagccttcaggctgaggagtaccatctatatagggaaaacaaatcagcatcctgggttagacggatacaagagcctgggaagaatggccagttccccatcccatccatcacctgggaacacgcagggcggtatcactgtcagtactacagccacaatcactcatcagagtacagtgaccccctggagctggtggtgacaggagcctacagcaaacccaccctctcagctctgcccagccctgtggtgaccttaggagggaacgtgaccctccagtgtgtctcacaggtggcatttgacggcttcattctgtgtaaggaaggagaagatgaacacccacaacgcctgaactcccattcccatgcccgtgggtggtcctgggccatcttctccgtgggccccgtgagcccgagtcgcaggtggtcgtacaggtgctatgcttatgactcgaactctccctatgtgtggtctctacccagtgatctcctggagctcctggtcccaggtgtttctaagaagccatcactctcagtgcagccaggtcctatggtggcccctggggagagcctgaccctccagtgtgtctctgatgtcggctacgacagatttgttctgtataaggagggagaacgtgacttcctccagcgccctggttggcagccccaggctgggctctcccaggccaacttcaccctgggccctgtgagcccctcccacgggggccagtacagatgctacagtgcacacaacctctcctccgagtggtcggcccccagtgaccccctggacatcctgatcacaggacagttctatgacagaccctctctctcggtgcagccggtccccacagtagccccaggaaagaacgtgaccctgctgtgtcagtcacgggggcagttccacactttccttctgaccaaggagggggcaggccatcccccactgcatctgagatcagagcaccaagctcagcagaaccaggctgaattccgcatgggtcctgtgacctcagcccacgtggggacctacagatgctacagctcactcagctccaacccctacctgctgtctctccccagtgaccccctggagctcgtggtctcagagcccctgagtataagcccttcacccacacctgcggggtccctgggccatctcaagacaagagaggaggctgcttgggcctcggtgggatctgactgtgatgaggctggagtccaccccagatgtgctcctttagagagaagcaccccagctgtgggtgccgctcacactgcccctcctgtgctcacctggaggcctctgtgctcagggcatccctgagaataaggaggggccctgcacctgctccctggacaagtcagcatccctaggccaacacccccaggattacacagtggagaatctcatccgcatgggtgtggctggcttggtcctggtggtcctcgggattctgctatttgaggctcagcacagccagagaagcctacaagatgcagccgggaggtgaacagcagagaggacaatgcatccttcagcgtggtggagcctcagggacagatctgatgatcccaggaggctctggaggacaatctaggacctacattatctggactgtatgctggtcatttctagagacagcaatcaatatttgagtgtaaggaaactgtctggggtgattcctagaagatcattaaactgtggtacattt

SEQ ID NO: 148506 - DNA, 1702 bp, Homo sapiens
  Payload ID: 9411
  Gene Symbol: LILRA2
  Gene Name: leukocyte immunoglobulin-like receptor, subfamily A (with TM domain), member 2
  Uniprot ID: Q8N149
  ENST ID: ENST00000613573
  CDS Start-End: 88-1488
ccgagtgtccacaccctgtgcgtctctctgtcctgccagcactgagggctcatccatccgcagagcagggcagtgggaggagacgccatgacccccatcctcacggtcctgatctgtctcgggctgagtctgggccccaggacccacgtgcaggcagggcacctccccaagcccaccctctgggctgagccaggctctgtgatcatccagggaagtcctgtgaccctcaggtgtcaggggagccttcaggctgaggagtaccatctatatagggaaaacaaatcagcatcctgggttagacggatacaagagcctgggaagaatggccagttccccatcccatccatcacctgggaacacgcagggcggtatcactgtcagtactacagccacaatcactcatcagagtacagtgaccccctggagctggtggtgacaggagcctacagcaaacccaccctctcagctctgcccagccctgtggtgaccttaggagggaacgtgaccctccagtgtgtctcacaggtggcatttgacggcttcattctgtgtaaggaaggagaagatgaacacccacaacgcctgaactcccattcccatgcccgtgggtggtcctgggccatcttctccgtgggccccgtgagcccgagtcgcaggtggtcgtacaggtgctatgcttatgactcgaactctccctatgtgtggtctctacccagtgatctcctggagctcctggtcccaggtgtttctaagaagccatcactctcagtgcagccaggtcctatggtggcccccggggagagcctgaccctccagtgtgtctctgatgtcggctacgacagatttgttctgtataaggagggagaacgtgacttcctccagcgccctggttggcagccccaggctgggctctcccaggccaacttcaccctgggccctgtgagcccctcccacgggggccagtacagatgctacagtgcacacaacctctcctccgagtggtcggcccccagtgaccccctggacatcctgatcacaggacagttctatgacagaccctctctctcggtgcagccggtccccacagtagccccaggaaagaacgtgaccctgctgtgtcagtcacgggggcagttccacactttccttctgaccaaggagggggcaggccatcccccactgcatctgagatcagagcaccaagctcagcagaaccaggctgaattccgcatgggtcctgtgacctcagcccacgtggggacctacagatgctacagctcactcagctccaacccctacctgctgtctctccccagtgaccccctggagctcgtggtctcagcatccctaggccaacacccccaggattacacagtggagaatctcatccgcatgggtgtggctggcttggtcctggtggtcctcgggattctgctatttgaggctcagcacagccagagaagcctacaagatgcagccgggaggtgaacagcagagaggacaatgcatccttcagcgtggtggagcctcagggacagatctgatgatcccaggaggctctggaggacaatctaggacctacattatctggactgtatgctggtcatttctagagacagcaatcaatatttgagtgtaaggaaactgtctggggtgattcctagaagatcattaaactgtggtacatttttttgtctatgaa

SEQ ID NO: 148507 - DNA, 1452 bp, Homo sapiens
  Payload ID: 9411
  Gene Symbol: LILRA2
  Gene Name: leukocyte immunoglobulin-like receptor, subfamily A (with TM domain), member 2
  ENST ID: ENST00000615591
  CDS Start-End: 39-1403
tcatccatccgcagagcagggcagtgggaggagacgccatgacccccatcctcacggtcctgatctgtctcgggcacctccccaagcccaccctctgggctgagccaggctctgtgatcatccagggaagtcctgtgaccctcaggtgtcaggggagccttcaggctgaggagtaccatctatatagggaaaacaaatcagcatcctgggttagacggatacaagagcctgggaagaatggccagttccccatcccatccatcacctgggaacacgcagggcggtatcactgtcagtactacagccacaatcactcatcagagtacagtgaccccctggagctggtggtgacaggagcctacagcaaacccaccctctcagctctgcccagccctgtggtgaccttaggagggaacgtgaccctccagtgtgtctcacaggtggcatttgacggcttcattctgtgtaaggaaggagaagatgaacacccacaacgcctgaactcccattcccatgcccgtgggtggtcctgggccatcttctccgtgggccccgtgagcccgagtcgcaggtggtcgtacaggtgctatgcttatgactcgaactctccctatgtgtggtctctacccagtgatctcctggagctcctggtcccaggtgtttctaagaagccatcactctcagtgcagccaggtcctatggtggcccctggggagagcctgaccctccagtgtgtctctgatgtcggctacgacagatttgttctgtataaggagggagaacgtgacttcctccagcgccctggttggcagccccaggctgggctctcccaggccaacttcaccctgggccctgtgagcccctcccacgggggccagtacagatgctacagtgcacacaacctctcctccgagtggtcggcccccagtgaccccctggacatcctgatcacaggacagttctatgacagaccctctctctcggtgcagccggtccccacagtagccccaggaaagaacgtgaccctgctgtgtcagtcacgggggcagttccacactttccttctgaccaaggagggggcaggccatcccccactgcatctgagatcagagcaccaagctcagcagaaccaggctgaattccgcatgggtcctgtgacctcagcccacgtggggacctacagatgctacagctcactcagctccaacccctacctgctgtctctccccagtgaccccctggagctcgtggtctcagcatccctaggccaacacccccaggattacacagtggagaatctcatccgcatgggtgtggctggcttggtcctggtggtcctcgggattctgctatttgaggctcagcacagccagagaagcctacaagatgcagccgggaggtgaacagcagagaggacaatgcatccttcagcgtggtggagcctcagggaca

SEQ ID NO: 148508 - DNA, 1571 bp, Homo sapiens
  Payload ID: 9411
  Gene Symbol: LILRA2
  Gene Name: leukocyte immunoglobulin-like receptor, subfamily A (with TM domain), member 2
  ENST ID: ENST00000618818
  CDS Start-End: 590-1571
ggctggaatgctaaggggtgatcatagctccctgcagcctccgcctcccaggccgaagtattcctcccacctcagcctcctgagtagctgggactagagatgtgagctgccatgcctggctaattttttgctttttttatacagacaaggtcttgctatgtggcccagggtaatctgaagctcctggcctctagccttcacccacctcagcctcctgaagtgctgggattccaggcatgagccaccatggtagaccctgcattactcctctgtgctcactgccacacgcagctcaacctgagctacacagccaggtgtcaggtgcgtctctgctgatctgagtctaactgcagcatggacctgggttttccctgaagcatctccagggctggagggacgaccgccatgccctaaaggtatgacagccaggctcctgagagggcagttgcacttcctgtgtggttgcacataacaaaaccccatgacaagaaggatccagcctccgagtgtccacaccctgtgcgtctctctgtcctgccagcactgagggctcatccatccgcagagcagggcagtgggaggagacgccatgacccccatcctcacggtcctgatctgtctcgggctgagtctgggccccaggacccacgtgcaggcagggcacctccccaagcccaccctctgggctgagccaggctctgtgatcatccagggaagtcctgtgaccctcaggtgtcaggggagccttcaggctgaggagtaccatctatatagggaaaacaaatcagcatcctgggttagacggatacaagagcctgggaagaatggccagttccccatcccatccatcacctgggaacacgcagggcggtatcactgtcagtactacagccacaatcactcatcagagtacagtgaccccctggagctggtggtgacaggagcctacagcaaacccaccctctcagctctgcccagccctgtggtgaccttaggagggaacgtgaccctccagtgtgtctcacaggtggcatttgacggcttcattctgtgtaaggaaggagaagatgaacacccacaacgcctgaactcccattcccatgcccgtgggtggtcctgggccatcttctccgtgggccccgtgagcccgagtcgcaggtggtcgtacaggtgctatgcttatgactcgaactctccctatgtgtggtctctacccagtgatctcctggagctcctggtcccaggtgtttctaagaagccatcactctcagtgcagccaggtcctatggtggcccccggggagagcctgaccctccagtgtgtctctgatgtcggctacgacagatttgttctgtataaggagggagaacgtgacttcctccagcgccctggttggcagccccaggctgggctctcccaggccaacttcaccctgggccctgtgagcccctcccacgggggccagtacagatgctacagtgcacacaacctctcctccgagtggtcggcccccagtgaccccctggacatcctgatcacaggacagttctatgacagaccctctctctcgg

SEQ ID NO: 148509 - DNA, 1705 bp, Homo sapiens
  Payload ID: 9411
  Gene Symbol: LILRA2
  Gene Name: leukocyte immunoglobulin-like receptor, subfamily A (with TM domain), member 2
  Uniprot ID: Q8N149
  ENST ID: ENST00000617409
  CDS Start-End: 40-1491
ctcatccatccgcagagcagggcagtgggaggagacgccatgacccccatcctcacggtcctgatctgtctcgggctgagtctgggccccaggacccacgtgcaggcagggcacctccccaagcccaccctctgggctgagccaggctctgtgatcatccagggaagtcctgtgaccctcaggtgtcaggggagccttcaggctgaggagtaccatctatatagggaaaacaaatcagcatcctgggttagacggatacaagagcctgggaagaatggccagttccccatcccatccatcacctgggaacacgcagggcggtatcactgtcagtactacagccacaatcactcatcagagtacagtgaccccctggagctggtggtgacaggagcctacagcaaacccaccctctcagctctgcccagccctgtggtgaccttaggagggaacgtgaccctccagtgtgtctcacaggtggcatttgacggcttcattctgtgtaaggaaggagaagatgaacacccacaacgcctgaactcccattcccatgcccgtgggtggtcctgggccatcttctccgtgggccccgtgagcccgagtcgcaggtggtcgtacaggtgctatgcttatgactcgaactctccctatgtgtggtctctacccagtgatctcctggagctcctggtcccaggtgtttctaagaagccatcactctcagtgcagccaggtcctatggtggcccctggggagagcctgaccctccagtgtgtctctgatgtcggctacgacagatttgttctgtataaggagggagaacgtgacttcctccagcgccctggttggcagccccaggctgggctctcccaggccaacttcaccctgggccctgtgagcccctcccacgggggccagtacagatgctacagtgcacacaacctctcctccgagtggtcggcccccagtgaccccctggacatcctgatcacaggacagttctatgacagaccctctctctcggtgcagccggtccccacagtagccccaggaaagaacgtgaccctgctgtgtcagtcacgggggcagttccacactttccttctgaccaaggagggggcaggccatcccccactgcatctgagatcagagcaccaagctcagcagaaccaggctgaattccgcatgggtcctgtgacctcagcccacgtggggacctacagatgctacagctcactcagctccaacccctacctgctgtctctccccagtgaccccctggagctcgtggtctcagaagcagctgagaccctcagcccatcacaaaacaagacagactccacgactacatccctaggccaacacccccaggattacacagtggagaatctcatccgcatgggtgtggctggcttggtcctggtggtcctcgggattctgctatttgaggctcagcacagccagagaagcctacaagatgcagccgggaggtgaacagcagagaggacaatgcatccttcagcgtggtggagcctcagggacagatctgatgatcccaggaggctctggaggacaatctaggacctacattatctggactgtatgctggtcatttctagagacagcaatcaatatttgagtgtaaggaaactgtctggggtgattcctagaagatcattaaactgtggtacatttttttgtctatgaa

SEQ ID NO: 148510 - DNA, 1452 bp, Homo sapiens
  Payload ID: 9411
  Gene Symbol: LILRA2
  Gene Name: leukocyte immunoglobulin-like receptor, subfamily A (with TM domain), member 2
  ENST ID: ENST00000621611
  CDS Start-End: 39-1403
tcatccatccgcagagcagggcagtgggaggagacgccatgacccccatcctcacggtcctgatctgtctcgggcacctccccaagcccaccctctgggctgagccaggctctgtgatcatccagggaagtcctgtgaccctcaggtgtcaggggagccttcaggctgaggagtaccatctatatagggaaaacaaatcagcatcctgggttagacggatacaagagcctgggaagaatggccagttccccatcccatccatcacctgggaacacgcagggcggtatcactgtcagtactacagccacaatcactcatcagagtacagtgaccccctggagctggtggtgacaggagcctacagcaaacccaccctctcagctctgcccagccctgtggtgaccttaggagggaacgtgaccctccagtgtgtctcacaggtggcatttgacggcttcattctgtgtaaggaaggagaagatgaacacccacaacgcctgaactcccattcccatgcccgtgggtggtcctgggccatcttctccgtgggccccgtgagcccgagtcgcaggtggtcgtacaggtgctatgcttatgactcgaactctccctatgtgtggtctctacccagtgatctcctggagctcctggtcccaggtgtttctaagaagccatcactctcagtgcagccaggtcctatggtggcccccggggagagcctgaccctccagtgtgtctctgatgtcggctacgacagatttgttctgtataaggagggagaacgtgacttcctccagcgccctggttggcagccccaggctgggctctcccaggccaacttcaccctgggccctgtgagcccctcccacgggggccagtacagatgctacagtgcacacaacctctcctccgagtggtcggcccccagtgaccccctggacatcctgatcacaggacagttctatgacagaccctctctctcggtgcagccggtccccacagtagccccaggaaagaacgtgaccctgctgtgtcagtcacgggggcagttccacactttccttctgaccaaggagggggcaggccatcccccactgcatctgagatcagagcaccaagctcagcagaaccaggctgaattccgcatgggtcctgtgacctcagcccacgtggggacctacagatgctacagctcactcagctccaacccctacctgctgtctctccccagtgaccccctggagctcgtggtctcagcatccctaggccaacacccccaggattacacagtggagaatctcatccgcatgggtgtggctggcttggtcctggtggtcctcgggattctgctatttgaggctcagcacagccagagaagcctacaagatgcagccgggaggtgaacagcagagaggacaatgcatccttcagcgtggtggagcctcagggaca

SEQ ID NO: 148511 - DNA, 644 bp, Homo sapiens; identical to SEQ ID NO: 148502
  Payload ID: 9411
  Gene Symbol: LILRA2
  Gene Name: leukocyte immunoglobulin-like receptor, subfamily A (with TM domain), member 2
  ENST ID: ENST00000617156
  CDS Start-End: 1-256

SEQ ID NO: 148512 - DNA, 1725 bp, Homo sapiens
  Payload ID: 9411
  Gene Symbol: LILRA2
  Gene Name: leukocyte immunoglobulin-like receptor, subfamily A (with TM domain), member 2
  Uniprot ID: Q8N149
  ENST ID: ENST00000620279
  CDS Start-End: 124-1524
acataacaaaaccccatgacaagaaggatccagcctccgagtgtccacaccctgtgcgtctctctgtcctgccagcactgagggctcatccatccgcagagcagggcagtgggaggagacgccatgacccccatcctcacggtcctgatctgtctcgggctgagtctgggccccaggacccacgtgcaggcagggcacctccccaagcccaccctctgggctgagccaggctctgtgatcatccagggaagtcctgtgaccctcaggtgtcaggggagccttcaggctgaggagtaccatctatatagggaaaacaaatcagcatcctgggttagacggatacaagagcctgggaagaatggccagttccccatcccatccatcacctgggaacacgcagggcggtatcactgtcagtactacagccacaatcactcatcagagtacagtgaccccctggagctggtggtgacaggagcctacagcaaacccaccctctcagctctgcccagccctgtggtgaccttaggagggaacgtgaccctccagtgtgtctcacaggtggcatttgacggcttcattctgtgtaaggaaggagaagatgaacacccacaacgcctgaactcccattcccatgcccgtgggtggtcctgggccatcttctccgtgggccccgtgagcccgagtcgcaggtggtcgtacaggtgctatgcttatgactcgaactctccctatgtgtggtctctacccagtgatctcctggagctcctggtcccaggtgtttctaagaagccatcactctcagtgcagccaggtcctatggtggcccctggggagagcctgaccctccagtgtgtctctgatgtcggctacgacagatttgttctgtataaggagggagaacgtgacttcctccagcgccctggttggcagccccaggctgggctctcccaggccaacttcaccctgggccctgtgagcccctcccacgggggccagtacagatgctacagtgcacacaacctctcctccgagtggtcggcccccagtgaccccctggacatcctgatcacaggacagttctatgacagaccctctctctcggtgcagccggtccccacagtagccccaggaaagaacgtgaccctgctgtgtcagtcacgggggcagttccacactttccttctgaccaaggagggggcaggccatcccccactgcatctgagatcagagcaccaagctcagcagaaccaggctgaattccgcatgggtcctgtgacctcagcccacgtggggacctacagatgctacagctcactcagctccaacccctacctgctgtctctccccagtgaccccctggagctcgtggtctcagcatccctaggccaacacccccaggattacacagtggagaatctcatccgcatgggtgtggctggcttggtcctggtggtcctcgggattctgctatttgaggctcagcacagccagagaagcctacaagatgcagccgggaggtgaacagcagagaggacaatgcatccttcagcgtggtggagcctcagggacagatctgatgatcccaggaggctctggaggacaatctaggacctacattatctggactgtatgctggtcatttctagagacagcaatcaatatttgagtgtaaggaaactgtctggggtgattcctagaagatcattaaactgtggtacattt

SEQ ID NO: 148513 - DNA, 1753 bp, Homo sapiens
  Payload ID: 9411
  Gene Symbol: LILRA2
  Gene Name: leukocyte immunoglobulin-like receptor, subfamily A (with TM domain), member 2
  Uniprot ID: Q8N149
  ENST ID: ENST00000616629
  CDS Start-End: 90-1541
ctccgagtgtccacaccctgtgcgtctctctgtcctgccagcactgagggctcatccatccgcagagcagggcagtgggaggagacgccatgacccccatcctcacggtcctgatctgtctcgggctgagtctgggccccaggacccacgtgcaggcagggcacctccccaagcccaccctctgggctgagccaggctctgtgatcatccagggaagtcctgtgaccctcaggtgtcaggggagccttcaggctgaggagtaccatctatatagggaaaacaaatcagcatcctgggttagacggatacaagagcctgggaagaatggccagttccccatcccatccatcacctgggaacacgcagggcggtatcactgtcagtactacagccacaatcactcatcagagtacagtgaccccctggagctggtggtgacaggagcctacagcaaacccaccctctcagctctgcccagccctgtggtgaccttaggagggaacgtgaccctccagtgtgtctcacaggtggcatttgacggcttcattctgtgtaaggaaggagaagatgaacacccacaacgcctgaactcccattcccatgcccgtgggtggtcctgggccatcttctccgtgggccccgtgagcccgagtcgcaggtggtcgtacaggtgctatgcttatgactcgaactctccctatgtgtggtctctacccagtgatctcctggagctcctggtcccaggtgtttctaagaagccatcactctcagtgcagccaggtcctatggtggcccccggggagagcctgaccctccagtgtgtctctgatgtcggctacgacagatttgttctgtataaggagggagaacgtgacttcctccagcgccctggttggcagccccaggctgggctctcccaggccaacttcaccctgggccctgtgagcccctcccacgggggccagtacagatgctacagtgcacacaacctctcctccgagtggtcggcccccagtgaccccctggacatcctgatcacaggacagttctatgacagaccctctctctcggtgcagccggtccccacagtagccccaggaaagaacgtgaccctgctgtgtcagtcacgggggcagttccacactttccttctgaccaaggagggggcaggccatcccccactgcatctgagatcagagcaccaagctcagcagaaccaggctgaattccgcatgggtcctgtgacctcagcccacgtggggacctacagatgctacagctcactcagctccaacccctacctgctgtctctccccagtgaccccctggagctcgtggtctcagaagcagctgagaccctcagcccatcacaaaacaagacagactccacgactacatccctaggccaacacccccaggattacacagtggagaatctcatccgcatgggtgtggctggcttggtcctggtggtcctcgggattctgctatttgaggctcagcacagccagagaagcctacaagatgcagccgggaggtgaacagcagagaggacaatgcatccttcagcgtggtggagcctcagggacagatctgatgatcccaggaggctctggaggacaatctaggacctacattatctggactgtatgctggtcatttctagagacagcaatcaatatttgagtgtaaggaaactgtctggggtgattcctagaagatcattaaactgtggtacatttttttgtctatg

SEQ ID NO: 148514 - DNA, 1705 bp, Homo sapiens; identical to SEQ ID NO: 148509
  Payload ID: 9411
  Gene Symbol: LILRA2
  Gene Name: leukocyte immunoglobulin-like receptor, subfamily A (with TM domain), member 2
  Uniprot ID: Q8N149
  ENST ID: ENST00000622640
  CDS Start-End: 40-1491

SEQ ID NO: 148515 - DNA, 1732 bp, Homo sapiens
  Payload ID: 9411
  Gene Symbol: LILRA2
  Gene Name: leukocyte immunoglobulin-like receptor, subfamily A (with TM domain), member 2
  Uniprot ID: Q8N149
  ENST ID: ENST00000621721
  CDS Start-End: 124-1524
acataacaaaaccccatgacaagaaggatccagcctccgagtgtccacaccctgtgcgtctctctgtcctgccagcactgagggctcatccatccgcagagcagggcagtgggaggagacgccatgacccccatcctcacggtcctgatctgtctcgggctgagtctgggccccaggacccacgtgcaggcagggcacctccccaagcccaccctctgggctgagccaggctctgtgatcatccagggaagtcctgtgaccctcaggtgtcaggggagccttcaggctgaggagtaccatctatatagggaaaacaaatcagcatcctgggttagacggatacaagagcctgggaagaatggccagttccccatcccatccatcacctgggaacacgcagggcggtatcactgtcagtactacagccacaatcactcatcagagtacagtgaccccctggagctggtggtgacaggagcctacagcaaacccaccctctcagctctgcccagccctgtggtgaccttaggagggaacgtgaccctccagtgtgtctcacaggtggcatttgacggcttcattctgtgtaaggaaggagaagatgaacacccacaacgcctgaactcccattcccatgcccgtgggtggtcctgggccatcttctccgtgggccccgtgagcccgagtcgcaggtggtcgtacaggtgctatgcttatgactcgaactctccctatgtgtggtctctacccagtgatctcctggagctcctggtcccaggtgtttctaagaagccatcactctcagtgcagccaggtcctatggtggcccctggggagagcctgaccctccagtgtgtctctgatgtcggctacgacagatttgttctgtataaggagggagaacgtgacttcctccagcgccctggttggcagccccaggctgggctctcccaggccaacttcaccctgggccctgtgagcccctcccacgggggccagtacagatgctacagtgcacacaacctctcctccgagtggtcggcccccagtgaccccctggacatcctgatcacaggacagttctatgacagaccctctctctcggtgcagccggtccccacagtagccccaggaaagaacgtgaccctgctgtgtcagtcacgggggcagttccacactttccttctgaccaaggagggggcaggccatcccccactgcatctgagatcagagcaccaagctcagcagaaccaggctgaattccgcatgggtcctgtgacctcagcccacgtggggacctacagatgctacagctcactcagctccaacccctacctgctgtctctccccagtgaccccctggagctcgtggtctcagcatccctaggccaacacccccaggattacacagtggagaatctcatccgcatgggtgtggctggcttggtcctggtggtcctcgggattctgctatttgaggctcagcacagccagagaagcctacaagatgcagccgggaggtgaacagcagagaggacaatgcatccttcagcgtggtggagcctcagggacagatctgatgatcccaggaggctctggaggacaatctaggacctacattatctggactgtatgctggtcatttctagagacagcaatcaatatttgagtgtaaggaaactgtctggggtgattcctagaagatcattaaactgtggtacatttttttgtc

SEQ ID NO: 148516 - DNA, 661 bp, Homo sapiens
  Payload ID: 9411
  Gene Symbol: LILRA2
  Gene Name: leukocyte immunoglobulin-like receptor, subfamily A (with TM domain), member 2
  ENST ID: ENST00000631297
  CDS Start-End: 1-612
atgacccccatcctcacggtcctgatctgtctcgggctgagtctgggccccaggacccacgtgcaggcagggcacctccccaagcccaccctctgggctgagccaggctctgtgatcatccagggaagtcctgtgaccctcaggtgtcaggggagccttcaggctgaggagtaccatctatatagggaaaacaaatcagcatcctgggttagacggatacaagagcctgggaagaatggccagttccccatcccatccatcacctgggaacacgcagggcggtatcactgtcagtactacagccacaatcactcatcagagcaccaagctcagcagaaccaggctgaattccgcatgggtcctgtgacctcagcccacgtggggacctacagatgctacagctcactcagctccaacccctacctgctgtctctccccagtgaccccctggagctcgtggtctcagcatccctaggccaacacccccaggattacacagtggagaatctcatccgcatgggtgtggctggcttggtcctggtggtcctcgggattctgctatttgaggctcagcacagccagagaagcctacaagatgcagccgggaggtgaacagcagagaggacaatgcatccttcagcgtggtggagcctcagggaca

SEQ ID NO: 148517 - DNA, 661 bp, Homo sapiens; identical to SEQ ID NO: 148516
  Payload ID: 9411
  Gene Symbol: LILRA2
  Gene Name: leukocyte immunoglobulin-like receptor, subfamily A (with TM domain), member 2
  ENST ID: ENST00000627076
  CDS Start-End: 1-612

SEQ ID NO: 148518 - DNA, 661 bp, Homo sapiens; identical to SEQ ID NO: 148516
  Payload ID: 9411
  Gene Symbol: LILRA2
  Gene Name: leukocyte immunoglobulin-like receptor, subfamily A (with TM domain), member 2
  ENST ID: ENST00000629481
  CDS Start-End: 1-612

SEQ ID NO: 148519 - DNA, 1452 bp, Homo sapiens; identical to SEQ ID NO: 148507
  Payload ID: 9411
  Gene Symbol: LILRA2
  Gene Name: leukocyte immunoglobulin-like receptor, subfamily A (with TM domain), member 2
  ENST ID: ENST00000628662
  CDS Start-End: 39-1403

SEQ ID NO: 148520 - DNA, 661 bp, Homo sapiens; identical to SEQ ID NO: 148516
  Payload ID: 9411
  Gene Symbol: LILRA2
  Gene Name: leukocyte immunoglobulin-like receptor, subfamily A (with TM domain), member 2
  ENST ID: ENST00000628510
  CDS Start-End: 1-612

SEQ ID NO: 148521 - DNA, 1944 bp, Homo sapiens
  Payload ID: 9412
  Gene Symbol: LILRA4
  Gene Name: leukocyte immunoglobulin-like receptor, subfamily A (with TM domain), member 4
  Uniprot ID: P59901
  ENST ID: ENST00000291759
  CDS Start-End: 58-1557
ctacgggcaccgtggccacacctgcctgcacagccagggccaggaggaggagatgccatgaccctcattctcacaagcctgctcttctttgggctgagcctgggccccaggacccgggtgcaggcagaaaacctactcaaacccatcctgtgggccgagccaggtcccgtgatcacctggcataaccccgtgaccatctggtgtcagggcaccctggaggcccaggggtaccgtctggataaagagggaaactcaatgtcgaggcacatattaaaaacactggagtctgaaaacaaggtcaaactctccatcccatccatgatgtgggaacatgcagggcgatatcactgttactatcagagccctgcaggctggtcagagcccagcgaccccctggagctggtggtgacagcctacagcagacccaccctgtccgcactgccaagccctgtggtgacctcaggagtgaacgtgaccctccggtgtgcctcacggctgggactgggcaggttcactctgattgaggaaggagaccacaggctctcctggaccctgaactcacaccaacacaaccatggaaagttccaggccctgttccccatgggccccctgaccttcagcaacaggggtacattcagatgctacggctatgaaaacaacaccccatacgtgtggtcggaacccagtgaccccctgcagctactggtgtcaggcgtgtctaggaagccctccctcctgaccctgcagggccctgtcgtgacccccggagagaatctgaccctccagtgtggctctgatgtcggctacatcagatacactctgtacaaggagggggccgatggcctcccccagcgccctggccggcagccccaggctgggctctcccaggccaacttcaccctgagccctgtgagccgctcctacgggggccagtacagatgctacggcgcacacaacgtctcctccgagtggtcggcccccagtgaccccctggatatcctgatcgcaggacagatctctgacagaccctccctctcagtgcagccgggccccacggtgacctcaggagagaaggtgaccctgctgtgtcagtcatgggacccgatgttcactttccttctgaccaaggagggggcagcccatcccccgttgcgtctgagatcaatgtacggagctcataagtaccaggctgaattccccatgagtcctgtgacctcagcccacgcggggacctacaggtgctacggctcacgcagctccaacccctacctgctgtctcaccccagtgagcccctggagctcgtggtctcaggagcaactgagaccctcaatccagcacaaaagaagtcagattccaagactgccccacacctccaggattacacagtggagaatctcatccgcatgggtgtggctggcttggtcctgctgttcctcgggattctgttatttgaggctcagcacagccagagaagccccccaaggtgcagccaggaggcaaacagcagaaaggacaatgcacccttcagagtggtggagccttgggaacagatctgatgatctgaggaggttctggaagactggggcagcagttggggaagtgtctgctgagaatatcaaggggaagaagcatgggtcaggtgcaggaagatgtctgggtgtctgtagaagatgcttcctccattaaactgtggtgctttcctcctcattgtcgactctccttgactgccccttccttcgtttttcttccctatgatgtaaggcttcacccctatggtgggtttgggtccgcccctctgtgacctcatgctctgctccactttcaggtaatacacctttctttatttctaactactgcattttctaatgtgtattactgggactatctcttcagctcataacatggaatttgcttttgataattaaatccatgggcaaaaatca

SEQ ID NO: 148522 - DNA, 421 bp, Homo sapiens
  Payload ID: 9412
  Gene Symbol: LILRA4
  Gene Name: leukocyte immunoglobulin-like receptor, subfamily A (with TM domain), member 4
  ENST ID: ENST00000595581
  CDS Start-End: 1-421
tcctccgagtggtcggcccccagtgaccccctggatatcctgatcgcaggacagatctctgacagaccctccctctcagtgcagccgggccccacggtgacctcaggagagaaggtgaccctgctgtgtcagtcatgggacccgatgttcactttccttctgaccaaggagggggcagcccatcccccgttgcgtctgagatcaatgtacggagctcataagtaccaggctgaattccccatgagtcctgtgacctcagcccacgcggggacctacaggtgctacggctcacgcagctccaacccctacctgctgtctcaccccagtgagcccctggagctcgtggtctcaggtgagggcgctgaccctgtccactctgagctcaaaggggttcttggaaatgaaaaaggagagcttccaa

SEQ ID NO: 148523 - DNA, 1707 bp, Homo sapiens
  Payload ID: 9412
  Gene Symbol: LILRA4
  Gene Name: leukocyte immunoglobulin-like receptor, subfamily A (with TM domain), member 4
  Uniprot ID: P59901
  ENST ID: ENST00000613813
  CDS Start-End: 58-1557
ctacgggcaccgtggccacacctgcctgcacagccagggccaggaggaggagatgccatgaccctcattctcacaagcctgctcttctttgggctgagcctgggccccaggacccgggtgcaggcagaaaacctacccaaacccatcctgtgggccgagccaggtcccgtgatcacctggcataaccccgtgaccatctggtgtcagggcaccctggaggcccaggggtaccgtctggataaagagggaaactcaatgtcgaggcacatattaaaaacactggagtctgaaaacaaggtcaaactctccatcccatccatgatgtgggaacatgcagggcgatatcactgttactatcagagccctgcaggctggtcagagcccagcgaccccctggagctggtggtgacagcctacagcagacccaccctgtccgcactgccaagccctgtggtgacctcaggagtgaacgtgaccctccggtgtgcctcacggctgggactgggcaggttcactctgattgaggaaggagaccacaggctctcctggaccctgaactcacaccaacacaaccatggaaagttccaggccctgttccccatgggccccctgaccttcagcaacaggggtacattcagatgctacggctatgaaaacaacaccccatacgtgtggtcggaacccagtgaccccctgcagctactggtgtcaggcgtgtctaggaagccctccctcctgaccctgcagggccctgtcgtgacccccggagagaatctgaccctccagtgtggctctgatgtcggctacatcagatacactctgtacaaggagggggccgatggcctcccccagcgccctggccggcagccccaggctgggctctcccaggccaacttcaccctgagccctgtgagccgctcctacgggggccagtacagatgctacggcgcacacaacgtctcctccgagtggtcggcccccagtgaccccctggacatcctgatcgcaggacagatctctgacagaccctccctctcagtgcagccgggccccacggtgacctcaggagagaaggtgaccctgctgtgtcagtcatgggacccgatgttcactttccttctgaccaaggagggggcagcccatcccccgttgcgtctgagatcaatgtacggagctcataagtaccaggctgaattccccatgagtcctgtgacctcagcccacgcggggacctacaggtgctacggctcacgcagctccaacccctacctgctgtctcaccccagtgagcccctggagctcgtggtctcaggagcaactgagaccctcaatccagcacaaaagaagtcagattccaagactgccccacacctccaggattacacagtggagaatctcatccgcatgggtgtggctggcttggtcctgctgttcctcgggattctgttatttgaggctcagcacagccagagaagccccccaaggtgcagccaggaggcaaacagcagaaaggacaatgcacccttcagagtggtggagccttgggaacagatctgatgatctgaggaggttctggaagactggggcagcagttggggaagtgtctgctgagaatatcaaggggaagaagcatgggtcaggtgcaggaagatgtctgggtgtctgtagaagatgcttcctccattaaactgtggtgctttcctcctc

SEQ ID NO: 148524 - DNA, 1607 bp, Homo sapiens
  Payload ID: 9412
  Gene Symbol: LILRA4
  Gene Name: leukocyte immunoglobulin-like receptor, subfamily A (with TM domain), member 4
  Uniprot ID: P59901
  ENST ID: ENST00000619832
  CDS Start-End: 77-1576
accatgtgtctgtctgtgtctacgggcaccgtggccacacctgcctgcacagccagggccaggaggaggagatgccatgaccctcattctcacaagcctgctcttctttgggctgagcctgggccccaggacccgggtgcaggcagaaaacctacccaaacccatcctgtgggccgagccaggtcccgtgatcacctggcataaccccgtgaccatctggtgtcagggcaccctggaggcccaggggtaccgtctggataaagagggaaactcaatgtcgaggcacatattaaaaacactggagtctgaaaacaaggtcaaactctccatcccatccatgatgtgggaacatgcagggcgatatcactgttactatcagagccctgcaggctggtcagagcccagcgaccccctggagctggtggtgacagcctacagcagacccaccctgtccgcactgccaagccctgtggtgacctcaggagtgaacgtgaccctccggtgtgcctcacggctgggactgggcaggttcactctgattgaggaaggagaccacaggctctcctggaccctgaactcacaccaacacaaccatggaaagttccaggccctgttccccatgggccccctgaccttcagcaacaggggtacattcagatgctacggctatgaaaacaacaccccatacgtgtggtcggaacccagtgaccccctgcagctactggtgtcaggcgtgtctaggaagccctccctcctgaccctgcagggccctgtcgtgacccccggagagaatctgaccctccagtgtggctctgatgtcggctacatcagatacactctgtacaaggagggggccgatggcctcccccagcgccctggccggcagccccaggctgggctctcccaggccaacttcaccctgagccctgtgagccgctcctacgggggccagtacagatgctacggcgcacacaacgtctcctccgagtggtcggcccccagtgaccccctggacatcctgatcgcaggacagatctctgacagaccctccctctcagtgcagccgggccccacggtgacctcaggagagaaggtgaccctgctgtgtcagtcatgggacccgatgttcactttccttctgaccaaggagggggcagcccatcccccgttgcgtctgagatcaatgtacggagctcataagtaccaggctgaattccccatgagtcctgtgacctcagcccacgcggggacctacaggtgctacggctcacgcagctccaacccctacctgctgtctcaccccagtgagcccctggagctcgtggtctcaggagcaactgagaccctcaatccagcacaaaagaagtcagattccaagactgccccacacctccaggattacacagtggagaatctcatccgcatgggtgtggctggcttggtcctgctgttcctcgggattctgttatttgaggctcagcacagccagagaagccccccaaggtgcagccaggaggcaaacagcagaaaggacaatgcacccttcagagtggtggagccttgggaacagatctgatgatctgaggaggttctggaagactggggca

SEQ ID NO: 148525 - DNA, 1647 bp, Homo sapiens
  Payload ID: 9412
  Gene Symbol: LILRA4
  Gene Name: leukocyte immunoglobulin-like receptor, subfamily A (with TM domain), member 4
  ENST ID: ENST00000620539
  CDS Start-End: 58-1260
ctacgggcaccgtggccacacctgcctgcacagccagggccaggaggaggagatgccatgaccctcattctcacaagcctgctcttctttgggctgagcctgggccccaggacccgggtgcaggcagaaaacctacccaaacccatcctgtgggccgagccaggtcccgtgatcacctggcataaccccgtgaccatctggtgtcagggcaccctggaggcccaggggtaccgtctggataaagagggaaactcaatgtcgaggcacatattaaaaacactggagtctgaaaacaaggtcaaactctccatcccatccatgatgtgggaacatgcagggcgatatcactgttactatcagagccctgcaggctggtcagagcccagcgaccccctggagctggtggtgacagcctacagcagacccaccctgtccgcactgccaagccctgtggtgacctcaggagtgaacgtgaccctccggtgtgcctcacggctgggactgggcaggttcactctgattgaggaaggagaccacaggctctcctggaccctgaactcacaccaacacaaccatggaaagttccaggccctgttccccatgggccccctgaccttcagcaacaggggtacattcagatgctacggctatgaaaacaacaccccatacgtgtggtcggaacccagtgaccccctgcagctactggtgtcaggacagatctctgacagaccctccctctcagtgcagccgggccccacggtgacctcaggagagaaggtgaccctgctgtgtcagtcatgggacccgatgttcactttccttctgaccaaggagggggcagcccatcccccgttgcgtctgagatcaatgtacggagctcataagtaccaggctgaattccccatgagtcctgtgacctcagcccacgcggggacctacaggtgctacggctcacgcagctccaacccctacctgctgtctcaccccagtgagcccctggagctcgtggtctcaggagcaactgagaccctcaatccagcacaaaagaagtcagattccaagactgccccacacctccaggattacacagtggagaatctcatccgcatgggtgtggctggcttggtcctgctgttcctcgggattctgttatttgaggctcagcacagccagagaagccccccaaggtgcagccaggaggcaaacagcagaaaggacaatgcacccttcagagtggtggagccttgggaacagatctgatgatctgaggaggttctggaagactggggcagcagttggggaagtgtctgctgagaatatcaaggggaagaagcatgggtcaggtgcaggaagatgtctgggtgtctgtagaagatgcttcctccattaaactgtggtgctttcctcctcattgtcgactctccttgactgccccttccttcgtttttcttccctatgatgtaaggcttcacccctatggtgggtttgggtccgcccctctgtgacctcatgctctgctccactttcaggtaatacacctttctttatttctaactactgcattttctaatgtgtattactgggactatctcttcagctcataacatggaatttgcttttgataattaaatccatgggcaaaaatca

SEQ ID NO: 148526 - DNA, 1588 bp, Homo sapiens
  Payload ID: 9412
  Gene Symbol: LILRA4
  Gene Name: leukocyte immunoglobulin-like receptor, subfamily A (with TM domain), member 4
  Uniprot ID: P59901
  ENST ID: ENST00000616790
  CDS Start-End: 58-1557
ctacgggcaccgtggccacacctgcctgcacagccagggccaggaggaggagatgccatgaccctcattctcacaagcctgctcttctttgggctgagcctgggccccaggacccgggtgcaggcagaaaacctacccaaacccatcctgtgggccgagccaggtcccgtgatcacctggcataaccccgtgaccatctggtgtcagggcaccctggaggcccaggggtaccgtctggataaagagggaaactcaatgtcgaggcacatattaaaaacactggagtctgaaaacaaggtcaaactctccatcccatccatgatgtgggaacatgcagggcgatatcactgttactatcagagccctgcaggctggtcagagcccagcgaccccctggagctggtggtgacagcctacagcagacccaccctgtccgccctgccaagccctgtggtaacctcaggagtgaacgtgaccctccggtgtgcctcacggctgggactgggcaggttcactctgattgaggaaggagaccacaggctctcctggaccctgaactcacaccaacacaaccatggaaagttccaggccctgttccccatgggccccctgaccttcagcaacaggggtacattcagatgctacggctatgaaaacaacaccccatacgtgtggtcggaacccagtgaccccctgcagctactggtgtcaggcgtgtctaggaagccctccctcctgaccctgcagggccctgtcgtgacccccggagagaatctgaccctccagtgtggctctgatgtcggctacatcagatacactctgtacaaggagggggccgatggcctcccccagcgccctggccggcagccccaggctgggctctcccaggccaacttcaccctgagccctgtgagccgctcctacgggggccagtacagatgctacggcgcacacaacgtctcctccgagtggtcggcccccagtgaccccctggacatcctgatcgcaggacagatctctgacagaccctccctctcagtgcagccgggccccacggtgacctcaggagagaaggtgaccctgctgtgtcagtcatgggacccgatgttcactttccttctgaccaaggagggggcagcccatcccccgttgcgtctgagatcaatgtacggagctcataagtaccaggctgaattccccatgagtcctgtgacctcagcccacgcggggacctacaggtgctacggctcacgcagctccaacccctacctgctgtctcaccccagtgagcccctggagctcgtggtctcaggagcaactgagaccctcaatccagcacaaaagaagtcagattccaagactgccccacacctccaggattacacagtggagaatctcatccgcatgggtgtggctggcttggtcctgctgttcctcgggattctgttatttgaggctcagcacagccagagaagccccccaaggtgcagccaggaggcaaacagcagaaaggacaatgcacccttcagagtggtggagccttgggaacagatctgatgatctgaggaggttctggaagactggggca

SEQ ID NO: 148527 - DNA, 1363 bp, Homo sapiens
  Payload ID: 9413
  Gene Symbol: LILRA5
  Gene Name: leukocyte immunoglobulin-like receptor, subfamily A (with TM domain), member 5
  Uniprot ID: A6NI73
  ENST ID: ENST00000432233
  CDS Start-End: 121-1020
atgcagctcagcctgggctacacagccaggtgtcagatgtgtctctgctgatctgagtctgcctgtggcatggacctgcatcttccctgaagcatctccagggctgaaaaatcactgaccatggcaccatggtctcatccatctgcacagctgcagccagtgggaggagacgccgtgagccctgccctcatggttctgctctgcctcgggctgagtctgggccccaggacccacgtgcaggcagggaacctctccaaagccaccctctgggctgagccaggctctgtgatcagccgggggaactctgtgaccatccggtgtcaggggaccctggaggcccaggaataccgtctggttaaagagggaagcccagaaccctgggacacacagaacccactggagcccaagaacaaggccagattctccatcccatccatgacagagcaccatgcagggagataccgctgttactactacagccctgcaggctggtcagagcccagcgaccccctggagctggtggtgacaggattctacaacaaacccaccctctcagccctgcccagtcctgtggtgacctcaggagagaacgtgaccctccagtgtggctcacggctgagattcgacaggttcattctgactgaggaaggagaccacaagctctcctggaccttggactcacagctgacccccagtgggcagttccaggccctgttccctgtgggccctgtgacccccagccacaggtggatgctcagatgctatggctctcgcaggcatatcctgcaggtatggtcagaacccagtgacctcctggagattccggtctcaggagcagctgataacctcagtccgtcacaaaacaagtctgactctgggactgcctcacaccttcaggattacgcagtagagaatctcatccgcatgggcatggccggcttgatcctggtggtccttgggattctgatatttcaggattggcacagccagagaagcccccaagctgcagctggaaggtgaacagaagagagaacaatgcaccattgaatgctggagccttggaagcgaatctgatggtcctaggaggttcgggaagaccatctgaggcctatgccatctggactgtctgctggcaatttctttttttctttcttttcttttctttcttttttttttttttttttttttttgagatggagtcttgctctgtcaccaggctggaatgcagtggcgcaatctgggctcactgcaacctccgcctctcgggttcaagtgattctcctgcctcagcctctggcaatttctagagggaggaatgggtgtttgagtgcagagacactggtctggggtgatccatggagga

SEQ ID NO: 148528 - DNA, 922 bp, Homo sapiens
  Payload ID: 9413
  Gene Symbol: LILRA5
  Gene Name: leukocyte immunoglobulin-like receptor, subfamily A (with TM domain), member 5
  Uniprot ID: A6NI73
  ENST ID: ENST00000621482
  CDS Start-End: 80-877
tctctgctgatctgagtctgcctgtggcatggacctgcatcttccctgaagcatctccagggctgaaaaatcactgaccatggcaccatggtctcatccatctgcacagctgcagccagtgggaggagacgccgtgagccctgccctcatggttctgctctgcctcgggctgagtctgggccccaggacccacgtgcaggcagggaacctctccaaagccaccctctgggctgagccaggctctgtgatcagccgggggaactctgtgaccatccggtgtcaggggaccctggaggcccaggaataccgtctggttaaagagggaagcccagaaccctgggacacacagaacccactggagcccaagaacaaggccagattctccatcccatccatgacagagcaccatgcagggagataccgctgttactactacagccctgcaggctggtcagagcccagcgaccccctggagctggtggtgacaggattctacaacaaacccaccctctcagccctgcccagtcctgtggtgacctcaggagagaacgtgaccctccagtgtggctcacggctgagattcgacaggttcattctgactgaggaaggagaccacaagctctcctggaccttggactcacagctgacccccagtgggcagttccaggccctgttccctgtgggccctgtgacccccagccacaggtggatgctcagatgctatggctctcgcaggcatatcctgcaggtatggtcagaacccagtgacctcctggagattccggtctcaggtgaggaagccacagtcttctctagtacaattcagggaagccagacaggttgtggagagctttacaggcagggcagcccctgctaagaaagacaaaaaggggaaggagaacacagaaatcctagggacaca

SEQ ID NO: 148529 - DNA, 1365 bp, Homo sapiens
  Payload ID: 9413
  Gene Symbol: LILRA5
  Gene Name: leukocyte immunoglobulin-like receptor, subfamily A (with TM domain), member 5
  Uniprot ID: A6NI73
  ENST ID: ENST00000618711
  CDS Start-End: 121-1020
atgcagctcagcctgggctacacagccaggtgtcagatgtgtctctgctgatctgagtctgcctgtggcatggacctgcatcttccctgaagcatctccagggctgaaaaatcactgaccatggcaccatggtctcatccatctgcacagctgcagccagtgggaggagacgccgtgagccctgccctcatggttctgctctgcctcgggctgagtctgggccccaggacccacgtgcaggcagggaacctctccaaagccaccctctgggctgagccaggctctgtgatcagccgggggaactctgtgaccatccggtgtcaggggaccctggaggcccaggaataccgtctggttaaagagggaagcccagaaccctgggacacacagaacccactggagcccaagaacaaggccagattctccatcccatccatgacagagcaccatgcagggagataccgctgttactactacagccctgcaggctggtcagagcccagcgaccccctggagctggtggtgacaggattctacaacaaacccaccctctcagccctgcccagtcctgtggtgacctcaggagagaacgtgaccctccagtgtggctcacggctgagattcgacaggttcattctgactgaggaaggagaccacaagctctcctggaccttggactcacagctgacccccagtgggcagttccaggccctgttccctgtgggccctgtgacccccagccacaggtggatgctcagatgctatggctctcgcaggcatatcctgcaggtatggtcagaacccagtgacctcctggagattccggtctcaggagcagctgataacctcagtccgtcacaaaacaagtctgactctgggactgcctcacaccttcaggattacgcagtagagaatctcatccgcatgggcatggccggcttgatcctggtggtccttgggattctgatatttcaggattggcacagccagagaagcccccaagctgcagctggaaggtgaacagaagagagaacaatgcaccattgaatgctggagccttggaagcgaatctgatggtcctaggaggttcgggaagaccatctgaggcctatgccatctggactgtctgctggcaatttctttttttctttcttttcttttctttcttttttttttttttttttttttttttgagatggagtcttgctctgtcaccaggctggaatgcagtggcgcaatctgggctcactgcaacctccgcctctcgggttcaagtgattctcctgcctcagcctctggcaatttctagagggaggaatgggtgtttgagtgcagagacactggtctggggtgatccatggagga

SEQ ID NO: 148530 - DNA, 1078 bp, Homo sapiens
  Payload ID: 9413
  Gene Symbol: LILRA5
  Gene Name: leukocyte immunoglobulin-like receptor, subfamily A (with TM domain), member 5
  Uniprot ID: A6NI73
  ENST ID: ENST00000615820
  CDS Start-End: 56-919
tggcatggacctgcatcttccctgaagcatctccagggctgaaaaatcactgaccatggcaccatggtctcatccatctgcacagctgcagccagtgggaggagacgccgtgagccctgccctcatggttctgctctgcctcgggaacctctccaaagccaccctctgggctgagccaggctctgtgatcagccgggggaactctgtgaccatccggtgtcaggggaccctggaggcccaggaataccgtctggttaaagagggaagcccagaaccctgggacacacagaacccactggagcccaagaacaaggccagattctccatcccatccatgacagagcaccatgcagggagataccgctgttactactacagccctgcaggctggtcagagcccagcgaccccctggagctggtggtgacaggattctacaacaaacccaccctctcagccctgcccagtcctgtggtgacctcaggagagaacgtgaccctccagtgtggctcacggctgagattcgacaggttcattctgactgaggaaggagaccacaagctctcctggaccttggactcacagctgacccccagtgggcagttccaggccctgttccctgtgggccctgtgacccccagccacaggtggatgctcagatgctatggctctcgcaggcatatcctgcaggtatggtcagaacccagtgacctcctggagattccggtctcaggagcagctgataacctcagtccgtcacaaaacaagtctgactctgggactgcctcacaccttcaggattacgcagtagagaatctcatccgcatgggcatggccggcttgatcctggtggtccttgggattctgatatttcaggattggcacagccagagaagcccccaagctgcagctggaaggtgaacagaagagagaacaatgcaccattgaatgctggagccttggaagcgaatctgatggtcctaggaggttcgggaagaccatctgaggcctatgccatctggactgtctgctggcaatttctttttttctttcttttcttttctttcttttttttttttt

SEQ ID NO: 148531 - DNA, 997 bp, Homo sapiens
  Payload ID: 9413
  Gene Symbol: LILRA5
  Gene Name: leukocyte immunoglobulin-like receptor, subfamily A (with TM domain), member 5
  Uniprot ID: A6NI73
  ENST ID: ENST00000619516
  CDS Start-End: 73-834
tgatctgagtctgcctgtggcatggacctgcatcttccctgaagcatctccagggctgaaaaatcactgaccatggcaccatggtctcatccatctgcacagctgcagccagtgggaggagacgccgtgagccctgccctcatggttctgctctgcctcgggaacctctccaaagccaccctctgggctgagccaggctctgtgatcagccgggggaactctgtgaccatccggtgtcaggggaccctggaggcccaggaataccgtctggttaaagagggaagcccagaaccctgggacacacagaacccactggagcccaagaacaaggccagattctccatcccatccatgacagagcaccatgcagggagataccgctgttactactacagccctgcaggctggtcagagcccagcgaccccctggagctggtggtgacaggattctacaacaaacccaccctctcagccctgcccagtcctgtggtgacctcaggagagaacgtgaccctccagtgtggctcacggctgagattcgacaggttcattctgactgaggaaggagaccacaagctctcctggaccttggactcacagctgacccccagtgggcagttccaggccctgttccctgtgggccctgtgacccccagccacaggtggatgctcagatgctatggctctcgcaggcatatcctgcaggtatggtcagaacccagtgacctcctggagattccggtctcaggtgaggaagccacagtcttctctagtacaattcagggaagccagacaggttgtggagagctttacaggcagggcagcccctgctaagaaagacaaaaaggggaaggagaacacagaaatcctagggacacaaattcagggtgaggaaaacaaagcaagggctgggcacagtggctcacacgtgtaatctcagcactttgggaggccgaggcaggtggatcacctgatgtcaggagttcaagaccagcct

SEQ ID NO: 148532 - DNA, 997 bp, Homo sapiens; identical to SEQ ID NO: 148531
  Payload ID: 9413
  Gene Symbol: LILRA5
  Gene Name: leukocyte immunoglobulin-like receptor, subfamily A (with TM domain), member 5
  Uniprot ID: A6NI73
  ENST ID: ENST00000612266
  CDS Start-End: 73-834

SEQ ID NO: 148533 - DNA, 1365 bp, Homo sapiens; identical to SEQ ID NO: 148529
  Payload ID: 9413
  Gene Symbol: LILRA5
  Gene Name: leukocyte immunoglobulin-like receptor, subfamily A (with TM domain), member 5
  Uniprot ID: A6NI73
  ENST ID: ENST00000620091
  CDS Start-End: 121-1020

SEQ ID NO: 148534 - DNA, 1080 bp, Homo sapiens
  Payload ID: 9413
  Gene Symbol: LILRA5
  Gene Name: leukocyte immunoglobulin-like receptor, subfamily A (with TM domain), member 5
  Uniprot ID: A6NI73
  ENST ID: ENST00000611164
  CDS Start-End: 56-919
tggcatggacctgcatcttccctgaagcatctccagggctgaaaaatcactgaccatggcaccatggtctcatccatctgcacagctgcagccagtgggaggagacgccgtgagccctgccctcatggttctgctctgcctcgggaacctctccaaagccaccctctgggctgagccaggctctgtgatcagccgggggaactctgtgaccatccggtgtcaggggaccctggaggcccaggaataccgtctggttaaagagggaagcccagaaccctgggacacacagaacccactggagcccaagaacaaggccagattctccatcccatccatgacagagcaccatgcagggagataccgctgttactactacagccctgcaggctggtcagagcccagcgaccccctggagctggtggtgacaggattctacaacaaacccaccctctcagccctgcccagtcctgtggtgacctcaggagagaacgtgaccctccagtgtggctcacggctgagattcgacaggttcattctgactgaggaaggagaccacaagctctcctggaccttggactcacagctgacccccagtgggcagttccaggccctgttccctgtgggccctgtgacccccagccacaggtggatgctcagatgctatggctctcgcaggcatatcctgcaggtatggtcagaacccagtgacctcctggagattccggtctcaggagcagctgataacctcagtccgtcacaaaacaagtctgactctgggactgcctcacaccttcaggattacgcagtagagaatctcatccgcatgggcatggccggcttgatcctggtggtccttgggattctgatatttcaggattggcacagccagagaagcccccaagctgcagctggaaggtgaacagaagagagaacaatgcaccattgaatgctggagccttggaagcgaatctgatggtcctaggaggttcgggaagaccatctgaggcctatgccatctggactgtctgctggcaatttctttttttctttcttttcttttctttcttttttttttttttt

SEQ ID NO: 148535 - DNA, 1363 bp, Homo sapiens; identical to SEQ ID NO: 148527
  Payload ID: 9413
  Gene Symbol: LILRA5
  Gene Name: leukocyte immunoglobulin-like receptor, subfamily A (with TM domain), member 5
  Uniprot ID: A6NI73
  ENST ID: ENST00000621042
  CDS Start-End: 121-1020

SEQ ID NO: 148536 - DNA, 922 bp, Homo sapiens; identical to SEQ ID NO: 148528
  Payload ID: 9413
  Gene Symbol: LILRA5
  Gene Name: leukocyte immunoglobulin-like receptor, subfamily A (with TM domain), member 5
  Uniprot ID: A6NI73
  ENST ID: ENST00000620692
  CDS Start-End: 80-877

SEQ ID NO: 148537 - DNA, 1080 bp, Homo sapiens; identical to SEQ ID NO: 148534
  Payload ID: 9413
  Gene Symbol: LILRA5
  Gene Name: leukocyte immunoglobulin-like receptor, subfamily A (with TM domain), member 5
  Uniprot ID: A6NI73
  ENST ID: ENST00000614299
  CDS Start-End: 56-919

SEQ ID NO: 148538 - DNA, 997 bp, Homo sapiens; identical to SEQ ID NO: 148531
  Payload ID: 9413
  Gene Symbol: LILRA5
  Gene Name: leukocyte immunoglobulin-like receptor, subfamily A (with TM domain), member 5
  Uniprot ID: A6NI73
  ENST ID: ENST00000616133
  CDS Start-End: 73-834

SEQ ID NO: 148539 - DNA, 1078 bp, Homo sapiens; identical to SEQ ID NO: 148530
  Payload ID: 9413
  Gene Symbol: LILRA5
  Gene Name: leukocyte immunoglobulin-like receptor, subfamily A (with TM domain), member 5
  Uniprot ID: A6NI73
  ENST ID: ENST00000486742
  CDS Start-End: 56-919

SEQ ID NO: 148540 - DNA, 922 bp, Homo sapiens; identical to SEQ ID NO: 148528
  Payload ID: 9413
  Gene Symbol: LILRA5
  Gene Name: leukocyte immunoglobulin-like receptor, subfamily A (with TM domain), member 5
  Uniprot ID: A6NI73
  ENST ID: ENST00000613559
  CDS Start-End: 80-877

SEQ ID NO: 148541 - DNA, 1363 bp, Homo sapiens; identical to SEQ ID NO: 148527
  Payload ID: 9413
  Gene Symbol: LILRA5
  Gene Name: leukocyte immunoglobulin-like receptor, subfamily A (with TM domain), member 5
  Uniprot ID: A6NI73
  ENST ID: ENST00000612621
  CDS Start-End: 121-1020

SEQ ID NO: 148542 - DNA, 1080 bp, Homo sapiens; identical to SEQ ID NO: 148534
  Payload ID: 9413
  Gene Symbol: LILRA5
  Gene Name: leukocyte immunoglobulin-like receptor, subfamily A (with TM domain), member 5
  Uniprot ID: A6NI73
  ENST ID: ENST00000620898
  CDS Start-End: 56-919

SEQ ID NO: 148543 - DNA, 1395 bp, Homo sapiens
  Payload ID: 9414
  Gene Symbol: LILRA6
  Gene Name: leukocyte immunoglobulin-like receptor, subfamily A (with TM domain), member 6
  ENST ID: ENST00000245621
  CDS Start-End: 1-1395
atgacccccaccctcgcagccctgctctgcctagggctgagtctgggccccaggacccacgtgcaggcagggcccttccccaaacccaccctctgggctgagccaggctctgtgatcagctgggggagccccgtgaccatctggtgtcaggggagcctggaggcccaggagtaccgactggataaagagggaagcccagagccctgggacagaaataacccactggaacccaagaacaaggccagattctccatcccatccataacagagcaccatgcggggagataccgctgccactattacagctctgcaggctggtcagagcccagcgaccccctggagctggtgatgacaggagcctatagcaaacccaccctctcagccctgcccagccctgtggtggcctcaggggggaatatgaccctccaatgtggctcacagaagggatatcaccattttgttctgatgaaggaaggagaacaccagctcccccggaccctggactcacagcagctccacagtggggggttccaggccctgttccctgtgggccccgtgaaccccagccacaggtggaggttcacatgctattactattatatgaacaccccccgggtgtggtcccaccccagtgaccccctggagattctgccctcaggcgtgtctaggaagccctccctcctgaccctgcagggccctgtcctggcccctgggcagagcctgaccctccagtgtggctctgatgtcggctacgacagatttgttctgtataaggagggggaacgtgacttcctccagcgccctggccagcagccccaggctgggctctcccaggccaacttcaccctgggccctgtgagcccctcccacgggggccagtacaggtgctatggtgcacacaacctctcctccgagtggtcggcccccagcgaccccctgaacatcctgatggcaggacagatctatgacaccgtctccctgtcagcacagccgggccccacagtggcctcaggagagaacgtgaccctgctgtgtcagtcatggtggcagtttgacactttccttctgaccaaagaaggggcagcccatcccccactgcgtctgagatcaatgtacggagctcataagtaccaggctgaattccccatgagtcctgtgacctcagcccacgcggggacctacaggtgctacggctcatacagctccaacccccacctgctgtctttccccagtgagcccctggaactcatggtctcagcctcacacgccaaggattacacagtggagaatctcatccgcatgggcatggcaggcttggtcctggtgttcctcgggattctgttatttgaggctcagcacagccagagaaacccccaagatgcagccgggaggtga

SEQ ID NO: 148544 - DNA, 1890 bp, Homo sapiens
  Payload ID: 9414
  Gene Symbol: LILRA6
  Gene Name: leukocyte immunoglobulin-like receptor, subfamily A (with TM domain), member 6
  Uniprot ID: Q6PI73
  ENST ID: ENST00000396365
  CDS Start-End: 41-1486
catccctctgcagagcccggggtcaccaggaggagacgccatgacccccaccctcgcagccctgctctgcctagggctgagtctgggccccaggacccacgtgcaggcagggcccttccccaaacccaccctctgggctgagccaggctctgtgatcagctgggggagccccgtgaccatctggtgtcaggggagcctggaggcccaggagtaccgactggataaagagggaagcccagagccctgggacagaaataacccactggaacccaagaacaaggccagattctccatcccatccataacagagcaccatgcggggagataccgctgccactattacagctctgcaggctggtcagagcccagcgaccccctggagctggtgatgacaggagcctatagcaaacccaccctctcagccctgcccagccctgtggtggcctcaggggggaatatgaccctccaatgtggctcacagaagggatatcaccattttgttctgatgaaggaaggagaacaccagctcccccggaccctggactcacagcagctccacagtggggggttccaggccctgttccctgtgggccccgtgaaccccagccacaggtggaggttcacatgctattactattatatgaacaccccccgggtgtggtcccaccccagtgaccccctggagattctgccctcaggcgtgtctaggaagccctccctcctgaccctgcagggccctgtcctggcccctgggcagagcctgaccctccagtgtggctctgatgtcggctacgacagatttgttctgtataaggagggggaacgtgacttcctccagcgccctggccagcagccccaggctgggctctcccaggccaacttcaccctgggccctgtgagcccctcccacgggggccagtacaggtgctatggtgcacacaacctctcctccgagtggtcggcccccagcgaccccctgaacatcctgatggcaggacagatctatgacaccgtctccctgtcagcacagccgggccccacagtggcctcaggagagaacgtgaccctgctgtgtcagtcatggtggcagtttgacactttccttctgaccaaagaaggggcagcccatcccccactgcgtctgagatcaatgtacggagctcataagtaccaggctgaattccccatgagtcctgtgacctcagcccacgcggggacctacaggtgctacggctcatacagctccaacccccacctgctgtctttccccagtgagcccctggaactcatggtctcaggacactctggaggctccagcctcccacccacagggccgccctccacacctgcctcacacgccaaggattacacagtggagaatctcatccgcatgggcatggcaggcttggtcctggtgttcctcgggattctgttatttgaggctcagcacagccagagaaacccccaagatgcagccgggaggtgaacagcggagaggacaatgcacccttcagcgtggtggagcctcagggacagatctgatgatcccagaaggctctggaggacaatctaggacctccagaggggggtgagatttcaggccacacactgtggaaggtaatcatgtctgatcacaaattttgggtctccaccttacttccaatctatgttgtgaatgcccagttgagacccacggaaaagagctcatgggtgagtgtgaagtgcttctctgtcttaagttcccagagatccttgcctcttggaggccagcaaacactaactcttgaggaattcatgacaatatcatctgattcctccttcccagcttgtatggcagtctcccaccctcatgtgttcaatctgatgatcccaggaggttctggaacaaaa

SEQ ID NO: 148545 - DNA, 2238 bp, Homo sapiens
  Payload ID: 9414
  Gene Symbol: LILRA6
  Gene Name: leukocyte immunoglobulin-like receptor, subfamily A (with TM domain), member 6
  Uniprot ID: Q6PI73
  ENST ID: ENST00000430421
  CDS Start-End: 18-599
caccaggaggagacgccatgacccccaccctcgcagccctgctctgcctagggctgagtctgggccccaggacccacgtgcaggcagggcccttccccaaacccaccctctgggctgagccaggctctgtgatcagctgggggagccccgtgaccatctggtgtcaggggagcctggaggcccaggagtaccgactggataaagagggaagcccagagccctgggacagaaataacccactggaacccaagaacaaggccagattctccatcccatccataacagagcaccatgcggggagataccgctgccactattacagctctgcaggctggtcagagcccagcgaccccctggagctggtgatgacaggagcctatagcaaacccaccctctcagccctgcccagccctgtggtggcctcaggggggaatatgaccctccaatgtggctcacagaagggatatcaccattttgttctgatgaaggaaggagaacaccagctcccccggaccctggactcacagcagctccacagtggggggttccaggccctgttccctgtgggccccgtgaaccccagccacaggcgtgtctaggaagccctccctcctgaccctgcagggccctgtcctggcccctgggcagagcctgaccctccagtgtggctctgatgtcggctacgacagatttgttctgtataaggagggggaacgtgacttcctccagcgccctggccagcagccccaggctgggctctcccaggccaacttcaccctgggccctgtgagcccctcccacgggggccagtacaggtgctatggtgcacacaacctctcctccgagtggtcggcccccagcgaccccctgaacatcctgatggcaggacagatctatgacaccgtctccctgtcagcacagccgggccccacagtggcctcaggagagaacgtgaccctgctgtgtcagtcatggtggcagtttgacactttccttctgaccaaagaaggggcagcccatcccccactgcgtctgagatcaatgtacggagctcataagtaccaggctgaattccccatgagtcctgtgacctcagcccacgcggggacctacaggtgctacggctcatacagctccaacccccacctgctgtctttccccagtgagcccctggaactcatggtctcaggacactctggaggctccagcctcccacccacagggccgccctccacacctgcctcacacgccaaggattacacagtggagaatctcatccgcatgggcatggcaggcttggtcctggtgttcctcgggattctgttatttgaggctcagcacagccagagaaacccccaagatgcagccgggaggtgaacagcggagaggacaatgcacccttcagcgtggtggagcctcagggacagatctgatgatcccagaaggctctggaggacaatctaggacctccagaggggggtgagatttcaggccacacactgtggaagcttgtatggcagtctcccaccctcatgtgttcaatctgatgatcccaggaggttctggaacaaaatctacagcctatgctttctggactatctgtcgatcattcctgaagagagggatcaatgttgagacggggtttcaccatgttgctctggctggtctcgaactcctgacctaaggtgatccaccagcgtcggctttccatagtgctgggattacaggtgtgagccactatgcctggccaacttttataatttctgtgctgggaacattccaaatcttcatttctcactcatgtggaaaatacaataatctgttgctaactatggtcaccctactgagctctcaggccctggaacttactccttctctccacctgtatttctgcacccgtccaccaacctctctccatccctgtcctccacactcccttgccagcctctgttgacaaccattctactctctgccatcacaaggcccacttttgtagcttccgcgtgagtgagaacatgctcctctttctgggcctggcttatttcactgaacataatgtcttccagattcatctgtgttgctgaacatggtacaatttccttctttttatgcctgaatattatttcattgtgtatatagaccacatgttccttatccattcatccattgatggacataggttgattccatatcttggctattgtgaatactgctgcaataaacatggcaatgcagaca

SEQ ID NO: 148546 - DNA, 1217 bp, Homo sapiens
  Payload ID: 9414
  Gene Symbol: LILRA6
  Gene Name: leukocyte immunoglobulin-like receptor, subfamily A (with TM domain), member 6
  ENST ID: ENST00000622510
  CDS Start-End: 45-1193
ggctcatccctctgcagagcgcggggtcaccgggaggagacgccatgacgcccgccctcacagccctgctctgccttgggctgagtctgggccccaggacccgcgtgcaggcagggcccttccccaaacccaccctctgggctgagccaggctctgtgatcagctgggggagccccgtgaccatctggtgtcaggggagcctggaggcccaggagtaccaactggataaagagggaagcccagagcccttggacagaaataacccactggaacccaagaacaaggccagattctccatcccatccatgacacagcaccatgcagggagataccgctgccactattacagctctgcaggctggtcagagcccagcgaccccctggagctggtgatgacaggattctacaacaaacccaccctctcagccctgcccagccctgtggtggcctcaggggggaatatgaccctccgatgtggctcacagaagggatatcaccattttgttctgatgaaggaaggagaacaccagctcccccggaccctggactcacagcagctccacagtggggggttccaggccctgttccctgtgggccccgtgacccccagccacaggtggaggttcacatgctattactattatacaaacaccccccaggtgtggtcccaccccagtgaccccctggagattctgccctcaggacagatctatgacaccgtctccctgtcagcacagccgggccccacagtggcctcaggagagaacgtgaccctgctgtgtcagtcacggggttattttgacactttccttctgaccaaagaaggggcagcccatcccccactgcgtctgagatcaatgtacggagctcataagtaccaggctgaattccccatgagtcctgtgacctcagcccacgcggggacctacaggtgctacggctcacgcagctccaacccccacctgctgtctcaccccagtgagcccctggaactcatggtctcaggacactctggaggctccagcctcccacccacagggccgccctccacacctgcctcacacgccaaggattacacagtggagaatctcatccgcatgggcatggcaggcttggtcctggtgttcctcgggattctgttatttgaggctcagcacagccagagaaacccccaagatgcagccgggaggtgaacagcggagaggacaatgcaccct

SEQ ID NO: 148547 - DNA, 2238 bp, Homo sapiens
  Payload ID: 9414
  Gene Symbol: LILRA6
  Gene Name: leukocyte immunoglobulin-like receptor, subfamily A (with TM domain), member 6
  Uniprot ID: Q6PI73
  ENST ID: ENST00000613333
  CDS Start-End: 18-599
caccggaaggagacgccatgacgcccgccctcacagccctgctctgccttgggctgagtctgggccccaggacccgcgtgcaggcagggcccttccccaaacccaccctctgggctgagccaggctctgtgatcagctgggggagccccgtgaccatctggtgtcaggggagcctggaggcccaggagtaccaactggataaagagggaagcccagagcccttggacagaaataacccactggaacccaagaacaaggccagattctccatcccatccatgacacagcaccatgcagggagataccgctgccactattacagctctgcaggctggtcagagcccagcgaccccctggagctggtgatgacaggattctacaacaaacccaccctctcagccctgcccagccctgtggtggcctcaggggggaatatgaccctccgatgtggctcacagaagggatatcaccattttgttctgatgaaggaaggagaacaccagctcccccggaccctggactcacagcagctccacagtggggggttccaggccctgttccctgtgggccccgtgacccccagccacaggcgtgtctaggaagccctccctcctgaccctgcagggccctgtcctggcccctgggcagagcctgaccctccagtgtggctctgatgtcggctacgacagatttgttctgtataaggagggggaacgtgacttcctccagcgccctggccagcagccccaggctgggctctcccaggccaacttcaccctgggccctgtgagcccctcccacgggggccagtacaggtgctatggtgcacacaacctctcctccgagtggtcggcccccagcgaccccctgaacatcctgatggcaggacagatctatgacaccgtctccctgtcagcacagccgggccccacagtggcctcaggagagaacgtgaccctgctgtgtcagtcacggggttattttgacactttccttctgaccaaagaaggggcagcccatcccccactgcgtctgagatcaatgtacggagctcataagtaccaggctgaattccccatgagtcctgtgacctcagcccacgcggggacctacaggtgctacggctcatacagctccaacccccacctgctgtctttccccagtgagcccctggaactcatggtctcaggacactctggaggctccagcctcccacccacagggccgccctccacacctgcctcacacgccaaggattacacagtggagaatctcatccgcatgggcatggcaggcttggtcctggtgttcctcgggattctgttatttgaggctcagcacagccagagaaacccccaagatgcagccgggaggtgaacagcggagaggacaatgcacccttcagcgtggtggagcctcagggacagatctgatgatcccagaaggctctggaggacaatctaggacctccagaggggggtgagatttcaggccacacactgtggaagcttgtatggcagtctcccaccctcatgtgttcaatctgatgatcccaggaggttctggaacaaaatctacagcctatgctttctggactatctgtcgatcattcctgaagagagggatcaatgttgagacggggtttcaccatgttgctctggctggtctcgaactcctgacctaaggtgatccaccagcgtcggctttccatagtgctgggattacaggtgtgagccactatgcctggccaacttttataatttctgtgctgggaacattccaaatcttcatttctcactcatgtggaaaatacaataatctgttgctaactatggtcaccctactgagctctcaggccctggaacttactccttctctccacctgtatttctgcacccgtccaccaacctctctccatccctgtcctccacactcccttgccagcctctgttgacaaccattctactctctgccatcacaaggcccacttttgtagcttccgcgtgagtgagaacatgctcctctttctgggcctggcttatttcactgaacataatgtcttccagattcatctgtgttgctgaacatggtacaatttccttctttttatgcctgaatattatttcattgtgtatatagaccacatgttccttatccattcatccattgatggacataggttgattccatatcttggctattgtgaatactgctgcaataaacatggcaatgcagaca

SEQ ID NO: 148548 - DNA, 1924 bp, Homo sapiens
  Payload ID: 9414
  Gene Symbol: LILRA6
  Gene Name: leukocyte immunoglobulin-like receptor, subfamily A (with TM domain), member 6
  ENST ID: ENST00000622891
  CDS Start-End: 3-584
ccatgacccccaccctcgcagccctgctctgcctagggctgagtctgggccccaggacccacgtgcaggcagggcccttccccaaacccaccctctgggctgagccaggctctgtgatcagctgggggagccccgtgaccatctggtgtcaggggagcctggaggcccaggagtaccgactggataaagagggaagcccagagccctgggacagaaataacccactggaacccaagaacaaggccagattctccatcccatccataacagagcaccatgcggggagataccgctgccactattacagctctgcaggctggtcagagcccagcgaccccctggagctggtgatgacaggagcctatagcaaacccaccctctcagccctgcccagccctgtggtggcctcaggggggaatatgaccctccaatgtggctcacagaagggatatcaccattttgttctgatgaaggaaggagaacaccagctcccccggaccctggactcacagcagctccacagtggggggttccaggccctgttccctgtgggccccgtgaaccccagccacaggcgtgtctaggaagccctccctcctgaccctgcagggccctgtcctggcccctgggcagagcctgaccctccagtgtggctctgatgtcggctacgacagatttgttctgtataaggagggggaacgtgacttcctccagcgccctggccagcagccccaggctgggctctcccaggccaacttcaccctgggccctgtgagcccctcccacgggggccagtacaggtgctatggtgcacacaacctctcctccgagtggtcggcccccagcgaccccctgaacatcctgatggcaggacagatctatgacaccgtctccctgtcagcacagccgggccccacagtggcctcaggagagaacgtgaccctgctgtgtcagtcatggtggcagtttgacactttccttctgaccaaagaaggggcagcccatcccccactgcgtctgagatcaatgtacggagctcataagtaccaggctgaattccccatgagtcctgtgacctcagcccacgcggggacctacaggtgctacggctcatacagctccaacccccacctgctgtctttccccagtgagcccctggaactcatggtctcaggacactctggaggctccagcctcccacccacagggccgccctccacacctggtctgggaagatacctggaggttttgattggggtctcggtggccttcgtcctgctgctcttcctcctcctcttcctcctcctccgacgtcagcgtcacagcaaacacaggacatctgaccagagaaagactgatttccagcgtcctgcaggggctgcggagacagagcccaaggacaggggcctgctgaggaggtccagcccagctgctgacgtccaggaagaaaacctctagcccacacgatgaagacccccaggcagtgacgtatgccccggtgaaacactccagtcctaggagagaaatggcctctcctccctcctcactgtctggggaattcctggacacaaaggacagacaggtggaagaggacaggcagatggacactgaggctgctgcatctgaagcctcccaggatgtgacctacgcccagctgcacagcttgacccttagacggaaggcaactgagcctcctccatcccaggaaggggaacctccagctgagcccagcatctacgccactctggccatccactagcccggggggtacgcagaccccacactcagcagaaggagactcaggactgctgaaggcacgggagctgcccccagtggacaccagtgaaccccagtcagcctggacccctaacacagaccatgaggagacgctgggaacttgtgggactcacctgactcaaagatg

SEQ ID NO: 148549 - DNA, 2825 bp, Homo sapiens
  Payload ID: 9414
  Gene Symbol: LILRA6
  Gene Name: leukocyte immunoglobulin-like receptor, subfamily A (with TM domain), member 6
  ENST ID: ENST00000611687
  CDS Start-End: 112-2010
atgacaagaaggacccagcctccgagcggccacaccctgtgtgtctctctgtcctgccagcactgagggctcatccctctgcagagcgcggggtcaccgggaggagacgccatgacgcccgccctcacagccctgctctgccttgggctgagtctgggccccaggacccgcgtgcaggcagggcccttccccaaacccaccctctgggctgagccaggctctgtgatcagctgggggagccccgtgaccatctggtgtcaggggagcctggaggcccaggagtaccaactggataaagagggaagcccagagcccttggacagaaataacccactggaacccaagaacaaggccagattctccatcccatccatgacacagcaccatgcagggagataccgctgccactattacagctctgcaggctggtcagagcccagcgaccccctggagctggtgatgacaggattctacaacaaacccaccctctcagccctgcccagccctgtggtggcctcaggggggaatatgaccctccgatgtggctcacagaagggatatcaccattttgttctgatgaaggaaggagaacaccagctcccccggaccctggactcacagcagctccacagtggggggttccaggccctgttccctgtgggccccgtgacccccagccacaggtggaggttcacatgctattactattatacaaacaccccccaggtgtggtcccaccccagtgaccccctggagattctgccctcaggcgtgtctaggaagccctccctcctgaccctgcagggccctgtcctggcccctgggcagagcctgaccctccagtgtggctctgatgtcggctacgacagatttgttctgtataaggagggggaacgtgacttcctccagcgccctggccagcagccccaggctgggctctcccaggccaacttcaccctgggccctgtgagcccctcccacgggggccagtacaggtgctatggtgcacacaacctctcctccgagtggtcggcccccagcgaccccctgaacatcctgatggcaggacagatctatgacaccgtctccctgtcagcacagccgggccccacagtggcctcaggagagaacgtgaccctgctgtgtcagtcacggggttattttgacactttccttctgaccaaagaaggggcagcccatcccccactgcgtctgagatcaatgtacggagctcataagtaccaggctgaattccccatgagtcctgtgacctcagcccacgcggggacctacaggtgctacggctcacgcagctccaacccccacctgctgtctcaccccagtgagcccctggaactcatggtctcaggacactctggaggctccagcctcccacccacagggccgccctccacacctggtctgggaagatacctggaggttttgattggggtctcggtggccttcgtcctgctgctcttcctcctcctcttcctcctcctccgacgtcagcgtcacagcaaacacaggacatctgaccagagaaagactgatttccagcgtcctgcaggggctgcggagacagagcccaaggacaggggcctgctgaggaggtccagcccagctgctgacgtccaggaagaaaacctctatgctgccgtgaaggacacacagtctgaggacagggtggagctggacagtcagcagagcccacacgatgaagacccccaggcagtgacgtatgccccggtgaaacactccagtcctaggagagaaatggcctctcctccctcctcactgtctggggaattcctggacacaaaggacagacaggtggaagaggacaggcagatggacactgaggctgctgcatctgaagcctcccaggatgtgacctacgcccagctgcacagcttgacccttagacggaaggcaactgagcctcctccatcccaggaaggggaacctccagctgagcccagcatctacgccactctggccatccactagcccggggggtacgcagaccccacactcagcagaaggagactcaggactgctgaaggcacgggagctgcccccagtggacaccagtgaaccccagtcagcctggacccctaacacagaccatgaggagacgctgggaacttgtgggactcacctgactcaaagatgactaatatcgtcccattttggaaataaagcaacagacttctcaacaatcaatgagttaataacaaaaaaacaaaaaacaaaaacagacgtaaaggccgggtgtggtactcaggaggctgagtggggaggattccttgaacacaagaagttaaggctgctgaggctgcagtgagctatgactgtgccactgcactccagcctgtgtgacagagcgagaccttgtctctaaaaaaaaaaacagtgaatgttttaaactgaatgataatgtaaatattatacatcgaacttatgacatgggaaaattaagaagcataaataggccgggcgcggtggctcacgcctataatctcagcactttgggaggctgatgcgggcggatcatgaggtcaggagatcgagaccatcctggctaacacggtgaaaccccgtctctactaaaaatacaaaaaaattagccgggcgtggtggcgagtgcctatagtcccagctactcaggaggctgaggcaggagaatggcatgagcccgggaggcagagcttgcagtgagctgagatcgcaccactgcactccagcctgggcgacagagtgagattccgtctcgaaaaaaaaaaaaaaagaaagaaaaaaaataaaaaagaagcataaccagg

SEQ ID NO: 148550 - DNA, 1636 bp, Homo sapiens
  Payload ID: 9414
  Gene Symbol: LILRA6
  Gene Name: leukocyte immunoglobulin-like receptor, subfamily A (with TM domain), member 6
  ENST ID: ENST00000621072
  CDS Start-End: 18-599
caccgggaggagacgccatgacgcccgccctcacagccctgctctgccttgggctgagtctgggccccaggacccgcgtgcaggcagggcccttccccaaacccaccctctgggctgagccaggctctgtgatcagctgggggagccccgtgaccatctggtgtcaggggagcctggaggcccaggagtaccaactggataaagagggaagcccagagccctgggacagaaataacccactggaacccaagaacaaggccagattctccatcccatccatgacacagcaccatgcagggagataccgctgccactattacagctctgcaggctggtcagagcccagcgaccccctggagctggtgatgacaggattctacaacaaacccaccctctcagccctgcccagccctgtggtggcctcaggggggaatatgaccctccgatgtggctcacagaagggatatcaccattttgttctgatgaaggaaggagaacaccagctcccccggaccctggactcacagcagctccacagtggggggttccaggccctgttccctgtgggccccgtgacccccagccacaggcgtgtctaggaagccctccctcctgaccctgcagggccctgtcctggcccctgggcagagcctgaccctccagtgtggctctgatgtcggctacgacagatttgttctgtataaggagggggaacgtgacttcctccagcgccctggccagcagccccaggctgggctctcccaggccaacttcaccctgggccctgtgagcccctcccacgggggccagtacaggtgctatggtgcacacaacctctcctccgagtggtcggcccccagcgaccccctgaacatcctgatggcaggacagatctatgacaccgtctccctgtcagcacagccgggccccacagtggcctcaggagagaacgtgaccctgctgtgtcagtcacggggttattttgacactttccttctgaccaaagaaggggcagcccatcccccactgcgtctgagatcaatgtacggagctcataagtaccaggctgaattccccatgagtcctgtgacctcagcccacgcggggacctacaggtgctacggctcacgcagctccaacccccacctgctgtctcaccccagtgagcccctggagctcatggtctcaggaccctctggaggctccagcctcccacccacagggccgccctccacacctgcctcacacgccaaggattacacagtggagaatctcatccgcatgggcatggcaggcttggtcctggtgttcctcgggattctgttatttgaggctcagcacagccagagaaacccccaagatgcagccgggaggtgaacagcggagaggacaatgcacccttcagcgtggtggagcctcagggacagatctgatgatcccagaaggctctggaggacaatctaggacctccagaggggggtgagatttcaggccacacactgtggaagcttgtatggcagtctcccaccctcatgtgttcaatctgatgatcccaggaggttctggaacaaaatctacagcctatgctttctggactatctgtcgatcattcctgaagagagggatcaatgttgag

SEQ ID NO: 148551 - DNA, 1247 bp, Homo sapiens
  Payload ID: 9414
  Gene Symbol: LILRA6
  Gene Name: leukocyte immunoglobulin-like receptor, subfamily A (with TM domain), member 6
  Uniprot ID: Q6PI73
  ENST ID: ENST00000616720
  CDS Start-End: 3-584
ccatgacgcccgccctcacagccctgctctgccttgggctgagtctgggccccaggacccgcgtgcaggcagggcccttccccaaacccaccctctgggctgagccaggctctgtgatcagctgggggagccccgtgaccatctggtgtcaggggagcctggaggcccaggagtaccaactggataaagagggaagcccagagcccttggacagaaataacccactggaacccaagaacaaggccagattctccatcccatccatgacacagcaccatgcagggagataccgctgccactattacagctctgcaggctggtcagagcccagcgaccccctggagctggtgatgacaggattctacaacaaacccaccctctcagccctgcccagccctgtggtggcctcaggggggaatatgaccctccgatgtggctcacagaagggatatcaccattttgttctgatgaaggaaggagaacaccagctcccccggaccctggactcacagcagctccacagtggggggttccaggccctgttccctgtgggccccgtgacccccagccacaggcgtgtctaggaagccctccctcctgaccctgcagggccctgtcctggcccctgggcagagcctgaccctccagtgtggctctgatgtcggctacgacagatttgttctgtataaggagggggaacgtgacttcctccagcgccctggccagcagccccaggctgggctctcccaggccaacttcaccctgggccctgtgagcccctcccacgggggccagtacaggtgctatggtgcacacaacctctcctccgagtggtcggcccccagcgaccccctgaacatcctgatggcaggacagatctatgacaccgtctccctgtcagcacagccgggccccacagtggcctcaggagagaacgtgaccctgctgtgtcagtcacggggttattttgacactttccttctgaccaaagaaggggcagcccatcccccactgcgtctgagatcaatgtacggagctcataagtaccaggctgaattccccatgagtcctgtgacctcagcccacgcggggacctacaggtgctacggctcatacagctccaacccccacctgctgtctttccccagtgagcccctggaactcatggtctcaggacactctggaggctccagcctcccacccacagggccgccctccacacctggtgagtcactgaggcctcgtgg

SEQ ID NO: 148552 - DNA, 1653 bp, Homo sapiens
  Payload ID: 9414
  Gene Symbol: LILRA6
  Gene Name: leukocyte immunoglobulin-like receptor, subfamily A (with TM domain), member 6
  ENST ID: ENST00000621815
  CDS Start-End: 32-1570
gcagagcgcggggtcaccgggaggagacgccatgacgcccgccctcacagccctgctctgccttgggctgagtctgggccccaggacccgcgtgcaggcagggcccttccccaaacccaccctctgggctgagccaggctctgtgatcagctgggggagccccgtgaccatctggtgtcaggggagcctggaggcccaggagtaccaactggataaagagggaagcccagagcccttggacagaaataacccactggaacccaagaacaaggccagattctccatcccatccatgacacagcaccatgcagggagataccgctgccactattacagctctgcaggctggtcagagcccagcgaccccctggagctggtgatgacaggattctacaacaaacccaccctctcagccctgcccagccctgtggtggcctcaggggggaatatgaccctccgatgtggctcacagaagggatatcaccattttgttctgatgaaggaaggagaacaccagctcccccggaccctggactcacagcagctccacagtggggggttccaggccctgttccctgtgggccccgtgacccccagccacaggtggaggttcacatgctattactattatacaaacaccccccaggtgtggtcccaccccagtgaccccctggagattctgccctcaggcgtgtctaggaagccctccctcctgaccctgcagggccctgtcctggcccctgggcagagcctgaccctccagtgtggctctgatgtcggctacgacagatttgttctgtataaggagggggaacgtgacttcctccagcgccctggccagcagccccaggctgggctctcccaggccaacttcaccctgggccctgtgagcccctcccacgggggccagtacaggtgctatggtgcacacaacctctcctccgagtggtcggcccccagcgaccccctgaacatcctgatggcaggacagatctatgacaccgtctccctgtcagcacagccgggccccacagtggcctcaggagagaacgtgaccctgctgtgtcagtcacggggttattttgacactttccttctgaccaaagaaggggcagcccatcccccactgcgtctgagatcaatgtacggagctcataagtaccaggctgaattccccatgagtcctgtgacctcagcccacgcggggacctacaggtgctacggctcacgcagctccaacccccacctgctgtctcaccccagtgagcccctggaactcatggtctcaggacactctggaggctccagcctcccacccacagggccgccctccacacctggtgagtcactgaggcctcttggggagcgcggcctcccccagggcagtctgagtctcccaaaggatcccactcccctcccctcaaggacgggcttgtgtcccaggggctctgaggctgggctggtgaagagtggggggcaaggcagagagagatgttggggcccagccaggaggaggagccgggctgatgtggggagcaaggtagccccaggcttcacctccctgtcctgacccaggaggtcctgaggaccagccccttaaccccccagggtcaggccctcagaatggtgagtgaggggctctgagtgggagat

SEQ ID NO: 148553 - DNA, 1924 bp, Homo sapiens
  Payload ID: 9414
  Gene Symbol: LILRA6
  Gene Name: leukocyte immunoglobulin-like receptor, subfamily A (with TM domain), member 6
  Uniprot ID: Q6PI73
  ENST ID: ENST00000616252
  CDS Start-End: 3-584
ccatgacgcccgccctcacagccctgctctgccttgggctgagtctgggccccaggacccgcgtgcaggcagggcccttccccaaacccaccctctgggctgagccaggctctgtgatcagctgggggagccccgtgaccatctggtgtcaggggagcctggaggcccaggagtaccaactggataaagagggaagcccagagcccttggacagaaataacccactggaacccaagaacaaggccagattctccatcccatccatgacacagcaccatgcagggagataccgctgccactattacagctctgcaggctggtcagagcccagcgaccccctggagctggtgatgacaggattctacaacaaacccaccctctcagccctgcccagccctgtggtggcctcaggggggaatatgaccctccgatgtggctcacagaagggatatcaccattttgttctgatgaaggaaggagaacaccagctcccccggaccctggactcacagcagctccacagtggggggttccaggccctgttccctgtgggccccgtgacccccagccacaggcgtgtctaggaagccctccctcctgaccctgcagggccctgtcctggcccctgggcagagcctgaccctccagtgtggctctgatgtcggctacgacagatttgttctgtataaggagggggaacgtgacttcctccagcgccctggccagcagccccaggctgggctctcccaggccaacttcaccctgggccctgtgagcccctcccacgggggccagtacaggtgctatggtgcacacaacctctcctccgagtggtcggcccccagcgaccccctgaacatcctgatggcaggacagatctatgacaccgtctccctgtcagcacagccgggccccacagtggcctcaggagagaacgtgaccctgctgtgtcagtcacggggttattttgacactttccttctgaccaaagaaggggcagcccatcccccactgcgtctgagatcaatgtacggagctcataagtaccaggctgaattccccatgagtcctgtgacctcagcccacgcggggacctacaggtgctacggctcacgcagctccaacccccacctgctgtctcaccccagtgagcccctggaactcatggtctcaggacactctggaggctccagcctcccacccacagggccgccctccacacctggtctgggaagatacctggaggttttgattggggtctcggtggccttcgtcctgctgctcttcctcctcctcttcctcctcctccgacgtcagcgtcacagcaaacacaggacatctgaccagagaaagactgatttccagcgtcctgcaggggctgcggagacagagcccaaggacaggggcctgctgaggaggtccagcccagctgctgacgtccaggaagaaaacctctagcccacacgatgaagacccccaggcagtgacgtatgccccggtgaaacactccagtcctaggagagaaatggcctctcctccctcctcactgtctggggaattcctggacacaaaggacagacaggtggaagaggacaggcagatggacactgaggctgctgcatctgaagcctcccaggatgtgacctacgcccagctgcacagcttgacccttagacggaaggcaactgagcctcctccatcccaggaaggggaacctccagctgagcccagcatctacgccactctggccatccactagcccggggggtacgcagaccccacactcagcagaaggagactcaggactgctgaaggcacgggagctgcccccagtggacaccagtgaaccccagtcagcctggacccctaacacagaccatgaggagacgctgggaacttgtgggactcacctgactcaaagatg

SEQ ID NO: 148554 - DNA, 1619 bp, Homo sapiens
  Payload ID: 9414
  Gene Symbol: LILRA6
  Gene Name: leukocyte immunoglobulin-like receptor, subfamily A (with TM domain), member 6
  ENST ID: ENST00000620938
  CDS Start-End: 32-1546
gcagagcgcggggtcaccggaaggagacgccatgacgcccgccctcacagccctgctctgccttgggctgagtctgggccccaggacccgcgtgcaggcagggcccttccccaaacccaccctctgggctgagccaggctctgtgatcagctgggggagccccgtgaccatctggtgtcaggggagcctggaggcccaggagtaccaactggataaagagggaagcccagagcccttggacagaaataacccactggaacccaagaacaaggccagattctccatcccatccatgacacagcaccatgcagggagataccgctgccactattacagctctgcaggctggtcagagcccagcgaccccctggagctggtgatgacaggattctacaacaaacccaccctctcagccctgcccagccctgtggtggcctcaggggggaatatgaccctccgatgtggctcacagaagggatatcaccattttgttctgatgaaggaaggagaacaccagctcccccggaccctggactcacagcagctccacagtggggggttccaggccctgttccctgtgggccccgtgacccccagccacaggtggaggttcacatgctattactattatacaaacaccccccgggtgtggtcccaccccagtgaccccctggagattctgccctcaggcgtgtctaggaagccctccctcctgaccctgcagggccctgtcctggcccctgggcagagcctgaccctccagtgtggctctgatgtcggctacgacagatttgttctgtataaggagggggaacgtgacttcctccagcgccctggccagcagccccaggctgggctctcccaggccaacttcaccctgggccctgtgagcccctcccacgggggccagtacaggtgctatggtgcacacaacctctcctccgagtggtcggcccccagcgaccccctgaacatcctgatggcaggacagatctatgacaccgtctccctgtcagcacagccgggccccacagtggcctcaggagagaacgtgaccctgctgtgtcagtcacggggttattttgacactttccttctgaccaaagaaggggcagcccatcccccactgcgtctgagatcaatgtacggagctcataagtaccaggctgaattccccatgagtcctgtgacctcagcccacgcggggacctacaggtgctacggctcatacagctccaacccccacctgctgtctttccccagtgagcccctggaactcatggtctcaggacactctggaggctccagcctcccacccacagggccgccctccacacctggtgagtcactgaggcctcgtggggagcgcggcctcccccagggcagtctgagtctcccaaaggatcccactcccctcccctcaaggacgggcttgtgtcccaggggctctgaggctgggctggtgaagagtggggggttcaaggcagagagagatgttggggcccagccaggaggaggagccgggctgatgtggggagcaaggtagccccaggcttcacctccctgtcctgacccaggaggtcctgaggaccagcccctcaaccccccagggtcaggcc

SEQ ID NO: 148555 - DNA, 2825 bp, Homo sapiens
  Payload ID: 9414
  Gene Symbol: LILRA6
  Gene Name: leukocyte immunoglobulin-like receptor, subfamily A (with TM domain), member 6
  ENST ID: ENST00000617251
  CDS Start-End: 112-2010
atgacaagaaggacccagcctccgagcggccacaccctgtgtgtctctctgtcctgccagcactgagggctcatccctctgcagagcgcggggtcaccggaaggagacgccatgacgcccgccctcacagccctgctctgccttgggctgagtctgggccccaggacccgcgtgcaggcagggcccttccccaaacccaccctctgggctgagccaggctctgtgatcagctgggggagccccgtgaccatctggtgtcaggggagcctggaggcccaggagtaccaactggataaagagggaagcccagagcccttggacagaaataacccactggaacccaagaacaaggccagattctccatcccatccatgacacagcaccatgcagggagataccgctgccactattacagctctgcaggctggtcagagcccagcgaccccctggagctggtgatgacaggattctacaacaaacccaccctctcagccctgcccagccctgtggtggcctcaggggggaatatgaccctccgatgtggctcacagaagggatatcaccattttgttctgatgaaggaaggagaacaccagctcccccggaccctggactcacagcagctccacagtggggggttccaggccctgttccctgtgggccccgtgacccccagccacaggtggaggttcacatgctattactattatacaaacaccccccgggtgtggtcccaccccagtgaccccctggagattctgccctcaggcgtgtctaggaagccctccctcctgaccctgcagggccctgtcctggcccctgggcagagcctgaccctccagtgtggctctgatgtcggctacgacagatttgttctgtataaggagggggaacgtgacttcctccagcgccctggccagcagccccaggctgggctctcccaggccaacttcaccctgggccctgtgagcccctcccacgggggccagtacaggtgctatggtgcacacaacctctcctccgagtggtcggcccccagcgaccccctgaacatcctgatggcaggacagatctatgacaccgtctccctgtcagcacagccgggccccacagtggcctcaggagagaacgtgaccctgctgtgtcagtcacggggttattttgacactttccttctgaccaaagaaggggcagcccatcccccactgcgtctgagatcaatgtacggagctcataagtaccaggctgaattccccatgagtcctgtgacctcagcccacgcggggacctacaggtgctacggctcatacagctccaacccccacctgctgtctttccccagtgagcccctggaactcatggtctcaggacactctggaggctccagcctcccacccacagggccgccctccacacctggtctgggaagatacctggaggttttgattggggtctcggtggccttcgtcctgctgctcttcctcctcctcttcctcctcctccgacgtcagcgtcacagcaaacacaggacatctgaccagagaaagactgatttccagcgtcctgcaggggctgcggagacagagcccaaggacaggggcctgctgaggaggtccagcccagctgctgacgtccaggaagaaaacctctatgctgccgtgaaggacacacagtctgaggacagggtggagctggacagtcagcagagcccacacgatgaagacccccaggcagtgacgtatgccccggtgaaacactccagtcctaggagagaaatggcctctcctccctcctcactgtctggggaattcctggacacaaaggacagacaggtggaagaggacaggcagatggacactgaggctgctgcatctgaagcctcccaggatgtgacctacgcccagctgcacagcttgacccttagacggaaggcaactgagcctcctccatcccaggaaggggaacctccagctgagcccagcatctacgccactctggccatccactagcccggggggtacgcagaccccacactcagcagaaggagactcaggactgctgaaggcacgggagctgcccccagtggacaccagtgaaccccagtcagcctggacccctaacacagaccatgaggagacgctgggaacttgtgggactcacctgactcaaagatgactaatatcgtcccattttggaaataaagcaacagacttctcaacaatcaatgagttaataacaaaaaaacaaaaaacaaaaacagacgtaaaggccgggtgtggtactcaggaggctgagtggggaggattccttgaacacaagaagttaaggctgctgaggctgcagtgagctatgactgtgccactgcactccagcctgtgtgacagagcgagaccttgtctctaaaaaaaaaaacagtgaatgttttaaactgaatgataatgtaaatattatacatcgaacttatgacatgggaaaattaagaagcataaataggccgggcgcggtggctcacgcctataatctcagcactttgggaggctgatgcgggcggatcatgaggtcaggagatcgagaccatcctggctaacacggtgaaaccccgtctctactaaaaatacaaaaaaattagccgggcgtggtggcgagtgcctatagtcccagctactcaggaggctgaggcaggagaatggcatgagcccgggaggcagagcttgcagtgagctgagatcgcaccactgcactccagcctgggcgacagagtgagattccgtctcgaaaaaaaaaaaaaaagaaagaaaaaaaataaaaaagaagcataaccagg

SEQ ID NO: 148556 - DNA, 1217 bp, Homo sapiens
  Payload ID: 9414
  Gene Symbol: LILRA6
  Gene Name: leukocyte immunoglobulin-like receptor, subfamily A (with TM domain), member 6
  ENST ID: ENST00000613255
  CDS Start-End: 45-1193
ggctcatccctctgcagagcgccgggtcaccgggaggagacgccatgacgcccgccctcacagccctgctctgccttgggctgagtctgggccccaggacccgcgtgcaggcagggcccttccccaaacccaccctctgggctgagccaggctctgtgatcagctgggggagccccgtgaccatctggtgtcaggggagcctggaggcccaggagtaccaactggataaagagggaagcccagagccctgggacagaaataacccactggaacccaagaacaaggccagattctccatcccatccatgacacagcaccatgcagggagataccgctgccactattacagctctgcaggctggtcagagcccagcgaccccctggagctggtgatgacaggattctacaacaaacccaccctctcagccctgcccagccctgtggtggcctcaggggggaatatgaccctccgatgtggctcacagaagggatatcaccattttgttctgatgaaggaaggagaacaccagctcccccggaccctggactcacagcagctccacagtggggggttccaggccctgttccctgtgggccccgtgacccccagccacaggtggaggttcacatgctattactattatacaaacaccccctgggtgtggtcccaccccagtgaccccctggagattctgccctcaggacagatctatgacaccgtctccctgtcagcacagccgggccccacagtggcctcaggagagaacgtgaccctgctgtgtcagtcacggggttattttgacactttccttctgaccaaagaaggggcagcccatcccccactgcgtctgagatcaatgtacggagctcataagtaccaggctgaattccccatgagtcctgtgacctcagcccacgcggggacctacaggtgctacggctcacgcagctccaacccccacctgctgtctcaccccagtgagcccctggagctcatggtctcaggaccctctggaggctccagcctcccacccacagggccgccctccacacctgcctcacacgccaaggattacacagtggagaatctcatccgcatgggcatggcaggcttggtcctggtgttcctcgggattctgttatttgaggctcagcacagccagagaaacccccaagatgcagccgggaggtgaacagcggagaggacaatgcaccct

SEQ ID NO: 148557 - DNA, 1890 bp, Homo sapiens
  Payload ID: 9414
  Gene Symbol: LILRA6
  Gene Name: leukocyte immunoglobulin-like receptor, subfamily A (with TM domain), member 6
  Uniprot ID: Q6PI73
  ENST ID: ENST00000621570
  CDS Start-End: 41-1486
catccctctgcagagcgcggggtcaccggaaggagacgccatgacgcccgccctcacagccctgctctgccttgggctgagtctgggccccaggacccgcgtgcaggcagggcccttccccaaacccaccctctgggctgagccaggctctgtgatcagctgggggagccccgtgaccatctggtgtcaggggagcctggaggcccaggagtaccaactggataaagagggaagcccagagcccttggacagaaataacccactggaacccaagaacaaggccagattctccatcccatccatgacacagcaccatgcagggagataccgctgccactattacagctctgcaggctggtcagagcccagcgaccccctggagctggtgatgacaggattctacaacaaacccaccctctcagccctgcccagccctgtggtggcctcaggggggaatatgaccctccgatgtggctcacagaagggatatcaccattttgttctgatgaaggaaggagaacaccagctcccccggaccctggactcacagcagctccacagtggggggttccaggccctgttccctgtgggccccgtgacccccagccacaggtggaggttcacatgctattactattatacaaacaccccccgggtgtggtcccaccccagtgaccccctggagattctgccctcaggcgtgtctaggaagccctccctcctgaccctgcagggccctgtcctggcccctgggcagagcctgaccctccagtgtggctctgatgtcggctacgacagatttgttctgtataaggagggggaacgtgacttcctccagcgccctggccagcagccccaggctgggctctcccaggccaacttcaccctgggccctgtgagcccctcccacgggggccagtacaggtgctatggtgcacacaacctctcctccgagtggtcggcccccagcgaccccctgaacatcctgatggcaggacagatctatgacaccgtctccctgtcagcacagccgggccccacagtggcctcaggagagaacgtgaccctgctgtgtcagtcacggggttattttgacactttccttctgaccaaagaaggggcagcccatcccccactgcgtctgagatcaatgtacggagctcataagtaccaggctgaattccccatgagtcctgtgacctcagcccacgcggggacctacaggtgctacggctcatacagctccaacccccacctgctgtctttccccagtgagcccctggaactcatggtctcaggacactctggaggctccagcctcccacccacagggccgccctccacacctgcctcacacgccaaggattacacagtggagaatctcatccgcatgggcatggcaggcttggtcctggtgttcctcgggattctgttatttgaggctcagcacagccagagaaacccccaagatgcagccgggaggtgaacagcggagaggacaatgcacccttcagcgtggtggagcctcagggacagatctgatgatcccagaaggctctggaggacaatctaggacctccagaggggggtgagatttcaggccacacactgtggaaggtaatcatgtctgatcacaaattttgggtctccaccttacttccaatctatgttgtgaatgcccagttgagacccacggaaaagagctcatgggtgagtgtgaagtgcttctctgtcttaagttcccagagatccttgcctcttggaggccagcaaacactaactcttgaggaattcatgacaatatcatctgattcctccttcccagcttgtatggcagtctcccaccctcatgtgttcaatctgatgatcccaggaggttctggaacaaaa

SEQ ID NO: 148558 - DNA, 1260 bp, Homo sapiens
  Payload ID: 9414
  Gene Symbol: LILRA6
  Gene Name: leukocyte immunoglobulin-like receptor, subfamily A (with TM domain), member 6
  ENST ID: ENST00000620837
  CDS Start-End: 112-1260
atgacaagaaggacccagcctccgagcggccacaccctgtgtgtctctctgtcctgccagcactgagggctcatccctctgcagagcgcggggtcaccggaaggagacgccatgacgcccgccctcacagccctgctctgccttgggctgagtctgggccccaggacccgcgtgcaggcagggcccttccccaaacccaccctctgggctgagccaggctctgtgatcagctgggggagccccgtgaccatctggtgtcaggggagcctggaggcccaggagtaccaactggataaagagggaagcccagagcccttggacagaaataacccactggaacccaagaacaaggccagattctccatcccatccatgacacagcaccatgcagggagataccgctgccactattacagctctgcaggctggtcagagcccagcgaccccctggagctggtgatgacaggattctacaacaaacccaccctctcagccctgcccagccctgtggtggcctcaggggggaatatgaccctccgatgtggctcacagaagggatatcaccattttgttctgatgaaggaaggagaacaccagctcccccggaccctggactcacagcagctccacagtggggggttccaggccctgttccctgtgggccccgtgacccccagccacaggtggaggttcacatgctattactattatacaaacaccccccgggtgtggtcccaccccagtgaccccctggagattctgccctcaggacagatctatgacaccgtctccctgtcagcacagccgggccccacagtggcctcaggagagaacgtgaccctgctgtgtcagtcacggggttattttgacactttccttctgaccaaagaaggggcagcccatcccccactgcgtctgagatcaatgtacggagctcataagtaccaggctgaattccccatgagtcctgtgacctcagcccacgcggggacctacaggtgctacggctcatacagctccaacccccacctgctgtctttccccagtgagcccctggaactcatggtctcaggacactctggaggctccagcctcccacccacagggccgccctccacacctgcctcacacgccaaggattacacagtggagaatctcatccgcatgggcatggcaggcttggtcctggtgttcctcgggattctgttatttgaggctcagcacagccagagaaacccccaagatgcagccgggaggtga

SEQ ID NO: 148559 - DNA, 1557 bp, Homo sapiens
  Payload ID: 9414
  Gene Symbol: LILRA6
  Gene Name: leukocyte immunoglobulin-like receptor, subfamily A (with TM domain), member 6
  ENST ID: ENST00000618982
  CDS Start-End: 112-1557
atgacaagaaggacccagcctccgagcggccacaccctgtgtgtctctctgtcctgccagcactgagggctcatccctctgcagagcgcggggtcaccgggaggagacgccatgacgcccgccctcacagccctgctctgccttgggctgagtctgggccccaggacccgcgtgcaggcagggcccttccccaaacccaccctctgggctgagccaggctctgtgatcagctgggggagccccgtgaccatctggtgtcaggggagcctggaggcccaggagtaccaactggataaagagggaagcccagagcccttggacagaaataacccactggaacccaagaacaaggccagattctccatcccatccatgacacagcaccatgcagggagataccgctgccactattacagctctgcaggctggtcagagcccagcgaccccctggagctggtgatgacaggattctacaacaaacccaccctctcagccctgcccagccctgtggtggcctcaggggggaatatgaccctccgatgtggctcacagaagggatatcaccattttgttctgatgaaggaaggagaacaccagctcccccggaccctggactcacagcagctccacagtggggggttccaggccctgttccctgtgggccccgtgacccccagccacaggtggaggttcacatgctattactattatacaaacaccccccaggtgtggtcccaccccagtgaccccctggagattctgccctcaggcgtgtctaggaagccctccctcctgaccctgcagggccctgtcctggcccctgggcagagcctgaccctccagtgtggctctgatgtcggctacgacagatttgttctgtataaggagggggaacgtgacttcctccagcgccctggccagcagccccaggctgggctctcccaggccaacttcaccctgggccctgtgagcccctcccacgggggccagtacaggtgctatggtgcacacaacctctcctccgagtggtcggcccccagcgaccccctgaacatcctgatggcaggacagatctatgacaccgtctccctgtcagcacagccgggccccacagtggcctcaggagagaacgtgaccctgctgtgtcagtcacggggttattttgacactttccttctgaccaaagaaggggcagcccatcccccactgcgtctgagatcaatgtacggagctcataagtaccaggctgaattccccatgagtcctgtgacctcagcccacgcggggacctacaggtgctacggctcacgcagctccaacccccacctgctgtctcaccccagtgagcccctggaactcatggtctcaggacactctggaggctccagcctcccacccacagggccgccctccacacctgcctcacacgccaaggattacacagtggagaatctcatccgcatgggcatggcaggcttggtcctggtgttcctcgggattctgttatttgaggctcagcacagccagagaaacccccaagatgcagccgggaggtga

SEQ ID NO: 148560 - DNA, 2114 bp, Homo sapiens
  Payload ID: 9414
  Gene Symbol: LILRA6
  Gene Name: leukocyte immunoglobulin-like receptor, subfamily A (with TM domain), member 6
  ENST ID: ENST00000616329
  CDS Start-End: 3-1949
ccatgacgcccgccctcacagccctgctctgccttgggctgagtctgggccccaggacccgcgtgcaggcagggcccttccccaaacccaccctctgggctgagccaggctctgtgatcagctgggggagccccgtgaccatctggtgtcaggggagcctggaggcccaggagtaccaactggataaagagggaagcccagagccctgggacagaaataacccactggaacccaagaacaaggccagattctccatcccatccatgacacagcaccatgcagggagataccgctgccactattacagctctgcaggctggtcagagcccagcgaccccctggagctggtgatgacaggattctacaacaaacccaccctctcagccctgcccagccctgtggtggcctcaggggggaatatgaccctccgatgtggctcacagaagggatatcaccattttgttctgatgaaggaaggagaacaccagctcccccggaccctggactcacagcagctccacagtggggggttccaggccctgttccctgtgggccccgtgacccccagccacaggtggaggttcacatgctattactattatacaaacaccccctgggtgtggtcccaccccagtgaccccctggagattctgccctcaggcgtgtctaggaagccctccctcctgaccctgcagggccctgtcctggcccctgggcagagcctgaccctccagtgtggctctgatgtcggctacgacagatttgttctgtataaggagggggaacgtgacttcctccagcgccctggccagcagccccaggctgggctctcccaggccaacttcaccctgggccctgtgagcccctcccacgggggccagtacaggtgctatggtgcacacaacctctcctccgagtggtcggcccccagcgaccccctgaacatcctgatggcaggacagatctatgacaccgtctccctgtcagcacagccgggccccacagtggcctcaggagagaacgtgaccctgctgtgtcagtcacggggttattttgacactttccttctgaccaaagaaggggcagcccatcccccactgcgtctgagatcaatgtacggagctcataagtaccaggctgaattccccatgagtcctgtgacctcagcccacgcggggacctacaggtgctacggctcacgcagctccaacccccacctgctgtctcaccccagtgagcccctggagctcatggtctcaggacactctggaggctccagcctcccacccacagggccgccctccacacctggaggtcctgaggaccagccccttaaccccccagggtcaggccctcagaatggtctgggaagatacctggaggttttgattggggtctcggtggccttcgtcctgctgctcttcctcctcctcttcctcctcctccgacgtcagcgtcacagcaaacacaggacatctgaccagagaaagactgatttccagcgtcctgcaggggctgcggagacagagcccaaggacaggggcctgctgaggaggtccagcccagctgctgacgtccaggaagaaaacctctatgctgctgtgaaggacacacagtctgaggacagggtggagctggacagtcagagcccacacgatgaagacccccaggcagtgacgtatgccccggtgaaacactccagtcctaggagagaaatggcctctcctccctcctcactgtctggggaattcctggacacaaaggacagacaggtggaagaggacaggcagatggacactgaggctgctgcatctgaagcctcccaggatgtgacctacgcccagctgcacagcttgacccttagacggaaggcaactgagcctcctccatcccaggaaggggaacctccagctgagcccagcatctacgccactctggccatccactagcccggggggtacgcagaccccacactcagcagaaggagactcaggactgctgaaggcacgggagctgcccccagtggacaccagtgaaccccagtcagcctggacccctaacacagaccatgaggagacgctgggaacttgtgggactcacctgactcaaagatg

SEQ ID NO: 148561 - DNA, 1446 bp, Homo sapiens
  Payload ID: 9414
  Gene Symbol: LILRA6
  Gene Name: leukocyte immunoglobulin-like receptor, subfamily A (with TM domain), member 6
  ENST ID: ENST00000621450
  CDS Start-End: 1-1446
atgacgcccgccctcacagccctgctctgccttgggctgagtctgggccccaggacccgcgtgcaggcagggcccttccccaaacccaccctctgggctgagccaggctctgtgatcagctgggggagccccgtgaccatctggtgtcaggggagcctggaggcccaggagtaccaactggataaagagggaagcccagagccctgggacagaaataacccactggaacccaagaacaaggccagattctccatcccatccatgacacagcaccatgcagggagataccgctgccactattacagctctgcaggctggtcagagcccagcgaccccctggagctggtgatgacaggattctacaacaaacccaccctctcagccctgcccagccctgtggtggcctcaggggggaatatgaccctccgatgtggctcacagaagggatatcaccattttgttctgatgaaggaaggagaacaccagctcccccggaccctggactcacagcagctccacagtggggggttccaggccctgttccctgtgggccccgtgacccccagccacaggtggaggttcacatgctattactattatacaaacaccccctgggtgtggtcccaccccagtgaccccctggagattctgccctcaggcgtgtctaggaagccctccctcctgaccctgcagggccctgtcctggcccctgggcagagcctgaccctccagtgtggctctgatgtcggctacgacagatttgttctgtataaggagggggaacgtgacttcctccagcgccctggccagcagccccaggctgggctctcccaggccaacttcaccctgggccctgtgagcccctcccacgggggccagtacaggtgctatggtgcacacaacctctcctccgagtggtcggcccccagcgaccccctgaacatcctgatggcaggacagatctatgacaccgtctccctgtcagcacagccgggccccacagtggcctcaggagagaacgtgaccctgctgtgtcagtcacggggttattttgacactttccttctgaccaaagaaggggcagcccatcccccactgcgtctgagatcaatgtacggagctcataagtaccaggctgaattccccatgagtcctgtgacctcagcccacgcggggacctacaggtgctacggctcacgcagctccaacccccacctgctgtctcaccccagtgagcccctggagctcatggtctcaggaccctctggaggctccagcctcccacccacagggccgccctccacacctgcctcacacgccaaggattacacagtggagaatctcatccgcatgggcatggcaggcttggtcctggtgttcctcgggattctgttatttgaggctcagcacagccagagaaacccccaagatgcagccgggaggtga

SEQ ID NO: 148562 - DNA, 1655 bp, Homo sapiens
  Payload ID: 9414
  Gene Symbol: LILRA6
  Gene Name: leukocyte immunoglobulin-like receptor, subfamily A (with TM domain), member 6
  ENST ID: ENST00000621199
  CDS Start-End: 32-1546
gcagagcgccgggtcaccgggaggagacgccatgacgcccgccctcacagccctgctctgccttgggctgagtctgggccccaggacccgcgtgcaggcagggcccttccccaaacccaccctctgggctgagccaggctctgtgatcagctgggggagccccgtgaccatctggtgtcaggggagcctggaggcccaggagtaccaactggataaagagggaagcccagagccctgggacagaaataacccactggaacccaagaacaaggccagattctccatcccatccatgacacagcaccatgcagggagataccgctgccactattacagctctgcaggctggtcagagcccagcgaccccctggagctggtgatgacaggattctacaacaaacccaccctctcagccctgcccagccctgtggtggcctcaggggggaatatgaccctccgatgtggctcacagaagggatatcaccattttgttctgatgaaggaaggagaacaccagctcccccggaccctggactcacagcagctccacagtggggggttccaggccctgttccctgtgggccccgtgacccccagccacaggtggaggttcacatgctattactattatacaaacaccccctgggtgtggtcccaccccagtgaccccctggagattctgccctcaggcgtgtctaggaagccctccctcctgaccctgcagggccctgtcctggcccctgggcagagcctgaccctccagtgtggctctgatgtcggctacgacagatttgttctgtataaggagggggaacgtgacttcctccagcgccctggccagcagccccaggctgggctctcccaggccaacttcaccctgggccctgtgagcccctcccacgggggccagtacaggtgctatggtgcacacaacctctcctccgagtggtcggcccccagcgaccccctgaacatcctgatggcaggacagatctatgacaccgtctccctgtcagcacagccgggccccacagtggcctcaggagagaacgtgaccctgctgtgtcagtcacggggttattttgacactttccttctgaccaaagaaggggcagcccatcccccactgcgtctgagatcaatgtacggagctcataagtaccaggctgaattccccatgagtcctgtgacctcagcccacgcggggacctacaggtgctacggctcacgcagctccaacccccacctgctgtctcaccccagtgagcccctggagctcatggtctcaggaccctctggaggctccagcctcccacccacagggccgccctccacacctggtgagtcactgaggcctcgtggggagcgcggcctcccccagggcagtctgagtctcccaaaggatcccactcccctcccctcaaggacgggcttgtgtcccaggggctctgaggctgggctggtgaagagtggggggttcaaggcagagagagatgttggggcccagccaggaggaggagccgggctgatgtggggagcaaggtagccccaggcttcacctccctgtcctgacccaggaggtcctgaggaccagccccttaaccccccagggtcaggccctcagaatggtgagtgaggggctctgagtgggagat

SEQ ID NO: 148563 - DNA, 1655 bp, Homo sapiens
  Payload ID: 9414
  Gene Symbol: LILRA6
  Gene Name: leukocyte immunoglobulin-like receptor, subfamily A (with TM domain), member 6
  ENST ID: ENST00000618491
  CDS Start-End: 32-1546
gcagagcgcggggtcaccggaaggagacgccatgacgcccgccctcacagccctgctctgccttgggctgagtctgggccccaggacccgcgtgcaggcagggcccttccccaaacccaccctctgggctgagccaggctctgtgatcagctgggggagccccgtgaccatctggtgtcaggggagcctggaggcccaggagtaccaactggataaagagggaagcccagagcccttggacagaaataacccactggaacccaagaacaaggccagattctccatcccatccatgacacagcaccatgcagggagataccgctgccactattacagctctgcaggctggtcagagcccagcgaccccctggagctggtgatgacaggattctacaacaaacccaccctctcagccctgcccagccctgtggtggcctcaggggggaatatgaccctccgatgtggctcacagaagggatatcaccattttgttctgatgaaggaaggagaacaccagctcccccggaccctggactcacagcagctccacagtggggggttccaggccctgttccctgtgggccccgtgacccccagccacaggtggaggttcacatgctattactattatacaaacaccccccgggtgtggtcccaccccagtgaccccctggagattctgccctcaggcgtgtctaggaagccctccctcctgaccctgcagggccctgtcctggcccctgggcagagcctgaccctccagtgtggctctgatgtcggctacgacagatttgttctgtataaggagggggaacgtgacttcctccagcgccctggccagcagccccaggctgggctctcccaggccaacttcaccctgggccctgtgagcccctcccacgggggccagtacaggtgctatggtgcacacaacctctcctccgagtggtcggcccccagcgaccccctgaacatcctgatggcaggacagatctatgacaccgtctccctgtcagcacagccgggccccacagtggcctcaggagagaacgtgaccctgctgtgtcagtcacggggttattttgacactttccttctgaccaaagaaggggcagcccatcccccactgcgtctgagatcaatgtacggagctcataagtaccaggctgaattccccatgagtcctgtgacctcagcccacgcggggacctacaggtgctacggctcatacagctccaacccccacctgctgtctttccccagtgagcccctggaactcatggtctcaggacactctggaggctccagcctcccacccacagggccgccctccacacctggtgagtcactgaggcctcgtggggagcgcggcctcccccagggcagtctgagtctcccaaaggatcccactcccctcccctcaaggacgggcttgtgtcccaggggctctgaggctgggctggtgaagagtggggggttcaaggcagagagagatgttggggcccagccaggaggaggagccgggctgatgtggggagcaaggtagccccaggcttcacctccctgtcctgacccaggaggtcctgaggaccagccccttaaccccccagggtcaggccctcagaatcgtgagtgaggggctctgagtgggagat

SEQ ID NO: 148564 - DNA, 1655 bp, Homo sapiens
  Payload ID: 9414
  Gene Symbol: LILRA6
  Gene Name: leukocyte immunoglobulin-like receptor, subfamily A (with TM domain), member 6
  ENST ID: ENST00000616282
  CDS Start-End: 32-1546
gcagagcccggggtcaccaggaggagacgccatgacccccaccctcgcagccctgctctgcctagggctgagtctgggccccaggacccacgtgcaggcagggcccttccccaaacccaccctctgggctgagccaggctctgtgatcagctgggggagccccgtgaccatctggtgtcaggggagcctggaggcccaggagtaccgactggataaagagggaagcccagagccctgggacagaaataacccactggaacccaagaacaaggccagattctccatcccatccataacagagcaccatgcggggagataccgctgccactattacagctctgcaggctggtcagagcccagcgaccccctggagctggtgatgacaggagcctatagcaaacccaccctctcagccctgcccagccctgtggtggcctcaggggggaatatgaccctccaatgtggctcacagaagggatatcaccattttgttctgatgaaggaaggagaacaccagctcccccggaccctggactcacagcagctccacagtggggggttccaggccctgttccctgtgggccccgtgaaccccagccacaggtggaggttcacatgctattactattatatgaacaccccccgggtgtggtcccaccccagtgaccccctggagattctgccctcaggcgtgtctaggaagccctccctcctgaccctgcagggccctgtcctggcccctgggcagagcctgaccctccagtgtggctctgatgtcggctacgacagatttgttctgtataaggagggggaacgtgacttcctccagcgccctggccagcagccccaggctgggctctcccaggccaacttcaccctgggccctgtgagcccctcccacgggggccagtacaggtgctatggtgcacacaacctctcctccgagtggtcggcccccagcgaccccctgaacatcctgatggcaggacagatctatgacaccgtctccctgtcagcacagccgggccccacagtggcctcaggagagaacgtgaccctgctgtgtcagtcatggtggcagtttgacactttccttctgaccaaagaaggggcagcccatcccccactgcgtctgagatcaatgtacggagctcataagtaccaggctgaattccccatgagtcctgtgacctcagcccacgcggggacctacaggtgctacggctcatacagctccaacccccacctgctgtctttccccagtgagcccctggaactcatggtctcaggacactctggaggctccagcctcccacccacagggccgccctccacacctggtgagtcactgaggcctcgtggggagcgcggcctcccccagggcagtctgagtctcccaaaggatcccactcccctcccctcaaggacgggcttgtgtcccaggggctctgaggctgggctggtgaagagtggggggttcaaggcagagagagatgttggggcccagccaggaggaggagccgggctgatgtggggagcaaggtagccccaggcttcacctccctgtcctgacccaggaggtcctgaggaccagccccttaaccccccagggtcaggccctcagaatcgtgagtgaggggctctgagtgggagat

SEQ ID NO: 148565 - DNA, 1508 bp, Homo sapiens
  Payload ID: 9414
  Gene Symbol: LILRA6
  Gene Name: leukocyte immunoglobulin-like receptor, subfamily A (with TM domain), member 6
  ENST ID: ENST00000615203
  CDS Start-End: 18-599
caccaggaggagacgccatgacccccaccctcgcagccctgctctgcctagggctgagtctgggccccaggacccacgtgcaggcagggcccttccccaaacccaccctctgggctgagccaggctctgtgatcagctgggggagccccgtgaccatctggtgtcaggggagcctggaggcccaggagtaccgactggataaagagggaagcccagagccctgggacagaaataacccactggaacccaagaacaaggccagattctccatcccatccataacagagcaccatgcggggagataccgctgccactattacagctctgcaggctggtcagagcccagcgaccccctggagctggtgatgacaggagcctatagcaaacccaccctctcagccctgcccagccctgtggtggcctcaggggggaatatgaccctccaatgtggctcacagaagggatatcaccattttgttctgatgaaggaaggagaacaccagctcccccggaccctggactcacagcagctccacagtggggggttccaggccctgttccctgtgggccccgtgaaccccagccacaggcgtgtctaggaagccctccctcctgaccctgcagggccctgtcctggcccctgggcagagcctgaccctccagtgtggctctgatgtcggctacgacagatttgttctgtataaggagggggaacgtgacttcctccagcgccctggccagcagccccaggctgggctctcccaggccaacttcaccctgggccctgtgagcccctcccacgggggccagtacaggtgctatggtgcacacaacctctcctccgagtggtcggcccccagcgaccccctgaacatcctgatggcaggacagatctatgacaccgtctccctgtcagcacagccgggccccacagtggcctcaggagagaacgtgaccctgctgtgtcagtcatggtggcagtttgacactttccttctgaccaaagaaggggcagcccatcccccactgcgtctgagatcaatgtacggagctcataagtaccaggctgaattccccatgagtcctgtgacctcagcccacgcggggacctacaggtgctacggctcatacagctccaacccccacctgctgtctttccccagtgagcccctggaactcatggtctcaggacactctggaggctccagcctcccacccacagggccgccctccacacctgcctcacacgccaaggattacacagtggagaatctcatccgcatgggcatggcaggcttggtcctgctgttcctcgggattctgttatttgaggctcagcacagccagagaaacccccaagatgcagccgggaggtgaacagcggagaggacaatgcacccttcagcgtggtggagcctcagggacagatctgatgatcccagaaggctctggaggacaatctaggacgtccagaggggggtgagatttcaggccacacactgtggaag

SEQ ID NO: 148566 - DNA, 1653 bp, Homo sapiens
  Payload ID: 9414
  Gene Symbol: LILRA6
  Gene Name: leukocyte immunoglobulin-like receptor, subfamily A (with TM domain), member 6
  ENST ID: ENST00000620914
  CDS Start-End: 32-1570
gcagagcgcggggtcaccggaaggagacgccatgacgcccgccctcacagccctgctctgccttgggctgagtctgggccccaggacccgcgtgcaggcagggcccttccccaaacccaccctctgggctgagccaggctctgtgatcagctgggggagccccgtgaccatctggtgtcaggggagcctggaggcccaggagtaccaactggataaagagggaagcccagagcccttggacagaaataacccactggaacccaagaacaaggccagattctccatcccatccatgacacagcaccatgcagggagataccgctgccactattacagctctgcaggctggtcagagcccagcgaccccctggagctggtgatgacaggattctacaacaaacccaccctctcagccctgcccagccctgtggtggcctcaggggggaatatgaccctccgatgtggctcacagaagggatatcaccattttgttctgatgaaggaaggagaacaccagctcccccggaccctggactcacagcagctccacagtggggggttccaggccctgttccctgtgggccccgtgacccccagccacaggtggaggttcacatgctattactattatacaaacaccccccgggtgtggtcccaccccagtgaccccctggagattctgccctcaggcgtgtctaggaagccctccctcctgaccctgcagggccctgtcctggcccctgggcagagcctgaccctccagtgtggctctgatgtcggctacgacagatttgttctgtataaggagggggaacgtgacttcctccagcgccctggccagcagccccaggctgggctctcccaggccaacttcaccctgggccctgtgagcccctcccacgggggccagtacaggtgctatggtgcacacaacctctcctccgagtggtcggcccccagcgaccccctgaacatcctgatggcaggacagatctatgacaccgtctccctgtcagcacagccgggccccacagtggcctcaggagagaacgtgaccctgctgtgtcagtcacggggttattttgacactttccttctgaccaaagaaggggcagcccatcccccactgcgtctgagatcaatgtacggagctcataagtaccaggctgaattccccatgagtcctgtgacctcagcccacgcggggacctacaggtgctacggctcatacagctccaacccccacctgctgtctttccccagtgagcccctggaactcatggtctcaggacactctggaggctccagcctcccacccacagggccgccctccacacctggtgagtcactgaggcctcgtggggagcgccgcctcccccagggcagtctgagtctcccaaaggatcccactcccctcccctcaaggacgggcttgtgtcccaggggctctgaggctgggctggtgaagagtgggggtcgaggcagagggagatgttggggcccagccaggaggaggagccgggctgatgtggggggcaagacagccccagccttcacctccctgtcctgacccaggaggtcctgaggaccagccccttaaccccccagggtcaggccctcagaatcgtgagtgaggggctctgagtgggagat

SEQ ID NO: 148567 - DNA, 1924 bp, Homo sapiens
  Payload ID: 9414
  Gene Symbol: LILRA6
  Gene Name: leukocyte immunoglobulin-like receptor, subfamily A (with TM domain), member 6
  Uniprot ID: Q6PI73
  ENST ID: ENST00000616466
  CDS Start-End: 3-584
ccatgacgcccgccctcacagccctgctctgccttgggctgagtctgggccccaggacccgcgtgcaggcagggcccttccccaaacccaccctctgggctgagccaggctctgtgatcagctgggggagccccgtgaccatctggtgtcaggggagcctggaggcccaggagtaccaactggataaagagggaagcccagagcccttggacagaaataacccactggaacccaagaacaaggccagattctccatcccatccatgacacagcaccatgcagggagataccgctgccactattacagctctgcaggctggtcagagcccagcgaccccctggagctggtgatgacaggattctacaacaaacccaccctctcagccctgcccagccctgtggtggcctcaggggggaatatgaccctccgatgtggctcacagaagggatatcaccattttgttctgatgaaggaaggagaacaccagctcccccggaccctggactcacagcagctccacagtggggggttccaggccctgttccctgtgggccccgtgacccccagccacaggcgtgtctaggaagccctccctcctgaccctgcagggccctgtcctggcccctgggcagagcctgaccctccagtgtggctctgatgtcggctacgacagatttgttctgtataaggagggggaacgtgacttcctccagcgccctggccagcagccccaggctgggctctcccaggccaacttcaccctgggccctgtgagcccctcccacgggggccagtacaggtgctatggtgcacacaacctctcctccgagtggtcggcccccagcgaccccctgaacatcctgatggcaggacagatctatgacaccgtctccctgtcagcacagccgggccccacagtggcctcaggagagaacgtgaccctgctgtgtcagtcacggggttattttgacactttccttctgaccaaagaaggggcagcccatcccccactgcgtctgagatcaatgtacggagctcataagtaccaggctgaattccccatgagtcctgtgacctcagcccacgcggggacctacaggtgctacggctcatacagctccaacccccacctgctgtctttccccagtgagcccctggaactcatggtctcaggacactctggaggctccagcctcccacccacagggccgccctccacacctggtctgggaagatacctggaggttttgattggggtctcggtggccttcgtcctgctgctcttcctcctcctcttcctcctcctccgacgtcagcgtcacagcaaacacaggacatctgaccagagaaagactgatttccagcgtcctgcaggggctgcggagacagagcccaaggacaggggcctgctgaggaggtccagcccagctgctgacgtccaggaagaaaacctctagcccacacgatgaagacccccaggcagtgacgtatgccccggtgaaacactccagtcctaggagagaaatggcctctcctccctcctcactgtctggggaattcctggacacaaaggacagacaggtggaagaggacaggcagatggacactgaggctgctgcatctgaagcctcccaggatgtgacctacgcccagctgcacagcttgacccttagacggaaggcaactgagcctcctccatcccaggaaggggaacctccagctgagcccagcatctacgccactctggccatccactagcccggggggtacgcagaccccacactcagcagaaggagactcaggactgctgaaggcacgggagctgcccccagtggacaccagtgaaccccagtcagcctggacccctaacacagaccatgaggagacgctgggaacttgtgggactcacctgactcaaagatg

SEQ ID NO: 148568 - DNA, 1416 bp, Homo sapiens
  Payload ID: 9414
  Gene Symbol: LILRA6
  Gene Name: leukocyte immunoglobulin-like receptor, subfamily A (with TM domain), member 6
  ENST ID: ENST00000613668
  CDS Start-End: 3-578
ccatgacgcccgccctcacagccctgctctgccttgggctgagtctgggccccaggacccgcgtgcaggcagggcccttccccaaacccaccctctgggctgagccaggctctgtgatcagctgggggagccccgtgaccatctggtgtcaggggagcctggaggcccaggagtaccaactggataaagagggaagcccagagcccttggacagaaataacccactggaacccaagaacaaggccagattctccatcccatccatgacacagcaccatgcagggagataccgctgccactattacagctctgcaggctggtcagagcccagcgaccccctggagctggtgatgacaggattctacaacaaacccaccctctcagccctgcccagccctgtggtggcctcaggggggaatatgaccctccgatgtggctcacagaagggatatcaccattttgttctgatgaaggaaggagaacaccagctcccccggaccctggactcacagcagctccacagtggggggttccaggccctgttccctgtgggccccgtgacccccagccacagctgacaggttgtggggagtttggctggtgactgaatctggaaaggacccagagtgatgtgttgaaggacgggctgaaggcatgagggagaccccatggggaggctctgacatgggaggaggagcccttgaccacgttcacctggaaggggaggactcaggaaggcatcggcgtgtctaggaagccctccctcctgaccctgcagggccctgtcctggcccctgggcagagcctgaccctccagtgtggctctgatgtcggctacgacagatttgttctgtataaggagggggaacgtgacttcctccagcgccctggccagcagccccaggctgggctctcccaggccaacttcaccctgggccctgtgagcccctcccacgggggccagtacaggtgctatggtgcacacaacctctcctccgagtggtcggcccccagcgaccccctgaacatcctgatggcaggacagatctatgacaccgtctccctgtcagcacagccgggccccacagtggcctcaggagagaacgtgaccctgctgtgtcagtcacggggttattttgacactttccttctgaccaaagaaggggcagcccatcccccactgcgtctgagatcaatgtacggagctcataagtaccaggctgaattccccatgagtcctgtgacctcagcccacgcggggacctacaggtgctacggctcatacagctccaacccccacctgctgtctttccccagtgagcccctggaactcatggtctcaggacactctggaggctccagcctcccacccacagggccgccctccacacctggtgagtcactgaggcctcgtgg

SEQ ID NO: 148569 - DNA, 2114 bp, Homo sapiens
  Payload ID: 9414
  Gene Symbol: LILRA6
  Gene Name: leukocyte immunoglobulin-like receptor, subfamily A (with TM domain), member 6
  ENST ID: ENST00000614123
  CDS Start-End: 3-1949
ccatgacccccaccctcgcagccctgctctgcctagggctgagtctgggccccaggacccacgtgcaggcagggcccttccccaaacccaccctctgggctgagccaggctctgtgatcagctgggggagccccgtgaccatctggtgtcaggggagcctggaggcccaggagtaccgactggataaagagggaagcccagagccctgggacagaaataacccactggaacccaagaacaaggccagattctccatcccatccataacagagcaccatgcggggagataccgctgccactattacagctctgcaggctggtcagagcccagcgaccccctggagctggtgatgacaggagcctatagcaaacccaccctctcagccctgcccagccctgtggtggcctcaggggggaatatgaccctccaatgtggctcacagaagggatatcaccattttgttctgatgaaggaaggagaacaccagctcccccggaccctggactcacagcagctccacagtggggggttccaggccctgttccctgtgggccccgtgaaccccagccacaggtggaggttcacatgctattactattatatgaacaccccccgggtgtggtcccaccccagtgaccccctggagattctgccctcaggcgtgtctaggaagccctccctcctgaccctgcagggccctgtcctggcccctgggcagagcctgaccctccagtgtggctctgatgtcggctacgacagatttgttctgtataaggagggggaacgtgacttcctccagcgccctggccagcagccccaggctgggctctcccaggccaacttcaccctgggccctgtgagcccctcccacgggggccagtacaggtgctatggtgcacacaacctctcctccgagtggtcggcccccagcgaccccctgaacatcctgatggcaggacagatctatgacaccgtctccctgtcagcacagccgggccccacagtggcctcaggagagaacgtgaccctgctgtgtcagtcatggtggcagtttgacactttccttctgaccaaagaaggggcagcccatcccccactgcgtctgagatcaatgtacggagctcataagtaccaggctgaattccccatgagtcctgtgacctcagcccacgcggggacctacaggtgctacggctcatacagctccaacccccacctgctgtctcaccccagtgagcccctggagctcgtggtctcaggacactctggaggctccagcctcccacccacagggccgccctccacacctggaggtcctgaggaccagccccttaaccccccagggtcaggccctcagaatcgtctgggaagatacctggaggttttgattggggtctcggtggccttcgtcctgctgctcttcctcctcctcttcctcctcctccgacgtcagcgtcacagcaaacacaggacatctgaccagagaaagactgatttccagcgtcctgcaggggctgcggagacagagcccaaggacaggggcctgctgaggaggtccagcccagctgctgacgtccaggaagaaaacctctatgctgccgtgaaggacacacagtctgaggacagggtggagctggacagtcagagcccacacgatgaagacccccaggcagtgacgtatgccccggtgaaacactccagtcctaggagagaaatggcctctcctccctcctcactgtctggggaattcctggacacaaaggacagacaggtggaagaggacaggcagatggacactgaggctgctgcatctgaagcctcccaggatgtgacctacgcccagctgcacagcttgacccttagacggaaggcaactgagcctcctccatcccaggaaggggaacctccagctgagcccagcatctacgccactctggccatccactagcccggggggtacgcagaccccacactcagcagaaggagactcaggactgctgaaggcacgggagctgcccccagtggacaccagtgaaccccagtcagcctggacccctaacacagaccatgaggagacgctgggaacttgtgggactcacctgactcaaagatg

SEQ ID NO: 148570 - DNA, 2066 bp, Homo sapiens
  Payload ID: 9414
  Gene Symbol: LILRA6
  Gene Name: leukocyte immunoglobulin-like receptor, subfamily A (with TM domain), member 6
  ENST ID: ENST00000612434
  CDS Start-End: 3-1901
ccatgacccccaccctcgcagccctgctctgcctagggctgagtctgggccccaggacccacgtgcaggcagggcccttccccaaacccaccctctgggctgagccaggctctgtgatcagctgggggagccccgtgaccatctggtgtcaggggagcctggaggcccaggagtaccgactggataaagagggaagcccagagccctgggacagaaataacccactggaacccaagaacaaggccagattctccatcccatccataacagagcaccatgcggggagataccgctgccactattacagctctgcaggctggtcagagcccagcgaccccctggagctggtgatgacaggagcctatagcaaacccaccctctcagccctgcccagccctgtggtggcctcaggggggaatatgaccctccaatgtggctcacagaagggatatcaccattttgttctgatgaaggaaggagaacaccagctcccccggaccctggactcacagcagctccacagtggggggttccaggccctgttccctgtgggccccgtgaaccccagccacaggtggaggttcacatgctattactattatatgaacaccccccgggtgtggtcccaccccagtgaccccctggagattctgccctcaggcgtgtctaggaagccctccctcctgaccctgcagggccctgtcctggcccctgggcagagcctgaccctccagtgtggctctgatgtcggctacgacagatttgttctgtataaggagggggaacgtgacttcctccagcgccctggccagcagccccaggctgggctctcccaggccaacttcaccctgggccctgtgagcccctcccacgggggccagtacaggtgctatggtgcacacaacctctcctccgagtggtcggcccccagcgaccccctgaacatcctgatggcaggacagatctatgacaccgtctccctgtcagcacagccgggccccacagtggcctcaggagagaacgtgaccctgctgtgtcagtcatggtggcagtttgacactttccttctgaccaaagaaggggcagcccatcccccactgcgtctgagatcaatgtacggagctcataagtaccaggctgaattccccatgagtcctgtgacctcagcccacgcggggacctacaggtgctacggctcatacagctccaacccccacctgctgtctcaccccagtgagcccctggagctcgtggtctcaggacactctggaggctccagcctcccacccacagggccgccctccacacctggtctgggaagatacctggaggttttgattggggtctcggtggccttcgtcctgctgctcttcctcctcctcttcctcctcctccgacgtcagcgtcacagcaaacacaggacatctgaccagagaaagactgatttccagcgtcctgcaggggctgcggagacagagcccaaggacaggggcctgctgaggaggtccagcccagctgctgacgtccaggaagaaaacctctatgctgccgtgaaggacacacagtctgaggacagggtggagctggacagtcagcagagcccacacgatgaagacccccaggcagtgacgtatgccccggtgaaacactccagtcctaggagagaaatggcctctcctccctcctcactgtctggggaattcctggacacaaaggacagacaggtggaagaggacaggcagatggacactgaggctgctgcatctgaagcctcccaggatgtgacctacgcccagctgcacagcttgacccttagacggaaggcaactgagcctcctccatcccaggaaggggaacctccagctgagcccagcatctacgccactctggccatccactagcccggggggtacgcagaccccacactcagcagaaggagactcaggactgctgaaggcacgggagctgcccccagtggacaccagtgaaccccagtcagcctggacccctaacacagaccatgaggagacgctgggaacttgtgggactcacctgactcaaagatg

SEQ ID NO: 148571 - DNA, 1217 bp, Homo sapiens
  Payload ID: 9414
  Gene Symbol: LILRA6
  Gene Name: leukocyte immunoglobulin-like receptor, subfamily A (with TM domain), member 6
  ENST ID: ENST00000611358
  CDS Start-End: 45-1193
ggctcatccctctgcagagcccggggtcaccaggaggagacgccatgacccccaccctcgcagccctgctctgcctagggctgagtctgggccccaggacccacgtgcaggcagggcccttccccaaacccaccctctgggctgagccaggctctgtgatcagctgggggagccccgtgaccatctggtgtcaggggagcctggaggcccaggagtaccgactggataaagagggaagcccagagccctgggacagaaataacccactggaacccaagaacaaggccagattctccatcccatccataacagagcaccatgcggggagataccgctgccactattacagctctgcaggctggtcagagcccagcgaccccctggagctggtgatgacaggagcctatagcaaacccaccctctcagccctgcccagccctgtggtggcctcaggggggaatatgaccctccaatgtggctcacagaagggatatcaccattttgttctgatgaaggaaggagaacaccagctcccccggaccctggactcacagcagctccacagtggggggttccaggccctgttccctgtgggccccgtgaaccccagccacaggtggaggttcacatgctattactattatatgaacaccccccgggtgtggtcccaccccagtgaccccctggagattctgccctcaggacagatctatgacaccgtctccctgtcagcacagccgggccccacagtggcctcaggagagaacgtgaccctgctgtgtcagtcatggtggcagtttgacactttccttctgaccaaagaaggggcagcccatcccccactgcgtctgagatcaatgtacggagctcataagtaccaggctgaattccccatgagtcctgtgacctcagcccacgcggggacctacaggtgctacggctcatacagctccaacccccacctgctgtctttccccagtgagcccctggaactcatggtctcaggacactctggaggctccagcctcccacccacagggccgccctccacacctgcctcacacgccaaggattacacagtggagaatctcatccgcatgggcatggcaggcttggtcctgctgttcctcgggattctgttatttgaggctcagcacagccagagaaacccccaagatgcagccgggaggtgaacagcggagaggacaatgcaccct

SEQ ID NO: 148572 - DNA, 1557 bp, Homo sapiens
  Payload ID: 9414
  Gene Symbol: LILRA6
  Gene Name: leukocyte immunoglobulin-like receptor, subfamily A (with TM domain), member 6
  ENST ID: ENST00000620480
  CDS Start-End: 112-1557
atgacaagaaggacccagcctccgagcggccacaccctgtgtgtctctctgtcctgccagcactgagggctcatccctctgcagagcccggggtcaccaggaggagacgccatgacccccaccctcgcagccctgctctgcctagggctgagtctgggccccaggacccacgtgcaggcagggcccttccccaaacccaccctctgggctgagccaggctctgtgatcagctgggggagccccgtgaccatctggtgtcaggggagcctggaggcccaggagtaccgactggataaagagggaagcccagagccctgggacagaaataacccactggaacccaagaacaaggccagattctccatcccatccataacagagcaccatgcggggagataccgctgccactattacagctctgcaggctggtcagagcccagcgaccccctggagctggtgatgacaggagcctatagcaaacccaccctctcagccctgcccagccctgtggtggcctcaggggggaatatgaccctccaatgtggctcacagaagggatatcaccattttgttctgatgaaggaaggagaacaccagctcccccggaccctggactcacagcagctccacagtggggggttccaggccctgttccctgtgggccccgtgaaccccagccacaggtggaggttcacatgctattactattatatgaacaccccccgggtgtggtcccaccccagtgaccccctggagattctgccctcaggcgtgtctaggaagccctccctcctgaccctgcagggccctgtcctggcccctgggcagagcctgaccctccagtgtggctctgatgtcggctacgacagatttgttctgtataaggagggggaacgtgacttcctccagcgccctggccagcagccccaggctgggctctcccaggccaacttcaccctgggccctgtgagcccctcccacgggggccagtacaggtgctatggtgcacacaacctctcctccgagtggtcggcccccagcgaccccctgaacatcctgatggcaggacagatctatgacaccgtctccctgtcagcacagccgggccccacagtggcctcaggagagaacgtgaccctgctgtgtcagtcatggtggcagtttgacactttccttctgaccaaagaaggggcagcccatcccccactgcgtctgagatcaatgtacggagctcataagtaccaggctgaattccccatgagtcctgtgacctcagcccacgcggggacctacaggtgctacggctcatacagctccaacccccacctgctgtctttccccagtgagcccctggaactcatggtctcaggacactctggaggctccagcctcccacccacagggccgccctccacacctgcctcacacgccaaggattacacagtggagaatctcatccgcatgggcatggcaggcttggtcctgctgttcctcgggattctgttatttgaggctcagcacagccagagaaacccccaagatgcagccgggaggtga

SEQ ID NO: 148573 - DNA, 1636 bp, Homo sapiens
  Payload ID: 9414
  Gene Symbol: LILRA6
  Gene Name: leukocyte immunoglobulin-like receptor, subfamily A (with TM domain), member 6
  Uniprot ID: Q6PI73
  ENST ID: ENST00000614434
  CDS Start-End: 18-599
caccgggaggagacgccatgacgcccgccctcacagccctgctctgccttgggctgagtctgggccccaggacccgcgtgcaggcagggcccttccccaaacccaccctctgggctgagccaggctctgtgatcagctgggggagccccgtgaccatctggtgtcaggggagcctggaggcccaggagtaccaactggataaagagggaagcccagagcccttggacagaaataacccactggaacccaagaacaaggccagattctccatcccatccatgacacagcaccatgcagggagataccgctgccactattacagctctgcaggctggtcagagcccagcgaccccctggagctggtgatgacaggattctacaacaaacccaccctctcagccctgcccagccctgtggtggcctcaggggggaatatgaccctccgatgtggctcacagaagggatatcaccattttgttctgatgaaggaaggagaacaccagctcccccggaccctggactcacagcagctccacagtggggggttccaggccctgttccctgtgggccccgtgacccccagccacaggcgtgtctaggaagccctccctcctgaccctgcagggccctgtcctggcccctgggcagagcctgaccctccagtgtggctctgatgtcggctacgacagatttgttctgtataaggagggggaacgtgacttcctccagcgccctggccagcagccccaggctgggctctcccaggccaacttcaccctgggccctgtgagcccctcccacgggggccagtacaggtgctatggtgcacacaacctctcctccgagtggtcggcccccagcgaccccctgaacatcctgatggcaggacagatctatgacaccgtctccctgtcagcacagccgggccccacagtggcctcaggagagaacgtgaccctgctgtgtcagtcacggggttattttgacactttccttctgaccaaagaaggggcagcccatcccccactgcgtctgagatcaatgtacggagctcataagtaccaggctgaattccccatgagtcctgtgacctcagcccacgcggggacctacaggtgctacggctcacgcagctccaacccccacctgctgtctcaccccagtgagcccctggaactcatggtctcaggacactctggaggctccagcctcccacccacagggccgccctccacacctgcctcacacgccaaggattacacagtggagaatctcatccgcatgggcatggcaggcttggtcctggtgttcctcgggattctgttatttgaggctcagcacagccagagaaacccccaagatgcagccgggaggtgaacagcggagaggacaatgcacccttcagcgtggtggagcctcagggacagatctgatgatcccagaaggctctggaggacaatctaggacctccagaggggggtgagatttcaggccacacactgtggaagcttgtatggcagtctcccaccctcatgtgttcaatctgatgatcccaggaggttctggaacaaaatctacagcctatgctttctggactatctgtcgatcattcctgaagagagggatcaatgttgag

SEQ ID NO: 148574 - DNA, 1653 bp, Homo sapiens
  Payload ID: 9414
  Gene Symbol: LILRA6
  Gene Name: leukocyte immunoglobulin-like receptor, subfamily A (with TM domain), member 6
  ENST ID: ENST00000612257
  CDS Start-End: 32-1570
gcagagcccggggtcaccaggaggagacgccatgacccccaccctcgcagccctgctctgcctagggctgagtctgggccccaggacccacgtgcaggcagggcccttccccaaacccaccctctgggctgagccaggctctgtgatcagctgggggagccccgtgaccatctggtgtcaggggagcctggaggcccaggagtaccgactggataaagagggaagcccagagccctgggacagaaataacccactggaacccaagaacaaggccagattctccatcccatccataacagagcaccatgcggggagataccgctgccactattacagctctgcaggctggtcagagcccagcgaccccctggagctggtgatgacaggagcctatagcaaacccaccctctcagccctgcccagccctgtggtggcctcaggggggaatatgaccctccaatgtggctcacagaagggatatcaccattttgttctgatgaaggaaggagaacaccagctcccccggaccctggactcacagcagctccacagtggggggttccaggccctgttccctgtgggccccgtgaaccccagccacaggtggaggttcacatgctattactattatatgaacaccccccgggtgtggtcccaccccagtgaccccctggagattctgccctcaggcgtgtctaggaagccctccctcctgaccctgcagggccctgtcctggcccctgggcagagcctgaccctccagtgtggctctgatgtcggctacgacagatttgttctgtataaggagggggaacgtgacttcctccagcgccctggccagcagccccaggctgggctctcccaggccaacttcaccctgggccctgtgagcccctcccacgggggccagtacaggtgctatggtgcacacaacctctcctccgagtggtcggcccccagcgaccccctgaacatcctgatggcaggacagatctatgacaccgtctccctgtcagcacagccgggccccacagtggcctcaggagagaacgtgaccctgctgtgtcagtcatggtggcagtttgacactttccttctgaccaaagaaggggcagcccatcccccactgcgtctgagatcaatgtacggagctcataagtaccaggctgaattccccatgagtcctgtgacctcagcccacgcggggacctacaggtgctacggctcatacagctccaacccccacctgctgtctttccccagtgagcccctggaactcatggtctcaggacactctggaggctccagcctcccacccacagggccgccctccacacctggtgagtcactgaggcctcgtggggagcgccgcctcccccagggcagtctgagtctcccaaaggatcccactcccctcccctcaaggacgggcttgtgtcccaggggctctgaggctgggctggtgaagagtgggggtcgaggcagagggagatgttggggcccagccaggaggaggagccgggctgatgtggggggcaagacagccccagccttcacctccctgtcctgacccaggaggtcctgaggaccagccccttaaccccccagggtcaggccctcagaatcgtgagtgaggggctctgagtgggagat

SEQ ID NO: 148575 - DNA, 2825 bp, Homo sapiens
  Payload ID: 9414
  Gene Symbol: LILRA6
  Gene Name: leukocyte immunoglobulin-like receptor, subfamily A (with TM domain), member 6
  ENST ID: ENST00000618663
  CDS Start-End: 112-2010
atgacaagaaggacccagcctccgagcggccacaccctgtgtgtctctctgtcctgccagcactgagggctcatccctctgcagagcccggggtcaccaggaggagacgccatgacccccaccctcgcagccctgctctgcctagggctgagtctgggccccaggacccacgtgcaggcagggcccttccccaaacccaccctctgggctgagccaggctctgtgatcagctgggggagccccgtgaccatctggtgtcaggggagcctggaggcccaggagtaccgactggataaagagggaagcccagagccctgggacagaaataacccactggaacccaagaacaaggccagattctccatcccatccataacagagcaccatgcggggagataccgctgccactattacagctctgcaggctggtcagagcccagcgaccccctggagctggtgatgacaggagcctatagcaaacccaccctctcagccctgcccagccctgtggtggcctcaggggggaatatgaccctccaatgtggctcacagaagggatatcaccattttgttctgatgaaggaaggagaacaccagctcccccggaccctggactcacagcagctccacagtggggggttccaggccctgttccctgtgggccccgtgaaccccagccacaggtggaggttcacatgctattactattatatgaacaccccccgggtgtggtcccaccccagtgaccccctggagattctgccctcaggcgtgtctaggaagccctccctcctgaccctgcagggccctgtcctggcccctgggcagagcctgaccctccagtgtggctctgatgtcggctacgacagatttgttctgtataaggagggggaacgtgacttcctccagcgccctggccagcagccccaggctgggctctcccaggccaacttcaccctgggccctgtgagcccctcccacgggggccagtacaggtgctatggtgcacacaacctctcctccgagtggtcggcccccagcgaccccctgaacatcctgatggcaggacagatctatgacaccgtctccctgtcagcacagccgggccccacagtggcctcaggagagaacgtgaccctgctgtgtcagtcatggtggcagtttgacactttccttctgaccaaagaaggggcagcccatcccccactgcgtctgagatcaatgtacggagctcataagtaccaggctgaattccccatgagtcctgtgacctcagcccacgcggggacctacaggtgctacggctcatacagctccaacccccacctgctgtctttccccagtgagcccctggaactcatggtctcaggacactctggaggctccagcctcccacccacagggccgccctccacacctggtctgggaagatacctggaggttttgattggggtctcggtggccttcgtcctgctgctcttcctcctcctcttcctcctcctccgacgtcagcgtcacagcaaacacaggacatctgaccagagaaagactgatttccagcgtcctgcaggggctgcggagacagagcccaaggacaggggcctgctgaggaggtccagcccagctgctgacgtccaggaagaaaacctctatgctgccgtgaaggacacacagtctgaggacagggtggagctggacagtcagcagagcccacacgatgaagacccccaggcagtgacgtatgccccggtgaaacactccagtcctaggagagaaatggcctctcctccctcctcactgtctggggaattcctggacacaaaggacagacaggtggaagaggacaggcagatggacactgaggctgctgcatctgaagcctcccaggatgtgacctacgcccagctgcacagcttgacccttagacggaaggcaactgagcctcctccatcccaggaaggggaacctccagctgagcccagcatctacgccactctggccatccactagcccggggggtacgcagaccccacactcagcagaaggagactcaggactgctgaaggcacgggagctgcccccagtggacaccagtgaaccccagtcagcctggacccctaacacagaccatgaggagacgctgggaacttgtgggactcacctgactcaaagatgactaatatcgtcccattttggaaataaagcaacagacttctcaacaatcaatgagttaataacaaaaaaacaaaaaacaaaaacagacgtaaaggccgggtgtggtactcaggaggctgagtggggaggattccttgaacacaagaagttaaggctgctgaggctgcagtgagctatgactgtgccactgcactccagcctgtgtgacagagcgagaccttgtctctaaaaaaaaaaacagtgaatgttttaaactgaatgataatgtaaatattatacatcgaacttatgacatgggaaaattaagaagcataaataggccgggcgcggtggctcacgcctataatctcagcactttgggaggctgatgcgggcggatcatgaggtcaggagatcgagaccatcctggctaacacggtgaaaccccgtctctactaaaaatacaaaaaaattagccgggcgtggtggcgagtgcctatagtcccagctactcaggaggctgaggcaggagaatggcatgagcccgggaggcagagcttgcagtgagctgagatcgcaccactgcactccagcctgggcgacagagtgagattccgtctcgaaaaaaaaaaaaaaagaaagaaaaaaaataaaaaagaagcataaccagg

SEQ ID NO: 148576 - DNA, 1443 bp, Homo sapiens
  Payload ID: 9414
  Gene Symbol: LILRA6
  Gene Name: leukocyte immunoglobulin-like receptor, subfamily A (with TM domain), member 6
  ENST ID: ENST00000618682
  CDS Start-End: 1-1443
atgacccccaccctcgcagccctgctctgcctagggctgagtctgggccccaggacccacgtgcaggcagggcccttccccaaacccaccctctgggctgagccaggctctgtgatcagctgggggagccccgtgaccatctggtgtcaggggagcctggaggcccaggagtaccgactggataaagagggaagcccagagccctgggacagaaataacccactggaacccaagaacaaggccagattctccatcccatccataacagagcaccatgcggggagataccgctgccactattacagctctgcaggctggtcagagcccagcgaccccctggagctggtgatgacaggagcctatagcaaacccaccctctcagccctgcccagccctgtggtggcctcaggggggaatatgaccctccaatgtggctcacagaagggatatcaccattttgttctgatgaaggaaggagaacaccagctcccccggaccctggactcacagcagctccacagtggggggttccaggccctgttccctgtgggccccgtgaaccccagccacaggtggaggttcacatgctattactattatatgaacaccccccgggtgtggtcccaccccagtgaccccctggagattctgccctcaggcgtgtctaggaagccctccctcctgaccctgcagggccctgtcctggcccctgggcagagcctgaccctccagtgtggctctgatgtcggctacgacagatttgttctgtataaggagggggaacgtgacttcctccagcgccctggccagcagccccaggctgggctctcccaggccaacttcaccctgggccctgtgagcccctcccacgggggccagtacaggtgctatggtgcacacaacctctcctccgagtggtcggcccccagcgaccccctgaacatcctgatggcaggacagatctatgacaccgtctccctgtcagcacagccgggccccacagtggcctcaggagagaacgtgaccctgctgtgtcagtcatggtggcagtttgacactttccttctgaccaaagaaggggcagcccatcccccactgcgtctgagatcaatgtacggagctcataagtaccaggctgaattccccatgagtcctgtgacctcagcccacgcggggacctacaggtgctacggctcatacagctccaacccccacctgctgtctttccccagtgagcccctggaactcatggtctcagggacactctggaggctccagcctcccacccacagggccgccctccacaccccagcctcacacgccaaggattacacagtggagaatctcatccgcatgggcatggcaggcttggtcctgctgttcctcgggattctgttatttgaggctcagcacagccagagaaacccccaagatgcagccggg

SEQ ID NO: 148577 - DNA, 1317 bp, Homo sapiens
  Payload ID: 9415
  Gene Symbol: LILRA3
  Gene Name: leukocyte immunoglobulin-like receptor, subfamily A (without TM domain), member 3
  ENST ID: ENST00000617541
  CDS Start-End: 1-1128
atgacccccatcctcacggtcctgatctgtctcgggctgagcctggaccccaggacccacgtgcaggcagggcccctccccaagcccaccctctgggctgagccaggctctgtgatcacccaagggagtcctgtgaccctcaggtgtcaggggagcctggagacgcaggagtaccatctatatagagaaaagaaaacagcactctggattacacggatcccacaggagcttgtgaagaagggccagttccccatcctatccatcacctgggaacatgcagggcggtattgctgtatctatggcagccacactgcaggcctctcagagagcagtgaccccctggagctggtggtgacaggagcctacagcaaacccaccctctcagctctgcccagccctgtggtgacctcaggagggaatgtgaccatccagtgtgactcacaggtggcatttgatggcttcattctgtgtgtttctaagaagccatcactctcagtgcagccgggtcctgtcgtggcccctggggagaagctgaccttccagtgtggctctgatgccggctacgacagatttgttctgtacaaggagtggggacgtgacttcctccagcgccctggccggcagccccaggctgggctctcccaggccaacttcaccctgggccctgtgagccgctcctacgggggccagtacacatgctccggtgcatacaacctctcctccgagtggtcggcccccagcgaccccctggacatcctgatcacaggacagatccgtgccagacccttcctctccgtgcggccgggccccacagtggcctcaggagagaacgtgaccctgctgtgtcagtcacagggagggatgcacactttccttttgaccaaggagggggcagctgattccccgctgcgtctaaaatcaaagcgccaatctcataagtaccaggctgaattccccatgagtcctgtgacctcggcccacgcggggacctacaggtgctacggctcactcagctccaacccctacctgctgactcaccccagtgaccccctggagctcgtggtctcaggagcagctgagaccctcagcccaccacaaaacaagtccgactccaaggctggtgagtgaggagatgcttgccgtgatgacgctgggcacagagggtcaggtcctgtcaagaggagctgggtgtcctgggtggacatttgaagaattatattcattccaacttgaagaattattcaacacctttaacaatgtatatgtgaagtactttattctttcatattttaaaaataaaagataattatccatgag

SEQ ID NO: 148578 - DNA, 737 bp, Homo sapiens
  Payload ID: 9415
  Gene Symbol: LILRA3
  Gene Name: leukocyte immunoglobulin-like receptor, subfamily A (without TM domain), member 3
  ENST ID: ENST00000610305
  CDS Start-End: 422-737
gcgtctctgctgacctgagtctgccctgcaccatggacctgcattttccctgaagcatctccacgacggatgagatgactggccatgggctgagtctgagcttcaggacccatgtgcaggcagctcagcctgggctgcacagccaggtgtcaggtgcgtctctgctgatctgagtccaccctgcagcatggacctgcatcttccctgaaggatctccagggctggagggacgactgccatgccctacaggaaagacagccaggctcctgggagggcagttccacttcctgtgtggctgcagatgacaaaaccccatgagaagaaggaccgagcctccaagtgtccacaccctgtgtgtcctctgtcctgccagcaccgagggctcatccatccacagagcagtgcagtgggaggagacgccatgacccccatcctcacggtcctgatctgtctcgggctgagcctggaccccaggacccacgtgcaggcagggcccctccccaagcccaccctctgggctgagccaggctctgtgatcacccaagggagtcctgtgaccctcaggtgtcaggggagcctggagacgcaggagtaccatctatatagagaaaagaaaacagcactctggattacacggatcccacaggagcttgtgaagaagggccagttccccatcctatccatcacctgggaacatgcagggcggtattgctgtatctatggcagccacactgcag

SEQ ID NO: 148579 - DNA, 737 bp, Homo sapiens; identical to SEQ ID NO: 148578
  Payload ID: 9415
  Gene Symbol: LILRA3
  Gene Name: leukocyte immunoglobulin-like receptor, subfamily A (without TM domain), member 3
  ENST ID: ENST00000613018
  CDS Start-End: 422-737

SEQ ID NO: 148580 - DNA, 1911 bp, Homo sapiens
  Payload ID: 9415
  Gene Symbol: LILRA3
  Gene Name: leukocyte immunoglobulin-like receptor, subfamily A (without TM domain), member 3
  ENST ID: ENST00000619928
  CDS Start-End: 184-1653
ctcactgccacacacagctcagcctgggctgcacagccaggtgtcaggtgcgtctctgctgatctgagtccaccctgcagcatggacctgcatcttccctgaaggatctccagggctggagggacgactgccatgcaccgagggctcatccatccacagagcagtgcagtgggaggagacgccatgacccccatcctcacggtcctgatctgtctcgggctgagcctggaccccaggacccacgtgcaggcagggcccctccccaagcccaccctctgggctgagccaggctctgtgatcacccaagggagtcctgtgaccctcaggtgtcaggggagcctggagacgcaggagtaccatctatatagagaaaagaaaacagcactctggattacacggatcccacaggagcttgtgaagaagggccagttccccatcctatccatcacctgggaacatgcagggcggtattgctgtatctatggcagccacactgcaggcctctcagagagcagtgaccccctggagctggtggtgacaggagcctacagcaaacccaccctctcagctctgcccagccctgtggtgacctcaggagggaatgtgaccatccagtgtgactcacaggtggcatttgatggcttcattctgtgtaaggaaggagaagatgaacacccacaatgcctgaactcccattcccatgcccgtgggtcatcccgggccatcttctccgtgggccccgtgagcccaagtcgcaggtggtcgtacaggtgctatggttatgactcgcgcgctccctatgtgtggtctctacccagtgatctcctggggctcctggtcccaggtgtttctaagaagccatcactctcagtgcagccgggtcctgtcgtggcccctggggagaagctgaccttccagtgtggctctgatgccggctacgacagatttgttctgtacaaggagtggggacgtgacttcctccagcgccctggccggcagccccaggctgggctctcccaggccaacttcaccctgggccctgtgagccgctcctacgggggccagtacacatgctccggtgcatacaacctctcctccgagtggtcggcccccagcgaccccctggacatcctgatcacaggacagatccgtgccagacccttcctctccgtgcggccgggccccacagtggcctcaggagagaacgtgaccctgctgtgtcagtcacagggagggatgcacactttccttttgaccaaggagggggcagctgattccccgctgcgtctaaaatcaaagcgccaatctcataagtaccaggctgaattccccatgagtcctgtgacctcggcccacgcggggacctacaggtgctacggctcactcagctccaacccctacctgctgactcaccccagtgaccccctggagctcgtggtctcaggagcagctgagaccctcagcccaccacaaaacaagtccgactccaaggctggagcagctgataccctcagcccatcacaaaacaacccaacctcacacccccaggattacacagtggagaatctcatccacatgggcaaggctggcttgatcctggtggtcctcaggattctgttatttgaggctcagcacagccagagaagcccctaagatgcagctaggaggtgaacagcagagaggacaatgcatctctcagagtggtggaaccttgggaatagatatggtgatcccaggaggttccgggagacaatttagggccaatgctatctggactgtctgctgataatttctagaaggaggaatcagtgttggattgcagagatattttgcagggtgatccatggaggaccattaacatgtgatacctttcctctctattaatgttgacttcccttggttggatcccct

SEQ ID NO: 148581 - DNA, 481 bp, Homo sapiens
  Payload ID: 9415
  Gene Symbol: LILRA3
  Gene Name: leukocyte immunoglobulin-like receptor, subfamily A (without TM domain), member 3
  ENST ID: ENST00000619618
  CDS Start-End: 369-481
gcctgatgtcagatgcgtctctgctgacctgagtctgccctgcaccatggacctgcattttccctgaagcatctccacgacggatgagatgactggccatgggctgagtctgagcttcaggacccatgtgcaggcagggattaaggtgcagagggacggccaaggatgcaatgggcaccgaggaggcaggaaagactcagagctcagcctgggctgcacagccaggtgtcaggtgcgtctctgctgatctgagtccaccctgcagcatggacctgcatcttccctgaaggatctccagggctggagggacgactgccatgcaccgagggctcatccatccacagagcagtgcagtgggaggagacgccatgacccccatcctcacggtcctgatctgtctcgggctgagcctggaccccaggacccacgtgcaggcagggcccctccccaagcccaccctctgggctgagccaggctctgt

SEQ ID NO: 148582 - DNA, 883 bp, Homo sapiens
  Payload ID: 9415
  Gene Symbol: LILRA3
  Gene Name: leukocyte immunoglobulin-like receptor, subfamily A (without TM domain), member 3
  ENST ID: ENST00000613983
  CDS Start-End: 121-883
cacagctcagcctgggctgcacagccaggtgtcaggtgcgtctctgctgatctgagtccaccctgcagcatggacctgcatcttccctgaaggatctccagggctggagggacgactgccatgcaccgagggctcatccatccacagagcagtgcagtgggaggagacgccatgacccccatcctcacggtcctgatctgtctcgggctgagcctggaccccaggacccacgtgcaggcagggcccctccccaagcccaccctctgggctgagccaggctctgtgatcacccaagggagtcctgtgaccctcaggtgtcaggggagcctggagacgcaggagtaccatctatatagagaaaagaaaacagcactctggattacacggatcccacaggagcttgtgaagaagggccagttccccatcctatccatcacctgggaacatgcagggcggtattgctgtatctatggcagccacactgcaggcctctcagagagcagtgaccccctggagctggtggtgacaggagcctacagcaaacccaccctctcagctctgcccagccctgtggtgacctcaggagggaatgtgaccatccagtgtgactcacaggtggcatttgatggcttcattctgtgtaaggaaggagaagatgaacacccacaatgcctgaactcccattcccatgcccgtgggtcatcccgggccatcttctccgtgggccccgtgagcccaagtcgcaggtggtcgtacaggtgctatggttatgactcgcgcgctccctatgtgtggtctctacccagtgatctcctggggctcctggtcccaggagcagctgagaccctcagcccaccacaaaacaagtccgactccaaggctg

SEQ ID NO: 148583 - DNA, 742 bp, Homo sapiens
  Payload ID: 9415
  Gene Symbol: LILRA3
  Gene Name: leukocyte immunoglobulin-like receptor, subfamily A (without TM domain), member 3
  ENST ID: ENST00000615584
  CDS Start-End: 427-742
cagatgcgtctctgctgacctgagtctgccctgcaccatggacctgcattttccctgaagcatctccacgacggatgagatgactggccatgggctgagtctgagcttcaggacccatgtgcaggcagctcagcctgggctgcacagccaggtgtcaggtgcgtctctgctgatctgagtccaccctgcagcatggacctgcatcttccctgaaggatctccagggctggagggacgactgccatgccctacaggaaagacagccaggctcctgggagggcagttccacttcctgtgtggctgcagatgacaaaaccccatgagaagaaggaccgagcctccaagtgtccacaccctgtgtgtcctctgtcctgccagcaccgagggctcatccatccacagagcagtgcagtgggaggagacgccatgacccccatcctcacggtcctgatctgtctcgggctgagcctggaccccaggacccacgtgcaggcagggcccctccccaagcccaccctctgggctgagccaggctctgtgatcacccaagggagtcctgtgaccctcaggtgtcaggggagcctggagacgcaggagtaccatctatatagagaaaagaaaacagcactctggattacacggatcccacaggagcttgtgaagaagggccagttccccatcctatccatcacctgggaacatgcagggcggtattgctgtatctatggcagccacactgcag

SEQ ID NO: 148584 - DNA, 664 bp, Homo sapiens
  Payload ID: 9415
  Gene Symbol: LILRA3
  Gene Name: leukocyte immunoglobulin-like receptor, subfamily A (without TM domain), member 3
  ENST ID: ENST00000616964
  CDS Start-End: 1-618
atgacccccatcctcacggtcctgatctgtctcgggctgagcctggaccccaggacccacgtgcaggcagggcccctccccaagcccaccctctgggctgagccaggctctgtgatcacccaagggagtcctgtgaccctcaggtgtcaggggagcctggagacgcaggagtaccatctatatagagaaaagaaaacagcactctggattacacggatcccacaggagcttgtgaagaagggccagttccccatcctatccatcacctgggaacatgcagggcggtattgctgtatctatggcagccacactgcaggcctctcatcaaagcgccaatctcataagtaccaggctgaattccccatgagtcctgtgacctcggcccacgcggggacctacaggtgctacggctcactcagctccaacccctacctgctgactcaccccagtgaccccctggagctcgtggtctcagcatccccaacctcacacccccaggattacacagtggagaatctcatccacatgggcaaggctggcttgatcctggtggtcctcaggattctgttatttgaggctcagcacagccagagaagccccgatgcagctaggaggtgaacagcagagaggacaatgcatctctcagagtggtggaaccttggga

SEQ ID NO: 148585 - DNA, 467 bp, Homo sapiens
  Payload ID: 9415
  Gene Symbol: LILRA3
  Gene Name: leukocyte immunoglobulin-like receptor, subfamily A (without TM domain), member 3
  ENST ID: ENST00000611439
  CDS Start-End: 355-467
gcgtctctgctgacctgagtctgccctgcaccatggacctgcattttccctgaagcatctccacgacggatgagatgactggccatgggctgagtctgagcttcaggacccatgtgcaggcagggattaaggtgcagagggacggccaaggatgcaatgggcaccgaggaggcaggaaagactcagagctcagcctgggctgcacagccaggtgtcaggtgcgtctctgctgatctgagtccaccctgcagcatggacctgcatcttccctgaaggatctccagggctggagggacgactgccatgcaccgagggctcatccatccacagagcagtgcagtgggaggagacgccatgacccccatcctcacggtcctgatctgtctcgggctgagcctggaccccaggacccacgtgcaggcagggcccctccccaagcccaccctctgggctgagccaggctctgt

SEQ ID NO: 148586 - DNA, 1911 bp, Homo sapiens; identical to SEQ ID NO: 148580
  Payload ID: 9415
  Gene Symbol: LILRA3
  Gene Name: leukocyte immunoglobulin-like receptor, subfamily A (without TM domain), member 3
  ENST ID: ENST00000615416
  CDS Start-End: 184-1653

SEQ ID NO: 148587 - DNA, 481 bp, Homo sapiens; identical to SEQ ID NO: 148581
  Payload ID: 9415
  Gene Symbol: LILRA3
  Gene Name: leukocyte immunoglobulin-like receptor, subfamily A (without TM domain), member 3
  ENST ID: ENST00000620042
  CDS Start-End: 369-481

SEQ ID NO: 148588 - DNA, 1604 bp, Homo sapiens
  Payload ID: 9415
  Gene Symbol: LILRA3
  Gene Name: leukocyte immunoglobulin-like receptor, subfamily A (without TM domain), member 3
  Uniprot ID: Q8N6C8
  ENST ID: ENST00000620589
  CDS Start-End: 93-1412
gagcctccaagtgtccacaccctgtgtgtcctctgtcctgccagcaccgagggctcatccatccacagagcagtgcagtgggaggagacgccatgacccccatcctcacggtcctgatctgtctcgggctgagcctggaccccaggacccacgtgcaggcagggcccctccccaagcccaccctctgggctgagccaggctctgtgatcacccaagggagtcctgtgaccctcaggtgtcaggggagcctggagacgcaggagtaccatctatatagagaaaagaaaacagcactctggattacacggatcccacaggagcttgtgaagaagggccagttccccatcctatccatcacctgggaacatgcagggcggtattgctgtatctatggcagccacactgcaggcctctcagagagcagtgaccccctggagctggtggtgacaggagcctacagcaaacccaccctctcagctctgcccagccctgtggtgacctcaggagggaatgtgaccatccagtgtgactcacaggtggcatttgatggcttcattctgtgtaaggaaggagaagatgaacacccacaatgcctgaactcccattcccatgcccgtgggtcatcccgggccatcttctccgtgggccccgtgagcccaagtcgcaggtggtcgtacaggtgctatggttatgactcgcgcgctccctatgtgtggtctctacccagtgatctcctggggctcctggtcccaggtgtttctaagaagccatcactctcagtgcagccgggtcctgtcgtggcccctggggagaagctgaccttccagtgtggctctgatgccggctacgacagatttgttctgtacaaggagtggggacgtgacttcctccagcgccctggccggcagccccaggctgggctctcccaggccaacttcaccctgggccctgtgagccgctcctacgggggccagtacacatgctccggtgcatacaacctctcctccgagtggtcggcccccagcgaccccctggacatcctgatcacaggacagatccgtgccagacccttcctctccgtgcggccgggccccacagtggcctcaggagagaacgtgaccctgctgtgtcagtcacagggagggatgcacactttccttttgaccaaggagggggcagctgattccccgctgcgtctaaaatcaaagcgccaatctcataagtaccaggctgaattccccatgagtcctgtgacctcggcccacgcggggacctacaggtgctacggctcactcagctccaacccctacctgctgactcaccccagtgaccccctggagctcgtggtctcaggagcagctgagaccctcagcccaccacaaaacaagtccgactccaaggctggtgagtgaggagatgcttgccgtgatgacgctgggcacagagggtcaggtcctgtcaagaggagctgggtgtcctgggtggacatttgaagaattatattcattccaacttgaagaattattcaacacctttaacaatgtatatgtgaagtactttattctttcatattttaaaaataaaagataattatccatgagaaa

SEQ ID NO: 148589 - DNA, 1604 bp, Homo sapiens; identical to SEQ ID NO: 148588
  Payload ID: 9415
  Gene Symbol: LILRA3
  Gene Name: leukocyte immunoglobulin-like receptor, subfamily A (without TM domain), member 3
  ENST ID: ENST00000619638
  CDS Start-End: 93-1412

SEQ ID NO: 148590 - DNA, 1604 bp, Homo sapiens; identical to SEQ ID NO: 148588
  Payload ID: 9415
  Gene Symbol: LILRA3
  Gene Name: leukocyte immunoglobulin-like receptor, subfamily A (without TM domain), member 3
  Uniprot ID: Q8N6C8
  ENST ID: ENST00000615652
  CDS Start-End: 93-1412

SEQ ID NO: 148591 - DNA, 1911 bp, Homo sapiens; identical to SEQ ID NO: 148580
  Payload ID: 9415
  Gene Symbol: LILRA3
  Gene Name: leukocyte immunoglobulin-like receptor, subfamily A (without TM domain), member 3
  ENST ID: ENST00000617121
  CDS Start-End: 184-1653

SEQ ID NO: 148592 - DNA, 1604 bp, Homo sapiens; identical to SEQ ID NO: 148588
  Payload ID: 9415
  Gene Symbol: LILRA3
  Gene Name: leukocyte immunoglobulin-like receptor, subfamily A (without TM domain), member 3
  Uniprot ID: Q8N6C8
  ENST ID: ENST00000612127
  CDS Start-End: 93-1412

SEQ ID NO: 148593 - DNA, 1911 bp, Homo sapiens; identical to SEQ ID NO: 148580
  Payload ID: 9415
  Gene Symbol: LILRA3
  Gene Name: leukocyte immunoglobulin-like receptor, subfamily A (without TM domain), member 3
  ENST ID: ENST00000610381
  CDS Start-End: 184-1653

SEQ ID NO: 148594 - DNA, 2774 bp, Homo sapiens
  Payload ID: 9416
  Gene Symbol: LILRB1
  Gene Name: leukocyte immunoglobulin-like receptor, subfamily B (with TM and ITIM domains), member 1
  ENST ID: ENST00000324602
  CDS Start-End: 166-2124
ctcagcctgggcggcacagccagatgcgagatgcgtctctgctgatctgagtctgcctgcagcatggacctgggtcttccctgaagcatctccagggctggagggacgactgccatgcaccgagggctcatccatccacagagcagggcagtgggaggagacgccatgacccccatcctcacggtcctgatctgtctcgggctgagtctgggcccccggacccacgtgcaggcagggcacctccccaagcccaccctctgggctgaaccaggctctgtgatcacccaggggagtcctgtgaccctcaggtgtcaggggggccaggagacccaggagtaccgtctatatagagaaaagaaaacagcaccctggattacacggatcccacaggagcttgtgaagaagggccagttccccatcccatccatcacctgggaacacacagggcggtatcgctgttactatggtagcgacactgcaggccgctcagagagcagtgaccccctggagctggtggtgacaggagcctacatcaaacccaccctctcagcccagcccagccccgtggtgaactcaggagggaatgtaaccctccagtgtgactcacaggtggcatttgatggcttcattctgtgtaaggaaggagaagatgaacacccacaatgcctgaactcccagccccatgcccgtgggtcgtcccgcgccatcttctccgtgggccccgtgagcccgagtcgcaggtggtggtacaggtgctatgcttatgactcgaactctccctatgagtggtctctacccagtgatctcctggagctcctggtcctaggtgtttctaagaagccatcactctcagtgcagccaggtcctatcgtggcccctgaggagaccctgactctgcagtgtggctctgatgctggctacaacagatttgttctgtataaggacggggaacgtgacttccttcagctcgctggcgcacagccccaggctgggctctcccaggccaacttcaccctgggccctgtgagccgctcctacgggggccagtacagatgctacggtgcacacaacctctcctccgagtggtcggcccccagcgaccccctggacatcctgatcgcaggacagttctatgacagagtctccctctcggtgcagccgggccccacggtggcctcaggagagaacgtgaccctgctgtgtcagtcacagggatggatgcaaactttccttctgaccaaggagggggcagctgatgacccatggcgtctaagatcaacgtaccaatctcaaaaataccaggctgaattccccatgggtcctgtgacctcagcccatgcggggacctacaggtgctacggctcacagagctccaaaccctacctgctgactcaccccagtgaccccctggagctcgtggtctcaggaccgtctgggggccccagctccccgacaacaggccccacctccacatctgcaggccctgaggaccagcccctcacccccaccgggtcggatccccagagtggtctgggaaggcacctgggggttgtgatcggcatcttggtggccgtcatcctactgctcctcctcctcctcctcctcttcctcatcctccgacatcgacgtcagggcaaacactggacatcgacccagagaaaggctgatttccaacatcctgcaggggctgtggggccagagcccacagacagaggcctgcagtggaggtccagcccagctgccgatgcccaggaagaaaacctctatgctgccgtgaagcacacacagcctgaggatggggtggagatggacactcggcagagcccacacgatgaagacccccaggcagtgacgtatgccgaggtgaaacactccagacctaggagagaaatggcctctcctccttccccactgtctggggaattcctggacacaaaggacagacaggcggaagaggacaggcagatggacactgaggctgctgcatctgaagccccccaggatgtgacctacgcccagctgcacagcttgaccctcagacgggaggcaactgagcctcctccatcccaggaagggccctctccagctgtgcccagcatctacgccactctggccatccactagcccagggggggacgcagaccccacactccatggagtctggaatgcatgggagctgcccccccagtggacaccattggaccccacccagcctggatctaccccaggagactctgggaacttttaggggtcactcaattctgcagtataaataactaatgtctctacaattttgaaataaagcaacagacttctcaataatcaatgaagtagctgagaaaactaagtcagaaagtgcattaaactgaatcacaatgtaaatattacacatcaagcgatgaaactggaaaactacaagccacgaatgaatgaattaggaaagaaaaaaagtaggaaatgaatgatcttggctttcctataagaaatttagggcagggcacggtggctcacgcctgtaattccagcactttgggaggccgaggcgggcagatcacgagttcaggagatcgagaccatcttggccaacatggtgaaaccctgtctctcctaaaaatacaaaaattagctggatgtggtggcagtgcctgtaatcccagctatttgggaggctgaggcaggagaatcgcttgaaccagggagtcagaggtttcagtgagccaagatcgcaccactgctctccagcctggcgacagagggagactccatctcaaatt

SEQ ID NO: 148595 - DNA, 2157 bp, Homo sapiens
  Payload ID: 9416
  Gene Symbol: LILRB1
  Gene Name: leukocyte immunoglobulin-like receptor, subfamily B (with TM and ITIM domains), member 1
  ENST ID: ENST00000396315
  CDS Start-End: 1-1959
atgacccccatcctcacggtcctgatctgtctcgggctgagtctgggcccccggacccacgtgcaggcagggcacctccccaagcccaccctctgggctgaaccaggctctgtgatcacccaggggagtcctgtgaccctcaggtgtcaggggggccaggagacccaggagtaccgtctatatagagaaaagaaaacagcaccctggattacacggatcccacaggagcttgtgaagaagggccagttccccatcccatccatcacctgggaacacacagggcggtatcgctgttactatggtagcgacactgcaggccgctcagagagcagtgaccccctggagctggtggtgacaggagcctacatcaaacccaccctctcagcccagcccagccccgtggtgaactcaggagggaatgtaaccctccagtgtgactcacaggtggcatttgatggcttcattctgtgtaaggaaggagaagatgaacacccacaatgcctgaactcccagccccatgcccgtgggtcgtcccgcgccatcttctccgtgggccccgtgagcccgagtcgcaggtggtggtacaggtgctatgcttatgactcgaactctccctatgagtggtctctacccagtgatctcctggagctcctggtcctaggtgtttctaagaagccatcactctcagtgcagccaggtcctatcgtggcccctgaggagaccctgactctgcagtgtggctctgatgctggctacaacagatttgttctgtataaggacggggaacgtgacttccttcagctcgctggcgcacagccccaggctgggctctcccaggccaacttcaccctgggccctgtgagccgctcctacgggggccagtacagatgctacggtgcacacaacctctcctccgagtggtcggcccccagcgaccccctggacatcctgatcgcaggacagttctatgacagagtctccctctcggtgcagccgggccccacggtggcctcaggagagaacgtgaccctgctgtgtcagtcacagggatggatgcaaactttccttctgaccaaggagggggcagctgatgacccatggcgtctaagatcaacgtaccaatctcaaaaataccaggctgaattccccatgggtcctgtgacctcagcccatgcggggacctacaggtgctacggctcacagagctccaaaccctacctgctgactcaccccagtgaccccctggagctcgtggtctcaggaccgtctgggggccccagctccccgacaacaggccccacctccacatctgcaggccctgaggaccagcccctcacccccaccgggtcggatccccagagtggtctgggaaggcacctgggggttgtgatcggcatcttggtggccgtcatcctactgctcctcctcctcctcctcctcttcctcatcctccgacatcgacgtcagggcaaacactggacatcgacccagagaaaggctgatttccaacatcctgcaggggctgtggggccagagcccacagacagaggcctgcagtggaggtccagcccagctgccgatgcccaggaagaaaacctctatgctgccgtgaagcacacacagcctgaggatggggtggagatggacactcggcagagcccacacgatgaagacccccaggcagtgacgtatgccgaggtgaaacactccagacctaggagagaaatggcctctcctccttccccactgtctggggaattcctggacacaaaggacagacaggcggaagaggacaggcagatggacactgaggctgctgcatctgaagccccccaggatgtgacctacgcccagctgcacagcttgaccctcagacgggaggcaactgagcctcctccatcccaggaagggccctctccagctgtgcccagcatctacgccactctggccatccactagcccagggggggacgcagaccccacactccatggagtctggaatgcatgggagctgcccccccagtggacaccattggaccccacccagcctggatctaccccaggagactctgggaacttttaggggtcactcaattctgcagtataaataactaatgtctctacaattttgaaataaagcaacagacttctcaataa

SEQ ID NO: 148596 - DNA, 2103 bp, Homo sapiens
  Payload ID: 9416
  Gene Symbol: LILRB1
  Gene Name: leukocyte immunoglobulin-like receptor, subfamily B (with TM and ITIM domains), member 1
  ENST ID: ENST00000396317
  CDS Start-End: 1-1905
atgacccccatcctcacggtcctgatctgtctcgggctgagtctgggcccccggacccacgtgcaggcagggcacctccccaagcccaccctctgggctgaaccaggctctgtgatcacccaggggagtcctgtgaccctcaggtgtcaggggggccaggagacccaggagtaccgtctatatagagaaaagaaaacagcaccctggattacacggatcccacaggagcttgtgaagaagggccagttccccatcccatccatcacctgggaacacacagggcggtatcgctgttactatggtagcgacactgcaggccgctcagagagcagtgaccccctggagctggtggtgacaggagcctacatcaaacccaccctctcagcccagcccagccccgtggtgaactcaggagggaatgtaaccctccagtgtgactcacaggtggcatttgatggcttcattctgtgtaaggaaggagaagatgaacacccacaatgcctgaactcccagccccatgcccgtgggtcgtcccgcgccatcttctccgtgggccccgtgagcccgagtcgcaggtggtggtacaggtgctatgcttatgactcgaactctccctatgagtggtctctacccagtgatctcctggagctcctggtcctaggtgtttctaagaagccatcactctcagtgcagccaggtcctatcgtggcccctgaggagaccctgactctgcagtgtggctctgatgctggctacaacagatttgttctgtataaggacggggaacgtgacttccttcagctcgctggcgcacagccccaggctgggctctcccaggccaacttcaccctgggccctgtgagccgctcctacgggggccagtacagatgctacggtgcacacaacctctcctccgagtggtcggcccccagcgaccccctggacatcctgatcgcaggacagttctatgacagagtctccctctcggtgcagccgggccccacggtggcctcaggagagaacgtgaccctgctgtgtcagtcacagggatggatgcaaactttccttctgaccaaggagggggcagctgatgacccatggcgtctaagatcaacgtaccaatctcaaaaataccaggctgaattccccatgggtcctgtgacctcagcccatgcggggacctacaggtgctacggctcacagagctccaaaccctacctgctgactcaccccagtgaccccctggagctcgtggtctcagcaggccctgaggaccagcccctcacccccaccgggtcggatccccagagtggtctgggaaggcacctgggggttgtgatcggcatcttggtggccgtcatcctactgctcctcctcctcctcctcctcttcctcatcctccgacatcgacgtcagggcaaacactggacatcgacccagagaaaggctgatttccaacatcctgcaggggctgtggggccagagcccacagacagaggcctgcagtggaggtccagcccagctgccgatgcccaggaagaaaacctctatgctgccgtgaagcacacacagcctgaggatggggtggagatggacactcggagcccacacgatgaagacccccaggcagtgacgtatgccgaggtgaaacactccagacctaggagagaaatggcctctcctccttccccactgtctggggaattcctggacacaaaggacagacaggcggaagaggacaggcagatggacactgaggctgctgcatctgaagccccccaggatgtgacctacgcccagctgcacagcttgaccctcagacgggaggcaactgagcctcctccatcccaggaagggccctctccagctgtgcccagcatctacgccactctggccatccactagcccagggggggacgcagaccccacactccatggagtctggaatgcatgggagctgcccccccagtggacaccattggaccccacccagcctggatctaccccaggagactctgggaacttttaggggtcactcaattctgcagtataaataactaatgtctctacaattttgaaataaagcaacagacttctcaataa

SEQ ID NO: 148597 - DNA, 2878 bp, Homo sapiens
  Payload ID: 9416
  Gene Symbol: LILRB1
  Gene Name: leukocyte immunoglobulin-like receptor, subfamily B (with TM and ITIM domains), member 1
  ENST ID: ENST00000396327
  CDS Start-End: 273-2228
ggggactatttggttgaaagaaaacccacaatccagtgtcaagaaagaagtcaacttttcttccctatttccctgcatttctcttctgtgctcactgccacacgcagctcagcctgggcggcacagccagatgcgagatgcgtctctgctgatctgagtctgcctgcagcatggacctgggtcttccctgaagcatctccagggctggagggacgactgccatgcaccgagggctcatccatccacagagcagggcagtgggaggagacgccatgacccccatcctcacggtcctgatctgtctcgggctgagtctgggcccccggacccacgtgcaggcagggcacctccccaagcccaccctctgggctgaaccaggctctgtgatcacccaggggagtcctgtgaccctcaggtgtcaggggggccaggagacccaggagtaccgtctatatagagaaaagaaaacagcaccctggattacacggatcccacaggagcttgtgaagaagggccagttccccatcccatccatcacctgggaacacacagggcggtatcgctgttactatggtagcgacactgcaggccgctcagagagcagtgaccccctggagctggtggtgacaggagcctacatcaaacccaccctctcagcccagcccagccccgtggtgaactcaggagggaatgtaaccctccagtgtgactcacaggtggcatttgatggcttcattctgtgtaaggaaggagaagatgaacacccacaatgcctgaactcccagccccatgcccgtgggtcgtcccgcgccatcttctccgtgggccccgtgagcccgagtcgcaggtggtggtacaggtgctatgcttatgactcgaactctccctatgagtggtctctacccagtgatctcctggagctcctggtcctaggtgtttctaagaagccatcactctcagtgcagccaggtcctatcgtggcccctgaggagaccctgactctgcagtgtggctctgatgctggctacaacagatttgttctgtataaggacggggaacgtgacttccttcagctcgctggcgcacagccccaggctgggctctcccaggccaacttcaccctgggccctgtgagccgctcctacgggggccagtacagatgctacggtgcacacaacctctcctccgagtggtcggcccccagcgaccccctggacatcctgatcgcaggacagttctatgacagagtctccctctcggtgcagccgggccccacggtggcctcaggagagaacgtgaccctgctgtgtcagtcacagggatggatgcaaactttccttctgaccaaggagggggcagctgatgacccatggcgtctaagatcaacgtaccaatctcaaaaataccaggctgaattccccatgggtcctgtgacctcagcccatgcggggacctacaggtgctacggctcacagagctccaaaccctacctgctgactcaccccagtgaccccctggagctcgtggtctcaggaccgtctgggggccccagctccccgacaacaggccccacctccacatctgcaggccctgaggaccagcccctcacccccaccgggtcggatccccagagtggtctgggaaggcacctgggggttgtgatcggcatcttggtggccgtcatcctactgctcctcctcctcctcctcctcttcctcatcctccgacatcgacgtcagggcaaacactggacatcgacccagagaaaggctgatttccaacatcctgcaggggctgtggggccagagcccacagacagaggcctgcagtggaggtccagcccagctgccgatgcccaggaagaaaacctctatgctgccgtgaagcacacacagcctgaggatggggtggagatggacactcggagcccacacgatgaagacccccaggcagtgacgtatgccgaggtgaaacactccagacctaggagagaaatggcctctcctccttccccactgtctggggaattcctggacacaaaggacagacaggcggaagaggacaggcagatggacactgaggctgctgcatctgaagccccccaggatgtgacctacgcccagctgcacagcttgaccctcagacgggaggcaactgagcctcctccatcccaggaagggccctctccagctgtgcccagcatctacgccactctggccatccactagcccagggggggacgcagaccccacactccatggagtctggaatgcatgggagctgcccccccagtggacaccattggaccccacccagcctggatctaccccaggagactctgggaacttttaggggtcactcaattctgcagtataaataactaatgtctctacaattttgaaataaagcaacagacttctcaataatcaatgaagtagctgagaaaactaagtcagaaagtgcattaaactgaatcacaatgtaaatattacacatcaagcgatgaaactggaaaactacaagccacgaatgaatgaattaggaaagaaaaaaagtaggaaatgaatgatcttggctttcctataagaaatttagggcagggcacggtggctcacgcctgtaattccagcactttgggaggccgaggcgggcagatcacgagttcaggagatcgagaccatcttggccaacatggtgaaaccctgtctctcctaaaaatacaaaaattagctggatgtggtggcagtgcctgtaatcccagctatttgggaggctgaggcaggagaatcgcttgaaccagggagtcagaggtttcagtgagccaagatcgcaccactgctctccagcctggcgacagagggagactccatctcaaatt

SEQ ID NO: 148598 - DNA, 2960 bp, Homo sapiens
  Payload ID: 9416
  Gene Symbol: LILRB1
  Gene Name: leukocyte immunoglobulin-like receptor, subfamily B (with TM and ITIM domains), member 1
  ENST ID: ENST00000396331
  CDS Start-End: 358-2310
gagaaaagaggagaggagaggaggaacagaaaagaaaagaaaagaaaaagtgggaaacaaataatctaagaatgaggagaaagcaagaagagtgacccccttgtgggcactccattggttttatggcgcctctactttctggagtttgtgtaaaacaaaaatattatggtctttgtgcacatttacatcaagctcagcctgggcggcacagccagatgcgagatgcgtctctgctgatctgagtctgcctgcagcatggacctgggtcttccctgaagcatctccagggctggagggacgactgccatgcaccgagggctcatccatccacagagcagggcagtgggaggagacgccatgacccccatcctcacggtcctgatctgtctcgggctgagtctgggcccccggacccacgtgcaggcagggcacctccccaagcccaccctctgggctgaaccaggctctgtgatcacccaggggagtcctgtgaccctcaggtgtcaggggggccaggagacccaggagtaccgtctatatagagaaaagaaaacagcaccctggattacacggatcccacaggagcttgtgaagaagggccagttccccatcccatccatcacctgggaacacacagggcggtatcgctgttactatggtagcgacactgcaggccgctcagagagcagtgaccccctggagctggtggtgacaggagcctacatcaaacccaccctctcagcccagcccagccccgtggtgaactcaggagggaatgtaaccctccagtgtgactcacaggtggcatttgatggcttcattctgtgtaaggaaggagaagatgaacacccacaatgcctgaactcccagccccatgcccgtgggtcgtcccgcgccatcttctccgtgggccccgtgagcccgagtcgcaggtggtggtacaggtgctatgcttatgactcgaactctccctatgagtggtctctacccagtgatctcctggagctcctggtcctaggtgtttctaagaagccatcactctcagtgcagccaggtcctatcgtggcccctgaggagaccctgactctgcagtgtggctctgatgctggctacaacagatttgttctgtataaggacggggaacgtgacttccttcagctcgctggcgcacagccccaggctgggctctcccaggccaacttcaccctgggccctgtgagccgctcctacgggggccagtacagatgctacggtgcacacaacctctcctccgagtggtcggcccccagcgaccccctggacatcctgatcgcaggacagttctatgacagagtctccctctcggtgcagccgggccccacggtggcctcaggagagaacgtgaccctgctgtgtcagtcacagggatggatgcaaactttccttctgaccaaggagggggcagctgatgacccatggcgtctaagatcaacgtaccaatctcaaaaataccaggctgaattccccatgggtcctgtgacctcagcccatgcggggacctacaggtgctacggctcacagagctccaaaccctacctgctgactcaccccagtgaccccctggagctcgtggtctcaggaccgtctgggggccccagctccccgacaacaggccccacctccacatctggccctgaggaccagcccctcacccccaccgggtcggatccccagagtggtctgggaaggcacctgggggttgtgatcggcatcttggtggccgtcatcctactgctcctcctcctcctcctcctcttcctcatcctccgacatcgacgtcagggcaaacactggacatcgacccagagaaaggctgatttccaacatcctgcaggggctgtggggccagagcccacagacagaggcctgcagtggaggtccagcccagctgccgatgcccaggaagaaaacctctatgctgccgtgaagcacacacagcctgaggatggggtggagatggacactcggagcccacacgatgaagacccccaggcagtgacgtatgccgaggtgaaacactccagacctaggagagaaatggcctctcctccttccccactgtctggggaattcctggacacaaaggacagacaggcggaagaggacaggcagatggacactgaggctgctgcatctgaagccccccaggatgtgacctacgcccagctgcacagcttgaccctcagacgggaggcaactgagcctcctccatcccaggaagggccctctccagctgtgcccagcatctacgccactctggccatccactagcccagggggggacgcagaccccacactccatggagtctggaatgcatgggagctgcccccccagtggacaccattggaccccacccagcctggatctaccccaggagactctgggaacttttaggggtcactcaattctgcagtataaataactaatgtctctacaattttgaaataaagcaacagacttctcaataatcaatgaagtagctgagaaaactaagtcagaaagtgcattaaactgaatcacaatgtaaatattacacatcaagcgatgaaactggaaaactacaagccacgaatgaatgaattaggaaagaaaaaaagtaggaaatgaatgatcttggctttcctataagaaatttagggcagggcacggtggctcacgcctgtaattccagcactttgggaggccgaggcgggcagatcacgagttcaggagatcgagaccatcttggccaacatggtgaaaccctgtctctcctaaaaatacaaaaattagctggatgtggtggcagtgcctgtaatcccagctatttgggaggctgaggcaggagaatcgcttgaaccagggagtcagaggtttcagtgagccaagatcgcaccactgctctccagcctggcgacagagggagactccatctcaaatt

SEQ ID NO: 148599 - DNA, 2776 bp, Homo sapiens
  Payload ID: 9416
  Gene Symbol: LILRB1
  Gene Name: leukocyte immunoglobulin-like receptor, subfamily B (with TM and ITIM domains), member 1
  ENST ID: ENST00000396332
  CDS Start-End: 171-2126
cgcagctcagcctgggcggcacagccagatgcgagatgcgtctctgctgatctgagtctgcctgcagcatggacctgggtcttccctgaagcatctccagggctggagggacgactgccatgcaccgagggctcatccatccacagagcagggcagtgggaggagacgccatgacccccatcctcacggtcctgatctgtctcgggctgagtctgggcccccggacccacgtgcaggcagggcacctccccaagcccaccctctgggctgaaccaggctctgtgatcacccaggggagtcctgtgaccctcaggtgtcaggggggccaggagacccaggagtaccgtctatatagagaaaagaaaacagcaccctggattacacggatcccacaggagcttgtgaagaagggccagttccccatcccatccatcacctgggaacacacagggcggtatcgctgttactatggtagcgacactgcaggccgctcagagagcagtgaccccctggagctggtggtgacaggagcctacatcaaacccaccctctcagcccagcccagccccgtggtgaactcaggagggaatgtaaccctccagtgtgactcacaggtggcatttgatggcttcattctgtgtaaggaaggagaagatgaacacccacaatgcctgaactcccagccccatgcccgtgggtcgtcccgcgccatcttctccgtgggccccgtgagcccgagtcgcaggtggtggtacaggtgctatgcttatgactcgaactctccctatgagtggtctctacccagtgatctcctggagctcctggtcctaggtgtttctaagaagccatcactctcagtgcagccaggtcctatcgtggcccctgaggagaccctgactctgcagtgtggctctgatgctggctacaacagatttgttctgtataaggacggggaacgtgacttccttcagctcgctggcgcacagccccaggctgggctctcccaggccaacttcaccctgggccctgtgagccgctcctacgggggccagtacagatgctacggtgcacacaacctctcctccgagtggtcggcccccagcgaccccctggacatcctgatcgcaggacagttctatgacagagtctccctctcggtgcagccgggccccacggtggcctcaggagagaacgtgaccctgctgtgtcagtcacagggatggatgcaaactttccttctgaccaaggagggggcagctgatgacccatggcgtctaagatcaacgtaccaatctcaaaaataccaggctgaattccccatgggtcctgtgacctcagcccatgcggggacctacaggtgctacggctcacagagctccaaaccctacctgctgactcaccccagtgaccccctggagctcgtggtctcaggaccgtctgggggccccagctccccgacaacaggccccacctccacatctggccctgaggaccagcccctcacccccaccgggtcggatccccagagtggtctgggaaggcacctgggggttgtgatcggcatcttggtggccgtcatcctactgctcctcctcctcctcctcctcttcctcatcctccgacatcgacgtcagggcaaacactggacatcgacccagagaaaggctgatttccaacatcctgcaggggctgtggggccagagcccacagacagaggcctgcagtggaggtccagcccagctgccgatgcccaggaagaaaacctctatgctgccgtgaagcacacacagcctgaggatggggtggagatggacactcggcagagcccacacgatgaagacccccaggcagtgacgtatgccgaggtgaaacactccagacctaggagagaaatggcctctcctccttccccactgtctggggaattcctggacacaaaggacagacaggcggaagaggacaggcagatggacactgaggctgctgcatctgaagccccccaggatgtgacctacgcccagctgcacagcttgaccctcagacgggaggcaactgagcctcctccatcccaggaagggccctctccagctgtgcccagcatctacgccactctggccatccactagcccagggggggacgcagaccccacactccatggagtctggaatgcatgggagctgcccccccagtggacaccattggaccccacccagcctggatctaccccaggagactctgggaacttttaggggtcactcaattctgcagtataaataactaatgtctctacaattttgaaataaagcaacagacttctcaataatcaatgaagtagctgagaaaactaagtcagaaagtgcattaaactgaatcacaatgtaaatattacacatcaagcgatgaaactggaaaactacaagccacgaatgaatgaattaggaaagaaaaaaagtaggaaatgaatgatcttggctttcctataagaaatttagggcagggcacggtggctcacgcctgtaattccagcactttgggaggccgaggcgggcagatcacgagttcaggagatcgagaccatcttggccaacatggtgaaaccctgtctctcctaaaaatacaaaaattagctggatgtggtggcagtgcctgtaatcccagctatttgggaggctgaggcaggagaatcgcttgaaccagggagtcagaggtttcagtgagccaagatcgcaccactgctctccagcctggcgacagagggagactccatctcaaatt

SEQ ID NO: 148600 - DNA, 2751 bp, Homo sapiens
  Payload ID: 9416
  Gene Symbol: LILRB1
  Gene Name: leukocyte immunoglobulin-like receptor, subfamily B (with TM and ITIM domains), member 1
  ENST ID: ENST00000427581
  CDS Start-End: 334-2439
ggtaaggaccccacaacactgagctgatggacggctgaaggagggagggtgaccatgtgggaggctgtgagaaggaaggagatgcctccgctaccctcgtcaggaagggcagacacaggaaggaaccagttttatttgctgctacatcctggctctcagtgggatgaaaacaaaccagacagacggtggctgggggtcaggaaagggcccattaccatctgaaatgatgcagagggcctagtgactgcccccacctcagccctaatggaatgagagcaagggtcctggggagggcagttccacttcctgtgtggctgcagatgacagcaccccatgagaagaaggacccagcctccgattggccacactctgtgtgtctctctatcctgccagcaccgagggctcatccatccacagagcagggcagtgggaggagacgccatgacccccatcctcacggtcctgatctgtctcgggctgagtctgggcccccggacccacgtgcaggcagggcacctccccaagcccaccctctgggctgaaccaggctctgtgatcacccaggggagtcctgtgaccctcaggtgtcaggggggccaggagacccaggagtaccgtctatatagagaaaagaaaacagcaccctggattacacggatcccacaggagcttgtgaagaagggccagttccccatcccatccatcacctgggaacacacagggcggtatcgctgttactatggtagcgacactgcaggccgctcagagagcagtgaccccctggagctggtggtgacaggagcctacatcaaacccaccctctcagcccagcccagccccgtggtgaactcaggagggaatgtaaccctccagtgtgactcacaggtggcatttgatggcttcattctgtgtaaggaaggagaagatgaacacccacaatgcctgaactcccagccccatgcccgtgggtcgtcccgcgccatcttctccgtgggccccgtgagcccgagtcgcaggtggtggtacaggtgctatgcttatgactcgaactctccctatgagtggtctctacccagtgatctcctggagctcctggtcctaggtgtttctaagaagccatcactctcagtgcagccaggtcctatcgtggcccctgaggagaccctgactctgcagtgtggctctgatgctggctacaacagatttgttctgtataaggacggggaacgtgacttccttcagctcgctggcgcacagccccaggctgggctctcccaggccaacttcaccctgggccctgtgagccgctcctacgggggccagtacagatgctacggtgcacacaacctctcctccgagtggtcggcccccagcgaccccctggacatcctgatcgcaggacagttctatgacagagtctccctctcggtgcagccgggccccacggtggcctcaggagagaacgtgaccctgctgtgtcagtcacagggatggatgcaaactttccttctgaccaaggagggggcagctgatgacccatggcgtctaagatcaacgtaccaatctcaaaaataccaggctgaattccccatgggtcctgtgacctcagcccatgcggggacctacaggtgctacggctcacagagctccaaaccctacctgctgactcaccccagtgaccccctggagctcgtggtctcaggaccgtctgggggccccagctccccgacaacaggccccacctccacatctgcaggccctgaggaccagcccctcacccccaccgggtcggatccccagagtgctccggggctcggctctggtgcaggaacaagggctgcaggtctgggaaggcacctgggggttgtgatcggcatcttggtggccgtcatcctactgctcctcctcctcctcctcctcttcctcatcctccgacatcgacgtcagggcaaacactggacatcgacccagagaaaggctgatttccaacatcctgcaggggctgtggggccagagcccacagacagaggcctgcagtggaggtccagcccagctgccgatgcccaggaagaaaacctctatgctgccgtgaagcacacacagcctgaggatggggtggagatggacactcggcagagcccacacgatgaagacccccaggcagtgacgtatgccgaggtgaaacactccagacctaggagagaaatggcctctcctccttccccactgtctggggaattcctggacacaaaggacagacaggcggaagaggacaggcagatggacactgaggctgctgcatctgaagccccccaggatgtgacctacgcccagctgcacagcttgaccctcagacgggaggcaactgagcctcctccatcccaggaagggccctctccagctgtgcccagcatctacgccactctggccatccactagcccagggggggacgcagaccccacactccatggagtctggaatgcatgggagctgcccccccagtggacaccattggaccccacccagcctggatctaccccaggagactctgggaacttttaggggtcactcaattctgcagtataaataactaatgtctctacaattttgaaataaagcaacagacttctcaataatcaatgaagtagctgagaaaactaagtcagaaagtgcattaaactgaatcacaatgtaaatattacacatcaagcgatgaaactggaaaactacaagccacgaatgaatgaatt

SEQ ID NO: 148601 - DNA, 2075 bp, Homo sapiens
  Payload ID: 9416
  Gene Symbol: LILRB1
  Gene Name: leukocyte immunoglobulin-like receptor, subfamily B (with TM and ITIM domains), member 1
  ENST ID: ENST00000421584
  CDS Start-End: 1-1533
atgacccccatcctcacggtcctgatctgtctcgggctgagtctgggcccccggacccacgtgcaggcagggcacctccccaagcccaccctctgggctgaaccaggctctgtgatcacccaggggagtcctgtgaccctcaggtgtcaggggggccaggagacccaggagtaccgtctatatagagaaaagaaaacagcaccctggattacacggatcccacaggagcttgtgaagaagggccagttccccatcccatccatcacctgggaacacacagggcggtatcgctgttactatggtagcgacactgcaggccgctcagagagcagtgaccccctggagctggtggtgacaggagcctacatcaaacccaccctctcagcccagcccagccccgtggtgaactcaggagggaatgtaaccctccagtgtgactcacaggtggcatttgatggcttcattctgtgtaaggaaggagaagatgaacacccacaatgcctgaactcccagccccatgcccgtgggtcgtcccgcgccatcttctccgtgggccccgtgagcccgagtcgcaggtggtggtacaggtgctatgcttatgactcgaactctccctatgagtggtctctacccagtgatctcctggagctcctggtcctaggtgtttctaagaagccatcactctcagtgcagccaggtcctatcgtggcccctgaggagaccctgactctgcagtgtggctctgatgctggctacaacagatttgttctgtataaggacggggaacgtgacttccttcagctcgctggcgcacagccccaggctgggctctcccaggccaacttcaccctgggccctgtgagccgctcctacgggggccagtacagatgctacggtgcacacaacctctcctccgagtggtcggcccccagcgaccccctggacatcctgatcgcaggacagttctatgacagagtctccctctcggtgcagccgggccccacggtggcctcaggagagaacgtgaccctgctgtgtcagtcacagggatggatgcaaactttccttctgaccaaggagggggcagctgatgacccatggcgtctaagatcaacgtaccaatctcaaaaataccaggctgaattccccatgggtcctgtgacctcagcccatgcggggacctacaggtgctacggctcacagagctccaaaccctacctgctgactcaccccagtgaccccctggagctcgtggtctcaggaccgtctgggggccccagctccccgacaacaggccccacctccacatctggccctgaggaccagcccctcacccccaccgggtcggatccccagagtggtctgggaaggcacctgggggttgtgatcggcatcttggtggccgtcatcctactgctcctcctcctcctcctcctcttcctcatcctccgacatcgacgtcagggcaaacactggacatcgagtccagcccagctgccgatgcccaggaagaaaacctctatgctgccgtgaagcacacacagcctgaggatggggtggagatggacactcggagcccacacgatgaagacccccaggcagtgacgtatgccgaggtgaaacactccagacctaggagagaaatggcctctcctccttccccactgtctggggaattcctggacacaaaggacagacaggcggaagaggacaggcagatggacactgaggctgctgcatctgaagccccccaggatgtgacctacgcccagctgcacagcttgaccctcagacgggaggcaactgagcctcctccatcccaggaagggccctctccagctgtgcccagcatctacgccactctggccatccactagcccagggggggacgcagaccccacactccatggagtctggaatgcatgggagctgcccccccagtggacaccattggaccccacccagcctggatctaccccaggagactctgggaacttttaggggtcactcaattctgcagtataaataactaatgtctctacaattttgaaataaagcaacagacttctcaataa

SEQ ID NO: 148602 - DNA, 2365 bp, Homo sapiens
  Payload ID: 9416
  Gene Symbol: LILRB1
  Gene Name: leukocyte immunoglobulin-like receptor, subfamily B (with TM and ITIM domains), member 1
  ENST ID: ENST00000613400
  CDS Start-End: 1-2053
ctgccagcaccgagggctcatccatccacagagcagggcagtgggaggagacgccatgacccccatcctcacggtcctgatctgtctcgggctgagtctgggccccaggacccacgtgcaggcagggcacctccccaagcccaccctctgggctgaaccaggctctgtgatcacccaggggagtcctgtgaccctcaggtgtcaggggggccaggagacccaggagtaccgtctatatagagaaaagaaaacagcactctggattacacggatcccacaggagcttgtgaagaagggccagttccccatcccatccatcacctgggaacatgcagggcggtatcgctgttactatggtagcgacactgcaggccgctcagagagcagtgaccccctggagctggtggtgacaggagcctacatcaaacccaccctctcagcccagcccagccccgtggtgaactcaggagggaatgtaatcctccagtgtgactcacaggtggcatttgatggcttcagtctgtgtaaggaaggagaagatgaacacccacaatgcctgaactcccagccccatgcccgtgggtcgtcccgcgccatcttctccgtgggccccgtgagcccgagtcgcaggtggtggtacaggtgctatgcttatgactcgaactctccctatgagtggtctctacccagtgatctcctggagctcctggtcctaggtgtttctaagaagccatcactctcagtgcagccaggtcctatcgtggcccctgaggagaccctgactctgcagtgtggctctgatgctggctacaacagatttgttctgtataaggacggggaacgtgacttccttcagctcgctggcgcacagccccaggctgggctctcccaggccaacttcaccctgggccctgtgagccgctcctacgggggccagtacagatgctacggtgcacacaacctctcctccgagtggtcggcccccagcgaccccctggacatcctgatcgcaggacagttctatgacagagtctccctctcggtgcagccgggccccacggtggcctcaggagagaacgtgaccctgctgtgtcagtcacagggatggatgcaaactttccttctgaccaaggagggggcagctgatgacccatggcgtctaagatcaacgtaccaatctcaaaaataccaggctgaattccccatgggtcctgtgacctcagcccatgcggggacctacaggtgctacggctcacagagctccaaaccctacctgctgactcaccccagtgaccccctggagctcgtggtctcaggaccgtctgggggccccagctccccgacaacaggccccacctccacatctgcaggccctgaggaccagcccctcacccccaccgggtcggatccccagagtgctccggggctcggctctggtgcaggaacaagggctgcaggtctgggaaggcacctgggggttgtgatcggcatcttggtggccgtcatcctactgctcctcctcctcctcctcctcttcctcatcctccgacatcgacgtcagggcaaacactggacatcgacccagagaaaggctgatttccaacatcctgcaggggctgtggggccagagcccacagacagaggcctgcagtggaggtccagcccagctgccgatgcccaggaagaaaacctctatgctgccgtgaagcacacacagcctgaggatggggtggagatggacactcggcagagcccacacgatgaagacccccaggcagtgacgtatgccgaggtgaaacactccagacctaggagagaaatggcctctcctccttccccactgtctggggaattcctggacacaaaggacagacaggcggaagaggacaggcagatggacactgaggctgctgcatctgaagccccccaggatgtgacctacgcccagctgcacagcttgaccctcagacgggaggcaactgagcctcctccatcccaggaagggccctctccagctgtgcccagcatctacgccactctggccatccactagcccagggggggacgcagaccccacactccatggagtctggaatgcatgggagctgcccccccagtggacaccattggaccccacccagcctggatctaccccaggagactctgggaacttttaggggtcactcaattctgcagtataaataactaatgtctctacaattttgaaataaagcaacagacttctcaataatcaatgaagtagctgagaaaactaagtcagaaagtgcattaaactgaatcacaatgtaaatattacacatcaagcgatgaaactggaaaactacaagccacgaatgaatgaatt

SEQ ID NO: 148603 - DNA, 2425 bp, Homo sapiens
  Payload ID: 9416
  Gene Symbol: LILRB1
  Gene Name: leukocyte immunoglobulin-like receptor, subfamily B (with TM and ITIM domains), member 1
  Uniprot ID: Q8NHL6
  ENST ID: ENST00000617686
  CDS Start-End: 171-2126
cgcagctcagcctgggcggcacagccagatgcgagatgcgtctctgctgatctgagtctgcctgcagcatggacctgggtcttccctgaagcatctccagggctggagggacgactgccatgcaccgagggctcatccatccacagagcagggcagtgggaggagacgccatgacccccatcctcacggtcctgatctgtctcgggctgagtctgggccccaggacccacgtgcaggcagggcacctccccaagcccaccctctgggctgaaccaggctctgtgatcacccaggggagtcctgtgaccctcaggtgtcaggggggccaggagacccaggagtaccgtctatatagagaaaagaaaacagcactctggattacacggatcccacaggagcttgtgaagaagggccagttccccatcccatccatcacctgggaacatgcagggcggtatcgctgttactatggtagcgacactgcaggccgctcagagagcagtgaccccctggagctggtggtgacaggagcctacatcaaacccaccctctcagcccagcccagccccgtggtgaactcaggagggaatgtaatcctccagtgtgactcacaggtggcatttgatggcttcagtctgtgtaaggaaggagaagatgaacacccacaatgcctgaactcccagccccatgcccgtgggtcgtcccgcgccatcttctccgtgggccccgtgagcccgagtcgcaggtggtggtacaggtgctatgcttatgactcgaactctccctatgagtggtctctacccagtgatctcctggagctcctggtcctaggtgtttctaagaagccatcactctcagtgcagccaggtcctatcgtggcccctgaggagaccctgactctgcagtgtggctctgatgctggctacaacagatttgttctgtataaggacggggaacgtgacttccttcagctcgctggcgcacagccccaggctgggctctcccaggccaacttcaccctgggccctgtgagccgctcctacgggggccagtacagatgctacggtgcacacaacctctcctccgagtggtcggcccccagtgaccccctggacatcctgatcgcaggacagttctatgacagagtctccctctcggtgcagccgggccccacggtggcctcaggagagaacgtgaccctgctgtgtcagtcacagggatggatgcaaactttccttctgaccaaggagggggcagctgatgacccatggcgtctaagatcaacgtaccaatctcaaaaataccaggctgaattccccatgggtcctgtgacctcagcccatgcggggacctacaggtgctacggctcacagagctccaaaccctacctgctgactcaccccagtgaccccctggagctcgtggtctcaggaccgtctgggggccccagctccccgacaacaggccccacctccacatctggccctgaggaccagcccctcacccccaccgggtcggatccccagagtggtctgggaaggcacctgggggttgtgatcggcatcttggtggccgtcatcctactgctcctcctcctcctcctcctcttcctcatcctccgacatcgacgtcagggcaaacactggacatcgacccagagaaaggctgatttccaacatcctgcaggggctgtggggccagagcccacagacagaggcctgcagtggaggtccagcccagctgccgatgcccaggaagaaaacctctatgctgccgtgaagcacacacagcctgaggatggggtggagatggacactcggcagagcccacacgatgaagacccccaggcagtgacgtatgccgaggtgaaacactccagacctaggagagaaatggcctctcctccttccccactgtctggggaattcctggacacaaaggacagacaggcggaagaggacaggcagatggacactgaggctgctgcatctgaagccccccaggatgtgacctacgcccagctgcacagcttgaccctcagacgggaggcaactgagcctcctccatcccaggaagggccctctccagctgtgcccagcatctacgccactctggccatccactagcccagggggggacgcagaccccacactccatggagtctggaatgcatgggagctgcccccccagtggacaccattggaccccacccagcctggatctaccccaggagactctgggaacttttaggggtcactcaattctgcagtataaataactaatgtctctacaattttgaaataaagcaacagacttctcaataatcaatgaagtagctgagaaaactaagtcagaaagtgcattaaactgaatcacaatgtaaatattacacatcaagcgatgaaactggaaaactacaagccac

SEQ ID NO: 148604 - DNA, 2425 bp, Homo sapiens
  Payload ID: 9416
  Gene Symbol: LILRB1
  Gene Name: leukocyte immunoglobulin-like receptor, subfamily B (with TM and ITIM domains), member 1
  ENST ID: ENST00000619093
  CDS Start-End: 171-2126
cgcagctcagcctgggcggcacagccagatgcgagatgcgtctctgctgatctgagtctgcctgcagcatggacctgggtcttccctgaagcatctccagggctggagggacgactgccatgcaccgagggctcatccatccacagagcagggcagtgggaggagacgccatgacccccatcctcacggtcctgatctgtctcgggctgagtctgggcccccggacccacgtgcaggcagggcacctccccaagcccaccctctgggctgaaccaggctctgtgatcacccaggggagtcctgtgaccctcaggtgtcaggggggccaggagacccaggagtaccgtctatatagagaaaagaaaacagcaccctggattacacggatcccacaggagcttgtgaagaagggccagttccccatcccatccatcacctgggaacatgcagggcggtatcgctgttactatggtagcgacactgcaggccgctcagagagcagtgaccccctggagctggtggtgacaggagcctacatcaaacccaccctctcagcccagcccagccccgtggtgaactcaggagggaatgtaaccctccagtgtgactcacaggtggcatttgatggcttcattctgtgtaaggaaggagaagatgaacacccacaatgcctgaactcccagccccatgcccgtgggtcgtcccgcgccatcttctccgtgggccccgtgagcccgagtcgcaggtggtggtacaggtgctatgcttatgactcgaactctccctatgagtggtctctacccagtgatctcctggagctcctggtcctaggtgtttctaagaagccatcactctcagtgcagccaggtcctatcgtggcccctgaggagaccctgactctgcagtgtggctctgatgctggctacaacagatttgttctgtataaggacggggaacgtgacttccttcagctcgctggcgcacagccccaggctgggctctcccaggccaacttcaccctgggccctgtgagccgctcctacgggggccagtacagatgctacggtgcacacaacctctcctccgagtggtcggcccccagcgaccccctggacatcctgatcgcaggacagttctatgacagagtctccctctcggtgcagccgggccccacggtggcctcaggagagaacgtgaccctgctgtgtcagtcacagggatggatgcaaactttccttctgaccaaggagggggcagctgatgacccatggcgtctaagatcaacgtaccaatctcaaaaataccaggctgaattccccatgggtcctgtgacctcagcccatgcggggacctacaggtgctacggctcacagagctccaaaccctacctgctgactcaccccagtgaccccctggagctcgtggtctcaggaccgtctgggggccccagctccccgacaacaggccccacctccacatctggccctgaggaccagcccctcacccccaccgggtcggatccccagagtggtctgggaaggcacctgggggttgtgatcggcatcttggtggccgtcatcctactgctcctcctcctcctcctcctcttcctcatcctccgacatcgacgtcagggcaaacactggacatcgacccagagaaaggctgatttccaacatcctgcaggggctgtggggccagagcccacagacagaggcctgcagtggaggtccagcccagctgccgatgcccaggaagaaaacctctatgctgccgtgaagcacacacagcctgaggatggggtggagatggacactcggcagagcccacacgatgaagacccccaggcagtgacgtatgccgaggtgaaacactccagacctaggagagaaatggcctctcctccttccccactgtctggggaattcctggacacaaaggacagacaggcggaagaggacaggcagatggacactgaggctgctgcatctgaagccccccaggatgtgacctacgcccagctgcacagcttgacccttagacggaaggcaactgagcctcctccatcccaggaagggccctctccagctgtgcccagcatctacgccactctggccatccactagcccagggggggacgcagaccccacactccatggagtctggaatgcatgggagctgcccccccagtggacaccattggaccccacccagcctggatctaccccaggagactctgggaacttttaggggtcactcaattctgcagtataaataactaatgtctctacaattttgaaataaagcaacagacttctcaataatcaatgaagtagctgagaaaactaagtcagaaagtgcattaaactgaatcacaatgtaaatattacacatcaagcgatgaaactggaaaactacaagccac

SEQ ID NO: 148605 - DNA, 854 bp, Homo sapiens
  Payload ID: 9416
  Gene Symbol: LILRB1
  Gene Name: leukocyte immunoglobulin-like receptor, subfamily B (with TM and ITIM domains), member 1
  ENST ID: ENST00000610532
  CDS Start-End: 1-204
gaattcctggacacaaaggacagacaggcggaagaggacaggcagatggacactgaggctgctgcatctgaagccccccaggatgtgacctacgcccagctgcacagcttgaccctcagacgggaggcaactgagcctcctccatcccaggaagggccctctccagctgtgcccagcatctacgccactctggccatccactagcccagggggggacgcagaccccacactccatggagtctggaatgcatgggagctgcccccccagtggacaccattggaccccacccagcctggatctaccccaggagactctgggaacttttaggggtcactcaattctgcagtataaataactaatgtctctacaattttgaaataaagcaacagacttctcaataatcaatgaagtagctgagaaaactaagtcagaaagtgcattaaactgaatcacaatgtaaatattacacatcaagcgatgaaactggaaaactacaagccacgaatgaatgaattaggaaagaaaaaaagtaggaaatgaatgatcttggctttcctataagaaatttagggcagggcacggtggctcacgcctgtaattccagcactttgggaggccgaggcgggcagatcacgagttcaggagatcgagaccatcttggccaacatggtgaaaccctgtctctcctaaaaatacaaaaattagctggatgtggtggcagtgcctgtaatcccagctatttgggaggctgaggcaggagaatcgcttgaaccagggagtcagaggtttcagtgagccaagatcgcaccactgctctccagcctggcgacagagggagactccatctcaaatt

SEQ ID NO: 148606 - DNA, 1507 bp, Homo sapiens
  Payload ID: 9416
  Gene Symbol: LILRB1
  Gene Name: leukocyte immunoglobulin-like receptor, subfamily B (with TM and ITIM domains), member 1
  ENST ID: ENST00000620234
  CDS Start-End: 1-1458
atgacccccatcctcacggtcctgatctgtctcgggctgagtctgggccccaggacccacgtgcaggcagggcacctccccaagcccaccctctgggctgaaccaggctctgtgatcacccaggggagtcctgtgaccctcaggtgtcaggggggccaggagacccaggagtaccgtctatatagagaaaagaaaacagcactctggattacacggatcccacaggagcttgtgaagaagggccagttccccatcccatccatcacctgggaacatgcagggcggtatcgctgttactatggtagcgacactgcaggccgctcagagagcagtgaccccctggagctggtggtgacaggagcctacatcaaacccaccctctcagcccagcccagccccgtggtgaactcaggagggaatgtaatcctccagtgtgactcacaggtggcatttgatggcttcagtctgtgtaaggaaggagaagatgaacacccacaatgcctgaactcccagccccatgcccgtgggtcgtcccgcgccatcttctccgtgggccccgtgagcccgagtcgcaggtggtggtacaggtgctatgcttatgactcgaactctccctatgagtggtctctacccagtgatctcctggagctcctggtcctaggtgtttctaagaagccatcactctcagtgcagccaggtcctatcgtggcccctgaggagaccctgactctgcagtgtggctctgatgctggctacaacagatttgttctgtataaggacggggaacgtgacttccttcagctcgctggcgcacagccccaggctgggctctcccaggccaacttcaccctgggccctgtgagccgctcctacgggggccagtacagatgctacggtgcacacaacctctcctccgagtggtcggcccccagtgaccccctggacatcctgatcgcaggacagttctatgacagagtctccctctcggtgcagccgggccccacggtggcctcaggagagaacgtgaccctgctgtgtcagtcacagggatggatgcaaactttccttctgaccaaggagggggcagcccatcccctactgcatctgagatcagagcacggagctcagcagcaccaggctgaattccccatgagtcctgtgacctcagtgcacggggggacctacaggtgcttcagctcacacggcttctcccactacctgctgtcacaccccagtgaccccctggagctcatagtctcaggagcagctgataccctcagcccatcacaaaacaagtctgactctgagactgcatccccagcctcacaccttcaggattacgcagtggagaatctcatccacatgggcgtggctggcttgatcctggtggtcctcgggattctgtcatttgaggcttggcacagccagagaagcttccaagatgcagccgggaggtgaacagcagagaggataatgtactttatagagtcgtgaagcctcaggaaca

SEQ ID NO: 148607 - DNA, 2781 bp, Homo sapiens
  Payload ID: 9416
  Gene Symbol: LILRB1
  Gene Name: leukocyte immunoglobulin-like receptor, subfamily B (with TM and ITIM domains), member 1
  Uniprot ID: Q8NHL6
  ENST ID: ENST00000618681
  CDS Start-End: 176-2131
ccacacgcagctcagcctgggcggcacagccagatgcgagatgcgtctctgctgatctgagtctgcctgcagcatggacctgggtcttccctgaagcatctccagggctggagggacgactgccatgcaccgagggctcatccatccacagagcagggcagtgggaggagacgccatgacccccatcctcacggtcctgatctgtctcgggctgagtctgggccccaggacccacgtgcaggcagggcacctccccaagcccaccctctgggctgaaccaggctctgtgatcacccaggggagtcctgtgaccctcaggtgtcaggggggccaggagacccaggagtaccgtctatatagagaaaagaaaacagcactctggattacacggatcccacaggagcttgtgaagaagggccagttccccatcccatccatcacctgggaacatgcagggcggtatcgctgttactatggtagcgacactgcaggccgctcagagagcagtgaccccctggagctggtggtgacaggagcctacatcaaacccaccctctcagcccagcccagccccgtggtgaactcaggagggaatgtaatcctccagtgtgactcacaggtggcatttgatggcttcagtctgtgtaaggaaggagaagatgaacacccacaatgcctgaactcccagccccatgcccgtgggtcgtcccgcgccatcttctccgtgggccccgtgagcccgagtcgcaggtggtggtacaggtgctatgcttatgactcgaactctccctatgagtggtctctacccagtgatctcctggagctcctggtcctaggtgtttctaagaagccatcactctcagtgcagccaggtcctatcgtggcccctgaggagaccctgactctgcagtgtggctctgatgctggctacaacagatttgttctgtataaggacggggaacgtgacttccttcagctcgctggcgcacagccccaggctgggctctcccaggccaacttcaccctgggccctgtgagccgctcctacgggggccagtacagatgctacggtgcacacaacctctcctccgagtggtcggcccccagtgaccccctggacatcctgatcgcaggacagttctatgacagagtctccctctcggtgcagccgggccccacggtggcctcaggagagaacgtgaccctgctgtgtcagtcacagggatggatgcaaactttccttctgaccaaggagggggcagctgatgacccatggcgtctaagatcaacgtaccaatctcaaaaataccaggctgaattccccatgggtcctgtgacctcagcccatgcggggacctacaggtgctacggctcacagagctccaaaccctacctgctgactcaccccagtgaccccctggagctcgtggtctcaggaccgtctgggggccccagctccccgacaacaggccccacctccacatctgcaggccctgaggaccagcccctcacccccaccgggtcggatccccagagtggtctgggaaggcacctgggggttgtgatcggcatcttggtggccgtcatcctactgctcctcctcctcctcctcctcttcctcatcctccgacatcgacgtcagggcaaacactggacatcgacccagagaaaggctgatttccaacatcctgcaggggctgtggggccagagcccacagacagaggcctgcagtggaggtccagcccagctgccgatgcccaggaagaaaacctctatgctgccgtgaagcacacacagcctgaggatggggtggagatggacactcggagcccacacgatgaagacccccaggcagtgacgtatgccgaggtgaaacactccagacctaggagagaaatggcctctcctccttccccactgtctggggaattcctggacacaaaggacagacaggcggaagaggacaggcagatggacactgaggctgctgcatctgaagccccccaggatgtgacctacgcccagctgcacagcttgaccctcagacgggaggcaactgagcctcctccatcccaggaagggccctctccagctgtgcccagcatctacgccactctggccatccactagcccagggggggacgcagaccccacactccatggagtctggaatgcatgggagctgcccccccagtggacaccattggaccccacccagcctggatctaccccaggagactctgggaacttttaggggtcactcaattctgcagtataaataactaatgtctctacaattttgaaataaagcaacagacttctcaataatcaatgaagtagctgagaaaactaagtcagaaagtgcattaaactgaatcacaatgtaaatattacacatcaagcgatgaaactggaaaactacaagccacgaatgaatgaattaggaaagaaaaaaagtaggaaatgaatgatcttggctttcctataagaaatttagggcagggcacggtggctcacgcctgtaattccagcactttgggaggccgaggcgggcagatcacgagttcaggagatcgagaccatcttggccaacatggtgaaaccctgtctctcctaaaaatacaaaaattagctggatgtggtggcagtgcctgtaatcccagctatttgggaggctgaggcaggagaatcgcttgaaccagggagtcagaggtttcagtgagccaagatcgcaccactgctctccagcctggcgacagagggagactccatctcaaatt

SEQ ID NO: 148608 - DNA, 1959 bp, Homo sapiens
  Payload ID: 9416
  Gene Symbol: LILRB1
  Gene Name: leukocyte immunoglobulin-like receptor, subfamily B (with TM and ITIM domains), member 1
  Uniprot ID: Q8NHL6
  ENST ID: ENST00000612636
  CDS Start-End: 1-1959
atgacccccatcctcacggtcctgatctgtctcgggctgagtctgggccccaggacccacgtgcaggcagggcacctccccaagcccaccctctgggctgaaccaggctctgtgatcacccaggggagtcctgtgaccctcaggtgtcaggggggccaggagacccaggagtaccgtctatatagagaaaagaaaacagcactctggattacacggatcccacaggagcttgtgaagaagggccagttccccatcccatccatcacctgggaacatgcagggcggtatcgctgttactatggtagcgacactgcaggccgctcagagagcagtgaccccctggagctggtggtgacaggagcctacatcaaacccaccctctcagcccagcccagccccgtggtgaactcaggagggaatgtaatcctccagtgtgactcacaggtggcatttgatggcttcagtctgtgtaaggaaggagaagatgaacacccacaatgcctgaactcccagccccatgcccgtgggtcgtcccgcgccatcttctccgtgggccccgtgagcccgagtcgcaggtggtggtacaggtgctatgcttatgactcgaactctccctatgagtggtctctacccagtgatctcctggagctcctggtcctaggtgtttctaagaagccatcactctcagtgcagccaggtcctatcgtggcccctgaggagaccctgactctgcagtgtggctctgatgctggctacaacagatttgttctgtataaggacggggaacgtgacttccttcagctcgctggcgcacagccccaggctgggctctcccaggccaacttcaccctgggccctgtgagccgctcctacgggggccagtacagatgctacggtgcacacaacctctcctccgagtggtcggcccccagtgaccccctggacatcctgatcgcaggacagttctatgacagagtctccctctcggtgcagccgggccccacggtggcctcaggagagaacgtgaccctgctgtgtcagtcacagggatggatgcaaactttccttctgaccaaggagggggcagctgatgacccatggcgtctaagatcaacgtaccaatctcaaaaataccaggctgaattccccatgggtcctgtgacctcagcccatgcggggacctacaggtgctacggctcacagagctccaaaccctacctgctgactcaccccagtgaccccctggagctcgtggtctcaggaccgtctgggggccccagctccccgacaacaggccccacctccacatctgcaggccctgaggaccagcccctcacccccaccgggtcggatccccagagtggtctgggaaggcacctgggggttgtgatcggcatcttggtggccgtcatcctactgctcctcctcctcctcctcctcttcctcatcctccgacatcgacgtcagggcaaacactggacatcgacccagagaaaggctgatttccaacatcctgcaggggctgtggggccagagcccacagacagaggcctgcagtggaggtccagcccagctgccgatgcccaggaagaaaacctctatgctgccgtgaagcacacacagcctgaggatggggtggagatggacactcggcagagcccacacgatgaagacccccaggcagtgacgtatgccgaggtgaaacactccagacctaggagagaaatggcctctcctccttccccactgtctggggaattcctggacacaaaggacagacaggcggaagaggacaggcagatggacactgaggctgctgcatctgaagccccccaggatgtgacctacgcccagctgcacagcttgaccctcagacgggaggcaactgagcctcctccatcccaggaagggccctctccagctgtgcccagcatctacgccactctggccatccactag

SEQ ID NO: 148609 - DNA, 1507 bp, Homo sapiens
  Payload ID: 9416
  Gene Symbol: LILRB1
  Gene Name: leukocyte immunoglobulin-like receptor, subfamily B (with TM and ITIM domains), member 1
  ENST ID: ENST00000621547
  CDS Start-End: 1-1458
atgacccccatcctcacggtcctgatctgtctcgggctgagtctgggcccccggacccacgtgcaggcagggcacctccccaagcccaccctctgggctgaaccaggctctgtgatcacccaggggagtcctgtgaccctcaggtgtcaggggggccaggagacccaggagtaccgtctatatagagaaaagaaaacagcaccctggattacacggatcccacaggagcttgtgaagaagggccagttccccatcccatccatcacctgggaacatgcagggcggtatcgctgttactatggtagcgacactgcaggccgctcagagagcagtgaccccctggagctggtggtgacaggagcctacatcaaacccaccctctcagcccagcccagccccgtggtgaactcaggagggaatgtaaccctccagtgtgactcacaggtggcatttgatggcttcattctgtgtaaggaaggagaagatgaacacccacaatgcctgaactcccagccccatgcccgtgggtcgtcccgcgccatcttctccgtgggccccgtgagcccgagtcgcaggtggtggtacaggtgctatgcttatgactcgaactctccctatgagtggtctctacccagtgatctcctggagctcctggtcctaggtgtttctaagaagccatcactctcagtgcagccaggtcctatcgtggcccctgaggagaccctgactctgcagtgtggctctgatgctggctacaacagatttgttctgtataaggacggggaacgtgacttccttcagctcgctggcgcacagccccaggctgggctctcccaggccaacttcaccctgggccctgtgagccgctcctacgggggccagtacagatgctacggtgcacacaacctctcctccgagtggtcggcccccagcgaccccctggacatcctgatcgcaggacagttctatgacagagtctccctctcggtgcagccgggccccacggtggcctcaggagagaacgtgaccctgctgtgtcagtcacagggatggatgcaaactttccttctgaccaaggagggggcagcccatcccctactgcatctgagatcagagcacggagctcagcagcaccaggctgaattccccatgagtcctgtgacctcagtgcacggggggacctacaggtgcttcagctcacacggcttctcccactacctgctgtcacaccccagtgaccccctggagctcatagtctcaggagcagctgataccctcagcccatcacaaaacaagtctgactctgagactgcatccccagcctcacaccttcaggattacgcagtggagaatctcatccacatgggcgtggctggcttgatcctggtggtcctcgggattctgtcatttgaggcttggcacagccagagaagcttccaagatgcagccgggaggtgaacagcagagaggataatgtactttatagagtcgtgaagcctcaggaaca

SEQ ID NO: 148610 - DNA, 1507 bp, Homo sapiens
  Payload ID: 9416
  Gene Symbol: LILRB1
  Gene Name: leukocyte immunoglobulin-like receptor, subfamily B (with TM and ITIM domains), member 1
  ENST ID: ENST00000618356
  CDS Start-End: 1-1458
atgacccccatcctcacggtcctgatctgtctcgggctgagtctgggccccaggacccacgtgcaggcagggcacctccccaagcccaccctctgggctgaaccaggctctgtgatcacccaggggagtcctgtgaccctcaggtgtcaggggggccaggagacccaggagtaccgtctatatagagaaaagaaaacagcactctggattacacggatcccacaggagcttgtgaagaagggccagttccccatcccatccatcacctgggaacatgcagggcggtatcgctgttactatggtagcgacactgcaggccgctcagagagcagtgaccccctggagctggtggtgacaggagcctacatcaaacccaccctctcagcccagcccagccccgtggtgaactcaggagggaatgtaatcctccagtgtgactcacaggtggcatttgatggcttcagtctgtgtaaggaaggagaagatgaacacccacaatgcctgaactcccagccccatgcccgtgggtcgtcccgcgccatcttctccgtgggccccgtgagcccgagtcgcaggtggtggtacaggtgctatgcttatgactcgaactctccctatgagtggtctctacccagtgatctcctggagctcctggtcctaggtgtttctaagaagccatcactctcagtgcagccaggtcctatcgtggcccctgaggagaccctgactctgcagtgtggctctgatgctggctacaacagatttgttctgtataaggacggggaacgtgacttccttcagctcgctggcgcacagccccaggctgggctctcccaggccaacttcaccctgggccctgtgagccgctcctacgggggccagtacagatgctacggtgcacacaacctctcctccgagtggtcggcccccagcgaccccctggacatcctgatcgcaggacagttctatgacagagtctccctctcggtgcagccgggccccacggtggcctcaggagagaacgtgaccctgctgtgtcagtcacagggatggatgcaaactttccttctgaccaaggagggggcagcccatcccctactgcatctgagatcagagcacggagctcagcagcaccaggctgaattccccatgagtcctgtgacctcagtgcacggggggacctacaggtgcttcagctcacacggcttctcccactacctgctgtcacaccccagtgaccccctggagctcatagtctcaggagcagctgataccctcagcccatcacaaaacaagtctgactctgagactgcatccccagcctcacaccttcaggattacgcagtggagaatctcatccacatgggcgtggctggcttgatcctggtggtcctcgggattctgtcatttgaggcttggcacagccagagaagcttccaagatgcagccgggaggtgaacagcagagaggataatgtactttatagagtcgtgaagcctcaggaaca

SEQ ID NO: 148611 - DNA, 204 bp, Homo sapiens
  Payload ID: 9416
  Gene Symbol: LILRB1
  Gene Name: leukocyte immunoglobulin-like receptor, subfamily B (with TM and ITIM domains), member 1
  ENST ID: ENST00000616890
  CDS Start-End: 1-204
gaattcctggacacaaaggacagacaggcggaagaggacaggcagatggacactgaggctgctgcatctgaagccccccaggatgtgacctacgcccagctgcacagcttgaccctcagacgggaggcaactgagcctcctccatcccaggaagggccctctccagctgtgcccagcatctacgccactctggccatccactag

SEQ ID NO: 148612 - DNA, 1458 bp, Homo sapiens
  Payload ID: 9416
  Gene Symbol: LILRB1
  Gene Name: leukocyte immunoglobulin-like receptor, subfamily B (with TM and ITIM domains), member 1
  ENST ID: ENST00000615311
  CDS Start-End: 39-1409
tcatccatccacagagcagggcagtgggaggagacgccatgacccccatcctcacggtcctgatctgtctcgggcacctccccaagcccaccctctgggctgaaccaggctctgtgatcacccaggggagtcctgtgaccctcaggtgtcaggggggccaggagacccaggagtaccgtctatatagagaaaagaaaacagcaccctggattacacggatcccacaggagcttgtgaagaagggccagttccccatcccatccatcacctgggaacatgcagggcggtatcgctgttactatggtagcgacactgcaggccgctcagagagcagtgaccccctggagctggtggtgacaggagcctacatcaaacccaccctctcagcccagcccagccccgtggtgaactcaggagggaatgtaaccctccagtgtgactcacaggtggcatttgatggcttcattctgtgtaaggaaggagaagatgaacacccacaatgcctgaactcccagccccatgcccgtgggtcgtcccgcgccatcttctccgtgggccccgtgagcccgagtcgcaggtggtggtacaggtgctatgcttatgactcgaactctccctatgagtggtctctacccagtgatctcctggagctcctggtcctaggtgtttctaagaagccatcactctcagtgcagccaggtcctatcgtggcccctgaggagaccctgactctgcagtgtggctctgatgctggctacaacagatttgttctgtataaggacggggaacgtgacttccttcagctcgctggcgcacagccccaggctgggctctcccaggccaacttcaccctgggccctgtgagccgctcctacgggggccagtacagatgctacggtgcacacaacctctcctccgagtggtcggcccccagcgaccccctggacatcctgatcgcaggacagttctatgacagagtctccctctcggtgcagccgggccccacggtggcctcaggagagaacgtgaccctgctgtgtcagtcacagggatggatgcaaactttccttctgaccaaggagggggcagcccatcccctactgcatctgagatcagagcacggagctcagcagcaccaggctgaattccccatgagtcctgtgacctcagtgcacggggggacctacaggtgcttcagctcacacggcttctcccactacctgctgtcacaccccagtgaccccctggagctcatagtctcagcatccccagcctcacaccttcaggattacgcagtggagaatctcatccacatgggcgtggctggcttgatcctggtggtcctcgggattctgtcatttgaggcttggcacagccagagaagcttccaagatgcagccgggaggtgaacagcagagaggataatgtactttatagagtcgtgaagcctcaggaaca

SEQ ID NO: 148613 - DNA, 2984 bp, Homo sapiens
  Payload ID: 9416
  Gene Symbol: LILRB1
  Gene Name: leukocyte immunoglobulin-like receptor, subfamily B (with TM and ITIM domains), member 1
  Uniprot ID: Q8NHL6
  ENST ID: ENST00000618055
  CDS Start-End: 341-2293
gaggaggaacagaaaagaaaagaaaagaaaaagtgggaaacaaataatctaagaatgaggagaaagcaagaagagtgacccccttgtgggcactccattggttttatggcgcctctactttctggagtttgtgtaaaacaaaaatattatggtctttgtgcacatttacatcaagctcagcctgggcggcacagccagatgcgagatgcgtctctgctgatctgagtctgcctgcagcatggacctgggtcttccctgaagcatctccagggctggagggacgactgccatgcaccgagggctcatccatccacagagcagggcagtgggaggagacgccatgacccccatcctcacggtcctgatctgtctcgggctgagtctgggccccaggacccacgtgcaggcagggcacctccccaagcccaccctctgggctgaaccaggctctgtgatcacccaggggagtcctgtgaccctcaggtgtcaggggggccaggagacccaggagtaccgtctatatagagaaaagaaaacagcactctggattacacggatcccacaggagcttgtgaagaagggccagttccccatcccatccatcacctgggaacatgcagggcggtatcgctgttactatggtagcgacactgcaggccgctcagagagcagtgaccccctggagctggtggtgacaggagcctacatcaaacccaccctctcagcccagcccagccccgtggtgaactcaggagggaatgtaatcctccagtgtgactcacaggtggcatttgatggcttcagtctgtgtaaggaaggagaagatgaacacccacaatgcctgaactcccagccccatgcccgtgggtcgtcccgcgccatcttctccgtgggccccgtgagcccgagtcgcaggtggtggtacaggtgctatgcttatgactcgaactctccctatgagtggtctctacccagtgatctcctggagctcctggtcctaggtgtttctaagaagccatcactctcagtgcagccaggtcctatcgtggcccctgaggagaccctgactctgcagtgtggctctgatgctggctacaacagatttgttctgtataaggacggggaacgtgacttccttcagctcgctggcgcacagccccaggctgggctctcccaggccaacttcaccctgggccctgtgagccgctcctacgggggccagtacagatgctacggtgcacacaacctctcctccgagtggtcggcccccagtgaccccctggacatcctgatcgcaggacagttctatgacagagtctccctctcggtgcagccgggccccacggtggcctcaggagagaacgtgaccctgctgtgtcagtcacagggatggatgcaaactttccttctgaccaaggagggggcagctgatgacccatggcgtctaagatcaacgtaccaatctcaaaaataccaggctgaattccccatgggtcctgtgacctcagcccatgcggggacctacaggtgctacggctcacagagctccaaaccctacctgctgactcaccccagtgaccccctggagctcgtggtctcaggaccgtctgggggccccagctccccgacaacaggccccacctccacatctggccctgaggaccagcccctcacccccaccgggtcggatccccagagtggtctgggaaggcacctgggggttgtgatcggcatcttggtggccgtcatcctactgctcctcctcctcctcctcctcttcctcatcctccgacatcgacgtcagggcaaacactggacatcgacccagagaaaggctgatttccaacatcctgcaggggctgtggggccagagcccacagacagaggcctgcagtggaggtccagcccagctgccgatgcccaggaagaaaacctctatgctgccgtgaagcacacacagcctgaggatggggtggagatggacactcggagcccacacgatgaagacccccaggcagtgacgtatgccgaggtgaaacactccagacctaggagagaaatggcctctcctccttccccactgtctggggaattcctggacacaaaggacagacaggcggaagaggacaggcagatggacactgaggctgctgcatctgaagccccccaggatgtgacctacgcccagctgcacagcttgaccctcagacgggaggcaactgagcctcctccatcccaggaagggccctctccagctgtgcccagcatctacgccactctggccatccactagcccagggggggacgcagaccccacactccatggagtctggaatgcatgggagctgcccccccagtggacaccattggaccccacccagcctggatctaccccaggagactctgggaacttttaggggtcactcaattctgcagtataaataactaatgtctctacaattttgaaataaagcaacagacttctcaataatcaatgaagtagctgagaaaactaagtcagaaagtgcattaaactgaatcacaatgtaaatattacacatcaagcgatgaaactggaaaactacaagccacgaatgaatgaattaggaaagaaaaaaagtaggaaatgaatgatcttggctttcctataagaaatttagggcagggcacggtggctcacgcctgtaattccagcactttgggaggccgaggcgggcagatcacgagttcaggagatcgagaccatcttggccaacatggtgaaaccctgtctctcctaaaaatacaaaaattagctggatgtggtggcagtgcctgtaatcccagctatttgggaggctgaggcaggagaatcgcttgaaccagggagtcagaggtttcagtgagccaagatcgcaccactgctctccagcctggcgacagagggagactccatctcaaattaaaaaaaaaaaaaaaaaagaaagaaaaagagaaaaaagaaa

SEQ ID NO: 148614 - DNA, 2017 bp, Homo sapiens
  Payload ID: 9416
  Gene Symbol: LILRB1
  Gene Name: leukocyte immunoglobulin-like receptor, subfamily B (with TM and ITIM domains), member 1
  ENST ID: ENST00000620471
  CDS Start-End: 1-1532
tgacccccatcctcacggtcctgatctgtctcgggctgagtctgggccccaggacccacgtgcaggcagggcacctccccaagcccaccctctgggctgaaccaggctctgtgatcacccaggggagtcctgtgaccctcaggtgtcaggggggccaggagacccaggagtaccgtctatatagagaaaagaaaacagcactctggattacacggatcccacaggagcttgtgaagaagggccagttccccatcccatccatcacctgggaacatgcagggcggtatcgctgttactatggtagcgacactgcaggccgctcagagagcagtgaccccctggagctggtggtgacaggagcctacatcaaacccaccctctcagcccagcccagccccgtggtgaactcaggagggaatgtaatcctccagtgtgactcacaggtggcatttgatggcttcagtctgtgtaaggaaggagaagatgaacacccacaatgcctgaactcccagccccatgcccgtgggtcgtcccgcgccatcttctccgtgggccccgtgagcccgagtcgcaggtggtggtacaggtgctatgcttatgactcgaactctccctatgagtggtctctacccagtgatctcctggagctcctggtcctaggtgtttctaagaagccatcactctcagtgcagccaggtcctatcgtggcccctgaggagaccctgactctgcagtgtggctctgatgctggctacaacagatttgttctgtataaggacggggaacgtgacttccttcagctcgctggcgcacagccccaggctgggctctcccaggccaacttcaccctgggccctgtgagccgctcctacgggggccagtacagatgctacggtgcacacaacctctcctccgagtggtcggcccccagcgaccccctggacatcctgatcgcaggacagttctatgacagagtctccctctcggtgcagccgggccccacggtggcctcaggagagaacgtgaccctgctgtgtcagtcacagggatggatgcaaactttccttctgaccaaggagggggcagctgatgacccatggcgtctaagatcaacgtaccaatctcaaaaataccaggctgaattccccatgggtcctgtgacctcagcccatgcggggacctacaggtgctacggctcacagagctccaaaccctacctgctgactcaccccagtgaccccctggagctcgtggtctcaggaccgtctgggggccccagctccccgacaacaggccccacctccacatctggccctgaggaccagcccctcacccccaccgggtcggatccccagagtggtctgggaaggcacctgggggttgtgatcggcatcttggtggccgtcatcctactgctcctcctcctcctcctcctcttcctcatcctccgacatcgacgtcagggcaaacactggacatcgagtccagcccagctgccgatgcccaggaagaaaacctctatgctgccgtgaagcacacacagcctgaggatggggtggagatggacactcggagcccacacgatgaagacccccaggcagtgacgtatgccgaggtgaaacactccagacctaggagagaaatggcctctcctccttccccactgtctggggaattcctggacacaaaggacagacaggcggaagaggacaggcagatggacactgaggctgctgcatctgaagccccccaggatgtgacctacgcccagctgcacagcttgaccctcagacgggaggcaactgagcctcctccatcccaggaagggccctctccagctgtgcccagcatctacgccactctggccatccactagcccagggggggacgcagaccccacactccatggagtctggaatgcatgggagctgcccccccagtggacaccattggaccccacccagcctggatctaccccaggagactctgggaacttttaggggtcactcaattctgc

SEQ ID NO: 148615 - DNA, 3216 bp, Homo sapiens
  Payload ID: 9416
  Gene Symbol: LILRB1
  Gene Name: leukocyte immunoglobulin-like receptor, subfamily B (with TM and ITIM domains), member 1
  Uniprot ID: Q8NHL6
  ENST ID: ENST00000616408
  CDS Start-End: 586-2538
aaatgagttttaaaaaggcttgtccaggaagcacatatgggagctggtcactctgcattttgggccctcctggaggtgtttagaccttccgagagagaaactgagacacatgagagggaagaaatgactcagtggtgagaccctgtggagtcccacccacaaccagcacactgtgacccactgcacaaacctctagcccacagctcacttcctcctttaagaagagaagagaaaagaggagaggagaggaggaacagaaaagaaaagaaaagaaaaagtgggaaacaaataatctaagaatgaggagaaagcaagaagagtgacccccttgtgggcactccattggttttatggcgcctctactttctggagtttgtgtaaaacaaaaatattatggtctttgtgcacatttacatcaagctcagcctgggcggcacagccagatgcgagatgcgtctctgctgatctgagtctgcctgcagcatggacctgggtcttccctgaagcatctccagggctggagggacgactgccatgcaccgagggctcatccatccacagagcagggcagtgggaggagacgccatgacccccatcctcacggtcctgatctgtctcgggctgagtctgggcccccggacccacgtgcaggcagggcacctccccaagcccaccctctgggctgaaccaggctctgtgatcacccaggggagtcctgtgaccctcaggtgtcaggggggccaggagacccaggagtaccgtctatatagagaaaagaaaacagcaccctggattacacggatcccacaggagcttgtgaagaagggccagttccccatcccatccatcacctgggaacatgcagggcggtatcgctgttactatggtagcgacactgcaggccgctcagagagcagtgaccccctggagctggtggtgacaggagcctacatcaaacccaccctctcagcccagcccagccccgtggtgaactcaggagggaatgtaaccctccagtgtgactcacaggtggcatttgatggcttcattctgtgtaaggaaggagaagatgaacacccacaatgcctgaactcccagccccatgcccgtgggtcgtcccgcgccatcttctccgtgggccccgtgagcccgagtcgcaggtggtggtacaggtgctatgcttatgactcgaactctccctatgagtggtctctacccagtgatctcctggagctcctggtcctaggtgtttctaagaagccatcactctcagtgcagccaggtcctatcgtggcccctgaggagaccctgactctgcagtgtggctctgatgctggctacaacagatttgttctgtataaggacggggaacgtgacttccttcagctcgctggcgcacagccccaggctgggctctcccaggccaacttcaccctgggccctgtgagccgctcctacgggggccagtacagatgctacggtgcacacaacctctcctccgagtggtcggcccccagcgaccccctggacatcctgatcgcaggacagttctatgacagagtctccctctcggtgcagccgggccccacggtggcctcaggagagaacgtgaccctgctgtgtcagtcacagggatggatgcaaactttccttctgaccaaggagggggcagctgatgacccatggcgtctaagatcaacgtaccaatctcaaaaataccaggctgaattccccatgggtcctgtgacctcagcccatgcggggacctacaggtgctacggctcacagagctccaaaccctacctgctgactcaccccagtgaccccctggagctcgtggtctcaggaccgtctgggggccccagctccccgacaacaggccccacctccacatctggccctgaggaccagcccctcacccccaccgggtcggatccccagagtggtctgggaaggcacctgggggttgtgatcggcatcttggtggccgtcatcctactgctcctcctcctcctcctcctcttcctcatcctccgacatcgacgtcagggcaaacactggacatcgacccagagaaaggctgatttccaacatcctgcaggggctgtggggccagagcccacagacagaggcctgcagtggaggtccagcccagctgccgatgcccaggaagaaaacctctatgctgccgtgaagcacacacagcctgaggatggggtggagatggacactcggagcccacacgatgaagacccccaggcagtgacgtatgccgaggtgaaacactccagacctaggagagaaatggcctctcctccttccccactgtctggggaattcctggacacaaaggacagacaggcggaagaggacaggcagatggacactgaggctgctgcatctgaagccccccaggatgtgacctacgcccagctgcacagcttgacccttagacggaaggcaactgagcctcctccatcccaggaagggccctctccagctgtgcccagcatctacgccactctggccatccactagcccagggggggacgcagaccccacactccatggagtctggaatgcatgggagctgcccccccagtggacaccattggaccccacccagcctggatctaccccaggagactctgggaacttttaggggtcactcaattctgcagtataaataactaatgtctctacaattttgaaataaagcaacagacttctcaataatcaatgaagtagctgagaaaactaagtcagaaagtgcattaaactgaatcacaatgtaaatattacacatcaagcgatgaaactggaaaactacaagccacgaatgaatgaattaggaaagaaaaaaagtaggaaatgaatgatcttggctttcctataagaaatttagggcagggcacggtggctcacgcctgtaattccagcactttgggaggccgaggcgggcagatcacgagttcaggagatcgagaccatcttggccaacatggtgaaaccctgtctctcctaaaaatacaaaaattagctggatgtggtggcagtgcctgtaatcccagctatttgggaggctgaggcaggagaatcgcttgaaccagggagtcagaggtttcagtgagccaagatcgcaccactgctctccagcctggcgacagagggagactccatctcaaattaaaaaaaaaaaaaaaaaagaaagaaaaa

SEQ ID NO: 148616 - DNA, 2835 bp, Homo sapiens
  Payload ID: 9416
  Gene Symbol: LILRB1
  Gene Name: leukocyte immunoglobulin-like receptor, subfamily B (with TM and ITIM domains), member 1
  ENST ID: ENST00000610641
  CDS Start-End: 141-2144
tcttctgtgctcgctgccacacgcagctcagcctgggcggcacagccagatgcgagatgcgtctctgctgatctgagtctgcctgcagcatggacctgggtcttccctgaagcatctccagggctggagggacgactgccatgcaccgagggctcatccatccacagagcagggcagtgggaggagacgccatgacccccatcctcacggtcctgatctgtctcgggctgagtctgggccccaggacccacgtgcaggcagggcacctccccaagcccaccctctgggctgaaccaggctctgtgatcacccaggggagtcctgtgaccctcaggtgtcaggggggccaggagacccaggagtaccgtctatatagagaaaagaaaacagcactctggattacacggatcccacaggagcttgtgaagaagggccagttccccatcccatccatcacctgggaacatgcagggcggtatcgctgttactatggtagcgacactgcaggccgctcagagagcagtgaccccctggagctggtggtgacaggagcctacatcaaacccaccctctcagcccagcccagccccgtggtgaactcaggagggaatgtaatcctccagtgtgactcacaggtggcatttgatggcttcagtctgtgtaaggaaggagaagatgaacacccacaatgcctgaactcccagccccatgcccgtgggtcgtcccgcgccatcttctccgtgggccccgtgagcccgagtcgcaggtggtggtacaggtgctatgcttatgactcgaactctccctatgagtggtctctacccagtgatctcctggagctcctggtcctaggtgtttctaagaagccatcactctcagtgcagccaggtcctatcgtggcccctgaggagaccctgactctgcagtgtggctctgatgctggctacaacagatttgttctgtataaggacggggaacgtgacttccttcagctcgctggcgcacagccccaggctgggctctcccaggccaacttcaccctgggccctgtgagccgctcctacgggggccagtacagatgctacggtgcacacaacctctcctccgagtggtcggcccccagcgaccccctggacatcctgatcgcaggacagttctatgacagagtctccctctcggtgcagccgggccccacggtggcctcaggagagaacgtgaccctgctgtgtcagtcacagggatggatgcaaactttccttctgaccaaggagggggcagctgatgacccatggcgtctaagatcaacgtaccaatctcaaaaataccaggctgaattccccatgggtcctgtgacctcagcccatgcggggacctacaggtgctacggctcacagagctccaaaccctacctgctgactcaccccagtgaccccctggagctcgtggtctcaggaccgtctgggggccccagctccccgacaacaggccccacctccacatctggccctgaggaccagcccctcacccccaccgggtcggatccccagagtggtctgggaaggcacctgggggttgtgatcggcatcttggtggccgtcatcctactgctcctcctcctcctcctcctcttcctcatcctccgacatcgacgtcagggcaaacactggacatcgacccagagaaaggctgatttccaacatcctgcaggggctgtggggccagagcccacagacagaggcctgcagtggaggtccagcccagctgccgatgcccaggaagaaaacctctatgctgccgtgaagcacacacagcctgaggatggggtggagatggacactcggagcccacacgatgaagacccccaggcagtgacgtatgccgaggtgaaacactccagacctaggagagaaatggcctctcctccttccccactgtctggggaattcctggacacaaaggacagacaggcggaagaggacaggcagatggacactgaggctgctgcatctgaagccccccaggatgtgacctacgcccagctgcacagcttgaccctcagacgggaggcaactgagcctcctccatcccaggaagggccctctccagctgtgcccagcatctacgccactctggccatccactagcccagggggggacgcagaccccacactccatggagtctggaatgcatgggagctgcccccccagtggacaccattggaccccacccagcctggatctaccccaggagactctgggaacttttaggggtcactcaattctgcagtataaataactaatgtctctacaattttgaaataaagcaacagacttctcaataatcaatgaagtagctgagaaaactaagtcagaaagtgcattaaactgaatcacaatgtaaatattacacatcaagcgatgaaactggaaaactacaagccacgaatgaatgaattaggaaagaaaaaaagtaggaaatgaatgatcttggctttcctataagaaatttagggcagggcacggtggctcacgcctgtaattccagcactttgggaggccgaggcgggcagatcacgagttcaggagatcgagaccatcttggccaacatggtgaaaccctgtctctcctaaaaatacaaaaattagctggatgtggtggcagtgcctgtaatcccagctatttgggaggctgaggcaggagaatcgcttgaaccagggagtcagaggtttcagtgagccaagatcgcaccactgctctccagcctggcgacagagggagactccatctcaaattaaaaaaaaaaaaaaaaaagaaagaaaaagagaaaaaagaaa

SEQ ID NO: 148617 - DNA, 2774 bp, Homo sapiens
  Payload ID: 9416
  Gene Symbol: LILRB1
  Gene Name: leukocyte immunoglobulin-like receptor, subfamily B (with TM and ITIM domains), member 1
  ENST ID: ENST00000619395
  CDS Start-End: 166-2124
ctcagcctgggcggcacagccagatgcgagatgcgtctctgctgatctgagtctgcctgcagcatggacctgggtcttccctgaagcatctccagggctggagggacgactgccatgcaccgagggctcatccatccacagagcagggcagtgggaggagacgccatgacccccatcctcacggtcctgatctgtctcgggctgagtctgggcccccggacccacgtgcaggcagggcacctccccaagcccaccctctgggctgaaccaggctctgtgatcacccaggggagtcctgtgaccctcaggtgtcaggggggccaggagacccaggagtaccgtctatatagagaaaagaaaacagcaccctggattacacggatcccacaggagcttgtgaagaagggccagttccccatcccatccatcacctgggaacatgcagggcggtatcgctgttactatggtagcgacactgcaggccgctcagagagcagtgaccccctggagctggtggtgacaggagcctacatcaaacccaccctctcagcccagcccagccccgtggtgaactcaggagggaatgtaaccctccagtgtgactcacaggtggcatttgatggcttcattctgtgtaaggaaggagaagatgaacacccacaatgcctgaactcccagccccatgcccgtgggtcgtcccgcgccatcttctccgtgggccccgtgagcccgagtcgcaggtggtggtacaggtgctatgcttatgactcgaactctccctatgagtggtctctacccagtgatctcctggagctcctggtcctaggtgtttctaagaagccatcactctcagtgcagccaggtcctatcgtggcccctgaggagaccctgactctgcagtgtggctctgatgctggctacaacagatttgttctgtataaggacggggaacgtgacttccttcagctcgctggcgcacagccccaggctgggctctcccaggccaacttcaccctgggccctgtgagccgctcctacgggggccagtacagatgctacggtgcacacaacctctcctccgagtggtcggcccccagcgaccccctggacatcctgatcgcaggacagttctatgacagagtctccctctcggtgcagccgggccccacggtggcctcaggagagaacgtgaccctgctgtgtcagtcacagggatggatgcaaactttccttctgaccaaggagggggcagctgatgacccatggcgtctaagatcaacgtaccaatctcaaaaataccaggctgaattccccatgggtcctgtgacctcagcccatgcggggacctacaggtgctacggctcacagagctccaaaccctacctgctgactcaccccagtgaccccctggagctcgtggtctcaggaccgtctgggggccccagctccccgacaacaggccccacctccacatctgcaggccctgaggaccagcccctcacccccaccgggtcggatccccagagtggtctgggaaggcacctgggggttgtgatcggcatcttggtggccgtcatcctactgctcctcctcctcctcctcctcttcctcatcctccgacatcgacgtcagggcaaacactggacatcgacccagagaaaggctgatttccaacatcctgcaggggctgtggggccagagcccacagacagaggcctgcagtggaggtccagcccagctgccgatgcccaggaagaaaacctctatgctgccgtgaagcacacacagcctgaggatggggtggagatggacactcggcagagcccacacgatgaagacccccaggcagtgacgtatgccgaggtgaaacactccagacctaggagagaaatggcctctcctccttccccactgtctggggaattcctggacacaaaggacagacaggcggaagaggacaggcagatggacactgaggctgctgcatctgaagccccccaggatgtgacctacgcccagctgcacagcttgacccttagacggaaggcaactgagcctcctccatcccaggaagggccctctccagctgtgcccagcatctacgccactctggccatccactagcccagggggggacgcagaccccacactccatggagtctggaatgcatgggagctgcccccccagtggacaccattggaccccacccagcctggatctaccccaggagactctgggaacttttaggggtcactcaattctgcagtataaataactaatgtctctacaattttgaaataaagcaacagacttctcaataatcaatgaagtagctgagaaaactaagtcagaaagtgcattaaactgaatcacaatgtaaatattacacatcaagcgatgaaactggaaaactacaagccacgaatgaatgaattaggaaagaaaaaaagtaggaaatgaatgatcttggctttcctataagaaatttagggcagggcacggtggctcacgcctgtaattccagcactttgggaggccgaggcgggcagatcacgagttcaggagatcgagaccatcttggccaacatggtgaaaccctgtctctcctaaaaatacaaaaattagctggatgtggtggcagtgcctgtaatcccagctatttgggaggctgaggcaggagaatcgcttgaaccagggagtcagaggtttcagtgagccaagatcgcaccactgctctccagcctggcgacagagggagactccatctcaaatt

SEQ ID NO: 148618 - DNA, 2018 bp, Homo sapiens
  Payload ID: 9416
  Gene Symbol: LILRB1
  Gene Name: leukocyte immunoglobulin-like receptor, subfamily B (with TM and ITIM domains), member 1
  ENST ID: ENST00000612335
  CDS Start-End: 1-1533
atgacccccatcctcacggtcctgatctgtctcgggctgagtctgggccccaggacccacgtgcaggcagggcacctccccaagcccaccctctgggctgaaccaggctctgtgatcacccaggggagtcctgtgaccctcaggtgtcaggggggccaggagacccaggagtaccgtctatatagagaaaagaaaacagcactctggattacacggatcccacaggagcttgtgaagaagggccagttccccatcccatccatcacctgggaacatgcagggcggtatcgctgttactatggtagcgacactgcaggccgctcagagagcagtgaccccctggagctggtggtgacaggagcctacatcaaacccaccctctcagcccagcccagccccgtggtgaactcaggagggaatgtaatcctccagtgtgactcacaggtggcatttgatggcttcagtctgtgtaaggaaggagaagatgaacacccacaatgcctgaactcccagccccatgcccgtgggtcgtcccgcgccatcttctccgtgggccccgtgagcccgagtcgcaggtggtggtacaggtgctatgcttatgactcgaactctccctatgagtggtctctacccagtgatctcctggagctcctggtcctaggtgtttctaagaagccatcactctcagtgcagccaggtcctatcgtggcccctgaggagaccctgactctgcagtgtggctctgatgctggctacaacagatttgttctgtataaggacggggaacgtgacttccttcagctcgctggcgcacagccccaggctgggctctcccaggccaacttcaccctgggccctgtgagccgctcctacgggggccagtacagatgctacggtgcacacaacctctcctccgagtggtcggcccccagtgaccccctggacatcctgatcgcaggacagttctatgacagagtctccctctcggtgcagccgggccccacggtggcctcaggagagaacgtgaccctgctgtgtcagtcacagggatggatgcaaactttccttctgaccaaggagggggcagctgatgacccatggcgtctaagatcaacgtaccaatctcaaaaataccaggctgaattccccatgggtcctgtgacctcagcccatgcggggacctacaggtgctacggctcacagagctccaaaccctacctgctgactcaccccagtgaccccctggagctcgtggtctcaggaccgtctgggggccccagctccccgacaacaggccccacctccacatctggccctgaggaccagcccctcacccccaccgggtcggatccccagagtggtctgggaaggcacctgggggttgtgatcggcatcttggtggccgtcatcctactgctcctcctcctcctcctcctcttcctcatcctccgacatcgacgtcagggcaaacactggacatcgagtccagcccagctgccgatgcccaggaagaaaacctctatgctgccgtgaagcacacacagcctgaggatggggtggagatggacactcggagcccacacgatgaagacccccaggcagtgacgtatgccgaggtgaaacactccagacctaggagagaaatggcctctcctccttccccactgtctggggaattcctggacacaaaggacagacaggcggaagaggacaggcagatggacactgaggctgctgcatctgaagccccccaggatgtgacctacgcccagctgcacagcttgaccctcagacgggaggcaactgagcctcctccatcccaggaagggccctctccagctgtgcccagcatctacgccactctggccatccactagcccagggggggacgcagaccccacactccatggagtctggaatgcatgggagctgcccccccagtggacaccattggaccccacccagcctggatctaccccaggagactctgggaacttttaggggtcactcaattctgc

SEQ ID NO: 148619 - DNA, 1959 bp, Homo sapiens
  Payload ID: 9416
  Gene Symbol: LILRB1
  Gene Name: leukocyte immunoglobulin-like receptor, subfamily B (with TM and ITIM domains), member 1
  ENST ID: ENST00000620642
  CDS Start-End: 1-1959
atgacccccatcctcacggtcctgatctgtctcgggctgagtctgggcccccggacccacgtgcaggcagggcacctccccaagcccaccctctgggctgaaccaggctctgtgatcacccaggggagtcctgtgaccctcaggtgtcaggggggccaggagacccaggagtaccgtctatatagagaaaagaaaacagcaccctggattacacggatcccacaggagcttgtgaagaagggccagttccccatcccatccatcacctgggaacatgcagggcggtatcgctgttactatggtagcgacactgcaggccgctcagagagcagtgaccccctggagctggtggtgacaggagcctacatcaaacccaccctctcagcccagcccagccccgtggtgaactcaggagggaatgtaaccctccagtgtgactcacaggtggcatttgatggcttcattctgtgtaaggaaggagaagatgaacacccacaatgcctgaactcccagccccatgcccgtgggtcgtcccgcgccatcttctccgtgggccccgtgagcccgagtcgcaggtggtggtacaggtgctatgcttatgactcgaactctccctatgagtggtctctacccagtgatctcctggagctcctggtcctaggtgtttctaagaagccatcactctcagtgcagccaggtcctatcgtggcccctgaggagaccctgactctgcagtgtggctctgatgctggctacaacagatttgttctgtataaggacggggaacgtgacttccttcagctcgctggcgcacagccccaggctgggctctcccaggccaacttcaccctgggccctgtgagccgctcctacgggggccagtacagatgctacggtgcacacaacctctcctccgagtggtcggcccccagcgaccccctggacatcctgatcgcaggacagttctatgacagagtctccctctcggtgcagccgggccccacggtggcctcaggagagaacgtgaccctgctgtgtcagtcacagggatggatgcaaactttccttctgaccaaggagggggcagctgatgacccatggcgtctaagatcaacgtaccaatctcaaaaataccaggctgaattccccatgggtcctgtgacctcagcccatgcggggacctacaggtgctacggctcacagagctccaaaccctacctgctgactcaccccagtgaccccctggagctcgtggtctcaggaccgtctgggggccccagctccccgacaacaggccccacctccacatctgcaggccctgaggaccagcccctcacccccaccgggtcggatccccagagtggtctgggaaggcacctgggggttgtgatcggcatcttggtggccgtcatcctactgctcctcctcctcctcctcctcttcctcatcctccgacatcgacgtcagggcaaacactggacatcgacccagagaaaggctgatttccaacatcctgcaggggctgtggggccagagcccacagacagaggcctgcagtggaggtccagcccagctgccgatgcccaggaagaaaacctctatgctgccgtgaagcacacacagcctgaggatggggtggagatggacactcggcagagcccacacgatgaagacccccaggcagtgacgtatgccgaggtgaaacactccagacctaggagagaaatggcctctcctccttccccactgtctggggaattcctggacacaaaggacagacaggcggaagaggacaggcagatggacactgaggctgctgcatctgaagccccccaggatgtgacctacgcccagctgcacagcttgacccttagacggaaggcaactgagcctcctccatcccaggaagggccctctccagctgtgcccagcatctacgccactctggccatccactag

SEQ ID NO: 148620 - DNA, 2720 bp, Homo sapiens
  Payload ID: 9416
  Gene Symbol: LILRB1
  Gene Name: leukocyte immunoglobulin-like receptor, subfamily B (with TM and ITIM domains), member 1
  ENST ID: ENST00000616565
  CDS Start-End: 166-2070
ctcagcctgggcggcacagccagatgcgagatgcgtctctgctgatctgagtctgcctgcagcatggacctgggtcttccctgaagcatctccagggctggagggacgactgccatgcaccgagggctcatccatccacagagcagggcagtgggaggagacgccatgacccccatcctcacggtcctgatctgtctcgggctgagtctgggccccaggacccacgtgcaggcagggcacctccccaagcccaccctctgggctgaaccaggctctgtgatcacccaggggagtcctgtgaccctcaggtgtcaggggggccaggagacccaggagtaccgtctatatagagaaaagaaaacagcactctggattacacggatcccacaggagcttgtgaagaagggccagttccccatcccatccatcacctgggaacatgcagggcggtatcgctgttactatggtagcgacactgcaggccgctcagagagcagtgaccccctggagctggtggtgacaggagcctacatcaaacccaccctctcagcccagcccagccccgtggtgaactcaggagggaatgtaatcctccagtgtgactcacaggtggcatttgatggcttcagtctgtgtaaggaaggagaagatgaacacccacaatgcctgaactcccagccccatgcccgtgggtcgtcccgcgccatcttctccgtgggccccgtgagcccgagtcgcaggtggtggtacaggtgctatgcttatgactcgaactctccctatgagtggtctctacccagtgatctcctggagctcctggtcctaggtgtttctaagaagccatcactctcagtgcagccaggtcctatcgtggcccctgaggagaccctgactctgcagtgtggctctgatgctggctacaacagatttgttctgtataaggacggggaacgtgacttccttcagctcgctggcgcacagccccaggctgggctctcccaggccaacttcaccctgggccctgtgagccgctcctacgggggccagtacagatgctacggtgcacacaacctctcctccgagtggtcggcccccagtgaccccctggacatcctgatcgcaggacagttctatgacagagtctccctctcggtgcagccgggccccacggtggcctcaggagagaacgtgaccctgctgtgtcagtcacagggatggatgcaaactttccttctgaccaaggagggggcagctgatgacccatggcgtctaagatcaacgtaccaatctcaaaaataccaggctgaattccccatgggtcctgtgacctcagcccatgcggggacctacaggtgctacggctcacagagctccaaaccctacctgctgactcaccccagtgaccccctggagctcgtggtctcagcaggccctgaggaccagcccctcacccccaccgggtcggatccccagagtggtctgggaaggcacctgggggttgtgatcggcatcttggtggccgtcatcctactgctcctcctcctcctcctcctcttcctcatcctccgacatcgacgtcagggcaaacactggacatcgacccagagaaaggctgatttccaacatcctgcaggggctgtggggccagagcccacagacagaggcctgcagtggaggtccagcccagctgccgatgcccaggaagaaaacctctatgctgccgtgaagcacacacagcctgaggatggggtggagatggacactcggagcccacacgatgaagacccccaggcagtgacgtatgccgaggtgaaacactccagacctaggagagaaatggcctctcctccttccccactgtctggggaattcctggacacaaaggacagacaggcggaagaggacaggcagatggacactgaggctgctgcatctgaagccccccaggatgtgacctacgcccagctgcacagcttgaccctcagacgggaggcaactgagcctcctccatcccaggaagggccctctccagctgtgcccagcatctacgccactctggccatccactagcccagggggggacgcagaccccacactccatggagtctggaatgcatgggagctgcccccccagtggacaccattggaccccacccagcctggatctaccccaggagactctgggaacttttaggggtcactcaattctgcagtataaataactaatgtctctacaattttgaaataaagcaacagacttctcaataatcaatgaagtagctgagaaaactaagtcagaaagtgcattaaactgaatcacaatgtaaatattacacatcaagcgatgaaactggaaaactacaagccacgaatgaatgaattaggaaagaaaaaaagtaggaaatgaatgatcttggctttcctataagaaatttagggcagggcacggtggctcacgcctgtaattccagcactttgggaggccgaggcgggcagatcacgagttcaggagatcgagaccatcttggccaacatggtgaaaccctgtctctcctaaaaatacaaaaattagctggatgtggtggcagtgcctgtaatcccagctatttgggaggctgaggcaggagaatcgcttgaaccagggagtcagaggtttcagtgagccaagatcgcaccactgctctccagcctggcgacagagggagactccatctcaaatt

SEQ ID NO: 148621 - DNA, 503 bp, Homo sapiens
  Payload ID: 9416
  Gene Symbol: LILRB1
  Gene Name: leukocyte immunoglobulin-like receptor, subfamily B (with TM and ITIM domains), member 1
  ENST ID: ENST00000610815
  CDS Start-End: 1-204
gaattcctggacacaaaggacagacaggcggaagaggacaggcagatggacactgaggctgctgcatctgaagccccccaggatgtgacctacgcccagctgcacagcttgaccctcagacgggaggcaactgagcctcctccatcccaggaagggccctctccagctgtgcccagcatctacgccactctggccatccactagcccagggggggacgcagaccccacactccatggagtctggaatgcatgggagctgcccccccagtggacaccattggaccccacccagcctggatctaccccaggagactctgggaacttttaggggtcactcaattctgcagtataaataactaatgtctctacaattttgaaataaagcaacagacttctcaataatcaatgaagtagctgagaaaactaagtcagaaagtgcattaaactgaatcacaatgtaaatattacacatcaagcgatgaaactggaaaactacaagccac

SEQ ID NO: 148622 - DNA, 2425 bp, Homo sapiens
  Payload ID: 9416
  Gene Symbol: LILRB1
  Gene Name: leukocyte immunoglobulin-like receptor, subfamily B (with TM and ITIM domains), member 1
  ENST ID: ENST00000611295
  CDS Start-End: 120-2126
cgcagctcagcctgggcggcacagccagatgcgagatgcgtctctgctgatctgagtctgcctgcagcatggacctgggtcttccctgaagcatctccagggctggagggacgactgccatgcaccgagggctcatccatccacagagcagggcagtgggaggagacgccatgacccccatcctcacggtcctgatctgtctcgggctgagtctgggccccaggacccacgtgcaggcagggcacctccccaagcccaccctctgggctgaaccaggctctgtgatcacccaggggagtcctgtgaccctcaggtgtcaggggggccaggagacccaggagtaccgtctatatagagaaaagaaaacagcactctggattacacggatcccacaggagcttgtgaagaagggccagttccccatcccatccatcacctgggaacatgcagggcggtatcgctgttactatggtagcgacactgcaggccgctcagagagcagtgaccccctggagctggtggtgacaggagcctacatcaaacccaccctctcagcccagcccagccccgtggtgaactcaggagggaatgtaatcctccagtgtgactcacaggtggcatttgatggcttcagtctgtgtaaggaaggagaagatgaacacccacaatgcctgaactcccagccccatgcccgtgggtcgtcccgcgccatcttctccgtgggccccgtgagcccgagtcgcaggtggtggtacaggtgctatgcttatgactcgaactctccctatgagtggtctctacccagtgatctcctggagctcctggtcctaggtgtttctaagaagccatcactctcagtgcagccaggtcctatcgtggcccctgaggagaccctgactctgcagtgtggctctgatgctggctacaacagatttgttctgtataaggacggggaacgtgacttccttcagctcgctggcgcacagccccaggctgggctctcccaggccaacttcaccctgggccctgtgagccgctcctacgggggccagtacagatgctacggtgcacacaacctctcctccgagtggtcggcccccagcgaccccctggacatcctgatcgcaggacagttctatgacagagtctccctctcggtgcagccgggccccacggtggcctcaggagagaacgtgaccctgctgtgtcagtcacagggatggatgcaaactttccttctgaccaaggagggggcagctgatgacccatggcgtctaagatcaacgtaccaatctcaaaaataccaggctgaattccccatgggtcctgtgacctcagcccatgcggggacctacaggtgctacggctcacagagctccaaaccctacctgctgactcaccccagtgaccccctggagctcgtggtctcaggaccgtctgggggccccagctccccgacaacaggccccacctccacatctggccctgaggaccagcccctcacccccaccgggtcggatccccagagtggtctgggaaggcacctgggggttgtgatcggcatcttggtggccgtcatcctactgctcctcctcctcctcctcctcttcctcatcctccgacatcgacgtcagggcaaacactggacatcgacccagagaaaggctgatttccaacatcctgcaggggctgtggggccagagcccacagacagaggcctgcagtggaggtccagcccagctgccgatgcccaggaagaaaacctctatgctgccgtgaagcacacacagcctgaggatggggtggagatggacactcggcagagcccacacgatgaagacccccaggcagtgacgtatgccgaggtgaaacactccagacctaggagagaaatggcctctcctccttccccactgtctggggaattcctggacacaaaggacagacaggcggaagaggacaggcagatggacactgaggctgctgcatctgaagccccccaggatgtgacctacgcccagctgcacagcttgaccctcagacgggaggcaactgagcctcctccatcccaggaagggccctctccagctgtgcccagcatctacgccactctggccatccactagcccagggggggacgcagaccccacactccatggagtctggaatgcatgggagctgcccccccagtggacaccattggaccccacccagcctggatctaccccaggagactctgggaacttttaggggtcactcaattctgcagtataaataactaatgtctctacaattttgaaataaagcaacagacttctcaataatcaatgaagtagctgagaaaactaagtcagaaagtgcattaaactgaatcacaatgtaaatattacacatcaagcgatgaaactggaaaactacaagccac

SEQ ID NO: 148623 - DNA, 1958 bp, Homo sapiens
  Payload ID: 9416
  Gene Symbol: LILRB1
  Gene Name: leukocyte immunoglobulin-like receptor, subfamily B (with TM and ITIM domains), member 1
  ENST ID: ENST00000610752
  CDS Start-End: 1-1958
tgacccccatcctcacggtcctgatctgtctcgggctgagtctgggccccaggacccacgtgcaggcagggcacctccccaagcccaccctctgggctgaaccaggctctgtgatcacccaggggagtcctgtgaccctcaggtgtcaggggggccaggagacccaggagtaccgtctatatagagaaaagaaaacagcactctggattacacggatcccacaggagcttgtgaagaagggccagttccccatcccatccatcacctgggaacatgcagggcggtatcgctgttactatggtagcgacactgcaggccgctcagagagcagtgaccccctggagctggtggtgacaggagcctacatcaaacccaccctctcagcccagcccagccccgtggtgaactcaggagggaatgtaatcctccagtgtgactcacaggtggcatttgatggcttcagtctgtgtaaggaaggagaagatgaacacccacaatgcctgaactcccagccccatgcccgtgggtcgtcccgcgccatcttctccgtgggccccgtgagcccgagtcgcaggtggtggtacaggtgctatgcttatgactcgaactctccctatgagtggtctctacccagtgatctcctggagctcctggtcctaggtgtttctaagaagccatcactctcagtgcagccaggtcctatcgtggcccctgaggagaccctgactctgcagtgtggctctgatgctggctacaacagatttgttctgtataaggacggggaacgtgacttccttcagctcgctggcgcacagccccaggctgggctctcccaggccaacttcaccctgggccctgtgagccgctcctacgggggccagtacagatgctacggtgcacacaacctctcctccgagtggtcggcccccagcgaccccctggacatcctgatcgcaggacagttctatgacagagtctccctctcggtgcagccgggccccacggtggcctcaggagagaacgtgaccctgctgtgtcagtcacagggatggatgcaaactttccttctgaccaaggagggggcagctgatgacccatggcgtctaagatcaacgtaccaatctcaaaaataccaggctgaattccccatgggtcctgtgacctcagcccatgcggggacctacaggtgctacggctcacagagctccaaaccctacctgctgactcaccccagtgaccccctggagctcgtggtctcaggaccgtctgggggccccagctccccgacaacaggccccacctccacatctgcaggccctgaggaccagcccctcacccccaccgggtcggatccccagagtggtctgggaaggcacctgggggttgtgatcggcatcttggtggccgtcatcctactgctcctcctcctcctcctcctcttcctcatcctccgacatcgacgtcagggcaaacactggacatcgacccagagaaaggctgatttccaacatcctgcaggggctgtggggccagagcccacagacagaggcctgcagtggaggtccagcccagctgccgatgcccaggaagaaaacctctatgctgccgtgaagcacacacagcctgaggatggggtggagatggacactcggcagagcccacacgatgaagacccccaggcagtgacgtatgccgaggtgaaacactccagacctaggagagaaatggcctctcctccttccccactgtctggggaattcctggacacaaaggacagacaggcggaagaggacaggcagatggacactgaggctgctgcatctgaagccccccaggatgtgacctacgcccagctgcacagcttgaccctcagacgggaggcaactgagcctcctccatcccaggaagggccctctccagctgtgcccagcatctacgccactctggccatccactag

SEQ ID NO: 148624 - DNA, 895 bp, Homo sapiens
  Payload ID: 9416
  Gene Symbol: LILRB1
  Gene Name: leukocyte immunoglobulin-like receptor, subfamily B (with TM and ITIM domains), member 1
  ENST ID: ENST00000619118
  CDS Start-End: 1-204
gaattcctggacacaaaggacagacaggcggaagaggacaggcagatggacactgaggctgctgcatctgaagccccccaggatgtgacctacgcccagctgcacagcttgaccctcagacgggaggcaactgagcctcctccatcccaggaagggccctctccagctgtgcccagcatctacgccactctggccatccactagcccagggggggacgcagaccccacactccatggagtctggaatgcatgggagctgcccccccagtggacaccattggaccccacccagcctggatctaccccaggagactctgggaacttttaggggtcactcaattctgcagtataaataactaatgtctctacaattttgaaataaagcaacagacttctcaataatcaatgaagtagctgagaaaactaagtcagaaagtgcattaaactgaatcacaatgtaaatattacacatcaagcgatgaaactggaaaactacaagccacgaatgaatgaattaggaaagaaaaaaagtaggaaatgaatgatcttggctttcctataagaaatttagggcagggcacggtggctcacgcctgtaattccagcactttgggaggccgaggcgggcagatcacgagttcaggagatcgagaccatcttggccaacatggtgaaaccctgtctctcctaaaaatacaaaaattagctggatgtggtggcagtgcctgtaatcccagctatttgggaggctgaggcaggagaatcgcttgaaccagggagtcagaggtttcagtgagccaagatcgcaccactgctctccagcctggcgacagagggagactccatctcaaattaaaaaaaaaaaaaaaaaagaaagaaaaagagaaaaaagaaa

SEQ ID NO: 148625 - DNA, 1458 bp, Homo sapiens
  Payload ID: 9416
  Gene Symbol: LILRB1
  Gene Name: leukocyte immunoglobulin-like receptor, subfamily B (with TM and ITIM domains), member 1
  ENST ID: ENST00000614951
  CDS Start-End: 39-1409
tcatccatccacagagcagggcagtgggaggagacgccatgacccccatcctcacggtcctgatctgtctcgggcacctccccaagcccaccctctgggctgaaccaggctctgtgatcacccaggggagtcctgtgaccctcaggtgtcaggggggccaggagacccaggagtaccgtctatatagagaaaagaaaacagcactctggattacacggatcccacaggagcttgtgaagaagggccagttccccatcccatccatcacctgggaacatgcagggcggtatcgctgttactatggtagcgacactgcaggccgctcagagagcagtgaccccctggagctggtggtgacaggagcctacatcaaacccaccctctcagcccagcccagccccgtggtgaactcaggagggaatgtaatcctccagtgtgactcacaggtggcatttgatggcttcagtctgtgtaaggaaggagaagatgaacacccacaatgcctgaactcccagccccatgcccgtgggtcgtcccgcgccatcttctccgtgggccccgtgagcccgagtcgcaggtggtggtacaggtgctatgcttatgactcgaactctccctatgagtggtctctacccagtgatctcctggagctcctggtcctaggtgtttctaagaagccatcactctcagtgcagccaggtcctatcgtggcccctgaggagaccctgactctgcagtgtggctctgatgctggctacaacagatttgttctgtataaggacggggaacgtgacttccttcagctcgctggcgcacagccccaggctgggctctcccaggccaacttcaccctgggccctgtgagccgctcctacgggggccagtacagatgctacggtgcacacaacctctcctccgagtggtcggcccccagtgaccccctggacatcctgatcgcaggacagttctatgacagagtctccctctcggtgcagccgggccccacggtggcctcaggagagaacgtgaccctgctgtgtcagtcacagggatggatgcaaactttccttctgaccaaggagggggcagcccatcccctactgcatctgagatcagagcacggagctcagcagcaccaggctgaattccccatgagtcctgtgacctcagtgcacggggggacctacaggtgcttcagctcacacggcttctcccactacctgctgtcacaccccagtgaccccctggagctcatagtctcagcatccccagcctcacaccttcaggattacgcagtggagaatctcatccacatgggcgtggctggcttgatcctggtggtcctcgggattctgtcatttgaggcttggcacagccagagaagcttccaagatgcagccgggaggtgaacagcagagaggataatgtactttatagagtcgtgaagcctcaggaaca

SEQ ID NO: 148626 - DNA, 2430 bp, Homo sapiens
  Payload ID: 9416
  Gene Symbol: LILRB1
  Gene Name: leukocyte immunoglobulin-like receptor, subfamily B (with TM and ITIM domains), member 1
  ENST ID: ENST00000615841
  CDS Start-End: 148-2154
gcatttctcttctgtgctcgctgccacacgcagctcagcctgggcggcacagccagatgcgagatgcgtctctgctgatctgagtctgcctgcagcatggacctgggtcttccctgaagcatctccagggctggagggacgactgccatgcaccgagggctcatccatccacagagcagggcagtgggaggagacgccatgacccccatcctcacggtcctgatctgtctcgggctgagtctgggccccaggacccacgtgcaggcagggcacctccccaagcccaccctctgggctgaaccaggctctgtgatcacccaggggagtcctgtgaccctcaggtgtcaggggggccaggagacccaggagtaccgtctatatagagaaaagaaaacagcactctggattacacggatcccacaggagcttgtgaagaagggccagttccccatcccatccatcacctgggaacatgcagggcggtatcgctgttactatggtagcgacactgcaggccgctcagagagcagtgaccccctggagctggtggtgacaggagcctacatcaaacccaccctctcagcccagcccagccccgtggtgaactcaggagggaatgtaatcctccagtgtgactcacaggtggcatttgatggcttcagtctgtgtaaggaaggagaagatgaacacccacaatgcctgaactcccagccccatgcccgtgggtcgtcccgcgccatcttctccgtgggccccgtgagcccgagtcgcaggtggtggtacaggtgctatgcttatgactcgaactctccctatgagtggtctctacccagtgatctcctggagctcctggtcctaggtgtttctaagaagccatcactctcagtgcagccaggtcctatcgtggcccctgaggagaccctgactctgcagtgtggctctgatgctggctacaacagatttgttctgtataaggacggggaacgtgacttccttcagctcgctggcgcacagccccaggctgggctctcccaggccaacttcaccctgggccctgtgagccgctcctacgggggccagtacagatgctacggtgcacacaacctctcctccgagtggtcggcccccagcgaccccctggacatcctgatcgcaggacagttctatgacagagtctccctctcggtgcagccgggccccacggtggcctcaggagagaacgtgaccctgctgtgtcagtcacagggatggatgcaaactttccttctgaccaaggagggggcagctgatgacccatggcgtctaagatcaacgtaccaatctcaaaaataccaggctgaattccccatgggtcctgtgacctcagcccatgcggggacctacaggtgctacggctcacagagctccaaaccctacctgctgactcaccccagtgaccccctggagctcgtggtctcaggaccgtctgggggccccagctccccgacaacaggccccacctccacatctgcaggccctgaggaccagcccctcacccccaccgggtcggatccccagagtggtctgggaaggcacctgggggttgtgatcggcatcttggtggccgtcatcctactgctcctcctcctcctcctcctcttcctcatcctccgacatcgacgtcagggcaaacactggacatcgacccagagaaaggctgatttccaacatcctgcaggggctgtggggccagagcccacagacagaggcctgcagtggaggtccagcccagctgccgatgcccaggaagaaaacctctatgctgccgtgaagcacacacagcctgaggatggggtggagatggacactcggagcccacacgatgaagacccccaggcagtgacgtatgccgaggtgaaacactccagacctaggagagaaatggcctctcctccttccccactgtctggggaattcctggacacaaaggacagacaggcggaagaggacaggcagatggacactgaggctgctgcatctgaagccccccaggatgtgacctacgcccagctgcacagcttgaccctcagacgggaggcaactgagcctcctccatcccaggaagggccctctccagctgtgcccagcatctacgccactctggccatccactagcccagggggggacgcagaccccacactccatggagtctggaatgcatgggagctgcccccccagtggacaccattggaccccacccagcctggatctaccccaggagactctgggaacttttaggggtcactcaattctgcagtataaataactaatgtctctacaattttgaaataaagcaacagacttctcaataatcaatgaagtagctgagaaaactaagtcagaaagtgcattaaactgaatcacaatgtaaatattacacatcaagcgat

SEQ ID NO: 148627 - DNA, 2804 bp, Homo sapiens
  Payload ID: 9416
  Gene Symbol: LILRB1
  Gene Name: leukocyte immunoglobulin-like receptor, subfamily B (with TM and ITIM domains), member 1
  ENST ID: ENST00000613145
  CDS Start-End: 199-2154
gcatttctcttctgtgctcactgccacacgcagctcagcctgggcggcacagccagatgcgagatgcgtctctgctgatctgagtctgcctgcagcatggacctgggtcttccctgaagcatctccagggctggagggacgactgccatgcaccgagggctcatccatccacagagcagggcagtgggaggagacgccatgacccccatcctcacggtcctgatctgtctcgggctgagtctgggcccccggacccacgtgcaggcagggcacctccccaagcccaccctctgggctgaaccaggctctgtgatcacccaggggagtcctgtgaccctcaggtgtcaggggggccaggagacccaggagtaccgtctatatagagaaaagaaaacagcaccctggattacacggatcccacaggagcttgtgaagaagggccagttccccatcccatccatcacctgggaacatgcagggcggtatcgctgttactatggtagcgacactgcaggccgctcagagagcagtgaccccctggagctggtggtgacaggagcctacatcaaacccaccctctcagcccagcccagccccgtggtgaactcaggagggaatgtaaccctccagtgtgactcacaggtggcatttgatggcttcattctgtgtaaggaaggagaagatgaacacccacaatgcctgaactcccagccccatgcccgtgggtcgtcccgcgccatcttctccgtgggccccgtgagcccgagtcgcaggtggtggtacaggtgctatgcttatgactcgaactctccctatgagtggtctctacccagtgatctcctggagctcctggtcctaggtgtttctaagaagccatcactctcagtgcagccaggtcctatcgtggcccctgaggagaccctgactctgcagtgtggctctgatgctggctacaacagatttgttctgtataaggacggggaacgtgacttccttcagctcgctggcgcacagccccaggctgggctctcccaggccaacttcaccctgggccctgtgagccgctcctacgggggccagtacagatgctacggtgcacacaacctctcctccgagtggtcggcccccagcgaccccctggacatcctgatcgcaggacagttctatgacagagtctccctctcggtgcagccgggccccacggtggcctcaggagagaacgtgaccctgctgtgtcagtcacagggatggatgcaaactttccttctgaccaaggagggggcagctgatgacccatggcgtctaagatcaacgtaccaatctcaaaaataccaggctgaattccccatgggtcctgtgacctcagcccatgcggggacctacaggtgctacggctcacagagctccaaaccctacctgctgactcaccccagtgaccccctggagctcgtggtctcaggaccgtctgggggccccagctccccgacaacaggccccacctccacatctgcaggccctgaggaccagcccctcacccccaccgggtcggatccccagagtggtctgggaaggcacctgggggttgtgatcggcatcttggtggccgtcatcctactgctcctcctcctcctcctcctcttcctcatcctccgacatcgacgtcagggcaaacactggacatcgacccagagaaaggctgatttccaacatcctgcaggggctgtggggccagagcccacagacagaggcctgcagtggaggtccagcccagctgccgatgcccaggaagaaaacctctatgctgccgtgaagcacacacagcctgaggatggggtggagatggacactcggagcccacacgatgaagacccccaggcagtgacgtatgccgaggtgaaacactccagacctaggagagaaatggcctctcctccttccccactgtctggggaattcctggacacaaaggacagacaggcggaagaggacaggcagatggacactgaggctgctgcatctgaagccccccaggatgtgacctacgcccagctgcacagcttgacccttagacggaaggcaactgagcctcctccatcccaggaagggccctctccagctgtgcccagcatctacgccactctggccatccactagcccagggggggacgcagaccccacactccatggagtctggaatgcatgggagctgcccccccagtggacaccattggaccccacccagcctggatctaccccaggagactctgggaacttttaggggtcactcaattctgcagtataaataactaatgtctctacaattttgaaataaagcaacagacttctcaataatcaatgaagtagctgagaaaactaagtcagaaagtgcattaaactgaatcacaatgtaaatattacacatcaagcgatgaaactggaaaactacaagccacgaatgaatgaattaggaaagaaaaaaagtaggaaatgaatgatcttggctttcctataagaaatttagggcagggcacggtggctcacgcctgtaattccagcactttgggaggccgaggcgggcagatcacgagttcaggagatcgagaccatcttggccaacatggtgaaaccctgtctctcctaaaaatacaaaaattagctggatgtggtggcagtgcctgtaatcccagctatttgggaggctgaggcaggagaatcgcttgaaccagggagtcagaggtttcagtgagccaagatcgcaccactgctctccagcctggcgacagagggagactccatctcaaatt

SEQ ID NO: 148628 - DNA, 2720 bp, Homo sapiens
  Payload ID: 9416
  Gene Symbol: LILRB1
  Gene Name: leukocyte immunoglobulin-like receptor, subfamily B (with TM and ITIM domains), member 1
  ENST ID: ENST00000615004
  CDS Start-End: 166-2070
ctcagcctgggcggcacagccagatgcgagatgcgtctctgctgatctgagtctgcctgcagcatggacctgggtcttccctgaagcatctccagggctggagggacgactgccatgcaccgagggctcatccatccacagagcagggcagtgggaggagacgccatgacccccatcctcacggtcctgatctgtctcgggctgagtctgggccccaggacccacgtgcaggcagggcacctccccaagcccaccctctgggctgaaccaggctctgtgatcacccaggggagtcctgtgaccctcaggtgtcaggggggccaggagacccaggagtaccgtctatatagagaaaagaaaacagcactctggattacacggatcccacaggagcttgtgaagaagggccagttccccatcccatccatcacctgggaacatgcagggcggtatcgctgttactatggtagcgacactgcaggccgctcagagagcagtgaccccctggagctggtggtgacaggagcctacatcaaacccaccctctcagcccagcccagccccgtggtgaactcaggagggaatgtaatcctccagtgtgactcacaggtggcatttgatggcttcagtctgtgtaaggaaggagaagatgaacacccacaatgcctgaactcccagccccatgcccgtgggtcgtcccgcgccatcttctccgtgggccccgtgagcccgagtcgcaggtggtggtacaggtgctatgcttatgactcgaactctccctatgagtggtctctacccagtgatctcctggagctcctggtcctaggtgtttctaagaagccatcactctcagtgcagccaggtcctatcgtggcccctgaggagaccctgactctgcagtgtggctctgatgctggctacaacagatttgttctgtataaggacggggaacgtgacttccttcagctcgctggcgcacagccccaggctgggctctcccaggccaacttcaccctgggccctgtgagccgctcctacgggggccagtacagatgctacggtgcacacaacctctcctccgagtggtcggcccccagcgaccccctggacatcctgatcgcaggacagttctatgacagagtctccctctcggtgcagccgggccccacggtggcctcaggagagaacgtgaccctgctgtgtcagtcacagggatggatgcaaactttccttctgaccaaggagggggcagctgatgacccatggcgtctaagatcaacgtaccaatctcaaaaataccaggctgaattccccatgggtcctgtgacctcagcccatgcggggacctacaggtgctacggctcacagagctccaaaccctacctgctgactcaccccagtgaccccctggagctcgtggtctcagcaggccctgaggaccagcccctcacccccaccgggtcggatccccagagtggtctgggaaggcacctgggggttgtgatcggcatcttggtggccgtcatcctactgctcctcctcctcctcctcctcttcctcatcctccgacatcgacgtcagggcaaacactggacatcgacccagagaaaggctgatttccaacatcctgcaggggctgtggggccagagcccacagacagaggcctgcagtggaggtccagcccagctgccgatgcccaggaagaaaacctctatgctgccgtgaagcacacacagcctgaggatggggtggagatggacactcggagcccacacgatgaagacccccaggcagtgacgtatgccgaggtgaaacactccagacctaggagagaaatggcctctcctccttccccactgtctggggaattcctggacacaaaggacagacaggcggaagaggacaggcagatggacactgaggctgctgcatctgaagccccccaggatgtgacctacgcccagctgcacagcttgaccctcagacgggaggcaactgagcctcctccatcccaggaagggccctctccagctgtgcccagcatctacgccactctggccatccactagcccagggggggacgcagaccccacactccatggagtctggaatgcatgggagctgcccccccagtggacaccattggaccccacccagcctggatctaccccaggagactctgggaacttttaggggtcactcaattctgcagtataaataactaatgtctctacaattttgaaataaagcaacagacttctcaataatcaatgaagtagctgagaaaactaagtcagaaagtgcattaaactgaatcacaatgtaaatattacacatcaagcgatgaaactggaaaactacaagccacgaatgaatgaattaggaaagaaaaaaagtaggaaatgaatgatcttggctttcctataagaaatttagggcagggcacggtggctcacgcctgtaattccagcactttgggaggccgaggcgggcagatcacgagttcaggagatcgagaccatcttggccaacatggtgaaaccctgtctctcctaaaaatacaaaaattagctggatgtggtggcagtgcctgtaatcccagctatttgggaggctgaggcaggagaatcgcttgaaccagggagtcagaggtttcagtgagccaagatcgcaccactgctctccagcctggcgacagagggagactccatctcaaatt

SEQ ID NO: 148629 - DNA, 670 bp, Homo sapiens
  Payload ID: 9416
  Gene Symbol: LILRB1
  Gene Name: leukocyte immunoglobulin-like receptor, subfamily B (with TM and ITIM domains), member 1
  ENST ID: ENST00000625929
  CDS Start-End: 1-621
atgacccccatcctcacggtcctgatctgtctcgggctgagtctgggccccaggacccacgtgcaggcagggcacctccccaagcccaccctctgggctgaaccaggctctgtgatcacccaggggagtcctgtgaccctcaggtgtcaggggggccaggagacccaggagtaccgtctatatagagaaaagaaaacagcactctggattacacggatcccacaggagcttgtgaagaagggccagttccccatcccatccatcacctgggaacatgcagggcggtatcgctgttactatggtagcgacactgcaggccgctcatcagagcacggagctcagcagcaccaggctgaattccccatgagtcctgtgacctcagcccacacggggacctacaggtgctacggctcactcagctccgacccctacctgctgtctcaccccagtggccccgtggagctcgtggtctcagcatccccagcctcacaccttcaggattacgcagtggagaatctcatccacatgggcgtggctggcttgatcctggtggtcctcgggattctgtcatttgaggcttggcacagccagagaagcttccaagatgcagccgggaggtgaacagcagagaggataatgtactttatagagtcgtgaagcctcaggaaca

SEQ ID NO: 148630 - DNA, 670 bp, Homo sapiens; identical to SEQ ID NO: 148629
  Payload ID: 9416
  Gene Symbol: LILRB1
  Gene Name: leukocyte immunoglobulin-like receptor, subfamily B (with TM and ITIM domains), member 1
  ENST ID: ENST00000625537
  CDS Start-End: 1-621

SEQ ID NO: 148631 - DNA, 670 bp, Homo sapiens
  Payload ID: 9416
  Gene Symbol: LILRB1
  Gene Name: leukocyte immunoglobulin-like receptor, subfamily B (with TM and ITIM domains), member 1
  ENST ID: ENST00000625885
  CDS Start-End: 1-621
atgacccccatcctcacggtcctgatctgtctcgggctgagtctgggcccccggacccacgtgcaggcagggcacctccccaagcccaccctctgggctgaaccaggctctgtgatcacccaggggagtcctgtgaccctcaggtgtcaggggggccaggagacccaggagtaccgtctatatagagaaaagaaaacagcaccctggattacacggatcccacaggagcttgtgaagaagggccagttccccatcccatccatcacctgggaacatgcagggcggtatcgctgttactatggtagcgacactgcaggccgctcatcagagcacggagctcagcagcaccaggctgaattccccatgagtcctgtgacctcagcccacacggggacctacaggtgctacggctcactcagctccgacccctacctgctgtctcaccccagtggccccgtggagctcgtggtctcagcatccccagcctcacaccttcaggattacgcagtggagaatctcatccacatgggcgtggctggcttgatcctggtggtcctcgggattctgtcatttgaggcttggcacagccagagaagcttccaagatgcagccgggaggtgaacagcagagaggataatgtactttatagagtcgtgaagcctcaggaaca

SEQ ID NO: 148632 - DNA, 1458 bp, Homo sapiens
  Payload ID: 9416
  Gene Symbol: LILRB1
  Gene Name: leukocyte immunoglobulin-like receptor, subfamily B (with TM and ITIM domains), member 1
  ENST ID: ENST00000629125
  CDS Start-End: 39-1409
tcatccatccacagagcagggcagtgggaggagacgccatgacccccatcctcacggtcctgatctgtctcgggcacctccccaagcccaccctctgggctgaaccaggctctgtgatcacccaggggagtcctgtgaccctcaggtgtcaggggggccaggagacccaggagtaccgtctatatagagaaaagaaaacagcactctggattacacggatcccacaggagcttgtgaagaagggccagttccccatcccatccatcacctgggaacatgcagggcggtatcgctgttactatggtagcgacactgcaggccgctcagagagcagtgaccccctggagctggtggtgacaggagcctacatcaaacccaccctctcagcccagcccagccccgtggtgaactcaggagggaatgtaatcctccagtgtgactcacaggtggcatttgatggcttcagtctgtgtaaggaaggagaagatgaacacccacaatgcctgaactcccagccccatgcccgtgggtcgtcccgcgccatcttctccgtgggccccgtgagcccgagtcgcaggtggtggtacaggtgctatgcttatgactcgaactctccctatgagtggtctctacccagtgatctcctggagctcctggtcctaggtgtttctaagaagccatcactctcagtgcagccaggtcctatcgtggcccctgaggagaccctgactctgcagtgtggctctgatgctggctacaacagatttgttctgtataaggacggggaacgtgacttccttcagctcgctggcgcacagccccaggctgggctctcccaggccaacttcaccctgggccctgtgagccgctcctacgggggccagtacagatgctacggtgcacacaacctctcctccgagtggtcggcccccagcgaccccctggacatcctgatcgcaggacagttctatgacagagtctccctctcggtgcagccgggccccacggtggcctcaggagagaacgtgaccctgctgtgtcagtcacagggatggatgcaaactttccttctgaccaaggagggggcagcccatcccctactgcatctgagatcagagcacggagctcagcagcaccaggctgaattccccatgagtcctgtgacctcagtgcacggggggacctacaggtgcttcagctcacacggcttctcccactacctgctgtcacaccccagtgaccccctggagctcatagtctcagcatccccagcctcacaccttcaggattacgcagtggagaatctcatccacatgggcgtggctggcttgatcctggtggtcctcgggattctgtcatttgaggcttggcacagccagagaagcttccaagatgcagccgggaggtgaacagcagagaggataatgtactttatagagtcgtgaagcctcaggaaca

SEQ ID NO: 148633 - DNA, 2397 bp, Homo sapiens
  Payload ID: 9417
  Gene Symbol: LILRB2
  Gene Name: leukocyte immunoglobulin-like receptor, subfamily B (with TM and ITIM domains), member 2
  Uniprot ID: Q8N423
  ENST ID: ENST00000314446
  CDS Start-End: 273-2066
gggactatttggttgaaagaaaacccacaatccagtgtcaagaaagaagtcaacttttcttcccctacttccctgcatttctcctctgtgctcactgccacacacagctcaacctggacagcacagccagaggcgagatgcttctctgctgatctgagtctgcctgcagcatggacctgggtcttccctgaagcatctccagggctggagggacgactgccatgcaccgagggctcatccatccgcagagcagggcagtgggaggagacgccatgacccccatcgtcacagtcctgatctgtctcgggctgagtctgggccccaggacccgcgtgcagacagggaccatccccaagcccaccctgtgggctgagccagactctgtgatcacccaggggagtcccgtcaccctcagttgtcaggggagccttgaagcccaggagtaccgtctatatagggagaaaaaatcagcatcttggattacacggatacgaccagagcttgtgaagaacggccagttccacatcccatccatcacctgggaacacacagggcgatatggctgtcagtattacagccgcgctcggtggtctgagctcagtgaccccctggtgctggtgatgacaggagcctacccaaaacccaccctctcagcccagcccagccctgtggtgacctcaggaggaagggtgaccctccagtgtgagtcacaggtggcatttggcggcttcattctgtgtaaggaaggagaagatgaacacccacaatgcctgaactcccagccccatgcccgtgggtcgtcccgcgccatcttctccgtgggccccgtgagcccgaatcgcaggtggtcgcacaggtgctatggttatgacttgaactctccctatgtgtggtcttcacccagtgatctcctggagctcctggtcccaggtgtttctaagaagccatcactctcagtgcagccgggtcctgtcatggcccctggggaaagcctgaccctccagtgtgtctctgatgtcggctatgacagatttgttctgtacaaggagggggaacgtgaccttcgccagctccctggccggcagccccaggctgggctctcccaggccaacttcaccctgggccctgtgagccgctcctacgggggccagtacagatgctacggtgcacacaacctctcctctgagtgctcggcccccagcgaccccctggacatcctgatcacaggacagatccgtggcacacccttcatctcagtgcagccaggccccacagtggcctcaggagagaacgtgaccctgctgtgtcagtcatggcggcagttccacactttccttctgaccaaggcgggagcagctgatgccccactccgtctaagatcaatacacgaatatcctaagtaccaggctgaattccccatgagtcctgtgacctcagcccacgcggggacctacaggtgctacggctcactcaactccgacccctacctgctgtctcaccccagtgagcccctggagctcgtggtctcaggaccctccatgggttccagccccccacccaccggtcccatctccacacctggccctgaggaccagcccctcacccccactgggtcggatccccaaagtggtctgggaaggcacctgggggttgtgatcggcatcttggtggccgtcgtcctactgctcctcctcctcctcctcctcttcctcatcctccgacatcgacgtcagggcaaacactggacatcgacccagagaaaggctgatttccaacatcctgcaggggctgtggggccagagcccacagacagaggcctgcagtggaggtccagcccagctgccgacgcccaggaagaaaacctctatgctgccgtgaaggacacacagcctgaagatggggtggagatggacactcgggctgctgcatctgaagccccccaggatgtgacctacgcccagctgcacagcttgaccctcagacggaaggcaactgagcctcctccatcccaggaaagggaacctccagctgagcccagcatctacgccaccctggccatccactagcccggagggtacgcagactccacactcagtagaaggagactcaggactgctgaaggcacgggagctgcccccagtggacaccaatgaaccccagtcagcctggacccctaacaaagaccatgaggagatgctgggaactttgggactcacttgattctgcagtcgaaataactaatatccctacattttttaattaaagcaacagacttctcaataatcaatgagttaaccgagaaaactaaaatcagaagtaagaatgtgctttaaactgaatcacaatataaatattacacatcacacaatgaaattgaaaaagtacaaaccacaaatg

SEQ ID NO: 148634 - DNA, 1940 bp, Homo sapiens
  Payload ID: 9417
  Gene Symbol: LILRB2
  Gene Name: leukocyte immunoglobulin-like receptor, subfamily B (with TM and ITIM domains), member 2
  Uniprot ID: Q8N423
  ENST ID: ENST00000391746
  CDS Start-End: 3-1535
ccatgacccccatcgtcacagtcctgatctgtctcgggctgagtctgggccccaggacccgcgtgcagacagggaccatccccaagcccaccctgtgggctgagccagactctgtgatcacccaggggagtcccgtcaccctcagttgtcaggggagccttgaagcccaggagtaccgtctatatagggagaaaaaatcagcatcttggattacacggatacgaccagagcttgtgaagaacggccagttccacatcccatccatcacctgggaacacacagggcgatatggctgtcagtattacagccgcgctcggtggtctgagctcagtgaccccctggtgctggtgatgacaggagcctacccaaaacccaccctctcagcccagcccagccctgtggtgacctcaggaggaagggtgaccctccagtgtgagtcacaggtggcatttggcggcttcattctgtgtaaggaaggagaagatgaacacccacaatgcctgaactcccagccccatgcccgtgggtcgtcccgcgccatcttctccgtgggccccgtgagcccgaatcgcaggtggtcgcacaggtgctatggttatgacttgaactctccctatgtgtggtcttcacccagtgatctcctggagctcctggtcccaggtgtttctaagaagccatcactctcagtgcagccgggtcctgtcatggcccctggggaaagcctgaccctccagtgtgtctctgatgtcggctatgacagatttgttctgtacaaggagggggaacgtgaccttcgccagctccctggccggcagccccaggctgggctctcccaggccaacttcaccctgggccctgtgagccgctcctacgggggccagtacagatgctacggtgcacacaacctctcctctgagtgctcggcccccagcgaccccctggacatcctgatcacaggacagatccgtggcacacccttcatctcagtgcagccaggccccacagtggcctcaggagagaacgtgaccctgctgtgtcagtcatggcggcagttccacactttccttctgaccaaggcgggagcagctgatgccccactccgtctaagatcaatacacgaatatcctaagtaccaggctgaattccccatgagtcctgtgacctcagcccacgcggggacctacaggtgctacggctcactcaactccgacccctacctgctgtctcaccccagtgagcccctggagctcgtggtctcaggaccctccatgggttccagccccccacccaccggtcccatctccacacctgcaggccctgaggaccagcccctcacccccactgggtcggatccccaaagtggtctgggaaggcacctgggggttgtgatcggcatcttggtggccgtcgtcctactgctcctcctcctcctcctcctcttcctcatcctccgacatcgacgtcagggcaaacactggacatcgagtccagcccagctgccgacgcccaggaagaaaacctctatgctgccgtgaaggacacacagcctgaagatggggtggagatggacactcgggctgctgcatctgaagccccccaggatgtgacctacgcccagctgcacagcttgaccctcagacggaaggcaactgagcctcctccatcccaggaaagggaacctccagctgagcccagcatctacgccaccctggccatccactagcccggagggtacgcagactccacactcagtagaaggagactcaggactgctgaaggcacgggagctgcccccagtggacaccaatgaaccccagtcagcctggacccctaacaaagaccatgaggagatgctgggaactttgggactcacttgattctgcagtcgaaataactaatatccctacattttttaattaaagcaacagacttctcaataa

SEQ ID NO: 148635 - DNA, 2784 bp, Homo sapiens
  Payload ID: 9417
  Gene Symbol: LILRB2
  Gene Name: leukocyte immunoglobulin-like receptor, subfamily B (with TM and ITIM domains), member 2
  Uniprot ID: Q8N423
  ENST ID: ENST00000391748
  CDS Start-End: 129-1922
ggggaagccactgctaccctcatcaggaagggcagacacaagaagcaccagttctatttgctgctacatcccggctctcgcaccgagggctcatccatccgcagagcagggcagtgggaggagacgccatgacccccatcgtcacagtcctgatctgtctcgggctgagtctgggccccaggacccgcgtgcagacagggaccatccccaagcccaccctgtgggctgagccagactctgtgatcacccaggggagtcccgtcaccctcagttgtcaggggagccttgaagcccaggagtaccgtctatatagggagaaaaaatcagcatcttggattacacggatacgaccagagcttgtgaagaacggccagttccacatcccatccatcacctgggaacacacagggcgatatggctgtcagtattacagccgcgctcggtggtctgagctcagtgaccccctggtgctggtgatgacaggagcctacccaaaacccaccctctcagcccagcccagccctgtggtgacctcaggaggaagggtgaccctccagtgtgagtcacaggtggcatttggcggcttcattctgtgtaaggaaggagaagatgaacacccacaatgcctgaactcccagccccatgcccgtgggtcgtcccgcgccatcttctccgtgggccccgtgagcccgaatcgcaggtggtcgcacaggtgctatggttatgacttgaactctccctatgtgtggtcttcacccagtgatctcctggagctcctggtcccaggtgtttctaagaagccatcactctcagtgcagccgggtcctgtcatggcccctggggaaagcctgaccctccagtgtgtctctgatgtcggctatgacagatttgttctgtacaaggagggggaacgtgaccttcgccagctccctggccggcagccccaggctgggctctcccaggccaacttcaccctgggccctgtgagccgctcctacgggggccagtacagatgctacggtgcacacaacctctcctctgagtgctcggcccccagcgaccccctggacatcctgatcacaggacagatccgtggcacacccttcatctcagtgcagccaggccccacagtggcctcaggagagaacgtgaccctgctgtgtcagtcatggcggcagttccacactttccttctgaccaaggcgggagcagctgatgccccactccgtctaagatcaatacacgaatatcctaagtaccaggctgaattccccatgagtcctgtgacctcagcccacgcggggacctacaggtgctacggctcactcaactccgacccctacctgctgtctcaccccagtgagcccctggagctcgtggtctcaggaccctccatgggttccagccccccacccaccggtcccatctccacacctggccctgaggaccagcccctcacccccactgggtcggatccccaaagtggtctgggaaggcacctgggggttgtgatcggcatcttggtggccgtcgtcctactgctcctcctcctcctcctcctcttcctcatcctccgacatcgacgtcagggcaaacactggacatcgacccagagaaaggctgatttccaacatcctgcaggggctgtggggccagagcccacagacagaggcctgcagtggaggtccagcccagctgccgacgcccaggaagaaaacctctatgctgccgtgaaggacacacagcctgaagatggggtggagatggacactcgggctgctgcatctgaagccccccaggatgtgacctacgcccagctgcacagcttgaccctcagacggaaggcaactgagcctcctccatcccaggaaagggaacctccagctgagcccagcatctacgccaccctggccatccactagcccggagggtacgcagactccacactcagtagaaggagactcaggactgctgaaggcacgggagctgcccccagtggacaccaatgaaccccagtcagcctggacccctaacaaagaccatgaggagatgctgggaactttgggactcacttgattctgcagtcgaaataactaatatccctacattttttaattaaagcaacagacttctcaataatcaatgagttaaccgagaaaactaaaatcagaagtaagaatgtgctttaaactgaatcacaatataaatattacacatcacacaatgaaattgaaaaagtacaaaccacaaatgaaaaaagtagaaacgaaaaaaaaaaactaggaaatgaatgacgttggctttcgtataaggaatttagaaaaagaataaccaattattccaaatgaaggtgtaagaaagggaataagaagaagaagagttgctcatgaggaaaaaccaaaacttgaaaattcaacaaagccaatgaagctcattcttgaaaatattaattacagtcataaatcctaactacattgagcaagagaaagaaagagcaggcacgcatttccatatgggagtgagccagcagacagcccagcagatcctacacacattttcacaaactaaccccagaacaggctgcaaacctataccaatatactagaaaatgcagattaaatggatgaaatattcaaaactggagtttacataatgaacgtaagagtaatcagagaatctgactcattttaaatgtgtgtgtatgtgtgtgtatatatatgtgtgtgtgtgtgtgtgtgtgtgtgtgtgaaaaacattgactgtaataaaaatgttcccatcgta

SEQ ID NO: 148636 - DNA, 2286 bp, Homo sapiens
  Payload ID: 9417
  Gene Symbol: LILRB2
  Gene Name: leukocyte immunoglobulin-like receptor, subfamily B (with TM and ITIM domains), member 2
  Uniprot ID: Q8N423
  ENST ID: ENST00000391749
  CDS Start-End: 273-2069
gggactatttggttgaaagaaaacccacaatccagtgtcaagaaagaagtcaacttttcttcccctacttccctgcatttctcctctgtgctcactgccacacacagctcaacctggacagcacagccagaggcgagatgcttctctgctgatctgagtctgcctgcagcatggacctgggtcttccctgaagcatctccagggctggagggacgactgccatgcaccgagggctcatccatccgcagagcagggcagtgggaggagacgccatgacccccatcgtcacagtcctgatctgtctcgggctgagtctgggccccaggacccgcgtgcagacagggaccatccccaagcccaccctgtgggctgagccagactctgtgatcacccaggggagtcccgtcaccctcagttgtcaggggagccttgaagcccaggagtaccgtctatatagggagaaaaaatcagcatcttggattacacggatacgaccagagcttgtgaagaacggccagttccacatcccatccatcacctgggaacacacagggcgatatggctgtcagtattacagccgcgctcggtggtctgagctcagtgaccccctggtgctggtgatgacaggagcctacccaaaacccaccctctcagcccagcccagccctgtggtgacctcaggaggaagggtgaccctccagtgtgagtcacaggtggcatttggcggcttcattctgtgtaaggaaggagaagatgaacacccacaatgcctgaactcccagccccatgcccgtgggtcgtcccgcgccatcttctccgtgggccccgtgagcccgaatcgcaggtggtcgcacaggtgctatggttatgacttgaactctccctatgtgtggtcttcacccagtgatctcctggagctcctggtcccaggtgtttctaagaagccatcactctcagtgcagccgggtcctgtcatggcccctggggaaagcctgaccctccagtgtgtctctgatgtcggctatgacagatttgttctgtacaaggagggggaacgtgaccttcgccagctccctggccggcagccccaggctgggctctcccaggccaacttcaccctgggccctgtgagccgctcctacgggggccagtacagatgctacggtgcacacaacctctcctctgagtgctcggcccccagcgaccccctggacatcctgatcacaggacagatccgtggcacacccttcatctcagtgcagccaggccccacagtggcctcaggagagaacgtgaccctgctgtgtcagtcatggcggcagttccacactttccttctgaccaaggcgggagcagctgatgccccactccgtctaagatcaatacacgaatatcctaagtaccaggctgaattccccatgagtcctgtgacctcagcccacgcggggacctacaggtgctacggctcactcaactccgacccctacctgctgtctcaccccagtgagcccctggagctcgtggtctcaggaccctccatgggttccagccccccacccaccggtcccatctccacacctgcaggccctgaggaccagcccctcacccccactgggtcggatccccaaagtggtctgggaaggcacctgggggttgtgatcggcatcttggtggccgtcgtcctactgctcctcctcctcctcctcctcttcctcatcctccgacatcgacgtcagggcaaacactggacatcgacccagagaaaggctgatttccaacatcctgcaggggctgtggggccagagcccacagacagaggcctgcagtggaggtccagcccagctgccgacgcccaggaagaaaacctctatgctgccgtgaaggacacacagcctgaagatggggtggagatggacactcgggctgctgcatctgaagccccccaggatgtgacctacgcccagctgcacagcttgaccctcagacggaaggcaactgagcctcctccatcccaggaaagggaacctccagctgagcccagcatctacgccaccctggccatccactagcccggagggtacgcagactccacactcagtagaaggagactcaggactgctgaaggcacgggagctgcccccagtggacaccaatgaaccccagtcagcctggacccctaacaaagaccatgaggagatgctgggaactttgggactcacttgattctgcagtcgaaataactaatatccctacattttttaattaaagcaacagacttctcaataa

SEQ ID NO: 148637 - DNA, 1058 bp, Homo sapiens
  Payload ID: 9417
  Gene Symbol: LILRB2
  Gene Name: leukocyte immunoglobulin-like receptor, subfamily B (with TM and ITIM domains), member 2
  ENST ID: ENST00000455108
  CDS Start-End: 1-632
ccttcatctcagtgcagccaggccccacagtggcctcaggagagaacgtgaccctgctgtgtcagtcatggcggcagttccacactttccttctgaccaaggcgggagcagctgatgccccactccgtctaagatcaatacacgaatatcctaagtaccaggctgaattccccatgagtcctgtgacctcagcccacgcggggacctacaggtgctacggctcactcaactccgacccctacctgctgtctcaccccagtgagcccctggagctcgtggtctcaggaccctccatgggttccagccccccacccaccggtcccatctccacacctgcaggccctgaggaccagcccctcacccccactgggtcggatccccaaagtggtctgggaaggcacctgggggttgtgatcggcatcttggtggccgtcgtcctactgctcctcctcctcctcctcctcttcctcatcctccgacatcgacgtcagggcaaacactggacatcgacccagagaaaggctgatttccaacatcctgcaggggctgtggggccagagcccacagacagaggcctgcagtggaggtccagcccagctgccgacgcccaggaagaaaacctctgtgagtgagaggaagagatgctgccgtgaaggacacacagcctgaagatggggtggagatggacactcgggctgctgcatctgaagccccccaggatgtgacctacgcccagctgcacagcttgaccctcagacggaaggcaactgagcctcctccatcccaggaaagggaacctccagctgagcccagcatctacgccaccctggccatccactagcccggagggtacgcagactccacactcagtagaaggagactcaggactgctgaaggcacgggagctgcccccagtggacaccaatgaaccccagtcagcctggacccctaacaaagaccatgaggagatgctgggaactttgggactcacttgattctgcagtcgaaataactaatatccctacattttttaattaaagcaacagacttctcaataa

SEQ ID NO: 148638 - DNA, 2773 bp, Homo sapiens
  Payload ID: 9417
  Gene Symbol: LILRB2
  Gene Name: leukocyte immunoglobulin-like receptor, subfamily B (with TM and ITIM domains), member 2
  Uniprot ID: Q8N423
  ENST ID: ENST00000434421
  CDS Start-End: 464-1912
atttggttgaaagaaaacccacaatccagtgtcaagaaagaagtcaacttttcttcccctacttccctgcatttctcctctgtgctcactgccacacacagctcaacctggacagcacagccagaggcgagatgcttctctgctgatctgagtctgcctgcagcatggacctgggtcttccctgaagcatctccagggctggagggacgactgccatgcaccgagggctcatccatccgcagagcagggcagtgggaggagacgccatgacccccatcgtcacagtcctgatctgtctcgggagaaaaaatcagcatcttggattacacggatacgaccagagcttgtgaagaacggccagttccacatcccatccatcacctgggaacacacagggcgatatggctgtcagtattacagccgcgctcggtggtctgagctcagtgaccccctggtgctggtgatgacaggagcctacccaaaacccaccctctcagcccagcccagccctgtggtgacctcaggaggaagggtgaccctccagtgtgagtcacaggtggcatttggcggcttcattctgtgtaaggaaggagaagatgaacacccacaatgcctgaactcccagccccatgcccgtgggtcgtcccgcgccatcttctccgtgggccccgtgagcccgaatcgcaggtggtcgcacaggtgctatggttatgacttgaactctccctatgtgtggtcttcacccagtgatctcctggagctcctggtcccaggtgtttctaagaagccatcactctcagtgcagccgggtcctgtcatggcccctggggaaagcctgaccctccagtgtgtctctgatgtcggctatgacagatttgttctgtacaaggagggggaacgtgaccttcgccagctccctggccggcagccccaggctgggctctcccaggccaacttcaccctgggccctgtgagccgctcctacgggggccagtacagatgctacggtgcacacaacctctcctctgagtgctcggcccccagcgaccccctggacatcctgatcacaggacagatccgtggcacacccttcatctcagtgcagccaggccccacagtggcctcaggagagaacgtgaccctgctgtgtcagtcatggcggcagttccacactttccttctgaccaaggcgggagcagctgatgccccactccgtctaagatcaatacacgaatatcctaagtaccaggctgaattccccatgagtcctgtgacctcagcccacgcggggacctacaggtgctacggctcactcaactccgacccctacctgctgtctcaccccagtgagcccctggagctcgtggtctcaggaccctccatgggttccagccccccacccaccggtcccatctccacacctgcaggccctgaggaccagcccctcacccccactgggtcggatccccaaagtggtctgggaaggcacctgggggttgtgatcggcatcttggtggccgtcgtcctactgctcctcctcctcctcctcctcttcctcatcctccgacatcgacgtcagggcaaacactggacatcgacccagagaaaggctgatttccaacatcctgcaggggctgtggggccagagcccacagacagaggcctgcagtggaggtccagcccagctgccgacgcccaggaagaaaacctctatgctgccgtgaaggacacacagcctgaagatggggtggagatggacactcgggctgctgcatctgaagccccccaggatgtgacctacgcccagctgcacagcttgaccctcagacggaaggcaactgagcctcctccatcccaggaaagggaacctccagctgagcccagcatctacgccaccctggccatccactagcccggagggtacgcagactccacactcagtagaaggagactcaggactgctgaaggcacgggagctgcccccagtggacaccaatgaaccccagtcagcctggacccctaacaaagaccatgaggagatgctgggaactttgggactcacttgattctgcagtcgaaataactaatatccctacattttttaattaaagcaacagacttctcaataatcaatgagttaaccgagaaaactaaaatcagaagtaagaatgtgctttaaactgaatcacaatataaatattacacatcacacaatgaaattgaaaaagtacaaaccacaaatgaaaaaagtagaaacgaaaaaaaaaaactaggaaatgaatgacgttggctttcgtataaggaatttagaaaaagaataaccaattattccaaatgaaggtgtaagaaagggaataagaagaagaagagttgctcatgaggaaaaaccaaaacttgaaaattcaacaaagccaatgaagctcattcttgaaaatattaattacagtcataaatcctaactacattgagcaagagaaagaaagagcaggcacgcatttccatatgggagtgagccagcagacagcccagcagatcctacacacattttcacaaactaaccccagaacaggctgcaaacctataccaatatactagaaaatgcagattaaatggatgaaatattcaaaactggagtttacataatgaacgtaagagtaatcagagaatctgactcattttaaatgtgtgtgtatgtgtgtgtatatatatgtgtgtgtgtgtgtgtgtgtgtgtgtgtgaaaaacattgactgtaataaaaatgttcccatcgt

SEQ ID NO: 148639 - DNA, 917 bp, Homo sapiens
  Payload ID: 9417
  Gene Symbol: LILRB2
  Gene Name: leukocyte immunoglobulin-like receptor, subfamily B (with TM and ITIM domains), member 2
  ENST ID: ENST00000616216
  CDS Start-End: 1-660
gaattccccatgagtcctgtgacctcagcccacgcggggacctacaggtgctacggctcactcaactccgacccctacctgctgtctcaccccagtgagcccctggagctcgtggtctcaggaccctccatgggttccagccccccacccaccggtcccatctccacacctgcaggccctgaggaccagcccctcacccccactgggtcggatccccaaagtggtctgggaaggcacctgggggttgtgatcggcatcttggtggccgtcgtcctactgctcctcctcctcctcctcctcttcctcatcctccgacatcgacgtcagggcaaacactggacatcgacccagagaaaggctgatttccaacatcctgcaggggctgtggggccagagcccacagacagaggcctgcagtggaggtccagcccagctgccgacgcccaggaagaaaacctctatgctgccgtgaaggacacacagcctgaagatggggtggagatggacactcgggctgctgcatctgaagccccccaggatgtgacctacgcccagctgcacagcttgaccctcagacggaaggcaactgagcctcctccatcccaggaaagggaacctccagctgagcccagcatctacgccaccctggccatccactagcccggagggtacgcagactccacactcagtagaaggagactcaggactgctgaaggcacgggagctgcccccagtggacaccaatgaaccccagtcagcctggacccctaacaaagaccatgaggagatgctgggaactttgggactcacttgattctgcagtcgaaataactaatatccctacattttttaattaaagcaacagacttctcaataatcaatgagttaaccgagaaaactaaaatcagaagtaagaa

SEQ ID NO: 148640 - DNA, 988 bp, Homo sapiens
  Payload ID: 9417
  Gene Symbol: LILRB2
  Gene Name: leukocyte immunoglobulin-like receptor, subfamily B (with TM and ITIM domains), member 2
  ENST ID: ENST00000617643
  CDS Start-End: 1-657
gaattccccatgagtcctgtgacctcagcccacgcggggacctacaggtgctacggctcactcaactccgacccctacctgctgtctcaccccagtgagcccctggagctcgtggtctcaggaccctccatgggttccagccccccacccaccggtcccatctccacacctggccctgaggaccagcccctcacccccactgggtcggatccccaaagtggtctgggaaggcacctgggggttgtgatcggcatcttggtggccgtcgtcctactgctcctcctcctcctcctcctcttcctcatcctccgacatcgacgtcagggcaaacactggacatcgacccagagaaaggctgatttccaacatcctgcaggggctgtggggccagagcccacagacagaggcctgcagtggaggtccagcccagctgccgacgcccaggaagaaaacctctatgctgccgtgaaggacacacagcctgaagatggggtggagatggacactcgggctgctgcatctgaagccccccaggatgtgacctacgcccagctgcacagcttgaccctcagacggaaggcaactgagcctcctccatcccaggaaagggaacctccagctgagcccagcatctacgccaccctggccatccactagcccggagggtacgcagactccacactcagtagaaggagactcaggactgctgaaggcacgggagctgcccccagtggacaccaatgaaccccagtcagcctggacccctaacaaagaccatgaggagatgctgggaactttgggactcacttgattctgcagtcgaaataactaatatccctacattttttaattaaagcaacagacttctcaataatcaatgagttaaccgagaaaactaaaatcagaagtaagaatgtgctttaaactgaatcacaatataaatattacacatcacacaatgaaattgaaaaagtacaaaccacaaatg

SEQ ID NO: 148641 - DNA, 2782 bp, Homo sapiens
  Payload ID: 9417
  Gene Symbol: LILRB2
  Gene Name: leukocyte immunoglobulin-like receptor, subfamily B (with TM and ITIM domains), member 2
  ENST ID: ENST00000621989
  CDS Start-End: 129-1922
ggggaagccactgctaccctcatcaggaagggcagacacaagaagcaccagttctatttgctgctacatcccggctctcgcaccgagggctcatccatccgcagagcagggcagtgggaggagacgccatgacccccatcgtcacagtcctgatctgtctcgggctgagtctgggccccaggacccacgtgcagacagggaccatccccaagcccaccctgtgggctgagccagactctgtgatcacccaggggagtcccgtcaccctcagttgtcaggggagccttgaagcccaggagtaccgtctatatagggagaaaaaatcagcatcttggattacacggatacgaccagagcttgtgaagaacggccagttccacatcccatccatcacctgggaacacacagggcgatatggctgtcagtattacagccgcgctcggtggtctgagctcagtgaccccctggtgctggtgatgacaggagcctacccaaaacccaccctctcagcccagcccagccctgtggtgacctcaggaggaagggtgaccctccagtgtgagtcacaggtggcatttggcggcttcattctgtgtaaggaaggagaagatgaacacccacaatgcctgaactcccagccccatgcccgtgggtcgtcccgcgccatcttctccgtgggccccgtgagcccgaatcgcaggtggtcgcacaggtgctatggttatgacttgaactctccctatgtgtggtcttcacccagtgatctcctggagctcctggtcccaggtgtttctaagaagccatcactctcagtgcagccgggtcctgtcgtggcccctggggaaagcctgaccctccagtgtgtctctgatgtcggctatgacagatttgttctgtacaaggagggggaacgtgaccttcgccagctccctggccggcagccccaggctgggctctcccaggccaacttcaccctgggccctgtgagccgctcctacgggggccagtacagatgctacggtgcatacaacctctcctccgagtggtcggcccccagcgaccccctggacatcctgatcacaggacagatccatggcacacccttcatctcagtgcagccaggccccacagtggcctcaggagagaacgtgaccctgctgtgtcagtcatggcggcagttccacactttccttctgaccaaggcgggagcagctgatgccccactccgtctaagatcaatacacgaatatcctaagtaccaggctgaattccccatgagtcctgtgacctcagcccacgcggggacctacaggtgctacggctcactcaactccgacccctacctgctgtctcaccccagtgagcccctggagctcgtggtctcaggaccctccatgggttccagccccccacccaccggtcccatctccacacctggccctgaggaccagcccctcacccccactgggtcggatccccaaagtggtctgggaaggcacctgggggttgtgatcggcatcttggtggccgtcgtcctactgctcctcctcctcctcctcctcttcctcatcctccgacatcgacgtcagggcaaacactggacatcaacccagagaaaggctgatttccaacatcctgcaggggctgtggggccagagcccacagacagaggcctgcagtggaggtccagcccagctgccgacgcccaggaagaaaacctctatgctgccgtgaaggacacacagcctgaagatggggtggagatggacactcgggctgctgcatctgaagccccccaggatgtgacctacgcccagctgcacagcttgaccctcagacggaaggcaactgagcctcctccatcccaggaaggggaacctccagctgagcccagcatctacgccaccctggccatccactagcccggagggtacgcagactccacactcagtagaaggagactcaggactgctgaaggcacgggagctgcccccagtggacaccaatgaaccccagtcagcctggacccctaacaaagaccatgaggagatgctgggaactttgggactcacttgattctgcagtcgaaataactaatatccctacattttttaattaaagcaacagacttctcaataatcaatgagttaaccgagaaaactaaaatcagaagtaagaatgtgctttaaactgaatcacaatataaatattacacatcacacaatgaaattgaaaaagtacaaaccacaaatgaaaaaagtagaaacgaaaaaaaaaaactaggaaatgaatgacgttggctttcgtataaggaatttagaaaaagaataaccaattattccaaatgaaggtgtaagaaagggaataagaagaagaagagttgctcatgaggaaaaaccaaaacttgaaaattcaacaaagccaatgaagctcattcttgaaaatattaattacagtcataaatcctaactacattgagcaagagaaagaaagagcaggcacgcatttccatatgggagtgagccagcagacagcccagcagatcctacacacattttcacaaactaaccccagaacaggctgcaaacctataccaatatactagaaaatgcagattaaatggatgaaatattcaaaactggagtttacataatgaacgtaagagtaatcagagaatctgactcattttaaatgtgtgtgtatgtgtgtgtatatatatgtgtgtgtgtgtgtgtgtgtgtgtgtgaaaaacattgactgtaataaaaatgttcccatcgta

SEQ ID NO: 148642 - DNA, 1058 bp, Homo sapiens; identical to SEQ ID NO: 148637
  Payload ID: 9417
  Gene Symbol: LILRB2
  Gene Name: leukocyte immunoglobulin-like receptor, subfamily B (with TM and ITIM domains), member 2
  ENST ID: ENST00000613933
  CDS Start-End: 1-632

SEQ ID NO: 148643 - DNA, 346 bp, Homo sapiens
  Payload ID: 9417
  Gene Symbol: LILRB2
  Gene Name: leukocyte immunoglobulin-like receptor, subfamily B (with TM and ITIM domains), member 2
  ENST ID: ENST00000620441
  CDS Start-End: 234-346
caggaattgaggtgcagagggacggctaaggacgcaatgggcaccgaggaggcaggaaagactcagagctcagcctgggcggcacagccagatgcgagatgcgtctctgctgatctgagtctgcctgcagcatggacctgggtcttccctgaagcatctccagggctggagggacgactgccatgcaccgagggctcatccatccgcagagcagggcagtgggaggagacgccatgacccccatcgtcacagtcctgatctgtctcgggctgagtctgggccccaggacccacgtgcagacagggaccatccccaagcccaccctgtgggctgagccagactctgt

SEQ ID NO: 148644 - DNA, 2210 bp, Homo sapiens
  Payload ID: 9417
  Gene Symbol: LILRB2
  Gene Name: leukocyte immunoglobulin-like receptor, subfamily B (with TM and ITIM domains), member 2
  Uniprot ID: Q8N423
  ENST ID: ENST00000618392
  CDS Start-End: 157-1953
gacggcacagccagatgcgagatgcgtctctgctgatctgagtctgcctgcagcatggacctgggtcttccctgaagcatctccagggctggagggacgactgccatgcaccgagggctcatccatccgcagagcagggcagtgggaggagacgccatgacccccatcgtcacagtcctgatctgtctcgggctgagtctgggccccaggacccacgtgcagacagggaccatccccaagcccaccctgtgggctgagccagactctgtgatcacccaggggagtcccgtcaccctcagttgtcaggggagccttgaagcccaggagtaccgtctatatagggagaaaaaatcagcatcttggattacacggatacgaccagagcttgtgaagaacggccagttccacatcccatccatcacctgggaacacacagggcgatatggctgtcagtattacagccgcgctcggtggtctgagctcagtgaccccctggtgctggtgatgacaggagcctacccaaaacccaccctctcagcccagcccagccctgtggtgacctcaggaggaagggtgaccctccagtgtgagtcacaggtggcatttggcggcttcattctgtgtaaggaaggagaagatgaacacccacaatgcctgaactcccagccccatgcccgtgggtcgtcccgcgccatcttctccgtgggccccgtgagcccgaatcgcaggtggtcgcacaggtgctatggttatgacttgaactctccctatgtgtggtcttcacccagtgatctcctggagctcctggtcccaggtgtttctaagaagccatcactctcagtgcagccgggtcctgtcgtggcccctggggaaagcctgaccctccagtgtgtctctgatgtcggctatgacagatttgttctgtacaaggagggggaacgtgaccttcgccagctccctggccggcagccccaggctgggctctcccaggccaacttcaccctgggccctgtgagccgctcctacgggggccagtacagatgctacggtgcatacaacctctcctccgagtggtcggcccccagcgaccccctggacatcctgatcacaggacagatccatggcacacccttcatctcagtgcagccaggccccacagtggcctcaggagagaacgtgaccctgctgtgtcagtcatggcggcagttccacactttccttctgaccaaggcgggagcagctgatgccccactccgtctaagatcaatacacgaatatcctaagtaccaggctgaattccccatgagtcctgtgacctcagcccacgcggggacctacaggtgctacggctcactcaactccgacccctacctgctgtctcaccccagtgagcccctggagctcgtggtctcaggaccctccatgggttccagccccccacccaccggtcccatctccacacctgcaggccctgaggaccagcccctcacccccactgggtcggatccccaaagtggtctgggaaggcacctgggggttgtgatcggcatcttggtggccgtcgtcctactgctcctcctcctcctcctcctcttcctcatcctccgacatcgacgtcagggcaaacactggacatcaacccagagaaaggctgatttccaacatcctgcaggggctgtggggccagagcccacagacagaggcctgcagtggaggtccagcccagctgccgacgcccaggaagaaaacctctatgctgccgtgaaggacacacagcctgaagatggggtggagatggacactcgggctgctgcatctgaagccccccaggatgtgacctacgcccagctgcacagcttgaccctcagacggaaggcaactgagcctcctccatcccaggaaggggaacctccagctgagcccagcatctacgccaccctggccatccactagcccggagggtacgcagactccacactcagtagaaggagactcaggactgctgaaggcacgggagctgcccccagtggacaccaatgaaccccagtcagcctggacccctaacaaagaccatgaggagatgctgggaactttgggactcacttgattctgcagtcgaaataactaatatccctacattttttaattaaagcaacagacttctcaataatcaatgagttaaccgagaaaactaaaatcagaagtaagaa

SEQ ID NO: 148645 - DNA, 2361 bp, Homo sapiens
  Payload ID: 9417
  Gene Symbol: LILRB2
  Gene Name: leukocyte immunoglobulin-like receptor, subfamily B (with TM and ITIM domains), member 2
  ENST ID: ENST00000613032
  CDS Start-End: 222-2030
gggactatttggttgaaagaaaacccacaatccagtgtcaagaaagaagtcaacttttcttcccctacttccctgcatttctcctctgtgctcactgccacacgcagctcaacctggacggcacagccagaggcgagatgcttctctgctgatctgagtctgcctgcagcatggacctgggtcttccctgaagcatctccagggctggagggacgactgccatgcaccgagggctcatccatccgcagagcagggcagtgggaggagacgccatgacccccatcgtcacagtcctgatctgtctcgggaccattcccaagcccaccctgtgggctgagccagactctgtgatcacccaggggagtcccgtcaccctcagttgtcaggggagccttgaagcccaggagtaccgtctatatagggagaaaaaatcagcatcttggattacacggatacgaccagagcttgtgaagaacggccagttccacatcccatccatcacctgggaacacacagggcgatatggctgtcagtattacagccgcgctcggtggtctgagctcagtgaccccctggtgctggtgatgacaggagcctacccaaaacccaccctctcagcccagcccagccctgtggtgacctcaggaggaagggtgaccctccagtgtgagtcacaggtggcatttggcggcttcattctgtgtaaggaaggagaagaagaacacccacaatgcctgaactcccagccccatgcccgtgggtcgtcccgcgccatcttctccgtgggccccgtgagcccgaatcgcaggtggtcgcacaggtgctatggttatgacttgaactctccctatgtgtggtcttcacccagtgatctcctggagctcctggtcccaggtgtttctaagaagccatcactctcagtgcagccgggtcctgtcgtggcccctggggaaagcctgaccctccagtgtgtctctgatgtcggctatgacagatttgttctgtacaaggagggggaacgtgaccttcgccagctccctggccggcagccccaggctgggctctcccaggccaacttcaccctgggccctgtgagccgctcctacgggggccagtacagatgctacggtgcacacaacctctcctctgagtgctcggcccccagcgaccccctggacatcctgatcacaggacagatccgtggcacacccttcatctcagtgcagccaggccccacagtggcctcaggagagaacgtgaccctgctgtgtcagtcatggcggcagttccacactttccttctgaccaaggcgggagcagctgatgccccactccgtctaagatcaatacacgaatatcctaagtaccaggctgaattccccatgagtcctgtgacctcagcccacgcggggacctacaggtgctacggctcactcaactccgacccctacctgctgtctcaccccagtgagcccctggagctcgtggtctcaggaccctccatgggttccagccccccacccaccggtcccatctccacacctggccctgaggaccagcccctcacccccactgggtcggatccccaaagtggtctgggaaggcacctgggggttgtgatcggcatcttggtggccgtcgtcctactgctcctcctcctcctcctcctcttcctcatcctccgacatcgacgtcagggcaaacactggacatcgacccagagaaaggctgatttccaacatcctgcaggggctgtggggccagagcccacagacagaggcctgcagtggaggtccagcccagctgccgacgcccaggaagaaaacctctatgctgccgtgaaggacacacagcctgaagatggggtggagatggacactcgggctgctgcatctgaagccccccaggatgtgacctacgcccagctgcacagcttgaccctcagacggaaggcaactgagcctcctccatcccaggaaagggaacctccagctgagcccagcatctacgccaccctggccatccactagcccggagggtacgcagactccacactcagtagaaggagactcaggactgctgaaggcacgggagctgcccccagtggacaccaatgaaccccagtcagcctggacccctaacaaagaccatgaggagatgctgggaactttgggactcacttgattctgcagtcgaaataactaatatccctacattttttaattaaagcaacagacttctcaataatcaatgagttaaccgagaaaactaaaatcagaagtaagaatgtgctttaaactgaatcacaatataaatattacacatcacacaatgaaattgaaaaagtacaaaccacaaatg

SEQ ID NO: 148646 - DNA, 2773 bp, Homo sapiens
  Payload ID: 9417
  Gene Symbol: LILRB2
  Gene Name: leukocyte immunoglobulin-like receptor, subfamily B (with TM and ITIM domains), member 2
  Uniprot ID: Q8N423
  ENST ID: ENST00000614225
  CDS Start-End: 464-1912
atttggttgaaagaaaacccacaatccagtgtcaagaaagaagtcaacttttcttcccctacttccctgcatttctcctctgtgctcactgccacacgcagctcaacctggacggcacagccagaggcgagatgcttctctgctgatctgagtctgcctgcagcatggacctgggtcttccctgaagcatctccagggctggagggacgactgccatgcaccgagggctcatccatccgcagagcagggcagtgggaggagacgccatgacccccatcgtcacagtcctgatctgtctcgggagaaaaaatcagcatcttggattacacggatacgaccagagcttgtgaagaacggccagttccacatcccatccatcacctgggaacacacagggcgatatggctgtcagtattacagccgcgctcggtggtctgagctcagtgaccccctggtgctggtgatgacaggagcctacccaaaacccaccctctcagcccagcccagccctgtggtgacctcaggaggaagggtgaccctccagtgtgagtcacaggtggcatttggcggcttcattctgtgtaaggaaggagaagaagaacacccacaatgcctgaactcccagccccatgcccgtgggtcgtcccgcgccatcttctccgtgggccccgtgagcccgaatcgcaggtggtcgcacaggtgctatggttatgacttgaactctccctatgtgtggtcttcacccagtgatctcctggagctcctggtcccaggtgtttctaagaagccatcactctcagtgcagccgggtcctgtcgtggcccctggggaaagcctgaccctccagtgtgtctctgatgtcggctatgacagatttgttctgtacaaggagggggaacgtgaccttcgccagctccctggccggcagccccaggctgggctctcccaggccaacttcaccctgggccctgtgagccgctcctacgggggccagtacagatgctacggtgcacacaacctctcctctgagtgctcggcccccagcgaccccctggacatcctgatcacaggacagatccgtggcacacccttcatctcagtgcagccaggccccacagtggcctcaggagagaacgtgaccctgctgtgtcagtcatggcggcagttccacactttccttctgaccaaggcgggagcagctgatgccccactccgtctaagatcaatacacgaatatcctaagtaccaggctgaattccccatgagtcctgtgacctcagcccacgcggggacctacaggtgctacggctcactcaactccgacccctacctgctgtctcaccccagtgagcccctggagctcgtggtctcaggaccctccatgggttccagccccccacccaccggtcccatctccacacctgcaggccctgaggaccagcccctcacccccactgggtcggatccccaaagtggtctgggaaggcacctgggggttgtgatcggcatcttggtggccgtcgtcctactgctcctcctcctcctcctcctcttcctcatcctccgacatcgacgtcagggcaaacactggacatcgacccagagaaaggctgatttccaacatcctgcaggggctgtggggccagagcccacagacagaggcctgcagtggaggtccagcccagctgccgacgcccaggaagaaaacctctatgctgccgtgaaggacacacagcctgaagatggggtggagatggacactcgggctgctgcatctgaagccccccaggatgtgacctacgcccagctgcacagcttgaccctcagacggaaggcaactgagcctcctccatcccaggaaagggaacctccagctgagcccagcatctacgccaccctggccatccactagcccggagggtacgcagactccacactcagtagaaggagactcaggactgctgaaggcacgggagctgcccccagtggacaccaatgaaccccagtcagcctggacccctaacaaagaccatgaggagatgctgggaactttgggactcacttgattctgcagtcgaaataactaatatccctacattttttaattaaagcaacagacttctcaataatcaatgagttaaccgagaaaactaaaatcagaagtaagaatgtgctttaaactgaatcacaatataaatattacacatcacacaatgaaattgaaaaagtacaaaccacaaatgaaaaaagtagaaacgaaaaaaaaaaactaggaaatgaatgacgttggctttcgtataaggaatttagaaaaagaataaccaattattccaaatgaaggtgtaagaaagggaataagaagaagaagagttgctcatgaggaaaaaccaaaacttgaaaattcaacaaagccaatgaagctcattcttgaaaatattaattacagtcataaatcctaactacattgagcaagagaaagaaagagcaggcacgcatttccatatgggagtgagccagcagacagcccagcagatcctacacacattttcacaaactaaccccagaacaggctgcaaacctataccaatatactagaaaatgcagattaaatggatgaaatattcaaaactggagtttacataatgaacgtaagagtaatcagagaatctgactcattttaaatgtgtgtgtatgtgtgtgtatatatatgtgtgtgtgtgtgtgtgtgtgtgtgtgtgaaaaacattgactgtaataaaaatgttcccatcgt

SEQ ID NO: 148647 - DNA, 2924 bp, Homo sapiens
  Payload ID: 9417
  Gene Symbol: LILRB2
  Gene Name: leukocyte immunoglobulin-like receptor, subfamily B (with TM and ITIM domains), member 2
  Uniprot ID: Q8N423
  ENST ID: ENST00000618705
  CDS Start-End: 267-2063
atttggttgaaagaaaacccacaatccagtgtcaagaaagaagtcaacttttcttcccctacttccctgcatttctcctctgtgctcactgccacacgcagctcaacctggacggcacagccagaggcgagatgcttctctgctgatctgagtctgcctgcagcatggacctgggtcttccctgaagcatctccagggctggagggacgactgccatgcaccgagggctcatccatccgcagagcagggcagtgggaggagacgccatgacccccatcgtcacagtcctgatctgtctcgggctgagtctgggccccaggacccacgtgcagacagggaccattcccaagcccaccctgtgggctgagccagactctgtgatcacccaggggagtcccgtcaccctcagttgtcaggggagccttgaagcccaggagtaccgtctatatagggagaaaaaatcagcatcttggattacacggatacgaccagagcttgtgaagaacggccagttccacatcccatccatcacctgggaacacacagggcgatatggctgtcagtattacagccgcgctcggtggtctgagctcagtgaccccctggtgctggtgatgacaggagcctacccaaaacccaccctctcagcccagcccagccctgtggtgacctcaggaggaagggtgaccctccagtgtgagtcacaggtggcatttggcggcttcattctgtgtaaggaaggagaagaagaacacccacaatgcctgaactcccagccccatgcccgtgggtcgtcccgcgccatcttctccgtgggccccgtgagcccgaatcgcaggtggtcgcacaggtgctatggttatgacttgaactctccctatgtgtggtcttcacccagtgatctcctggagctcctggtcccaggtgtttctaagaagccatcactctcagtgcagccgggtcctgtcgtggcccctggggaaagcctgaccctccagtgtgtctctgatgtcggctatgacagatttgttctgtacaaggagggggaacgtgaccttcgccagctccctggccggcagccccaggctgggctctcccaggccaacttcaccctgggccctgtgagccgctcctacgggggccagtacagatgctacggtgcacacaacctctcctctgagtgctcggcccccagcgaccccctggacatcctgatcacaggacagatccgtggcacacccttcatctcagtgcagccaggccccacagtggcctcaggagagaacgtgaccctgctgtgtcagtcatggcggcagttccacactttccttctgaccaaggcgggagcagctgatgccccactccgtctaagatcaatacacgaatatcctaagtaccaggctgaattccccatgagtcctgtgacctcagcccacgcggggacctacaggtgctacggctcactcaactccgacccctacctgctgtctcaccccagtgagcccctggagctcgtggtctcaggaccctccatgggttccagccccccacccaccggtcccatctccacacctgcaggccctgaggaccagcccctcacccccactgggtcggatccccaaagtggtctgggaaggcacctgggggttgtgatcggcatcttggtggccgtcgtcctactgctcctcctcctcctcctcctcttcctcatcctccgacatcgacgtcagggcaaacactggacatcgacccagagaaaggctgatttccaacatcctgcaggggctgtggggccagagcccacagacagaggcctgcagtggaggtccagcccagctgccgacgcccaggaagaaaacctctatgctgccgtgaaggacacacagcctgaagatggggtggagatggacactcgggctgctgcatctgaagccccccaggatgtgacctacgcccagctgcacagcttgaccctcagacggaaggcaactgagcctcctccatcccaggaaagggaacctccagctgagcccagcatctacgccaccctggccatccactagcccggagggtacgcagactccacactcagtagaaggagactcaggactgctgaaggcacgggagctgcccccagtggacaccaatgaaccccagtcagcctggacccctaacaaagaccatgaggagatgctgggaactttgggactcacttgattctgcagtcgaaataactaatatccctacattttttaattaaagcaacagacttctcaataatcaatgagttaaccgagaaaactaaaatcagaagtaagaatgtgctttaaactgaatcacaatataaatattacacatcacacaatgaaattgaaaaagtacaaaccacaaatgaaaaaagtagaaacgaaaaaaaaaaactaggaaatgaatgacgttggctttcgtataaggaatttagaaaaagaataaccaattattccaaatgaaggtgtaagaaagggaataagaagaagaagagttgctcatgaggaaaaaccaaaacttgaaaattcaacaaagccaatgaagctcattcttgaaaatattaattacagtcataaatcctaactacattgagcaagagaaagaaagagcaggcacgcatttccatatgggagtgagccagcagacagcccagcagatcctacacacattttcacaaactaaccccagaacaggctgcaaacctataccaatatactagaaaatgcagattaaatggatgaaatattcaaaactggagtttacataatgaacgtaagagtaatcagagaatctgactcattttaaatgtgtgtgtatgtgtgtgtatatatatgtgtgtgtgtgtgtgtgtgtgtgtgtgtgaaaaacattgactgtaataaaaatgttcccatcgt

SEQ ID NO: 148648 - DNA, 1904 bp, Homo sapiens
  Payload ID: 9417
  Gene Symbol: LILRB2
  Gene Name: leukocyte immunoglobulin-like receptor, subfamily B (with TM and ITIM domains), member 2
  ENST ID: ENST00000621522
  CDS Start-End: 3-1499
ccatgacccccatcgtcacagtcctgatctgtctcgggaccattcccaagcccaccctgtgggctgagccagactctgtgatcacccaggggagtcccgtcaccctcagttgtcaggggagccttgaagcccaggagtaccgtctatatagggagaaaaaatcagcatcttggattacacggatacgaccagagcttgtgaagaacggccagttccacatcccatccatcacctgggaacacacagggcgatatggctgtcagtattacagccgcgctcggtggtctgagctcagtgaccccctggtgctggtgatgacaggagcctacccaaaacccaccctctcagcccagcccagccctgtggtgacctcaggaggaagggtgaccctccagtgtgagtcacaggtggcatttggcggcttcattctgtgtaaggaaggagaagaagaacacccacaatgcctgaactcccagccccatgcccgtgggtcgtcccgcgccatcttctccgtgggccccgtgagcccgaatcgcaggtggtcgcacaggtgctatggttatgacttgaactctccctatgtgtggtcttcacccagtgatctcctggagctcctggtcccaggtgtttctaagaagccatcactctcagtgcagccgggtcctgtcgtggcccctggggaaagcctgaccctccagtgtgtctctgatgtcggctatgacagatttgttctgtacaaggagggggaacgtgaccttcgccagctccctggccggcagccccaggctgggctctcccaggccaacttcaccctgggccctgtgagccgctcctacgggggccagtacagatgctacggtgcacacaacctctcctctgagtgctcggcccccagcgaccccctggacatcctgatcacaggacagatccgtggcacacccttcatctcagtgcagccaggccccacagtggcctcaggagagaacgtgaccctgctgtgtcagtcatggcggcagttccacactttccttctgaccaaggcgggagcagctgatgccccactccgtctaagatcaatacacgaatatcctaagtaccaggctgaattccccatgagtcctgtgacctcagcccacgcggggacctacaggtgctacggctcactcaactccgacccctacctgctgtctcaccccagtgagcccctggagctcgtggtctcaggaccctccatgggttccagccccccacccaccggtcccatctccacacctgcaggccctgaggaccagcccctcacccccactgggtcggatccccaaagtggtctgggaaggcacctgggggttgtgatcggcatcttggtggccgtcgtcctactgctcctcctcctcctcctcctcttcctcatcctccgacatcgacgtcagggcaaacactggacatcgagtccagcccagctgccgacgcccaggaagaaaacctctatgctgccgtgaaggacacacagcctgaagatggggtggagatggacactcgggctgctgcatctgaagccccccaggatgtgacctacgcccagctgcacagcttgaccctcagacggaaggcaactgagcctcctccatcccaggaaagggaacctccagctgagcccagcatctacgccaccctggccatccactagcccggagggtacgcagactccacactcagtagaaggagactcaggactgctgaaggcacgggagctgcccccagtggacaccaatgaaccccagtcagcctggacccctaacaaagaccatgaggagatgctgggaactttgggactcacttgattctgcagtcgaaataactaatatccctacattttttaattaaagcaacagacttctcaataa

SEQ ID NO: 148649 - DNA, 1892 bp, Homo sapiens
  Payload ID: 9417
  Gene Symbol: LILRB2
  Gene Name: leukocyte immunoglobulin-like receptor, subfamily B (with TM and ITIM domains), member 2
  ENST ID: ENST00000613437
  CDS Start-End: 3-1535
ccatgacccccatcgtcacagtcctgatctgtctcgggctgagtctgggccccaggacccacgtgcagacagggaccatccccaagcccaccctgtgggctgagccagactctgtgatcacccaggggagtcccgtcaccctcagttgtcaggggagccttgaagcccaggagtaccgtctatatagggagaaaaaatcagcatcttggattacacggatacgaccagagcttgtgaagaacggccagttccacatcccatccatcacctgggaacacacagggcgatatggctgtcagtattacagccgcgctcggtggtctgagctcagtgaccccctggtgctggtgatgacaggagcctacccaaaacccaccctctcagcccagcccagccctgtggtgacctcaggaggaagggtgaccctccagtgtgagtcacaggtggcatttggcggcttcattctgtgtaaggaaggagaagatgaacacccacaatgcctgaactcccagccccatgcccgtgggtcgtcccgcgccatcttctccgtgggccccgtgagcccgaatcgcaggtggtcgcacaggtgctatggttatgacttgaactctccctatgtgtggtcttcacccagtgatctcctggagctcctggtcccaggtgtttctaagaagccatcactctcagtgcagccgggtcctgtcgtggcccctggggaaagcctgaccctccagtgtgtctctgatgtcggctatgacagatttgttctgtacaaggagggggaacgtgaccttcgccagctccctggccggcagccccaggctgggctctcccaggccaacttcaccctgggccctgtgagccgctcctacgggggccagtacagatgctacggtgcatacaacctctcctccgagtggtcggcccccagcgaccccctggacatcctgatcacaggacagatccatggcacacccttcatctcagtgcagccaggccccacagtggcctcaggagagaacgtgaccctgctgtgtcagtcatggcggcagttccacactttccttctgaccaaggcgggagcagctgatgccccactccgtctaagatcaatacacgaatatcctaagtaccaggctgaattccccatgagtcctgtgacctcagcccacgcggggacctacaggtgctacggctcactcaactccgacccctacctgctgtctcaccccagtgagcccctggagctcgtggtctcaggaccctccatgggttccagccccccacccaccggtcccatctccacacctgcaggccctgaggaccagcccctcacccccactgggtcggatccccaaagtggtctgggaaggcacctgggggttgtgatcggcatcttggtggccgtcgtcctactgctcctcctcctcctcctcctcttcctcatcctccgacatcgacgtcagggcaaacactggacatcaagtccagcccagctgccgacgcccaggaagaaaacctctatgctgccgtgaaggacacacagcctgaagatggggtggagatggacactcgggctgctgcatctgaagccccccaggatgtgacctacgcccagctgcacagcttgaccctcagacggaaggcaactgagcctcctccatcccaggaaggggaacctccagctgagcccagcatctacgccaccctggccatccactagcccggagggtacgcagactccacactcagtagaaggagactcaggactgctgaaggcacgggagctgcccccagtggacaccaatgaaccccagtcagcctggacccctaacaaagaccatgaggagatgctgggaactttgggactcacttgattctgcagtcgaaat

SEQ ID NO: 148650 - DNA, 1892 bp, Homo sapiens
  Payload ID: 9417
  Gene Symbol: LILRB2
  Gene Name: leukocyte immunoglobulin-like receptor, subfamily B (with TM and ITIM domains), member 2
  ENST ID: ENST00000621542
  CDS Start-End: 3-1535
ccatgacccccatcgtcacagtcctgatctgtctcgggctgagtctgggccccaggacccacgtgcagacagggaccatccccaagcccaccctgtgggctgagccagactctgtgatcacccaggggagtcccgtcaccctcagttgtcaggggagccttgaagcccaggagtaccgtctatatagggagaaaaaatcagcatcttggattacacggatacgaccagagcttgtgaagaacggccagttccacatcccatccatcacctgggaacacacagggcgatatggctgtcagtattacagccgcgctcggtggtctgagctcagtgaccccctggtgctggtgatgacaggagcctacccaaaacccaccctctcagcccagcccagccctgtggtgacctcaggaggaagggtgaccctccagtgtgagtcacaggtggcatttggcggcttcattctgtgtaaggaaggagaagatgaacacccacaatgcctgaactcccagccccatgcccgtgggtcgtcccgcgccatcttctccgtgggccccgtgagcccgaatcgcaggtggtcgcacaggtgctatggttatgacttgaactctccctatgtgtggtcttcacccagtgatctcctggagctcctggtcccaggtgtttctaagaagccatcactctcagtgcagccgggtcctgtcgtggcccctggggaaagcctgaccctccagtgtgtctctgatgtcggctatgacagatttgttctgtacaaggagggggaacgtgaccttcgccagctccctggccggcagccccaggctgggctctcccaggccaacttcaccctgggccctgtgagccgctcctacgggggccagtacagatgctacggtgcatacaacctctcctccgagtggtcggcccccagcgaccccctggacatcctgatcacaggacagatccatggcacacccttcatctcagtgcagccaggccccacagtggcctcaggagagaacgtgaccctgctgtgtcagtcatggcggcagttccacactttccttctgaccaaggcgggagcagctgatgccccactccgtctaagatcaatacacgaatatcctaagtaccaggctgaattccccatgagtcctgtgacctcagcccacgcggggacctacaggtgctacggctcactcaactccgacccctacctgctgtctcaccccagtgagcccctggagctcgtggtctcaggaccctccatgggttccagccccccacccaccggtcccatctccacacctgcaggccctgaggaccagcccctcacccccactgggtcggatccccaaagtggtctgggaaggcacctgggggttgtgatcggcatcttggtggccgtcgtcctactgctcctcctcctcctcctcctcttcctcatcctccgacatcgacgtcagggcaaacactggacatcgagtccagcccagctgccgacgcccaggaagaaaacctctatgctgccgtgaaggacacacagcctgaagatggggtggagatggacactcgggctgctgcatctgaagccccccaggatgtgacctacgcccagctgcacagcttgaccctcagacggaaggcaactgagcctcctccatcccaggaaagggaacctccagctgagcccagcatctacgccaccctggccatccactagcccggagggtacgcagactccacactcagtagaaggagactcaggactgctgaaggcacgggagctgcccccagtggacaccaatgaaccccagtcagcctggacccctaacaaagaccatgaggagatgctgggaactttgggactcacttgattctgcagtcgaaat

SEQ ID NO: 148651 - DNA, 2299 bp, Homo sapiens
  Payload ID: 9417
  Gene Symbol: LILRB2
  Gene Name: leukocyte immunoglobulin-like receptor, subfamily B (with TM and ITIM domains), member 2
  ENST ID: ENST00000610367
  CDS Start-End: 175-1968
cacacgcagctcaacctggacggcacagccagatgcgagatgcgtctctgctgatctgagtctgcctgcagcatggacctgggtcttccctgaagcatctccagggctggagggacgactgccatgcaccgagggctcatccatccgcagagcagggcagtgggaggagacgccatgacccccatcgtcacagtcctgatctgtctcgggctgagtctgggccccaggacccacgtgcagacagggaccatccccaagcccaccctgtgggctgagccagactctgtgatcacccaggggagtcccgtcaccctcagttgtcaggggagccttgaagcccaggagtaccgtctatatagggagaaaaaatcagcatcttggattacacggatacgaccagagcttgtgaagaacggccagttccacatcccatccatcacctgggaacacacagggcgatatggctgtcagtattacagccgcgctcggtggtctgagctcagtgaccccctggtgctggtgatgacaggagcctacccaaaacccaccctctcagcccagcccagccctgtggtgacctcaggaggaagggtgaccctccagtgtgagtcacaggtggcatttggcggcttcattctgtgtaaggaaggagaagatgaacacccacaatgcctgaactcccagccccatgcccgtgggtcgtcccgcgccatcttctccgtgggccccgtgagcccgaatcgcaggtggtcgcacaggtgctatggttatgacttgaactctccctatgtgtggtcttcacccagtgatctcctggagctcctggtcccaggtgtttctaagaagccatcactctcagtgcagccgggtcctgtcgtggcccctggggaaagcctgaccctccagtgtgtctctgatgtcggctatgacagatttgttctgtacaaggagggggaacgtgaccttcgccagctccctggccggcagccccaggctgggctctcccaggccaacttcaccctgggccctgtgagccgctcctacgggggccagtacagatgctacggtgcatacaacctctcctccgagtggtcggcccccagcgaccccctggacatcctgatcacaggacagatccatggcacacccttcatctcagtgcagccaggccccacagtggcctcaggagagaacgtgaccctgctgtgtcagtcatggcggcagttccacactttccttctgaccaaggcgggagcagctgatgccccactccgtctaagatcaatacacgaatatcctaagtaccaggctgaattccccatgagtcctgtgacctcagcccacgcggggacctacaggtgctacggctcactcaactccgacccctacctgctgtctcaccccagtgagcccctggagctcgtggtctcaggaccctccatgggttccagccccccacccaccggtcccatctccacacctggccctgaggaccagcccctcacccccactgggtcggatccccaaagtggtctgggaaggcacctgggggttgtgatcggcatcttggtggccgtcgtcctactgctcctcctcctcctcctcctcttcctcatcctccgacatcgacgtcagggcaaacactggacatcaacccagagaaaggctgatttccaacatcctgcaggggctgtggggccagagcccacagacagaggcctgcagtggaggtccagcccagctgccgacgcccaggaagaaaacctctatgctgccgtgaaggacacacagcctgaagatggggtggagatggacactcgggctgctgcatctgaagccccccaggatgtgacctacgcccagctgcacagcttgaccctcagacggaaggcaactgagcctcctccatcccaggaaggggaacctccagctgagcccagcatctacgccaccctggccatccactagcccggagggtacgcagactccacactcagtagaaggagactcaggactgctgaaggcacgggagctgcccccagtggacaccaatgaaccccagtcagcctggacccctaacaaagaccatgaggagatgctgggaactttgggactcacttgattctgcagtcgaaataactaatatccctacattttttaattaaagcaacagacttctcaataatcaatgagttaaccgagaaaactaaaatcagaagtaagaatgtgctttaaactgaatcacaatataaatattacacatcacacaatgaaattgaaaaagtacaaaccacaaatg

SEQ ID NO: 148652 - DNA, 2748 bp, Homo sapiens
  Payload ID: 9417
  Gene Symbol: LILRB2
  Gene Name: leukocyte immunoglobulin-like receptor, subfamily B (with TM and ITIM domains), member 2
  ENST ID: ENST00000615641
  CDS Start-End: 129-1886
ggggaagccactgctaccctcatcaggaagggcagacacaagaagcaccagttctatttgctgctacatcccggctctcgcaccgagggctcatccatccgcagagcagggcagtgggaggagacgccatgacccccatcgtcacagtcctgatctgtctcgggaccattcccaagcccaccctgtgggctgagccagactctgtgatcacccaggggagtcccgtcaccctcagttgtcaggggagccttgaagcccaggagtaccgtctatatagggagaaaaaatcagcatcttggattacacggatacgaccagagcttgtgaagaacggccagttccacatcccatccatcacctgggaacacacagggcgatatggctgtcagtattacagccgcgctcggtggtctgagctcagtgaccccctggtgctggtgatgacaggagcctacccaaaacccaccctctcagcccagcccagccctgtggtgacctcaggaggaagggtgaccctccagtgtgagtcacaggtggcatttggcggcttcattctgtgtaaggaaggagaagaagaacacccacaatgcctgaactcccagccccatgcccgtgggtcgtcccgcgccatcttctccgtgggccccgtgagcccgaatcgcaggtggtcgcacaggtgctatggttatgacttgaactctccctatgtgtggtcttcacccagtgatctcctggagctcctggtcccaggtgtttctaagaagccatcactctcagtgcagccgggtcctgtcgtggcccctggggaaagcctgaccctccagtgtgtctctgatgtcggctatgacagatttgttctgtacaaggagggggaacgtgaccttcgccagctccctggccggcagccccaggctgggctctcccaggccaacttcaccctgggccctgtgagccgctcctacgggggccagtacagatgctacggtgcacacaacctctcctctgagtgctcggcccccagcgaccccctggacatcctgatcacaggacagatccgtggcacacccttcatctcagtgcagccaggccccacagtggcctcaggagagaacgtgaccctgctgtgtcagtcatggcggcagttccacactttccttctgaccaaggcgggagcagctgatgccccactccgtctaagatcaatacacgaatatcctaagtaccaggctgaattccccatgagtcctgtgacctcagcccacgcggggacctacaggtgctacggctcactcaactccgacccctacctgctgtctcaccccagtgagcccctggagctcgtggtctcaggaccctccatgggttccagccccccacccaccggtcccatctccacacctggccctgaggaccagcccctcacccccactgggtcggatccccaaagtggtctgggaaggcacctgggggttgtgatcggcatcttggtggccgtcgtcctactgctcctcctcctcctcctcctcttcctcatcctccgacatcgacgtcagggcaaacactggacatcgacccagagaaaggctgatttccaacatcctgcaggggctgtggggccagagcccacagacagaggcctgcagtggaggtccagcccagctgccgacgcccaggaagaaaacctctatgctgccgtgaaggacacacagcctgaagatggggtggagatggacactcgggctgctgcatctgaagccccccaggatgtgacctacgcccagctgcacagcttgaccctcagacggaaggcaactgagcctcctccatcccaggaaagggaacctccagctgagcccagcatctacgccaccctggccatccactagcccggagggtacgcagactccacactcagtagaaggagactcaggactgctgaaggcacgggagctgcccccagtggacaccaatgaaccccagtcagcctggacccctaacaaagaccatgaggagatgctgggaactttgggactcacttgattctgcagtcgaaataactaatatccctacattttttaattaaagcaacagacttctcaataatcaatgagttaaccgagaaaactaaaatcagaagtaagaatgtgctttaaactgaatcacaatataaatattacacatcacacaatgaaattgaaaaagtacaaaccacaaatgaaaaaagtagaaacgaaaaaaaaaaactaggaaatgaatgacgttggctttcgtataaggaatttagaaaaagaataaccaattattccaaatgaaggtgtaagaaagggaataagaagaagaagagttgctcatgaggaaaaaccaaaacttgaaaattcaacaaagccaatgaagctcattcttgaaaatattaattacagtcataaatcctaactacattgagcaagagaaagaaagagcaggcacgcatttccatatgggagtgagccagcagacagcccagcagatcctacacacattttcacaaactaaccccagaacaggctgcaaacctataccaatatactagaaaatgcagattaaatggatgaaatattcaaaactggagtttacataatgaacgtaagagtaatcagagaatctgactcattttaaatgtgtgtgtatgtgtgtgtatatatatgtgtgtgtgtgtgtgtgtgtgtgtgtgtgaaaaacattgactgtaataaaaatgttcccatcgta

SEQ ID NO: 148653 - DNA, 1517 bp, Homo sapiens
  Payload ID: 9417
  Gene Symbol: LILRB2
  Gene Name: leukocyte immunoglobulin-like receptor, subfamily B (with TM and ITIM domains), member 2
  ENST ID: ENST00000614965
  CDS Start-End: 1-657
gaattccccatgagtcctgtgacctcagcccacgcggggacctacaggtgctacggctcactcaactccgacccctacctgctgtctcaccccagtgagcccctggagctcgtggtctcaggaccctccatgggttccagccccccacccaccggtcccatctccacacctggccctgaggaccagcccctcacccccactgggtcggatccccaaagtggtctgggaaggcacctgggggttgtgatcggcatcttggtggccgtcgtcctactgctcctcctcctcctcctcctcttcctcatcctccgacatcgacgtcagggcaaacactggacatcgacccagagaaaggctgatttccaacatcctgcaggggctgtggggccagagcccacagacagaggcctgcagtggaggtccagcccagctgccgacgcccaggaagaaaacctctatgctgccgtgaaggacacacagcctgaagatggggtggagatggacactcgggctgctgcatctgaagccccccaggatgtgacctacgcccagctgcacagcttgaccctcagacggaaggcaactgagcctcctccatcccaggaaagggaacctccagctgagcccagcatctacgccaccctggccatccactagcccggagggtacgcagactccacactcagtagaaggagactcaggactgctgaaggcacgggagctgcccccagtggacaccaatgaaccccagtcagcctggacccctaacaaagaccatgaggagatgctgggaactttgggactcacttgattctgcagtcgaaataactaatatccctacattttttaattaaagcaacagacttctcaataatcaatgagttaaccgagaaaactaaaatcagaagtaagaatgtgctttaaactgaatcacaatataaatattacacatcacacaatgaaattgaaaaagtacaaaccacaaatgaaaaaagtagaaacgaaaaaaaaaaactaggaaatgaatgacgttggctttcgtataaggaatttagaaaaagaataaccaattattccaaatgaaggtgtaagaaagggaataagaagaagaagagttgctcatgaggaaaaaccaaaacttgaaaattcaacaaagccaatgaagctcattcttgaaaatattaattacagtcataaatcctaactacattgagcaagagaaagaaagagcaggcacgcatttccatatgggagtgagccagcagacagcccagcagatcctacacacattttcacaaactaaccccagaacaggctgcaaacctataccaatatactagaaaatgcagattaaatggatgaaatattcaaaactggagtttacataatgaacgtaagagtaatcagagaatctgactcattttaaatgtgtgtgtatgtgtgtgtatatatatgtgtgtgtgtgtgtgtgtgtgtgtgtgaaaaacattgactgtaataaaaatgttcccatcgta

SEQ ID NO: 148654 - DNA, 2299 bp, Homo sapiens
  Payload ID: 9417
  Gene Symbol: LILRB2
  Gene Name: leukocyte immunoglobulin-like receptor, subfamily B (with TM and ITIM domains), member 2
  Uniprot ID: Q8N423
  ENST ID: ENST00000610886
  CDS Start-End: 175-1968
cacacgcagctcagcctgggcggcacagccagatgcgagatgcgtctctgctgatctgagtctgcctgcagcatggacctgggtcttccctgaagcatctccagggctggagggacgactgccatgcaccgagggctcatccatccgcagagcagggcagtgggaggagacgccatgacccccatcgtcacagtcctgatctgtctcgggctgagtctgggccccaggacccacgtgcagacagggaccatccccaagcccaccctgtgggctgagccagactctgtgatcacccaggggagtcccgtcaccctcagttgtcaggggagccttgaagcccaggagtaccgtctatatagggagaaaaaatcagcatcttggattacacggatacgaccagagcttgtgaagaacggccagttccacatcccatccatcacctgggaacacacagggcgatatggctgtcagtattacagccgcgctcggtggtctgagctcagtgaccccctggtgctggtgatgacaggagcctacccaaaacccaccctctcagcccagcccagccctgtggtgacctcaggaggaagggtgaccctccagtgtgagtcacaggtggcatttggcggcttcattctgtgtaaggaaggagaagatgaacacccacaatgcctgaactcccagccccatgcccgtgggtcgtcccgcgccatcttctccgtgggccccgtgagcccgaatcgcaggtggtcgcacaggtgctatggttatgacttgaactctccctatgtgtggtcttcacccagtgatctcctggagctcctggtcccaggtgtttctaagaagccatcactctcagtgcagccgggtcctgtcgtggcccctggggaaagcctgaccctccagtgtgtctctgatgtcggctatgacagatttgttctgtacaaggagggggaacgtgaccttcgccagctccctggccggcagccccaggctgggctctcccaggccaacttcaccctgggccctgtgagccgctcctacgggggccagtacagatgctacggtgcatacaacctctcctccgagtggtcggcccccagcgaccccctggacatcctgatcacaggacagatccatggcacacccttcatctcagtgcagccaggccccacagtggcctcaggagagaacgtgaccctgctgtgtcagtcatggcggcagttccacactttccttctgaccaaggcgggagcagctgatgccccactccgtctaagatcaatacacgaatatcctaagtaccaggctgaattccccatgagtcctgtgacctcagcccacgcggggacctacaggtgctacggctcactcaactccgacccctacctgctgtctcaccccagtgagcccctggagctcgtggtctcaggaccctccatgggttccagccccccacccaccggtcccatctccacacctggccctgaggaccagcccctcacccccactgggtcggatccccaaagtggtctgggaaggcacctgggggttgtgatcggcatcttggtggccgtcgtcctactgctcctcctcctcctcctcctcttcctcatcctccgacatcgacgtcagggcaaacactggacatcgacccagagaaaggctgatttccaacatcctgcaggggctgtggggccagagcccacagacagaggcctgcagtggaggtccagcccagctgccgacgcccaggaagaaaacctctatgctgccgtgaaggacacacagcctgaagatggggtggagatggacactcgggctgctgcatctgaagccccccaggatgtgacctacgcccagctgcacagcttgaccctcagacggaaggcaactgagcctcctccatcccaggaaagggaacctccagctgagcccagcatctacgccaccctggccatccactagcccggagggtacgcagactccacactcagtagaaggagactcaggactgctgaaggcacgggagctgcccccagtggacaccaatgaaccccagtcagcctggacccctaacaaagaccatgaggagatgctgggaactttgggactcacttgattctgcagtcgaaataactaatatccctacattttttaattaaagcaacagacttctcaataatcaatgagttaaccgagaaaactaaaatcagaagtaagaatgtgctttaaactgaatcacaatataaatattacacatcacacaatgaaattgaaaaagtacaaaccacaaatg

SEQ ID NO: 148655 - DNA, 2783 bp, Homo sapiens
  Payload ID: 9417
  Gene Symbol: LILRB2
  Gene Name: leukocyte immunoglobulin-like receptor, subfamily B (with TM and ITIM domains), member 2
  Uniprot ID: Q8N423
  ENST ID: ENST00000621020
  CDS Start-End: 129-1922
ggggaagccactgctaccctcatcaggaagggcagacacaagaagcaccagttctatttgctgctacatcccggctctcgcaccgagggctcatccatccgcagagcagggcagtgggaggagacgccatgacccccatcgtcacagtcctgatctgtctcgggctgagtctgggccccaggacccacgtgcagacagggaccattcccaagcccaccctgtgggctgagccagactctgtgatcacccaggggagtcccgtcaccctcagttgtcaggggagccttgaagcccaggagtaccgtctatatagggagaaaaaatcagcatcttggattacacggatacgaccagagcttgtgaagaacggccagttccacatcccatccatcacctgggaacacacagggcgatatggctgtcagtattacagccgcgctcggtggtctgagctcagtgaccccctggtgctggtgatgacaggagcctacccaaaacccaccctctcagcccagcccagccctgtggtgacctcaggaggaagggtgaccctccagtgtgagtcacaggtggcatttggcggcttcattctgtgtaaggaaggagaagaagaacacccacaatgcctgaactcccagccccatgcccgtgggtcgtcccgcgccatcttctccgtgggccccgtgagcccgaatcgcaggtggtcgcacaggtgctatggttatgacttgaactctccctatgtgtggtcttcacccagtgatctcctggagctcctggtcccaggtgtttctaagaagccatcactctcagtgcagccgggtcctgtcgtggcccctggggaaagcctgaccctccagtgtgtctctgatgtcggctatgacagatttgttctgtacaaggagggggaacgtgaccttcgccagctccctggccggcagccccaggctgggctctcccaggccaacttcaccctgggccctgtgagccgctcctacgggggccagtacagatgctacggtgcacacaacctctcctctgagtgctcggcccccagcgaccccctggacatcctgatcacaggacagatccgtggcacacccttcatctcagtgcagccaggccccacagtggcctcaggagagaacgtgaccctgctgtgtcagtcatggcggcagttccacactttccttctgaccaaggcgggagcagctgatgccccactccgtctaagatcaatacacgaatatcctaagtaccaggctgaattccccatgagtcctgtgacctcagcccacgcggggacctacaggtgctacggctcactcaactccgacccctacctgctgtctcaccccagtgagcccctggagctcgtggtctcaggaccctccatgggttccagccccccacccaccggtcccatctccacacctggccctgaggaccagcccctcacccccactgggtcggatccccaaagtggtctgggaaggcacctgggggttgtgatcggcatcttggtggccgtcgtcctactgctcctcctcctcctcctcctcttcctcatcctccgacatcgacgtcagggcaaacactggacatcgacccagagaaaggctgatttccaacatcctgcaggggctgtggggccagagcccacagacagaggcctgcagtggaggtccagcccagctgccgacgcccaggaagaaaacctctatgctgccgtgaaggacacacagcctgaagatggggtggagatggacactcgggctgctgcatctgaagccccccaggatgtgacctacgcccagctgcacagcttgaccctcagacggaaggcaactgagcctcctccatcccaggaaagggaacctccagctgagcccagcatctacgccaccctggccatccactagcccggagggtacgcagactccacactcagtagaaggagactcaggactgctgaaggcacgggagctgcccccagtggacaccaatgaaccccagtcagcctggacccctaacaaagaccatgaggagatgctgggaactttgggactcacttgattctgcagtcgaaataactaatatccctacattttttaattaaagcaacagacttctcaataatcaatgagttaaccgagaaaactaaaatcagaagtaagaatgtgctttaaactgaatcacaatataaatattacacatcacacaatgaaattgaaaaagtacaaaccacaaatgaaaaaagtagaaacgaaaaaaaaaaactaggaaatgaatgacgttggctttcgtataaggaatttagaaaaagaataaccaattattccaaatgaaggtgtaagaaagggaataagaagaagaagagttgctcatgaggaaaaaccaaaacttgaaaattcaacaaagccaatgaagctcattcttgaaaatattaattacagtcataaatcctaactacattgagcaagagaaagaaagagcaggcacgcatttccatatgggagtgagccagcagacagcccagcagatcctacacacattttcacaaactaaccccagaacaggctgcaaacctataccaatatactagaaaatgcagattaaatggatgaaatattcaaaactggagtttacataatgaacgtaagagtaatcagagaatctgactcattttaaatgtgtgtgtatgtgtgtgtatatatatgtgtgtgtgtgtgtgtgtgtgtgtgtgtgaaaaacattgactgtaataaaaatgttcccatcgt

SEQ ID NO: 148656 - DNA, 2623 bp, Homo sapiens
  Payload ID: 9417
  Gene Symbol: LILRB2
  Gene Name: leukocyte immunoglobulin-like receptor, subfamily B (with TM and ITIM domains), member 2
  Uniprot ID: Q8N423
  ENST ID: ENST00000619122
  CDS Start-End: 42-1574
ggctcatccatccgcagagcagggcagtgggaggagacgccatgacccccatcgtcacagtcctgatctgtctcgggctgagtctgggccccaggacccacgtgcagacagggaccattcccaagcccaccctgtgggctgagccagactctgtgatcacccaggggagtcccgtcaccctcagttgtcaggggagccttgaagcccaggagtaccgtctatatagggagaaaaaatcagcatcttggattacacggatacgaccagagcttgtgaagaacggccagttccacatcccatccatcacctgggaacacacagggcgatatggctgtcagtattacagccgcgctcggtggtctgagctcagtgaccccctggtgctggtgatgacaggagcctacccaaaacccaccctctcagcccagcccagccctgtggtgacctcaggaggaagggtgaccctccagtgtgagtcacaggtggcatttggcggcttcattctgtgtaaggaaggagaagaagaacacccacaatgcctgaactcccagccccatgcccgtgggtcgtcccgcgccatcttctccgtgggccccgtgagcccgaatcgcaggtggtcgcacaggtgctatggttatgacttgaactctccctatgtgtggtcttcacccagtgatctcctggagctcctggtcccaggtgtttctaagaagccatcactctcagtgcagccgggtcctgtcgtggcccctggggaaagcctgaccctccagtgtgtctctgatgtcggctatgacagatttgttctgtacaaggagggggaacgtgaccttcgccagctccctggccggcagccccaggctgggctctcccaggccaacttcaccctgggccctgtgagccgctcctacgggggccagtacagatgctacggtgcacacaacctctcctctgagtgctcggcccccagcgaccccctggacatcctgatcacaggacagatccgtggcacacccttcatctcagtgcagccaggccccacagtggcctcaggagagaacgtgaccctgctgtgtcagtcatggcggcagttccacactttccttctgaccaaggcgggagcagctgatgccccactccgtctaagatcaatacacgaatatcctaagtaccaggctgaattccccatgagtcctgtgacctcagcccacgcggggacctacaggtgctacggctcactcaactccgacccctacctgctgtctcaccccagtgagcccctggagctcgtggtctcaggaccctccatgggttccagccccccacccaccggtcccatctccacacctgcaggccctgaggaccagcccctcacccccactgggtcggatccccaaagtggtctgggaaggcacctgggggttgtgatcggcatcttggtggccgtcgtcctactgctcctcctcctcctcctcctcttcctcatcctccgacatcgacgtcagggcaaacactggacatcgagtccagcccagctgccgacgcccaggaagaaaacctctatgctgccgtgaaggacacacagcctgaagatggggtggagatggacactcgggctgctgcatctgaagccccccaggatgtgacctacgcccagctgcacagcttgaccctcagacggaaggcaactgagcctcctccatcccaggaaagggaacctccagctgagcccagcatctacgccaccctggccatccactagcccggagggtacgcagactccacactcagtagaaggagactcaggactgctgaaggcacgggagctgcccccagtggacaccaatgaaccccagtcagcctggacccctaacaaagaccatgaggagatgctgggaactttgggactcacttgattctgcagtcgaaataactaatatccctacattttttaattaaagcaacagacttctcaataatcaatgagttaaccgagaaaactaaaatcagaagtaagaatgtgctttaaactgaatcacaatataaatattacacatcacacaatgaaattgaaaaagtacaaaccacaaatgaaaaaagtagaaacgaaaaaaaaaaactaggaaatgaatgacgttggctttcgtataaggaatttagaaaaagaataaccaattattccaaatgaaggtgtaagaaagggaataagaagaagaagagttgctcatgaggaaaaaccaaaacttgaaaattcaacaaagccaatgaagctcattcttgaaaatattaattacagtcataaatcctaactacattgagcaagagaaagaaagagcaggcacgcatttccatatgggagtgagccagcagacagcccagcagatcctacacacattttcacaaactaaccccagaacaggctgcaaacctataccaatatactagaaaatgcagattaaatggatgaaatattcaaaactggagtttacataatgaacgtaagagtaatcagagaatctgactcattttaaatgtgtgtgtatgtgtgtgtatatatatgtgtgtgtgtgtgtgtgtgtgtgtgtgtgaaaaacattgactgtaataaaaatgttcccatcgt

SEQ ID NO: 148657 - DNA, 2321 bp, Homo sapiens
  Payload ID: 9417
  Gene Symbol: LILRB2
  Gene Name: leukocyte immunoglobulin-like receptor, subfamily B (with TM and ITIM domains), member 2
  Uniprot ID: Q8N423
  ENST ID: ENST00000617886
  CDS Start-End: 268-2064
tatttggttgaaagaaaacccacaatccagtgtcaagaaagaagtcaacttttcttcccctacttccctgcatttctcctctgtgctcactgccacacgcagctcagcctgggcggcacagccagatgcgagatgcgtctctgctgatctgagtctgcctgcagcatggacctgggtcttccctgaagcatctccagggctggagggacgactgccatgcaccgagggctcatccatccgcagagcagggcagtgggaggagacgccatgacccccatcgtcacagtcctgatctgtctcgggctgagtctgggccccaggacccacgtgcagacagggaccatccccaagcccaccctgtgggctgagccagactctgtgatcacccaggggagtcccgtcaccctcagttgtcaggggagccttgaagcccaggagtaccgtctatatagggagaaaaaatcagcatcttggattacacggatacgaccagagcttgtgaagaacggccagttccacatcccatccatcacctgggaacacacagggcgatatggctgtcagtattacagccgcgctcggtggtctgagctcagtgaccccctggtgctggtgatgacaggagcctacccaaaacccaccctctcagcccagcccagccctgtggtgacctcaggaggaagggtgaccctccagtgtgagtcacaggtggcatttggcggcttcattctgtgtaaggaaggagaagatgaacacccacaatgcctgaactcccagccccatgcccgtgggtcgtcccgcgccatcttctccgtgggccccgtgagcccgaatcgcaggtggtcgcacaggtgctatggttatgacttgaactctccctatgtgtggtcttcacccagtgatctcctggagctcctggtcccaggtgtttctaagaagccatcactctcagtgcagccgggtcctgtcgtggcccctggggaaagcctgaccctccagtgtgtctctgatgtcggctatgacagatttgttctgtacaaggagggggaacgtgaccttcgccagctccctggccggcagccccaggctgggctctcccaggccaacttcaccctgggccctgtgagccgctcctacgggggccagtacagatgctacggtgcatacaacctctcctccgagtggtcggcccccagcgaccccctggacatcctgatcacaggacagatccatggcacacccttcatctcagtgcagccaggccccacagtggcctcaggagagaacgtgaccctgctgtgtcagtcatggcggcagttccacactttccttctgaccaaggcgggagcagctgatgccccactccgtctaagatcaatacacgaatatcctaagtaccaggctgaattccccatgagtcctgtgacctcagcccacgcggggacctacaggtgctacggctcactcaactccgacccctacctgctgtctcaccccagtgagcccctggagctcgtggtctcaggaccctccatgggttccagccccccacccaccggtcccatctccacacctgcaggccctgaggaccagcccctcacccccactgggtcggatccccaaagtggtctgggaaggcacctgggggttgtgatcggcatcttggtggccgtcgtcctactgctcctcctcctcctcctcctcttcctcatcctccgacatcgacgtcagggcaaacactggacatcgacccagagaaaggctgatttccaacatcctgcaggggctgtggggccagagcccacagacagaggcctgcagtggaggtccagcccagctgccgacgcccaggaagaaaacctctatgctgccgtgaaggacacacagcctgaagatggggtggagatggacactcgggctgctgcatctgaagccccccaggatgtgacctacgcccagctgcacagcttgaccctcagacggaaggcaactgagcctcctccatcccaggaaagggaacctccagctgagcccagcatctacgccaccctggccatccactagcccggagggtacgcagactccacactcagtagaaggagactcaggactgctgaaggcacgggagctgcccccagtggacaccaatgaaccccagtcagcctggacccctaacaaagaccatgaggagatgctgggaactttgggactcacttgattctgcagtcgaaataactaatatccctacattttttaattaaagcaacagacttctcaataatcaatgagttaaccgagaaaactaaaatcagaagtaagaa

SEQ ID NO: 148658 - DNA, 2250 bp, Homo sapiens
  Payload ID: 9417
  Gene Symbol: LILRB2
  Gene Name: leukocyte immunoglobulin-like receptor, subfamily B (with TM and ITIM domains), member 2
  ENST ID: ENST00000617081
  CDS Start-End: 222-2033
gggactatttggttgaaagaaaacccacaatccagtgtcaagaaagaagtcaacttttcttcccctacttccctgcatttctcctctgtgctcactgccacacgcagctcaacctggacggcacagccagaggcgagatgcttctctgctgatctgagtctgcctgcagcatggacctgggtcttccctgaagcatctccagggctggagggacgactgccatgcaccgagggctcatccatccgcagagcagggcagtgggaggagacgccatgacccccatcgtcacagtcctgatctgtctcgggaccattcccaagcccaccctgtgggctgagccagactctgtgatcacccaggggagtcccgtcaccctcagttgtcaggggagccttgaagcccaggagtaccgtctatatagggagaaaaaatcagcatcttggattacacggatacgaccagagcttgtgaagaacggccagttccacatcccatccatcacctgggaacacacagggcgatatggctgtcagtattacagccgcgctcggtggtctgagctcagtgaccccctggtgctggtgatgacaggagcctacccaaaacccaccctctcagcccagcccagccctgtggtgacctcaggaggaagggtgaccctccagtgtgagtcacaggtggcatttggcggcttcattctgtgtaaggaaggagaagaagaacacccacaatgcctgaactcccagccccatgcccgtgggtcgtcccgcgccatcttctccgtgggccccgtgagcccgaatcgcaggtggtcgcacaggtgctatggttatgacttgaactctccctatgtgtggtcttcacccagtgatctcctggagctcctggtcccaggtgtttctaagaagccatcactctcagtgcagccgggtcctgtcgtggcccctggggaaagcctgaccctccagtgtgtctctgatgtcggctatgacagatttgttctgtacaaggagggggaacgtgaccttcgccagctccctggccggcagccccaggctgggctctcccaggccaacttcaccctgggccctgtgagccgctcctacgggggccagtacagatgctacggtgcacacaacctctcctctgagtgctcggcccccagcgaccccctggacatcctgatcacaggacagatccgtggcacacccttcatctcagtgcagccaggccccacagtggcctcaggagagaacgtgaccctgctgtgtcagtcatggcggcagttccacactttccttctgaccaaggcgggagcagctgatgccccactccgtctaagatcaatacacgaatatcctaagtaccaggctgaattccccatgagtcctgtgacctcagcccacgcggggacctacaggtgctacggctcactcaactccgacccctacctgctgtctcaccccagtgagcccctggagctcgtggtctcaggaccctccatgggttccagccccccacccaccggtcccatctccacacctgcaggccctgaggaccagcccctcacccccactgggtcggatccccaaagtggtctgggaaggcacctgggggttgtgatcggcatcttggtggccgtcgtcctactgctcctcctcctcctcctcctcttcctcatcctccgacatcgacgtcagggcaaacactggacatcgacccagagaaaggctgatttccaacatcctgcaggggctgtggggccagagcccacagacagaggcctgcagtggaggtccagcccagctgccgacgcccaggaagaaaacctctatgctgccgtgaaggacacacagcctgaagatggggtggagatggacactcgggctgctgcatctgaagccccccaggatgtgacctacgcccagctgcacagcttgaccctcagacggaaggcaactgagcctcctccatcccaggaaagggaacctccagctgagcccagcatctacgccaccctggccatccactagcccggagggtacgcagactccacactcagtagaaggagactcaggactgctgaaggcacgggagctgcccccagtggacaccaatgaaccccagtcagcctggacccctaacaaagaccatgaggagatgctgggaactttgggactcacttgattctgcagtcgaaataactaatatccctacattttttaattaaagcaacagacttctcaataa

SEQ ID NO: 148659 - DNA, 1455 bp, Homo sapiens
  Payload ID: 9417
  Gene Symbol: LILRB2
  Gene Name: leukocyte immunoglobulin-like receptor, subfamily B (with TM and ITIM domains), member 2
  ENST ID: ENST00000612280
  CDS Start-End: 39-1406
tcatccatccgcagagcagggcagtgggaggagacgccatgacccccatcgtcacagtcctgatctgtctcgggaccatccccaagcccaccctgtgggctgagccagactctgtgatcacccaggggagtcccgtcaccctcagttgtcaggggagccttgaagcccaggagtaccgtctatatagggagaaaaaatcagcatcttggattacacggatacgaccagagcttgtgaagaacggccagttccacatcccatccatcacctgggaacacacagggcgatatggctgtcagtattacagccgcgctcggtggtctgagctcagtgaccccctggtgctggtgatgacaggagcctacccaaaacccaccctctcagcccagcccagccctgtggtgacctcaggaggaagggtgaccctccagtgtgagtcacaggtggcatttggcggcttcattctgtgtaaggaaggagaagatgaacacccacaatgcctgaactcccagccccatgcccgtgggtcgtcccgcgccatcttctccgtgggccccgtgagcccgaatcgcaggtggtcgcacaggtgctatggttatgacttgaactctccctatgtgtggtcttcacccagtgatctcctggagctcctggtcccaggtgtttctaagaagccatcactctcagtgcagccgggtcctgtcatggcccctggggaaagcctgaccctccagtgtgtctctgatgtcggctacgacagatttgttctgtataaggagggggaacgtgacttcctccagcgccctggccagcagccccaggctgggctctcccaggccaacttcaccctgggccctgtgagcccctcccacgggggccagtacaggtgctatggtgcacacaacctctcctccgagtggtcggcccccagcgaccccctgaacatcctgatggcaggacagatctatgacaccgtctccctgtcagcacagccgggccccacagtggcctcaggagagaacgtgaccctgctgtgtcagtcatggtggcagtttgacactttccttctgaccaaagaaggggcagcccatcccccactgcgtctgagatcaatgtacggagctcataagtaccaggctgaattccccatgagtcctgtgacctcagcccacgcggggacctacaggtgctacggctcatacagctccaacccccacctgctgtctttccccagtgagcccctggaactcatggtctcagcatccccagcctcacacgccaaggattacacagtggagaatctcatccgcatgggcatggcaggcttggtcctggtgttcctcgggattctgttatttgaggctcagcacagccagagaaacccccaagatgcagccgggaggtgaacagcggagaggacaatgcacccttcagcgtggtggagcctcagggaca

SEQ ID NO: 148660 - DNA, 2782 bp, Homo sapiens
  Payload ID: 9417
  Gene Symbol: LILRB2
  Gene Name: leukocyte immunoglobulin-like receptor, subfamily B (with TM and ITIM domains), member 2
  Uniprot ID: Q8N423
  ENST ID: ENST00000617341
  CDS Start-End: 129-1922
ggggaagccactgctaccctcatcaggaagggcagacacaagaagcaccagttctatttgctgctacatcccggctctcgcaccgagggctcatccatccgcagagcagggcagtgggaggagacgccatgacccccatcgtcacagtcctgatctgtctcgggctgagtctgggccccaggacccacgtgcagacagggaccatccccaagcccaccctgtgggctgagccagactctgtgatcacccaggggagtcccgtcaccctcagttgtcaggggagccttgaagcccaggagtaccgtctatatagggagaaaaaatcagcatcttggattacacggatacgaccagagcttgtgaagaacggccagttccacatcccatccatcacctgggaacacacagggcgatatggctgtcagtattacagccgcgctcggtggtctgagctcagtgaccccctggtgctggtgatgacaggagcctacccaaaacccaccctctcagcccagcccagccctgtggtgacctcaggaggaagggtgaccctccagtgtgagtcacaggtggcatttggcggcttcattctgtgtaaggaaggagaagatgaacacccacaatgcctgaactcccagccccatgcccgtgggtcgtcccgcgccatcttctccgtgggccccgtgagcccgaatcgcaggtggtcgcacaggtgctatggttatgacttgaactctccctatgtgtggtcttcacccagtgatctcctggagctcctggtcccaggtgtttctaagaagccatcactctcagtgcagccgggtcctgtcgtggcccctggggaaagcctgaccctccagtgtgtctctgatgtcggctatgacagatttgttctgtacaaggagggggaacgtgaccttcgccagctccctggccggcagccccaggctgggctctcccaggccaacttcaccctgggccctgtgagccgctcctacgggggccagtacagatgctacggtgcatacaacctctcctccgagtggtcggcccccagcgaccccctggacatcctgatcacaggacagatccatggcacacccttcatctcagtgcagccaggccccacagtggcctcaggagagaacgtgaccctgctgtgtcagtcatggcggcagttccacactttccttctgaccaaggcgggagcagctgatgccccactccgtctaagatcaatacacgaatatcctaagtaccaggctgaattccccatgagtcctgtgacctcagcccacgcggggacctacaggtgctacggctcactcaactccgacccctacctgctgtctcaccccagtgagcccctggagctcgtggtctcaggaccctccatgggttccagccccccacccaccggtcccatctccacacctggccctgaggaccagcccctcacccccactgggtcggatccccaaagtggtctgggaaggcacctgggggttgtgatcggcatcttggtggccgtcgtcctactgctcctcctcctcctcctcctcttcctcatcctccgacatcgacgtcagggcaaacactggacatcgacccagagaaaggctgatttccaacatcctgcaggggctgtggggccagagcccacagacagaggcctgcagtggaggtccagcccagctgccgacgcccaggaagaaaacctctatgctgccgtgaaggacacacagcctgaagatggggtggagatggacactcgggctgctgcatctgaagccccccaggatgtgacctacgcccagctgcacagcttgaccctcagacggaaggcaactgagcctcctccatcccaggaaagggaacctccagctgagcccagcatctacgccaccctggccatccactagcccggagggtacgcagactccacactcagtagaaggagactcaggactgctgaaggcacgggagctgcccccagtggacaccaatgaaccccagtcagcctggacccctaacaaagaccatgaggagatgctgggaactttgggactcacttgattctgcagtcgaaataactaatatccctacattttttaattaaagcaacagacttctcaataatcaatgagttaaccgagaaaactaaaatcagaagtaagaatgtgctttaaactgaatcacaatataaatattacacatcacacaatgaaattgaaaaagtacaaaccacaaatgaaaaaagtagaaacgaaaaaaaaaaactaggaaatgaatgacgttggctttcgtataaggaatttagaaaaagaataaccaattattccaaatgaaggtgtaagaaagggaataagaagaagaagagttgctcatgaggaaaaaccaaaacttgaaaattcaacaaagccaatgaagctcattcttgaaaatattaattacagtcataaatcctaactacattgagcaagagaaagaaagagcaggcacgcatttccatatgggagtgagccagcagacagcccagcagatcctacacacattttcacaaactaaccccagaacaggctgcaaacctataccaatatactagaaaatgcagattaaatggatgaaatattcaaaactggagtttacataatgaacgtaagagtaatcagagaatctgactcattttaaatgtgtgtgtatgtgtgtgtatatatatgtgtgtgtgtgtgtgtgtgtgtgtgtgaaaaacattgactgtaataaaaatgttcccatcgta

SEQ ID NO: 148661 - DNA, 346 bp, Homo sapiens
  Payload ID: 9417
  Gene Symbol: LILRB2
  Gene Name: leukocyte immunoglobulin-like receptor, subfamily B (with TM and ITIM domains), member 2
  ENST ID: ENST00000620625
  CDS Start-End: 183-346
caggaattgaggtgcagagggacggctaaggacgcaatgggcaccgaggaggcaggaaagactcagagctcaacctggacggcacagccagatgcgagatgcgtctctgctgatctgagtctgcctgcagcatggacctgggtcttccctgaagcatctccagggctggagggacgactgccatgcaccgagggctcatccatccgcagagcagggcagtgggaggagacgccatgacccccatcgtcacagtcctgatctgtctcgggctgagtctgggccccaggacccacgtgcagacagggaccatccccaagcccaccctgtgggctgagccagactctgt

SEQ ID NO: 148662 - DNA, 2066 bp, Homo sapiens
  Payload ID: 9418
  Gene Symbol: LILRB3
  Gene Name: leukocyte immunoglobulin-like receptor, subfamily B (with TM and ITIM domains), member 3
  Uniprot ID: O75022
  ENST ID: ENST00000245620
  CDS Start-End: 3-1901
ccatgacgcccgccctcacagccctgctctgccttgggctgagtctgggccccaggacccgcatgcaggcagggcccttccccaaacccaccctctgggctgagccaggctctgtgatcagctgggggagccccgtgaccatctggtgtcaggggagcctggaggcccaggagtaccaactggataaagagggaagcccagagccctgggacagaaataacccactggaacccaagaacaaggccagattctccatcccatccatgacacagcaccatgcagggagataccgctgccactattacagctctgcaggctggtcagagcccagcgaccccctggagctggtgatgacaggattctacaacaaacccaccctctcagccctgcccagccctgtggtggcctcaggggggaatatgaccctccgatgtggctcacagaagggatatcaccattttgttctgatgaaggaaggagaacaccagctcccccggaccctggactcacagcagctccacagtggggggttccaggccctgttccctgtgggccccgtgacccccagccacaggtggaggttcacatgctattactattatacaaacaccccctgggtgtggtcccaccccagtgaccccctggagattctgccctcaggcgtgtctaggaagccctccctcctgaccctgcagggccctgtcctggcccctgggcagagcctgaccctccagtgtggctctgatgtcggctacgacagatttgttctgtataaggagggggaacgtgacttcctccagcgccctggccagcagccccaggctgggctctcccaggccaacttcaccctgggccctgtgagccgctcctacgggggccagtacaggtgctatggtgcacacaacctctcctccgagtggtcggcccccagtgaccccctggacatcctgatcacaggacagatctatgacaccgtctccctgtcagcacagccgggccccacagtggcctcaggagagaacatgaccctgctgtgtcagtcacgggggtattttgacactttccttctgaccaaagaaggggcagcccatcccccactgcgtctgagatcaatgtacggagctcataagtaccaggctgaattccccatgagtcctgtgacctcagcccacgcggggacctacaggtgctacggctcacgcagctccaacccccacctgctgtctttccccagtgagcccctggaactcatggtctcaggacactctggaggctccagcctcccacccacagggccgccctccacacctggtctgggaagatacctggaggttttgattggggtctcggtggccttcgtcctgctgctcttcctcctcctcttcctcctcctcctccgtcagcgtcacagcaaacacaggacatctgaccagagaaagactgatttccagcgtcctgcaggggctgcggagacagagcccaaggacaggggcctgctgaggaggtccagcccagctgctgacgtccaggaagaaaacctctatgctgctgtgaaggacacacagtctgaggacagggtggagctggacagtcagcagagcccacacgatgaagacccccaggcagtgacgtatgccccggtgaaacactccagtcctaggagagaaatggcctctcctccctcctcactgtctggggaattcctggacacaaaggacagacaggtggaagaggacaggcagatggacactgaggctgctgcatctgaagcctcccaggatgtgacctacgcccagctgcacagcttgacccttagacggaaggcaactgagcctcctccatcccaggaaggggaacctccagctgagcccagcatctacgccactctggccatccactagcccggggggtacgcagaccccacactcagcagaaggagactcaggactgctgaaggcacgggagctgcccccagtggacaccagtgaaccccagtcagcctggacccctaacacagaccatgaggagacgctgggaacttgtgggactcacctgactcaaagatg

SEQ ID NO: 148663 - DNA, 2204 bp, Homo sapiens
  Payload ID: 9418
  Gene Symbol: LILRB3
  Gene Name: leukocyte immunoglobulin-like receptor, subfamily B (with TM and ITIM domains), member 3
  ENST ID: ENST00000346401
  CDS Start-End: 64-1995
ctgtcctgccagcactgagggctcatccctctgcagagcgcggggtcaccgggaggagacgccatgacgcccgccctcacagccctgctctgccttgggctgagtctgggccccaggacccgcatgcaggcagggcccttccccaaacccaccctctgggctgagccaggctctgtgatcagctgggggagccccgtgaccatctggtgtcaggggagcctggaggcccaggagtaccaactggataaagagggaagcccagagccctgggacagaaataacccactggaacccaagaacaaggccagattctccatcccatccatgacacagcaccatgcagggagataccgctgccactattacagctctgcaggctggtcagagcccagcgaccccctggagctggtgatgacaggattctacaacaaacccaccctctcagccctgcccagccctgtggtggcctcaggggggaatatgaccctccgatgtggctcacagaagggatatcaccattttgttctgatgaaggaaggagaacaccagctcccccggaccctggactcacagcagctccacagtggggggttccaggccctgttccctgtgggccccgtgacccccagccacaggtggaggttcacatgctattactattatacaaacaccccctgggtgtggtcccaccccagtgaccccctggagattctgccctcaggcgtgtctaggaagccctccctcctgaccctgcagggccctgtcctggcccctgggcagagcctgaccctccagtgtggctctgatgtcggctacgacagatttgttctgtataaggagggggaacgtgacttcctccagcgccctggccagcagccccaggctgggctctcccaggccaacttcaccctgggccctgtgagccgctcctacgggggccagtacaggtgctatggtgcacacaacctctcctccgagtggtcggcccccagtgaccccctggacatcctgatcacaggacagatctatgacaccgtctccctgtcagcacagccgggccccacagtggcctcaggagagaacatgaccctgctgtgtcagtcacgggggtattttgacactttccttctgaccaaagaaggggcagcccatcccccactgcgtctgagatcaatgtacggagctcataagtaccaggctgaattccccatgagtcctgtgacctcagcccacgcggggacctacaggtgctacggctcacgcagctccaacccccacctgctgtctttccccagtgagcccctggaactcatggtctcaggtcctgaggaccagccccttaaccccccagggtcaggccctcagaatgctccgggtctcggctctggtgcaggaacaagggctgcaggtctgggaagatacctggaggttttgattggggtctcggtggccttcgtcctgctgctcttcctcctcctcttcctcctcctcctccgtcagcgtcacagcaaacacaggacatctgaccagagaaagactgatttccagcgtcctgcaggggctgcggagacagagcccaaggacaggggcctgctgaggaggtccagcccagctgctgacgtccaggaagaaaacctctatgctgctgtgaaggacacacagtctgaggacagggtggagctggacagtcagagcccacacgatgaagacccccaggcagtgacgtatgccccggtgaaacactccagtcctaggagagaaatggcctctcctccctcctcactgtctggggaattcctggacacaaaggacagacaggtggaagaggacaggcagatggacactgaggctgctgcatctgaagcctcccaggatgtgacctacgcccagctgcacagcttgacccttagacggaaggcaactgagcctcctccatcccaggaaggggaacctccagctgagcccagcatctacgccactctggccatccactagcccggggggtacgcagaccccacactcagcagaaggagactcaggactgctgaaggcacgggagctgcccccagtggacaccagtgaaccccagtcagcctggacccctaacacagaccatgaggagacgctgggaacttgtgggactcacctgactcaaagatgactaatatcgtcccattttggaaataaagcaacagacttctcaa

SEQ ID NO: 148664 - DNA, 2848 bp, Homo sapiens
  Payload ID: 9418
  Gene Symbol: LILRB3
  Gene Name: leukocyte immunoglobulin-like receptor, subfamily B (with TM and ITIM domains), member 3
  Uniprot ID: O75022
  ENST ID: ENST00000391750
  CDS Start-End: 138-2033
tgcgtctctgctgatctgagtctgcctgcagcatggacctgggtcttccctgaagcatctccagggctggagagacgactgccatgcactgagggctcatccctctgcagagcgcggggtcaccgggaggagacgccatgacgcccgccctcacagccctgctctgccttgggctgagtctgggccccaggacccgcatgcaggcagggcccttccccaaacccaccctctgggctgagccaggctctgtgatcagctgggggagccccgtgaccatctggtgtcaggggagcctggaggcccaggagtaccaactggataaagagggaagcccagagccctgggacagaaataacccactggaacccaagaacaaggccagattctccatcccatccatgacacagcaccatgcagggagataccgctgccactattacagctctgcaggctggtcagagcccagcgaccccctggagctggtgatgacaggattctacaacaaacccaccctctcagccctgcccagccctgtggtggcctcaggggggaatatgaccctccgatgtggctcacagaagggatatcaccattttgttctgatgaaggaaggagaacaccagctcccccggaccctggactcacagcagctccacagtggggggttccaggccctgttccctgtgggccccgtgacccccagccacaggtggaggttcacatgctattactattatacaaacaccccctgggtgtggtcccaccccagtgaccccctggagattctgccctcaggcgtgtctaggaagccctccctcctgaccctgcagggccctgtcctggcccctgggcagagcctgaccctccagtgtggctctgatgtcggctacgacagatttgttctgtataaggagggggaacgtgacttcctccagcgccctggccagcagccccaggctgggctctcccaggccaacttcaccctgggccctgtgagccgctcctacgggggccagtacaggtgctatggtgcacacaacctctcctccgagtggtcggcccccagtgaccccctggacatcctgatcacaggacagatctatgacaccgtctccctgtcagcacagccgggccccacagtggcctcaggagagaacatgaccctgctgtgtcagtcacgggggtattttgacactttccttctgaccaaagaaggggcagcccatcccccactgcgtctgagatcaatgtacggagctcataagtaccaggctgaattccccatgagtcctgtgacctcagcccacgcggggacctacaggtgctacggctcacgcagctccaacccccacctgctgtctttccccagtgagcccctggaactcatggtctcaggacactctggaggctccagcctcccacccacagggccgccctccacacctggtctgggaagatacctggaggttttgattggggtctcggtggccttcgtcctgctgctcttcctcctcctcttcctcctcctcctccgtcagcgtcacagcaaacacaggacatctgaccagagaaagactgatttccagcgtcctgcaggggctgcggagacagagcccaaggacaggggcctgctgaggaggtccagcccagctgctgacgtccaggaagaaaacctctatgctgctgtgaaggacacacagtctgaggacagggtggagctggacagtcagagcccacacgatgaagacccccaggcagtgacgtatgccccggtgaaacactccagtcctaggagagaaatggcctctcctccctcctcactgtctggggaattcctggacacaaaggacagacaggtggaagaggacaggcagatggacactgaggctgctgcatctgaagcctcccaggatgtgacctacgcccagctgcacagcttgacccttagacggaaggcaactgagcctcctccatcccaggaaggggaacctccagctgagcccagcatctacgccactctggccatccactagcccggggggtacgcagaccccacactcagcagaaggagactcaggactgctgaaggcacgggagctgcccccagtggacaccagtgaaccccagtcagcctggacccctaacacagaccatgaggagacgctgggaacttgtgggactcacctgactcaaagatgactaatatcgtcccattttggaaataaagcaacagacttctcaacaatcaatgagttaataacaaaaaaacaaaaaacaaaaacagacgtaaaggccgggtgtggtactcaggaggctgagtggggaggattccttgaacacaagaagttaaggctgctgaggctgcagtgagctatgactgtgccactgcactccagcctgtgtgacagagcgagaccttgtctctaaaaaaaaaaacagtgaatgttttaaactgaatgataatgtaaatattatacatcgaacttatgacatgggaaaattaagaagcataaataggccgggcgcggtggctcacgcctataatctcagcactttgggaggctgatgcgggcggatcatgaggtcaggagatcgagaccatcctggctaacacggtgaaaccccgtctctactaaaaatacaaaaaaattagccgggcgtggtggcgagtgcctatagtcccagctactcaggaggctgaggcaggagaatggcatgagcccgggaggcagagcttgcagtgagctgagatcgcaccactgcactccagcctgggcgacagagtgagattccgtctcgaaaaaaaaaaaaaaagaaagaaaaaaaataaaaaagaagcataaccagg

SEQ ID NO: 148665 - DNA, 586 bp, Homo sapiens
  Payload ID: 9418
  Gene Symbol: LILRB3
  Gene Name: leukocyte immunoglobulin-like receptor, subfamily B (with TM and ITIM domains), member 3
  ENST ID: ENST00000445347
  CDS Start-End: 112-586
atgacaagaaggacccagcctccgagcggccacaccctgtgtgtctctctgtcctgccagcactgagggctcatccctctgcagagcgcggggtcaccgggaggagacgccatgacgcccgccctcacagccctgctctgccttgggctgagtctgggccccaggacccgcatgcaggcagggcccttccccaaacccaccctctgggctgagccaggctctgtgatcagctgggggagccccgtgaccatctggtgtcaggggagcctggaggcccaggagtaccaactggataaagagggaagcccagagccctgggacagaaataacccactggaacccaagaacaaggccagattctccatcccatccatgacacagcaccatgcagggagataccgctgccactattacagctctgcaggctggtcagagcccagcgaccccctggagctggtgatgacaggattctacaacaaacccaccctctcagccctgcccagccctgtggtggcctcaggggggaatatgaccctccgatgtggctcacagaagggatatcaccattttgttctgatgaaggaag

SEQ ID NO: 148666 - DNA, 2400 bp, Homo sapiens
  Payload ID: 9418
  Gene Symbol: LILRB3
  Gene Name: leukocyte immunoglobulin-like receptor, subfamily B (with TM and ITIM domains), member 3
  ENST ID: ENST00000414379
  CDS Start-End: 3-578
ccatgacgcccgccctcacagccctgctctgccttgggctgagtctgggccccaggacccgcatgcaggcagggcccttccccaaacccaccctctgggctgagccaggctctgtgatcagctgggggagccccgtgaccatctggtgtcaggggagcctggaggcccaggagtaccaactggataaagagggaagcccagagccctgggacagaaataacccactggaacccaagaacaaggccagattctccatcccatccatgacacagcaccatgcagggagataccgctgccactattacagctctgcaggctggtcagagcccagcgaccccctggagctggtgatgacaggattctacaacaaacccaccctctcagccctgcccagccctgtggtggcctcaggggggaatatgaccctccgatgtggctcacagaagggatatcaccattttgttctgatgaaggaaggagaacaccagctcccccggaccctggactcacagcagctccacagtggggggttccaggccctgttccctgtgggccccgtgacccccagccacagctgacaggttgtggggagtttggctggtgactgaatctggaaaggacccagagtgatgtgttgaaggacgggctgaaggcatgagggagaccccatggggaggctctgacatgggaggaggagcccttgaccacgttcacctggaaggggaggactcaggaaggcatcggcgtgtctaggaagccctccctcctgaccctgcagggccctgtcctggcccctgggcagagcctgaccctccagtgtggctctgatgtcggctacgacagatttgttctgtataaggagggggaacgtgacttcctccagcgccctggccagcagccccaggctgggctctcccaggccaacttcaccctgggccctgtgagccgctcctacgggggccagtacaggtgctatggtgcacacaacctctcctccgagtggtcggcccccagtgaccccctggacatcctgatcacaggacagatctatgacaccgtctccctgtcagcacagccgggccccacagtggcctcaggagagaacatgaccctgctgtgtcagtcacgggggtattttgacactttccttctgaccaaagaaggggcagcccatcccccactgcgtctgagatcaatgtacggagctcataagtaccaggctgaattccccatgagtcctgtgacctcagcccacgcggggacctacaggtgctacggctcacgcagctccaacccccacctgctgtctttccccagtgagcccctggaactcatggtctcaggacactctggaggctccagcctcccacccacagggccgccctccacacctggtctgggaagatacctggaggttttgattggggtctcggtggccttcgtcctgctgctcttcctcctcctcttcctcctcctcctccgtcagcgtcacagcaaacacaggacatctgaccagagaaagactgatttccagcgtcctgcaggggctgcggagacagagcccaaggacaggggcctgctgaggaggtccagcccagctgctgacgtccaggaagaaaacctctatgctgctgtgaaggacacacagtctgaggacagggtggagctggacagtcagagcccacacgatgaagacccccaggcagtgacgtatgccccggtgaaacactccagtcctaggagagaaatggcctctcctccctcctcactgtctggggaattcctggacacaaaggacagacaggtggaagaggacaggcagatggacactgaggctgctgcatctgaagcctcccaggatgtgacctacgcccagctgcacagcttgacccttagacggaaggcaactgagcctcctccatcccaggaaggggaacctccagctgagcccagcatctacgccactctggccatccactagcccggggggtacgcagaccccacactcagcagaaggagactcaggactgctgaaggcacgggagctgcccccagtggacaccagtgaaccccagtcagcctggacccctaacacagaccatgaggagacgctgggaacttgtgggactcacctgactcaaagatgactaatatcgtcccattttggaaataaagcaacagacttctcaacaatcaatgagttaataacaaaaaaacaaaaaacaaaaacagacgtaaaggccgggtgtggtactcaggaggctgagtggggaggattccttgaacacaagaagttaaggctgctgaggctgcagtgagctatgactgtgccactgcactccagcctgtgtgacagagcgagaccttgtctctaaaaaaaaaaacagtgaatgttttaaa

SEQ ID NO: 148667 - DNA, 2170 bp, Homo sapiens
  Payload ID: 9418
  Gene Symbol: LILRB3
  Gene Name: leukocyte immunoglobulin-like receptor, subfamily B (with TM and ITIM domains), member 3
  ENST ID: ENST00000614251
  CDS Start-End: 50-1945
ctgagggctcatccctctgcagagcgcggggtcaccggaaggagacgccatgacgcccgccctcacagccctgctctgccttgggctgagtctgggccccaggacccgcgtgcaggcagggcccttccccaaacccaccctctgggctgagccaggctctgtgatcagctgggggagccccgtgaccatctggtgtcaggggagcctggaggcccaggagtaccaactggataaagagggaagcccagagcccttggacagaaataacccactggaacccaagaacaaggccagattctccatcccatccatgacacagcaccatgcagggagataccgctgccactattacagctctgcaggctggtcagagcccagcgaccccctggagctggtgatgacaggattctacaacaaacccaccctctcagccctgcccagccctgtggtggcctcaggggggaatatgaccctccgatgtggctcacagaagggatatcaccattttgttctgatgaaggaaggagaacaccagctcccccggaccctggactcacagcagctccacagtggggggttccaggccctgttccctgtgggccccgtgacccccagccacaggtggaggttcacatgctattactattatacaaacaccccccgggtgtggtcccaccccagtgaccccctggagattctgccctcaggcgtgtctaggaagccctccctcctgaccctgcagggccctgtcctggcccctgggcagagcctgaccctccagtgtggctctgatgtcggctacgacagatttgttctgtataaggagggggaacgtgacttcctccagcgccctggccagcagccccaggctgggctctcccaggccaacttcaccctgggccctgtgagcccctcccacgggggccagtacaggtgctatggtgcacacaacctctcctccgagtggtcggcccccagcgaccccctgaacatcctgatggcaggacagatctatgacaccgtctccctgtcagcacagccgggccccacagtggcctcaggagagaacgtgaccctgctgtgtcagtcatggtggcagtttgacactttccttctgaccaaagaaggggcagcccatcccccactgcgtctgagatcaatgtacggagctcataagtaccaggctgaattccccatgagtcctgtgacctcagcccacgcggggacctacaggtgctacggctcatacagctccaacccccacctgctgtctcaccccagtgagcccctggagctcgtggtctcaggacactctggaggctccagcctcccacccacagggccgccctccacacctggtctgggaagatacctggaggttttgattggggtctcggtggccttcgtcctgctgctcttcctcctcctcttcctcctcctccgacgtcagcgtcacagcaaacacaggacatctgaccagagaaagactgatttccagcgtcctgcaggggctgcggagacagagcccaaggacaggggcctgctgaggaggtccagcccagctgctgacgtccaggaagaaaacctctatgctgccgtgaaggacacacagtctgaggacagggtggagctggacagtcagagcccacacgatgaagacccccaggcagtgacgtatgccccggtgaaacactccagtcctaggagagaaatggcctctcctccctcctcactgtctggggaattcctggacacaaaggacagacaggtggaagaggacaggcagatggacactgaggctgctgcatctgaagcctcccaggatgtgacctacgcccagctgcacagcttgacccttagacggaaggcaactgagcctcctccatcccaggaaggggaacctccagctgagcccagcatctacgccactctggccatccactagcccggggggtacgcagaccccacactcagcagaaggagactcaggactgctgaaggcacgggagctgcccccagtggacaccagtgaaccccagtcagcctggacccctaacacagaccatgaggagacgctgggaacttgtgggactcacctgactcaaagatgactaatatcgtcccattttggaaataaagcaacagacttctcaacaatcaatgagttaat

SEQ ID NO: 148668 - DNA, 2132 bp, Homo sapiens
  Payload ID: 9418
  Gene Symbol: LILRB3
  Gene Name: leukocyte immunoglobulin-like receptor, subfamily B (with TM and ITIM domains), member 3
  ENST ID: ENST00000613833
  CDS Start-End: 54-1949
agcactgagggctcatccctctgcagagcgccgggtcaccgggaggagacgccatgacgcccgccctcacagccctgctctgccttgggctgagtctgggccccaggacccgcatgcaggcagggcccttccccaaacccaccctctgggctgagccaggctctgtgatcagctgggggagccccgtgaccatctggtgtcaagggagcctggaggcccaggagtaccaactggataaagagggaagcccagagccctgggacagaaataacccactggaacccaagaacaaggccagattctccatcccatccatgacacagcaccatgcagggagataccgctgccactattacagctctgcaggctggtcagagcccagcgaccccctggagctggtgatgacaggattctacaacaaacccaccctctcagccctgcccagccctgtggtggcctcaggggggaatatgaccctccgatgtggctcacagaagggatatcaccattttgttctgatgaaggaaggagaacaccagctcccccggaccctggactcacagcagctccacagtggggggttccaggccctgttccctgtgggccccgtgacccccagccacaggtggaggttcacatgctattactattatacaaacaccccctgggtgtggtcccaccccagtgaccccctggagattctgccctcaggcgtgtctaggaagccctccctcctgaccctgcagggccctgtcctggcccctgggcagagcctgaccctccagtgtggctctgatgtcggctacgacagatttgttctgtataaggagggggaacgtgacttcctccagcgccctggccagcagccccaggctgggctctcccaggccaacttcaccctgggccctgtgagccgctcctacgggggccagtacaggtgctatggtgcacacaacctctcctccgagtggtcggcccccagtgaccccctggacatcctgatcacaggacagatctatgacaccgtctccctgtcagcacagccgggccccacagtggcctcaggagagaacgtgaccctgctgtgtcagtcacgggggtattttgacactttccttctgaccaaagaaggggcagcccatcccccactgcgtctgagatcaatgtacggagctcataagtaccaggctgaattccccatgagtcctgtgacctcagcccacgcggggacctacaggtgctacggctcacgcagctccaacccccacctgctgtctttccccagtgagcccctggaactcatggtctcaggacactctggaggctccagcctcccacccacagggccgccctccacacctggtctgggaagatacctggaggttttgattggggtctcggtggccttcgtcctgctgctcttcctcctcctcttcctcctcctccgacgtcagcgtcacagcaaacacaggacatctgaccagagaaagactgatttccagcgtcctgcaggggctgcggagacagagcccaaggacaggggcctgctgaggaggtccagcccagctgctgacgtccaggaagaaaacctctatgctgctgtgaaggacacacagtctgaggacagggtggagctggacagtcagagcccacacgatgaagacccccaggcagtgacgtatgccccggtgaaacactccagtcctaggagagaaatggcctctcctccctcctcactgtctggggaattcctggacacaaaggacagacaggtggaagaggacaggcagatggacactgaggctgctgcatctgaagcctcccaggatgtgacctacgcccagctgcacagcttgacccttagacggaaggcaactgagcctcctccatcccaggaaggggaacctccagctgagcccagcatctacgccactctggccatccactagcccggggggtacgcagaccccacactcagcagaaggagactcaggactgctgaaggcacgggagctgcccccagtggacaccagtgaaccccagtcagcctggacccctaacacagaccatgaggagacgctgggaacttgtgggactcacctgactcaaagatgactaatatcgtcccattt

SEQ ID NO: 148669 - DNA, 2419 bp, Homo sapiens
  Payload ID: 9418
  Gene Symbol: LILRB3
  Gene Name: leukocyte immunoglobulin-like receptor, subfamily B (with TM and ITIM domains), member 3
  ENST ID: ENST00000610675
  CDS Start-End: 3-578
ccatgacgcccgccctcacagccctgctctgccttgggctgagtctgggccccaggacccgcgtgcaggcagggcccttccccaaacccaccctctgggctgagccaggctctgtgatcagctgggggagccccgtgaccatctggtgtcaggggagccaggaggcccaggagtaccgactgcataaagagggaagcccagagcccttggacagaaataacccactggaacccaagaacaaggccagattctccatcccatccatgacagagcaccatgcagggagataccgctgccactattacagctctgcaggctggtcagagcccagcgaccccctggagatggtgatgacaggagcctacagcaaacccaccctctcagccctgcccagccctgtggtggcctcaggggggaatatgaccctccgatgtggctcacagaagggatatcaccattttgttctgatgaaggaaggagaacaccagctcccccggaccctggactcacagcagctccacagtcgggggttccaggccctgttccctgtgggccccgtgacccccagccacagctgacaggttgtggggagtttggctggtgactgaatctggaaaggacccagagtgatgtgttgaaggacgggctgaaggcatgagggagaccccatggggaggctctgacatgggaggaggagccctcgaccacgttcacctggaaggggaggactcaggaaggcatcggcgtgtctaggaagccctccctcctgaccctgcagggccctgtcctggcccctgggcagagcctgaccctccagtgtggctctgatgtcggctacaacagatttgttctgtataaggagggggaacgtgacttcctccagcgccctggccagcagccccaggctgggctctcccaggccaacttcaccctgggccctgtgagcccctccaatgggggccagtacaggtgctacggtgcacacaacctctcctccgagtggtcggcccccagcgaccccctgaacatcctgatggcaggacagatctatgacaccgtctccctgtcagcacagccgggccccacagtggcctcaggagagaacgtgaccctgctgtgtcagtcatggtggcagtttgacactttccttctgaccaaagaaggggcagcccatcccccactgcgtctgagatcaatgtacggagctcataagtaccaggctgaattccccatgagtcctgtgacctcagcccacgcggggacctacaggtgctacggctcatacagctccaacccccacctgctgtctcaccccagtgagcccctggagctcgtggtctcaggacactctggaggctccagcctcccacccacagggccgccctccacacctggtctgggaagatacctggaggttttgattggggtctcggtggccttcgtcctgctgctcttcctcctcctcttcctcctcctccgacgtcagcgtcacagcaaacacaggacatctgaccagagaaagactgatttccagcgtcctgcaggggctgcggagacagagcccaaggacaggggcctgctgaggaggtccagcccagctgctgacgtccaggaagaaaacctctatgctgccgtgaaggacacacagtctgaggacagggtggagctggacagtcagagcccacacgatgaagacccccaggcagtgacgtatgccccggtgaaacactccagtcctaggagagaaatggcctctcctccctcctcactgtctggggaattcctggacacaaaggacagacaggtggaagaggacaggcagatggacactgaggctgctgcatctgaagcctcccaggatgtgacctacgcccagctgcacagcttgacccttagacggaaggcaactgagcctcctccatcccaggaaggggaacctccagctgagcccagcatctacgccactctggccatccactagcccggggggtacgcagaccccacactcagcagaaggagactcaggactgctgaaggcacgggagctgcccccagtggacaccagtgaaccccagtcagcctggacccctaacacagaccatgaggagacgctgggaacttgtgggactcacctgactcaaagatgactaatatcgtcccattttggaaataaagcaacagacttctcaacaatcaatgagttaataacaaaaaaacaaaaaacaaaaacagacgtaaaggccgggtgtggtactcaggaggctgagtggggaggattccttgaacacaagaagttaaggctgctgaggctgcagtgagctatgactgtgccactgcactccagcctgtgtgacagagcgagaccttgtctctaaaaaaaaaaacagtgaatgttttaaactgaatgataatgtaaata

SEQ ID NO: 148670 - DNA, 2066 bp, Homo sapiens
  Payload ID: 9418
  Gene Symbol: LILRB3
  Gene Name: leukocyte immunoglobulin-like receptor, subfamily B (with TM and ITIM domains), member 3
  ENST ID: ENST00000615764
  CDS Start-End: 3-1901
ccatgacgcccgccctcacagccctgctctgccttgggctgagtctgggccccaggacccgcatgcaggcagggcccttccccaaacccaccctctgggctgagccaggctctgtgatcagctgggggagccccgtgaccatctggtgtcaagggagcctggaggcccaggagtaccaactggataaagagggaagcccagagccctgggacagaaataacccactggaacccaagaacaaggccagattctccatcccatccatgacacagcaccatgcagggagataccgctgccactattacagctctgcaggctggtcagagcccagcgaccccctggagctggtgatgacaggattctacaacaaacccaccctctcagccctgcccagccctgtggtggcctcaggggggaatatgaccctccgatgtggctcacagaagggatatcaccattttgttctgatgaaggaaggagaacaccagctcccccggaccctggactcacagcagctccacagtggggggttccaggccctgttccctgtgggccccgtgacccccagccacaggtggaggttcacatgctattactattatacaaacaccccctgggtgtggtcccaccccagtgaccccctggagattctgccctcaggcgtgtctaggaagccctccctcctgaccctgcagggccctgtcctggcccctgggcagagcctgaccctccagtgtggctctgatgtcggctacgacagatttgttctgtataaggagggggaacgtgacttcctccagcgccctggccagcagccccaggctgggctctcccaggccaacttcaccctgggccctgtgagccgctcctacgggggccagtacaggtgctatggtgcacacaacctctcctccgagtggtcggcccccagtgaccccctggacatcctgatcacaggacagatctatgacaccgtctccctgtcagcacagccgggccccacagtggcctcaggagagaacgtgaccctgctgtgtcagtcacgggggtattttgacactttccttctgaccaaagaaggggcagcccatcccccactgcgtctgagatcaatgtacggagctcataagtaccaggctgaattccccatgagtcctgtgacctcagcccacgcggggacctacaggtgctacggctcacgcagctccaacccccacctgctgtctttccccagtgagcccctggaactcatggtctcaggacactctggaggctccagcctcccacccacagggccgccctccacacctggtctgggaagatacctggaggttttgattggggtctcggtggccttcgtcctgctgctcttcctcctcctcttcctcctcctccgacgtcagcgtcacagcaaacacaggacatctgaccagagaaagactgatttccagcgtcctgcaggggctgcggagacagagcccaaggacaggggcctgctgaggaggtccagcccagctgctgacgtccaggaagaaaacctctatgctgctgtgaaggacacacagtctgaggacagggtggagctggacagtcagcagagcccacacgatgaagacccccaggcagtgacgtatgccccggtgaaacactccagtcctaggagagaaatggcctctcctccctcctcactgtctggggaattcctggacacaaaggacagacaggtggaagaggacaggcagatggacactgaggctgctgcatctgaagcctcccaggatgtgacctacgcccagctgcacagcttgacccttagacggaaggcaactgagcctcctccatcccaggaaggggaacctccagctgagcccagcatctacgccactctggccatccactagcccggggggtacgcagaccccacactcagcagaaggagactcaggactgctgaaggcacgggagctgcccccagtggacaccagtgaaccccagtcagcctggacccctaacacagaccatgaggagacgctgggaacttgtgggactcacctgactcaaagatg

SEQ ID NO: 148671 - DNA, 2126 bp, Homo sapiens
  Payload ID: 9418
  Gene Symbol: LILRB3
  Gene Name: leukocyte immunoglobulin-like receptor, subfamily B (with TM and ITIM domains), member 3
  ENST ID: ENST00000612057
  CDS Start-End: 3-1901
ccatgacgcccgccctcacagccctgctctgccttgggctgagtctgggccccaggacccgcgtgcaggcagggcccttccccaaacccaccctctgggctgagccaggctctgtgatcagctgggggagccccgtgaccatctggtgtcaggggagcctggaggcccaggagtaccgactggataaagagggaagcccagagcccttggacagaaataacccactggaacccaagaacaaggccagattctccatcccatccatgacagagcaccatgcggggagataccgctgccactattacagctctgcaggctggtcagagcccagcgaccccctggagctggtgatgacaggattctacaacaaacccaccctctcagccctgcccagccctgtggtggcctcaggggggaatatgaccctccgatgtggctcacagaagggatatcaccattttgttctgatgaaggaaggagaacaccagctcccccggaccctggactcacagcagctccacagtggggggttccaggccctgttccctgtgggccccgtgaaccccagccacaggtggaggttcacatgctattactattatatgaacaccccccaggtgtggtcccaccccagtgaccccctggagattctgccctcaggcgtgtctaggaagccctccctcctgaccctgcagggccctgtcctggcccctgggcagagcctgaccctccagtgtggctctgatgtcggctacgacagatttgttctgtataaggagggggaacgtgacttcctccagcgccctggccagcagccccaggctgggctctcccaggccaacttcaccctgggccctgtgagcccctcccacgggggccagtacaggtgctatggtgcacacaacctctcctccgagtggtcggcccccagcgaccccctgaacatcctgatggcaggacagatctatgacaccgtctccctgtcagcacagccgggccccacagtggcctcaggagagaacgtgaccctgctgtgtcagtcatggtggcagtttgacactttccttctgaccaaagaaggggcagcccatcccccactgcgtctgagatcaatgtacggagctcataagtaccaggctgaattccccatgagtcctgtgacctcagcccacgcggggacctacaggtgctacggctcatacagctccaacccccacctgctgtctttccccagtgagcccctggaactcatggtctcaggacactctggaggctccagcctcccacccacagggccgccctccacacctggtctgggaagatacctggaggttttgattggggtctcggtggccttcgtcctgctgctcttcctcctcctcttcctcctcctccgacgtcagcgtcacagcaaacacaggacatctgaccagagaaagactgatttccagcgtcctgcaggggctgcggagacagagcccaaggacaggggcctgctgaggaggtccagcccagctgctgacgtccaggaagaaaacctctatgctgccgtgaaggacacacagtctgaggacagggtggagctggacagtcagcagagcccacacgatgaagacccccaggcagtgacgtatgccccggtgaaacactccagtcctaggagagaaatggcctctcctccctcctcactgtctggggaattcctggacacaaaggacagacaggtggaagaggacaggcagatggacactgaggctgctgcatctgaagcctcccaggatgtgacctacgcccagctgcacagcttgacccttagacggaaggcaactgagcctcctccatcccaggaaggggaacctccagctgagcccagcatctacgccactctggccatccactagcccggggggtacgcagaccccacactcagcagaaggagactcaggactgctgaaggcacgggagctgcccccagtggacaccagtgaaccccagtcagcctggacccctaacacagaccatgaggagacgctgggaacttgtgggactcacctgactcaaagatgactaatatcgtcccattttggaaataaagcaacagacttctcaacaatcaatgagttaat

SEQ ID NO: 148672 - DNA, 2066 bp, Homo sapiens
  Payload ID: 9418
  Gene Symbol: LILRB3
  Gene Name: leukocyte immunoglobulin-like receptor, subfamily B (with TM and ITIM domains), member 3
  ENST ID: ENST00000613084
  CDS Start-End: 3-1901
ccatgacgcccgccctcacagccctgctctgccttgggctgagtctgggccccaggacccgcgtgcaggcagggcccttccccaaacccaccctctgggctgagccaggctctgtgatcagctgggggagccccgtgaccatctggtgtcaggggagcctggaggcccaggagtaccaactggataaagagggaagcccagagcccttggacagaaataacccactggaacccaagaacaaggccagattctccatcccatccatgacacagcaccatgcagggagataccgctgccactattacagctctgcaggctggtcagagcccagcgaccccctggagctggtgatgacaggattctacaacaaacccaccctctcagccctgcccagccctgtggtggcctcaggggggaatatgaccctccgatgtggctcacagaagggatatcaccattttgttctgatgaaggaaggagaacaccagctcccccggaccctggactcacagcagctccacagtggggggttccaggccctgttccctgtgggccccgtgacccccagccacaggtggaggttcacatgctattactattatacaaacaccccccaggtgtggtcccaccccagtgaccccctggagattctgccctcaggcgtgtctaggaagccctccctcctgaccctgcagggccctgtcctggcccctgggcagagcctgaccctccagtgtggctctgatgtcggctacgacagatttgttctgtataaggagggggaacgtgacttcctccagcgccctggccagcagccccaggctgggctctcccaggccaacttcaccctgggccctgtgagcccctcccacgggggccagtacaggtgctatggtgcacacaacctctcctccgagtggtcggcccccagcgaccccctgaacatcctgatggcaggacagatctatgacaccgtctccctgtcagcacagccgggccccacagtggcctcaggagagaacgtgaccctgctgtgtcagtcatggtggcagtttgacactttccttctgaccaaagaaggggcagcccatcccccactgcgtctgagatcaatgtacggagctcataagtaccaggctgaattccccatgagtcctgtgacctcagcccacgcggggacctacaggtgctacggctcatacagctccaacccccacctgctgtctttccccagtgagcccctggaactcatggtctcaggacactctggaggctccagcctcccacccacagggccgccctccacacctggtctgggaagatacctggaggttttgattggggtctcggtggccttcgtcctgctgctcttcctcctcctcttcctcctcctccgacgtcagcgtcacagcaaacacaggacatctgaccagagaaagactgatttccagcgtcctgcaggggctgcggagacagagcccaaggacaggggcctgctgaggaggtccagcccagctgctgacgtccaggaagaaaacctctatgctgccgtgaaggacacacagtctgaggacagggtggagctggacagtcagcagagcccacacgatgaagacccccaggcagtgacgtatgccccggtgaaacactccagtcctaggagagaaatggcctctcctccctcctcactgtctggggaattcctggacacaaaggacagacaggtggaagaggacaggcagatggacactgaggctgctgcatctgaagcctcccaggatgtgacctacgcccagctgcacagcttgacccttagacggaaggcaactgagcctcctccatcccaggaaggggaacctccagctgagcccagcatctacgccactctggccatccactagcccggggggtacgcagaccccacactcagcagaaggagactcaggactgctgaaggcacgggagctgcccccagtggacaccagtgaaccccagtcagcctggacccctaacacagaccatgaggagacgctgggaacttgtgggactcacctgactcaaagatg

SEQ ID NO: 148673 - DNA, 2114 bp, Homo sapiens
  Payload ID: 9418
  Gene Symbol: LILRB3
  Gene Name: leukocyte immunoglobulin-like receptor, subfamily B (with TM and ITIM domains), member 3
  ENST ID: ENST00000615995
  CDS Start-End: 3-1949
ccatgacgcccgccctcacagccctgctctgccttgggctgagtctgggccccaggacccgcgtgcaggcagggcccttccccaaacccaccctctgggctgagccaggctctgtgatcagctgggggagccccgtgaccatctggtgtcaggggagcctggaggcccaggagtaccaactggataaagagggaagcccagagcccttggacagaaataacccactggaacccaagaacaaggccagattctccatcccatccatgacacagcaccatgcagggagataccgctgccactattacagctctgcaggctggtcagagcccagcgaccccctggagctggtgatgacaggattctacaacaaacccaccctctcagccctgcccagccctgtggtggcctcaggggggaatatgaccctccgatgtggctcacagaagggatatcaccattttgttctgatgaaggaaggagaacaccagctcccccggaccctggactcacagcagctccacagtggggggttccaggccctgttccctgtgggccccgtgaaccccagccacaggtggaggttcacatgctattactattatatgaacaccccccaggtgtggtcccaccccagtgaccccctggagattctgccctcaggcgtgtctaggaagccctccctcctgaccctgcagggccctgtcctggcccctgggcagagcctgaccctccagtgtggctctgatgtcggctacgacagatttgttctgtataaggagggggaacgtgacttcctccagcgccctggccagcagccccaggctgggctctcccaggccaacttcaccctgggccctgtgagcccctcccacgggggccagtacaggtgctatggtgcacacaacctctcctccgagtggtcggcccccagcgaccccctgaacatcctgatggcaggacagatctatgacaccgtctccctgtcagcacagccgggccccacagtggcctcaggagagaacgtgaccctgctgtgtcagtcatggtggcagtttgacactttccttctgaccaaagaaggggcagcccatcccccactgcgtctgagatcaatgtacggagctcataagtaccaggctgaattccccatgagtcctgtgacctcagcccacgcggggacctacaggtgctacggctcatacagctccaacccccacctgctgtctttccccagtgagcccctggaactcatggtctcaggacactctggaggctccagcctcccacccacagggccgccctccacacctggaggtcctgaggaccagccccttaaccccccagggtcaggccctcagaatggtctgggaagatacctggaggttttgattggggtctcggtggccttcgtcctgctgctcttcctcctcctcttcctcctcctccgacgtcagcgtcacagcaaacacaggacatctgaccagagaaagactgatttccagcgtcctgcaggggctgcggagacagagcccaaggacaggggcctgctgaggaggtccagcccagctgctgacgtccaggaagaaaacctctatgctgccgtgaaggacacacagtctgaggacagggtggagctggacagtcagagcccacacgatgaagacccccaggcagtgacgtatgccccggtgaaacactccagtcctaggagagaaatggcctctcctccctcctcactgtctggggaattcctggacacaaaggacagacaggtggaagaggacaggcagatggacactgaggctgctgcatctgaagcctcccaggatgtgacctacgcccagctgcacagcttgacccttagacggaaggcaactgagcctcctccatcccaggaaggggaacctccagctgagcccagcatctacgccactctggccatccactagcccggggggtacgcagaccccacactcagcagaaggagactcaggactgctgaaggcacgggagctgcccccagtggacaccagtgaaccccagtcagcctggacccctaacacagaccatgaggagacgctgggaacttgtgggactcacctgactcaaagatg

SEQ ID NO: 148674 - DNA, 2487 bp, Homo sapiens
  Payload ID: 9418
  Gene Symbol: LILRB3
  Gene Name: leukocyte immunoglobulin-like receptor, subfamily B (with TM and ITIM domains), member 3
  Uniprot ID: O75022
  ENST ID: ENST00000613698
  CDS Start-End: 191-2086
acttcagccctggggaaatcagagccaggttcctggggtggcagttcctcttcctgtgggctgaggatgagacaaccccatgacaagaaggacccagcctccgagcggccacaccctgtgtgtctctctgtcctgccagcactgagggctcatccctctgcagagcgcggggtcaccgggaggagacgccatgacgcccgccctcacagccctgctctgccttgggctgagtctgggccccaggacccgcgtgcaggcagggcccttccccaaacccaccctctgggctgagccaggctctgtgatcagctgggggagccccgtgaccatctggtgtcaggggagcctggaggcccaggagtaccgactggataaagagggaagcccagagcccttggacagaaataacccactggaacccaagaacaaggccagattctccatcccatccatgacagagcaccatgcggggagataccgctgccactattacagctctgcaggctggtcagagcccagcgaccccctggagctggtgatgacaggattctacaacaaacccaccctctcagccctgcccagccctgtggtggcctcaggggggaatatgaccctccgatgtggctcacagaagggatatcaccattttgttctgatgaaggaaggagaacaccagctcccccggaccctggactcacagcagctccacagtggggggttccaggccctgttccctgtgggccccgtgaaccccagccacaggtggaggttcacatgctattactattatatgaacaccccccaggtgtggtcccaccccagtgaccccctggagattctgccctcaggcgtgtctaggaagccctccctcctgaccctgcagggccctgtcctggcccctgggcagagcctgaccctccagtgtggctctgatgtcggctacgacagatttgttctgtataaggagggggaacgtgacttcctccagcgccctggccagcagccccaggctgggctctcccaggccaacttcaccctgggccctgtgagcccctcccacgggggccagtacaggtgctatggtgcacacaacctctcctccgagtggtcggcccccagcgaccccctgaacatcctgatggcaggacagatctatgacaccgtctccctgtcagcacagccgggccccacagtggcctcaggagagaacgtgaccctgctgtgtcagtcatggtggcagtttgacactttccttctgaccaaagaaggggcagcccatcccccactgcgtctgagatcaatgtacggagctcataagtaccaggctgaattccccatgagtcctgtgacctcagcccacgcggggacctacaggtgctacggctcatacagctccaacccccacctgctgtctttccccagtgagcccctggaactcatggtctcaggacactctggaggctccagcctcccacccacagggccgccctccacacctggtctgggaagatacctggaggttttgattggggtctcggtggccttcgtcctgctgctcttcctcctcctcttcctcctcctccgacgtcagcgtcacagcaaacacaggacatctgaccagagaaagactgatttccagcgtcctgcaggggctgcggagacagagcccaaggacaggggcctgctgaggaggtccagcccagctgctgacgtccaggaagaaaacctctatgctgccgtgaaggacacacagtctgaggacagggtggagctggacagtcagagcccacacgatgaagacccccaggcagtgacgtatgccccggtgaaacactccagtcctaggagagaaatggcctctcctccctcctcactgtctggggaattcctggacacaaaggacagacaggtggaagaggacaggcagatggacactgaggctgctgcatctgaagcctcccaggatgtgacctacgcccagctgcacagcttgacccttagacggaaggcaactgagcctcctccatcccaggaaggggaacctccagctgagcccagcatctacgccactctggccatccactagcccggggggtacgcagaccccacactcagcagaaggagactcaggactgctgaaggcacgggagctgcccccagtggacaccagtgaaccccagtcagcctggacccctaacacagaccatgaggagacgctgggaacttgtgggactcacctgactcaaagatgactaatatcgtcccattttggaaataaagcaacagacttctcaacaatcaatgagttaataacaaaaaaacaaaaaacaaaaacagacgtaaaggccgggtgtggtactcaggaggctgagtggggaggattccttgaacacaagaagttaaggctgctgaggctgcagtgagctatgactgtgccactgcactccagcctgtgtgacagagcgagaccttgtctctaaaaaaaaa

SEQ ID NO: 148675 - DNA, 2114 bp, Homo sapiens
  Payload ID: 9418
  Gene Symbol: LILRB3
  Gene Name: leukocyte immunoglobulin-like receptor, subfamily B (with TM and ITIM domains), member 3
  ENST ID: ENST00000621660
  CDS Start-End: 3-1949
ccatgacgcccgccctcacagccctgctctgccttgggctgagtctgggccccaggacccgcgtgcaggcagggcccttccccaaacccaccctctgggctgagccaggctctgtgatcagctgggggagccccgtgaccatctggtgtcaggggagccaggaggcccaggagtaccgactgcataaagagggaagcccagagcccttggacagaaataacccactggaacccaagaacaaggccagattctccatcccatccatgacagagcaccatgcagggagataccgctgccactattacagctctgcaggctggtcagagcccagcgaccccctggagatggtgatgacaggagcctacagcaaacccaccctctcagccctgcccagccctgtggtggcctcaggggggaatatgaccctccgatgtggctcacagaagggatatcaccattttgttctgatgaaggaaggagaacaccagctcccccggaccctggactcacagcagctccacagtcgggggttccaggccctgttccctgtgggccccgtgacccccagccacaggtggaggttcacatgctattactattatacaaacaccccctgggtgtggtcccaccccagtgaccccctggagattctgccctcaggcgtgtctaggaagccctccctcctgaccctgcagggccctgtcctggcccctgggcagagcctgaccctccagtgtggctctgatgtcggctacaacagatttgttctgtataaggagggggaacgtgacttcctccagcgccctggccagcagccccaggctgggctctcccaggccaacttcaccctgggccctgtgagcccctccaatgggggccagtacaggtgctacggtgcacacaacctctcctccgagtggtcggcccccagcgaccccctgaacatcctgatggcaggacagatctatgacaccgtctccctgtcagcacagccgggccccacagtggcctcaggagagaacgtgaccctgctgtgtcagtcatggtggcagtttgacactttccttctgaccaaagaaggggcagcccatcccccactgcgtctgagatcaatgtacggagctcataagtaccaggctgaattccccatgagtcctgtgacctcagcccacgcggggacctacaggtgctacggctcatacagctccaacccccacctgctgtctcaccccagtgagcccctggagctcgtggtctcaggacactctggaggctccagcctcccacccacagggccgccctccacacctggaggtcctgaggaccagccccttaaccccccagggtcaggccctcagaatcgtctgggaagatacctggaggttttgattggggtctcggtggccttcgtcctgctgctcttcctcctcctcttcctcctcctccgacgtcagcgtcacagcaaacacaggacatctgaccagagaaagactgatttccagcgtcctgcaggggctgcggagacagagcccaaggacaggggcctgctgaggaggtccagcccagctgctgacgtccaggaagaaaacctctatgctgccgtgaaggacacacagtctgaggacagggtggagctggacagtcagagcccacacgatgaagacccccaggcagtgacgtatgccccggtgaaacactccagtcctaggagagaaatggcctctcctccctcctcactgtctggggaattcctggacacaaaggacagacaggtggaagaggacaggcagatggacactgaggctgctgcatctgaagcctcccaggatgtgacctacgcccagctgcacagcttgacccttagacggaaggcaactgagcctcctccatcccaggaaggggaacctccagctgagcccagcatctacgccactctggccatccactagcccggggggtacgcagaccccacactcagcagaaggagactcaggactgctgaaggcacgggagctgcccccagtggacaccagtgaaccccagtcagcctggacccctaacacagaccatgaggagacgctgggaacttgtgggactcacctgactcaaagatg

SEQ ID NO: 148676 - DNA, 1983 bp, Homo sapiens
  Payload ID: 9418
  Gene Symbol: LILRB3
  Gene Name: leukocyte immunoglobulin-like receptor, subfamily B (with TM and ITIM domains), member 3
  ENST ID: ENST00000617197
  CDS Start-End: 3-590
ccatgacgcccgccctcacagccctgctctgccttgggctgagtctgggccccaggacccgcgtgcaggcagggcccttccccaaacccaccctctgggctgagccaggctctgtgatcagctgggggagccccgtgaccatctggtgtcaggggagcctggaggcccaggagtaccaactggataaagagggaagcccagagccctgggacagaaataacccactggaacccaagaacaaggccagattctccatcccatccatgacacagcaccatgcagggagataccgctgccactattacagctctgcaggctggtcagagcccagcgaccccctggagctggtgatgacaggattctacaacaaacccaccctctcagccctgcccagccctgtggtggcctcaggggggaatatgaccctccgatgtggctcacagaagggatatcaccattttgttctgatgaaggaaggagaacaccagctcccccggaccctggactcacagcagctccacagtggggggttccaggccctgttccctgtgggccccgtgacccccagccacaggtggaggcgtgtctaggaagccctccctcctgaccctgcagggccctgtcctggcccctgggcagagcctgaccctccagtgtggctctgatgtcggctacgacagatttgttctgtataaggagggggaacgtgacttcctccagcgccctggccagcagccccaggctgggctctcccaggccaacttcaccctgggccctgtgagccgctcctacgggggccagtacaggtgctatggtgcacacaacctctcctccgagtggtcggcccccagtgaccccctggacatcctgatcacaggacagatctatgacaccgtctccctgtcagcacagccgggccccacagtggcctcaggagagaacgtgaccctgctgtgtcagtcacgggggtattttgacactttccttctgaccaaagaaggggcagcccatcccccactgcgtctgagatcaatgtacggagctcataagtaccaggctgaattccccatgagtcctgtgacctcagcccacgcggggacctacaggtgctacggctcacgcagctccaacccccacctgctgtctttccccagtgagcccctggaactcatggtctcaggacactctggaggctccagcctcccacccacagggccgccctccacacctggtctgggaagatacctggaggttttgattggggtctcggtggccttcgtcctgctgctcttcctcctcctcttcctcctcctccgacgtcagcgtcacagcaaacacaggacatctgaccagagaaagactgatttccagcgtcctgcaggggctgcggagacagagcccaaggacaggggcctgctgaggaggtccagcccagctgctgacgtccaggaagaaaacctctatgctgctgtgaaggacacacagtctgaggacagggtggagctggacagtcagagcccacacgatgaagacccccaggcagtgacgtatgccccggtgaaacactccagtcctaggagagaaatggcctctcctccctcctcactgtctggggaattcctggacacaaaggacagacaggtggaagaggacaggcagatggacactgaggctgctgcatctgaagcctcccaggatgtgacctacgcccagctgcacagcttgacccttagacggaaggcaactgagcctcctccatcccaggaaggggaacctccagctgagcccagcatctacgccactctggccatccactagcccggggggtacgcagaccccacactcagcagaaggagactcaggactgctgaaggcacgggagctgcccccagtggacaccagtgaaccccagtcagcctggacccctaacacagaccatgaggagacgctgggaacttgtgggactcacctgactcaaagatg

SEQ ID NO: 148677 - DNA, 2117 bp, Homo sapiens
  Payload ID: 9418
  Gene Symbol: LILRB3
  Gene Name: leukocyte immunoglobulin-like receptor, subfamily B (with TM and ITIM domains), member 3
  ENST ID: ENST00000615387
  CDS Start-End: 3-1952
ccatgacgcccgccctcacagccctgctctgccttgggctgagtctgggccccaggacccgcgtgcaggcagggcccttccccaaacccaccctctgggctgagccaggctctgtgatcagctgggggagccccgtgaccatctggtgtcaggggagcctggaggcccaggagtaccgactggataaagagggaagcccagagcccttggacagaaataacccactggaacccaagaacaaggccagattctccatcccatccatgacagagcaccatgcggggagataccgctgccactattacagctctgcaggctggtcagagcccagcgaccccctggagctggtgatgacaggattctacaacaaacccaccctctcagccctgcccagccctgtggtggcctcaggggggaatatgaccctccgatgtggctcacagaagggatatcaccattttgttctgatgaaggaaggagaacaccagctcccccggaccctggactcacagcagctccacagtggggggttccaggccctgttccctgtgggccccgtgaaccccagccacaggtggaggttcacatgctattactattatatgaacaccccccaggtgtggtcccaccccagtgaccccctggagattctgccctcaggcgtgtctaggaagccctccctcctgaccctgcagggccctgtcctggcccctgggcagagcctgaccctccagtgtggctctgatgtcggctacgacagatttgttctgtataaggagggggaacgtgacttcctccagcgccctggccagcagccccaggctgggctctcccaggccaacttcaccctgggccctgtgagcccctcccacgggggccagtacaggtgctatggtgcacacaacctctcctccgagtggtcggcccccagcgaccccctgaacatcctgatggcaggacagatctatgacaccgtctccctgtcagcacagccgggccccacagtggcctcaggagagaacgtgaccctgctgtgtcagtcatggtggcagtttgacactttccttctgaccaaagaaggggcagcccatcccccactgcgtctgagatcaatgtacggagctcataagtaccaggctgaattccccatgagtcctgtgacctcagcccacgcggggacctacaggtgctacggctcatacagctccaacccccacctgctgtctttccccagtgagcccctggaactcatggtctcaggacactctggaggctccagcctcccacccacagggccgccctccacacctggaggtcctgaggaccagccccttaaccccccagggtcaggccctcagaatggtctgggaagatacctggaggttttgattggggtctcggtggccttcgtcctgctgctcttcctcctcctcttcctcctcctccgacgtcagcgtcacagcaaacacaggacatctgaccagagaaagactgatttccagcgtcctgcaggggctgcggagacagagcccaaggacaggggcctgctgaggaggtccagcccagctgctgacgtccaggaagaaaacctctatgctgccgtgaaggacacacagtctgaggacagggtggagctggacagtcagcagagcccacacgatgaagacccccaggcagtgacgtatgccccggtgaaacactccagtcctaggagagaaatggcctctcctccctcctcactgtctggggaattcctggacacaaaggacagacaggtggaagaggacaggcagatggacactgaggctgctgcatctgaagcctcccaggatgtgacctacgcccagctgcacagcttgacccttagacggaaggcaactgagcctcctccatcccaggaaggggaacctccagctgagcccagcatctacgccactctggccatccactagcccggggggtacgcagaccccacactcagcagaaggagactcaggactgctgaaggcacgggagctgcccccagtggacaccagtgaaccccagtcagcctggacccctaacacagaccatgaggagacgctgggaacttgtgggactcacctgactcaaagatg

SEQ ID NO: 148678 - DNA, 2091 bp, Homo sapiens
  Payload ID: 9418
  Gene Symbol: LILRB3
  Gene Name: leukocyte immunoglobulin-like receptor, subfamily B (with TM and ITIM domains), member 3
  ENST ID: ENST00000614546
  CDS Start-End: 3-1472
ccatgacgcccgccctcacagccctgctctgccttgggctgagtctgggccccaggacccgcatgcaggcagggcccttccccaaacccaccctctgggctgagccaggctctgtgatcagctgggggagccccgtgaccatctggtgtcaagggagcctggaggcccaggagtaccaactggataaagagggaagcccagagccctgggacagaaataacccactggaacccaagaacaaggccagattctccatcccatccatgacacagcaccatgcagggagataccgctgccactattacagctctgcaggctggtcagagcccagcgaccccctggagctggtgatgacaggattctacaacaaacccaccctctcagccctgcccagccctgtggtggcctcaggggggaatatgaccctccgatgtggctcacagaagggatatcaccattttgttctgatgaaggaaggagaacaccagctcccccggaccctggactcacagcagctccacagtggggggttccaggccctgttccctgtgggccccgtgacccccagccacaggtggaggttcacatgctattactattatacaaacaccccctgggtgtggtcccaccccagtgaccccctggagattctgccctcaggcgtgtctaggaagccctccctcctgaccctgcagggccctgtcctggcccctgggcagagcctgaccctccagtgtggctctgatgtcggctacgacagatttgttctgtataaggagggggaacgtgacttcctccagcgccctggccagcagccccaggctgggctctcccaggccaacttcaccctgggccctgtgagccgctcctacgggggccagtacaggtgctatggtgcacacaacctctcctccgagtggtcggcccccagtgaccccctggacatcctgatcacaggacagatctatgacaccgtctccctgtcagcacagccgggccccacagtggcctcaggagagaacgtgaccctgctgtgtcagtcacgggggtattttgacactttccttctgaccaaagaaggggcagcccatcccccactgcgtctgagatcaatgtacggagctcataagtaccaggctgaattccccatgagtcctgtgacctcagcccacgcggggacctacaggtgctacggctcacgcagctccaacccccacctgctgtctttccccagtgagcccctggaactcatggtctcaggacactctggaggctccagcctcccacccacagggccgccctccacacctggtctgggaagatacctggaggttttgattggggtctcggtggccttcgtcctgctgctcttcctcctcctcttcctcctcctccgacgtcagcgtcacagcaaacacaggacatctgggctgagactctgtccatcttcacccagaccagagaaagactgatttccagcgtcctgcaggggctgcggagacagagcccaaggacaggggcctgctgaggaggtccagcccagctgctgacgtccaggaagaaaacctctatgctgctgtgaaggacacacagtctgaggacagggtggagctggacagtcagagcccacacgatgaagacccccaggcagtgacgtatgccccggtgaaacactccagtcctaggagagaaatggcctctcctccctcctcactgtctggggaattcctggacacaaaggacagacaggtggaagaggacaggcagatggacactgaggctgctgcatctgaagcctcccaggatgtgacctacgcccagctgcacagcttgacccttagacggaaggcaactgagcctcctccatcccaggaaggggaacctccagctgagcccagcatctacgccactctggccatccactagcccggggggtacgcagaccccacactcagcagaaggagactcaggactgctgaaggcacgggagctgcccccagtggacaccagtgaaccccagtcagcctggacccctaacacagaccatgaggagacgctgggaacttgtgggactcacctgactcaaagatg

SEQ ID NO: 148679 - DNA, 2114 bp, Homo sapiens
  Payload ID: 9418
  Gene Symbol: LILRB3
  Gene Name: leukocyte immunoglobulin-like receptor, subfamily B (with TM and ITIM domains), member 3
  ENST ID: ENST00000622537
  CDS Start-End: 3-1949
ccatgacgcccgccctcacagccctgctctgccttgggctgagtctgggccccaggacccgcatgcaggcagggcccttccccaaacccaccctctgggctgagccaggctctgtgatcagctgggggagccccgtgaccatctggtgtcaagggagcctggaggcccaggagtaccaactggataaagagggaagcccagagccctgggacagaaataacccactggaacccaagaacaaggccagattctccatcccatccatgacacagcaccatgcagggagataccgctgccactattacagctctgcaggctggtcagagcccagcgaccccctggagctggtgatgacaggattctacaacaaacccaccctctcagccctgcccagccctgtggtggcctcaggggggaatatgaccctccgatgtggctcacagaagggatatcaccattttgttctgatgaaggaaggagaacaccagctcccccggaccctggactcacagcagctccacagtggggggttccaggccctgttccctgtgggccccgtgacccccagccacaggtggaggttcacatgctattactattatacaaacaccccctgggtgtggtcccaccccagtgaccccctggagattctgccctcaggcgtgtctaggaagccctccctcctgaccctgcagggccctgtcctggcccctgggcagagcctgaccctccagtgtggctctgatgtcggctacgacagatttgttctgtataaggagggggaacgtgacttcctccagcgccctggccagcagccccaggctgggctctcccaggccaacttcaccctgggccctgtgagccgctcctacgggggccagtacaggtgctatggtgcacacaacctctcctccgagtggtcggcccccagtgaccccctggacatcctgatcacaggacagatctatgacaccgtctccctgtcagcacagccgggccccacagtggcctcaggagagaacgtgaccctgctgtgtcagtcacgggggtattttgacactttccttctgaccaaagaaggggcagcccatcccccactgcgtctgagatcaatgtacggagctcataagtaccaggctgaattccccatgagtcctgtgacctcagcccacgcggggacctacaggtgctacggctcacgcagctccaacccccacctgctgtctttccccagtgagcccctggaactcatggtctcaggacactctggaggctccagcctcccacccacagggccgccctccacacctggaggtcctgaggaccagccccttaaccccccagggtcaggccctcagaatggtctgggaagatacctggaggttttgattggggtctcggtggccttcgtcctgctgctcttcctcctcctcttcctcctcctccgacgtcagcgtcacagcaaacacaggacatctgaccagagaaagactgatttccagcgtcctgcaggggctgcggagacagagcccaaggacaggggcctgctgaggaggtccagcccagctgctgacgtccaggaagaaaacctctatgctgctgtgaaggacacacagtctgaggacagggtggagctggacagtcagagcccacacgatgaagacccccaggcagtgacgtatgccccggtgaaacactccagtcctaggagagaaatggcctctcctccctcctcactgtctggggaattcctggacacaaaggacagacaggtggaagaggacaggcagatggacactgaggctgctgcatctgaagcctcccaggatgtgacctacgcccagctgcacagcttgacccttagacggaaggcaactgagcctcctccatcccaggaaggggaacctccagctgagcccagcatctacgccactctggccatccactagcccggggggtacgcagaccccacactcagcagaaggagactcaggactgctgaaggcacgggagctgcccccagtggacaccagtgaaccccagtcagcctggacccctaacacagaccatgaggagacgctgggaacttgtgggactcacctgactcaaagatg

SEQ ID NO: 148680 - DNA, 2825 bp, Homo sapiens
  Payload ID: 9418
  Gene Symbol: LILRB3
  Gene Name: leukocyte immunoglobulin-like receptor, subfamily B (with TM and ITIM domains), member 3
  ENST ID: ENST00000610647
  CDS Start-End: 112-2010
atgacaagaaggacccagcctccgagcggccacaccctgtgtgtctctctgtcctgccagcactgagggctcatccctctgcagagcgccgggtcaccgggaggagacgccatgacgcccgccctcacagccctgctctgccttgggctgagtctgggccccaggacccgcatgcaggcagggcccttccccaaacccaccctctgggctgagccaggctctgtgatcagctgggggagccccgtgaccatctggtgtcaagggagcctggaggcccaggagtaccaactggataaagagggaagcccagagccctgggacagaaataacccactggaacccaagaacaaggccagattctccatcccatccatgacacagcaccatgcagggagataccgctgccactattacagctctgcaggctggtcagagcccagcgaccccctggagctggtgatgacaggattctacaacaaacccaccctctcagccctgcccagccctgtggtggcctcaggggggaatatgaccctccgatgtggctcacagaagggatatcaccattttgttctgatgaaggaaggagaacaccagctcccccggaccctggactcacagcagctccacagtggggggttccaggccctgttccctgtgggccccgtgacccccagccacaggtggaggttcacatgctattactattatacaaacaccccctgggtgtggtcccaccccagtgaccccctggagattctgccctcaggcgtgtctaggaagccctccctcctgaccctgcagggccctgtcctggcccctgggcagagcctgaccctccagtgtggctctgatgtcggctacgacagatttgttctgtataaggagggggaacgtgacttcctccagcgccctggccagcagccccaggctgggctctcccaggccaacttcaccctgggccctgtgagccgctcctacgggggccagtacaggtgctatggtgcacacaacctctcctccgagtggtcggcccccagtgaccccctggacatcctgatcacaggacagatctatgacaccgtctccctgtcagcacagccgggccccacagtggcctcaggagagaacgtgaccctgctgtgtcagtcacgggggtattttgacactttccttctgaccaaagaaggggcagcccatcccccactgcgtctgagatcaatgtacggagctcataagtaccaggctgaattccccatgagtcctgtgacctcagcccacgcggggacctacaggtgctacggctcacgcagctccaacccccacctgctgtctttccccagtgagcccctggaactcatggtctcaggacactctggaggctccagcctcccacccacagggccgccctccacacctggtctgggaagatacctggaggttttgattggggtctcggtggccttcgtcctgctgctcttcctcctcctcttcctcctcctccgacgtcagcgtcacagcaaacacaggacatctgaccagagaaagactgatttccagcgtcctgcaggggctgcggagacagagcccaaggacaggggcctgctgaggaggtccagcccagctgctgacgtccaggaagaaaacctctatgctgctgtgaaggacacacagtctgaggacagggtggagctggacagtcagcagagcccacacgatgaagacccccaggcagtgacgtatgccccggtgaaacactccagtcctaggagagaaatggcctctcctccctcctcactgtctggggaattcctggacacaaaggacagacaggtggaagaggacaggcagatggacactgaggctgctgcatctgaagcctcccaggatgtgacctacgcccagctgcacagcttgacccttagacggaaggcaactgagcctcctccatcccaggaaggggaacctccagctgagcccagcatctacgccactctggccatccactagcccggggggtacgcagaccccacactcagcagaaggagactcaggactgctgaaggcacgggagctgcccccagtggacaccagtgaaccccagtcagcctggacccctaacacagaccatgaggagacgctgggaacttgtgggactcacctgactcaaagatgactaatatcgtcccattttggaaataaagcaacagacttctcaacaatcaatgagttaataacaaaaaaacaaaaaacaaaaacagacgtaaaggccgggtgtggtactcaggaggctgagtggggaggattccttgaacacaagaagttaaggctgctgaggctgcagtgagctatgactgtgccactgcactccagcctgtgtgacagagcgagaccttgtctctaaaaaaaaaaacagtgaatgttttaaactgaatgataatgtaaatattatacatcgaacttatgacatgggaaaattaagaagcataaataggccgggcgcggtggctcacgcctataatctcagcactttgggaggctgatgcgggcggatcatgaggtcaggagatcgagaccatcctggctaacacggtgaaaccccgtctctactaaaaatacaaaaaaattagccgggcgtggtggcgagtgcctatagtcccagctactcaggaggctgaggcaggagaatggcatgagcccgggaggcagagcttgcagtgagctgagatcgcaccactgcactccagcctgggcgacagagtgagattccgtctcgaaaaaaaaaaaaaaagaaagaaaaaaaataaaaaagaagcataaccagg

SEQ ID NO: 148681 - DNA, 2400 bp, Homo sapiens
  Payload ID: 9418
  Gene Symbol: LILRB3
  Gene Name: leukocyte immunoglobulin-like receptor, subfamily B (with TM and ITIM domains), member 3
  ENST ID: ENST00000619617
  CDS Start-End: 3-578
ccatgacgcccgccctcacagccctgctctgccttgggctgagtctgggccccaggacccgcatgcaggcagggcccttccccaaacccaccctctgggctgagccaggctctgtgatcagctgggggagccccgtgaccatctggtgtcaagggagcctggaggcccaggagtaccaactggataaagagggaagcccagagccctgggacagaaataacccactggaacccaagaacaaggccagattctccatcccatccatgacacagcaccatgcagggagataccgctgccactattacagctctgcaggctggtcagagcccagcgaccccctggagctggtgatgacaggattctacaacaaacccaccctctcagccctgcccagccctgtggtggcctcaggggggaatatgaccctccgatgtggctcacagaagggatatcaccattttgttctgatgaaggaaggagaacaccagctcccccggaccctggactcacagcagctccacagtggggggttccaggccctgttccctgtgggccccgtgacccccagccacagctgacaggttgtggggagtttggctggtgactgaatctggaaaggacccagagtgatgtgttgaaggacgggctgaaggcatgagggagaccccatggggaggctctgacatgggaggaggagcccttgaccacgttcacctggaaggggaggactcaggaaggcatcggcgtgtctaggaagccctccctcctgaccctgcagggccctgtcctggcccctgggcagagcctgaccctccagtgtggctctgatgtcggctacgacagatttgttctgtataaggagggggaacgtgacttcctccagcgccctggccagcagccccaggctgggctctcccaggccaacttcaccctgggccctgtgagccgctcctacgggggccagtacaggtgctatggtgcacacaacctctcctccgagtggtcggcccccagtgaccccctggacatcctgatcacaggacagatctatgacaccgtctccctgtcagcacagccgggccccacagtggcctcaggagagaacgtgaccctgctgtgtcagtcacgggggtattttgacactttccttctgaccaaagaaggggcagcccatcccccactgcgtctgagatcaatgtacggagctcataagtaccaggctgaattccccatgagtcctgtgacctcagcccacgcggggacctacaggtgctacggctcacgcagctccaacccccacctgctgtctttccccagtgagcccctggaactcatggtctcaggacactctggaggctccagcctcccacccacagggccgccctccacacctggtctgggaagatacctggaggttttgattggggtctcggtggccttcgtcctgctgctcttcctcctcctcttcctcctcctccgacgtcagcgtcacagcaaacacaggacatctgaccagagaaagactgatttccagcgtcctgcaggggctgcggagacagagcccaaggacaggggcctgctgaggaggtccagcccagctgctgacgtccaggaagaaaacctctatgctgctgtgaaggacacacagtctgaggacagggtggagctggacagtcagagcccacacgatgaagacccccaggcagtgacgtatgccccggtgaaacactccagtcctaggagagaaatggcctctcctccctcctcactgtctggggaattcctggacacaaaggacagacaggtggaagaggacaggcagatggacactgaggctgctgcatctgaagcctcccaggatgtgacctacgcccagctgcacagcttgacccttagacggaaggcaactgagcctcctccatcccaggaaggggaacctccagctgagcccagcatctacgccactctggccatccactagcccggggggtacgcagaccccacactcagcagaaggagactcaggactgctgaaggcacgggagctgcccccagtggacaccagtgaaccccagtcagcctggacccctaacacagaccatgaggagacgctgggaacttgtgggactcacctgactcaaagatgactaatatcgtcccattttggaaataaagcaacagacttctcaacaatcaatgagttaataacaaaaaaacaaaaaacaaaaacagacgtaaaggccgggtgtggtactcaggaggctgagtggggaggattccttgaacacaagaagttaaggctgctgaggctgcagtgagctatgactgtgccactgcactccagcctgtgtgacagagcgagaccttgtctctaaaaaaaaaaacagtgaatgttttaaa

SEQ ID NO: 148682 - DNA, 2403 bp, Homo sapiens
  Payload ID: 9418
  Gene Symbol: LILRB3
  Gene Name: leukocyte immunoglobulin-like receptor, subfamily B (with TM and ITIM domains), member 3
  ENST ID: ENST00000616493
  CDS Start-End: 3-578
ccatgacgcccgccctcacagccctgctctgccttgggctgagtctgggccccaggacccgcgtgcaggcagggcccttccccaaacccaccctctgggctgagccaggctctgtgatcagctgggggagccccgtgaccatctggtgtcaggggagcctggaggcccaggagtaccgactggataaagagggaagcccagagcccttggacagaaataacccactggaacccaagaacaaggccagattctccatcccatccatgacagagcaccatgcggggagataccgctgccactattacagctctgcaggctggtcagagcccagcgaccccctggagctggtgatgacaggattctacaacaaacccaccctctcagccctgcccagccctgtggtggcctcaggggggaatatgaccctccgatgtggctcacagaagggatatcaccattttgttctgatgaaggaaggagaacaccagctcccccggaccctggactcacagcagctccacagtggggggttccaggccctgttccctgtgggccccgtgaaccccagccacagctgacaggttgtggggagtttggctggtgactgaatctggaaaggacccagagtgatgtgttgaaggacgggctgaaggcatgagggagaccccatggggaggctctgacatgggaggaggagccctcgaccacgttcacctggaaggggaggactcaggaaggcatcggcgtgtctaggaagccctccctcctgaccctgcagggccctgtcctggcccctgggcagagcctgaccctccagtgtggctctgatgtcggctacgacagatttgttctgtataaggagggggaacgtgacttcctccagcgccctggccagcagccccaggctgggctctcccaggccaacttcaccctgggccctgtgagcccctcccacgggggccagtacaggtgctatggtgcacacaacctctcctccgagtggtcggcccccagcgaccccctgaacatcctgatggcaggacagatctatgacaccgtctccctgtcagcacagccgggccccacagtggcctcaggagagaacgtgaccctgctgtgtcagtcatggtggcagtttgacactttccttctgaccaaagaaggggcagcccatcccccactgcgtctgagatcaatgtacggagctcataagtaccaggctgaattccccatgagtcctgtgacctcagcccacgcggggacctacaggtgctacggctcatacagctccaacccccacctgctgtctttccccagtgagcccctggaactcatggtctcaggacactctggaggctccagcctcccacccacagggccgccctccacacctggtctgggaagatacctggaggttttgattggggtctcggtggccttcgtcctgctgctcttcctcctcctcttcctcctcctccgacgtcagcgtcacagcaaacacaggacatctgaccagagaaagactgatttccagcgtcctgcaggggctgcggagacagagcccaaggacaggggcctgctgaggaggtccagcccagctgctgacgtccaggaagaaaacctctatgctgccgtgaaggacacacagtctgaggacagggtggagctggacagtcagcagagcccacacgatgaagacccccaggcagtgacgtatgccccggtgaaacactccagtcctaggagagaaatggcctctcctccctcctcactgtctggggaattcctggacacaaaggacagacaggtggaagaggacaggcagatggacactgaggctgctgcatctgaagcctcccaggatgtgacctacgcccagctgcacagcttgacccttagacggaaggcaactgagcctcctccatcccaggaaggggaacctccagctgagcccagcatctacgccactctggccatccactagcccggggggtacgcagaccccacactcagcagaaggagactcaggactgctgaaggcacgggagctgcccccagtggacaccagtgaaccccagtcagcctggacccctaacacagaccatgaggagacgctgggaacttgtgggactcacctgactcaaagatgactaatatcgtcccattttggaaataaagcaacagacttctcaacaatcaatgagttaataacaaaaaaacaaaaaacaaaaacagacgtaaaggccgggtgtggtactcaggaggctgagtggggaggattccttgaacacaagaagttaaggctgctgaggctgcagtgagctatgactgtgccactgcactccagcctgtgtgacagagcgagaccttgtctctaaaaaaaaaaacagtgaatgttttaaa

SEQ ID NO: 148683 - DNA, 2170 bp, Homo sapiens
  Payload ID: 9418
  Gene Symbol: LILRB3
  Gene Name: leukocyte immunoglobulin-like receptor, subfamily B (with TM and ITIM domains), member 3
  ENST ID: ENST00000619769
  CDS Start-End: 50-1945
ctgagggctcatccctctgcagagcgccgggtcaccgggaggagacgccatgacgcccgccctcacagccctgctctgccttgggctgagtctgggccccaggacccgcgtgcaggcagggcccttccccaaacccaccctctgggctgagccaggctctgtgatcagctgggggagccccgtgaccatctggtgtcaggggagcctggaggcccaggagtaccaactggataaagagggaagcccagagccctgggacagaaataacccactggaacccaagaacaaggccagattctccatcccatccatgacacagcaccatgcagggagataccgctgccactattacagctctgcaggctggtcagagcccagcgaccccctggagctggtgatgacaggattctacaacaaacccaccctctcagccctgcccagccctgtggtggcctcaggggggaatatgaccctccgatgtggctcacagaagggatatcaccattttgttctgatgaaggaaggagaacaccagctcccccggaccctggactcacagcagctccacagtggggggttccaggccctgttccctgtgggccccgtgacccccagccacaggtggaggttcacatgctattactattatacaaacaccccctgggtgtggtcccaccccagtgaccccctggagattctgccctcaggcgtgtctaggaagccctccctcctgaccctgcagggccctgtcctggcccctgggcagagcctgaccctccagtgtggctctgatgtcggctacgacagatttgttctgtataaggagggggaacgtgacttcctccagcgccctggccagcagccccaggctgggctctcccaggccaacttcaccctgggccctgtgagcccctcccacgggggccagtacaggtgctatggtgcacacaacctctcctccgagtggtcggcccccagcgaccccctgaacatcctgatggcaggacagatctatgacaccgtctccctgtcagcacagccgggccccacagtggcctcaggagagaacgtgaccctgctgtgtcagtcacgggggtattttgacactttccttctgaccaaagaaggggcagcccatcccccactgcgtctgagatcaatgtacggagctcataagtaccaggctgaattccccatgagtcctgtgacctcagcccacgcggggacctacaggtgctacggctcacgcagctccaacccccacctgctgtctttccccagtgagcccctggaactcatggtctcaggacactctggaggctccagcctcccacccacagggccgccctccacacctggtctgggaagatacctggaggttttgattggggtctcggtggccttcgtcctgctgctcttcctcctcctcttcctcctcctccgacgtcagcgtcacagcaaacacaggacatctgaccagagaaagactgatttccagcgtcctgcaggggctgcggagacagagcccaaggacaggggcctgctgaggaggtccagcccagctgctgacgtccaggaagaaaacctctatgctgctgtgaaggacacacagtctgaggacagggtggagctggacagtcagagcccacacgatgaagacccccaggcagtgacgtatgccccggtgaaacactccagtcctaggagagaaatggcctctcctccctcctcactgtctggggaattcctggacacaaaggacagacaggtggaagaggacaggcagatggacactgaggctgctgcatctgaagcctcccaggatgtgacctacgcccagctgcacagcttgacccttagacggaaggcaactgagcctcctccatcccaggaaggggaacctccagctgagcccagcatctacgccactctggccatccactagcccggggggtacgcagaccccacactcagcagaaggagactcaggactgctgaaggcacgggagctgcccccagtggacaccagtgaaccccagtcagcctggacccctaacacagaccatgaggagacgctgggaacttgtgggactcacctgactcaaagatgactaatatcgtcccattttggaaataaagcaacagacttctcaacaatcaatgagttaat

SEQ ID NO: 148684 - DNA, 1976 bp, Homo sapiens
  Payload ID: 9418
  Gene Symbol: LILRB3
  Gene Name: leukocyte immunoglobulin-like receptor, subfamily B (with TM and ITIM domains), member 3
  ENST ID: ENST00000616782
  CDS Start-End: 32-1399
gcagagcgcggggtcaccgggaggagacgccatgacgcccgccctcacagccctgctctgccttgggctgagtctgggccccaggacccgcgtgcaggcagggcccttccccaaacccaccctctgggctgagccaggctctgtgatcagctgggggagccccgtgaccatctggtgtcaggggagccaggaggcccaggagtaccgactgcataaagagggaagcccagagcccttggacagaaataacccactggaacccaagaacaaggccagattctccatcccatccatgacagagcaccatgcagggagataccgctgccactattacagctctgcaggctggtcagagcccagcgaccccctggagatggtgatgacaggagcctacagcaaacccaccctctcagccctgcccagccctgtggtggcctcaggggggaatatgaccctccgatgtggctcacagaagggatatcaccattttgttctgatgaaggaaggagaacaccagctcccccggaccctggactcacagcagctccacagtcgggggttccaggccctgttccctgtgggccccgtgacccccagccacaggtggaggttcacatgctattactattatacaaacaccccctgggtgtggtcccaccccagtgaccccctggagattctgccctcaggcgtgtctaggaagccctccctcctgaccctgcagggccctgtcctggcccctgggcagagcctgaccctccagtgtggctctgatgtcggctacaacagatttgttctgtataaggagggggaacgtgacttcctccagcgccctggccagcagccccaggctgggctctcccaggccaacttcaccctgggccctgtgagcccctccaatgggggccagtacaggtgctacggtgcacacaacctctcctccgagtggtcggcccccagcgaccccctgaacatcctgatggcaggacagatctatgacaccgtctccctgtcagcacagccgggccccacagtggcctcaggagagaacgtgaccctgctgtgtcagtcatggtggcagtttgacactttccttctgaccaaagaaggggcagcccatcccccactgcgtctgagatcaatgtacggagctcataagtaccaggctgaattccccatgagtcctgtgacctcagcccacgcggggacctacaggtgctacggctcatacagctccaacccccacctgctgtctcaccccagtgagcccctggagctcgtggtctcaggtgagggcgctgaccccgtcctctctgagctcaaaggctcagctcaggcccaggcccccaggagagctctcggctgggatggaccgagggaggctgtgagggaggcttagccagagggcacccagccctcagaggggaggaggccaacaggggttctcctaggcgtggccacccgttctcccctgcctggcatgcagaaggcaccaggtgggcagagagatggttccagggaatccactgggcggaagcaggagagtgggagtggaagggtgcactccatggacggcccccgcccctcacccgcctcccgtgctccttccaggacactctggaggctccagcctcccacccacagggccgccctccacacctggtgagtcactgaggcctcgtggggagcgccgcctcccccagggcagtctgagtctcccaaaggatcccactcccctcccctcaaggacgggcttgtgtcccaggggctctgaggctgggctggtgaagagtggggggtcgaggcagagggagatgttggggcccagccaggaggaggagccgggctgatgtggggggcaagacagccccagccttcacctccctgtcctgacccaggaggtcctgaggaccagccccttaaccccccagggtcaggccctcagaatcgtgagtgaggggctctgagtgggagat

SEQ ID NO: 148685 - DNA, 1924 bp, Homo sapiens
  Payload ID: 9418
  Gene Symbol: LILRB3
  Gene Name: leukocyte immunoglobulin-like receptor, subfamily B (with TM and ITIM domains), member 3
  ENST ID: ENST00000611863
  CDS Start-End: 3-584
ccatgacgcccgccctcacagccctgctctgccttgggctgagtctgggccccaggacccgcatgcaggcagggcccttccccaaacccaccctctgggctgagccaggctctgtgatcagctgggggagccccgtgaccatctggtgtcaagggagcctggaggcccaggagtaccaactggataaagagggaagcccagagccctgggacagaaataacccactggaacccaagaacaaggccagattctccatcccatccatgacacagcaccatgcagggagataccgctgccactattacagctctgcaggctggtcagagcccagcgaccccctggagctggtgatgacaggattctacaacaaacccaccctctcagccctgcccagccctgtggtggcctcaggggggaatatgaccctccgatgtggctcacagaagggatatcaccattttgttctgatgaaggaaggagaacaccagctcccccggaccctggactcacagcagctccacagtggggggttccaggccctgttccctgtgggccccgtgacccccagccacaggcgtgtctaggaagccctccctcctgaccctgcagggccctgtcctggcccctgggcagagcctgaccctccagtgtggctctgatgtcggctacgacagatttgttctgtataaggagggggaacgtgacttcctccagcgccctggccagcagccccaggctgggctctcccaggccaacttcaccctgggccctgtgagccgctcctacgggggccagtacaggtgctatggtgcacacaacctctcctccgagtggtcggcccccagtgaccccctggacatcctgatcacaggacagatctatgacaccgtctccctgtcagcacagccgggccccacagtggcctcaggagagaacgtgaccctgctgtgtcagtcacgggggtattttgacactttccttctgaccaaagaaggggcagcccatcccccactgcgtctgagatcaatgtacggagctcataagtaccaggctgaattccccatgagtcctgtgacctcagcccacgcggggacctacaggtgctacggctcacgcagctccaacccccacctgctgtctttccccagtgagcccctggaactcatggtctcaggacactctggaggctccagcctcccacccacagggccgccctccacacctggtctgggaagatacctggaggttttgattggggtctcggtggccttcgtcctgctgctcttcctcctcctcttcctcctcctccgacgtcagcgtcacagcaaacacaggacatctgaccagagaaagactgatttccagcgtcctgcaggggctgcggagacagagcccaaggacaggggcctgctgaggaggtccagcccagctgctgacgtccaggaagaaaacctctagcccacacgatgaagacccccaggcagtgacgtatgccccggtgaaacactccagtcctaggagagaaatggcctctcctccctcctcactgtctggggaattcctggacacaaaggacagacaggtggaagaggacaggcagatggacactgaggctgctgcatctgaagcctcccaggatgtgacctacgcccagctgcacagcttgacccttagacggaaggcaactgagcctcctccatcccaggaaggggaacctccagctgagcccagcatctacgccactctggccatccactagcccggggggtacgcagaccccacactcagcagaaggagactcaggactgctgaaggcacgggagctgcccccagtggacaccagtgaaccccagtcagcctggacccctaacacagaccatgaggagacgctgggaacttgtgggactcacctgactcaaagatg

SEQ ID NO: 148686 - DNA, 2204 bp, Homo sapiens
  Payload ID: 9418
  Gene Symbol: LILRB3
  Gene Name: leukocyte immunoglobulin-like receptor, subfamily B (with TM and ITIM domains), member 3
  Uniprot ID: O75022
  ENST ID: ENST00000611086
  CDS Start-End: 81-1976
acaccctgtgtgtctctctgtcctgccagcactgagggctcatccctctgcagagcgcggggtcaccgggaggagacgccatgacgcccgccctcacagccctgctctgccttgggctgagtctgggccccaggacccgcgtgcaggcagggcccttccccaaacccaccctctgggctgagccaggctctgtgatcagctgggggagccccgtgaccatctggtgtcaggggagccaggaggcccaggagtaccgactgcataaagagggaagcccagagcccttggacagaaataacccactggaacccaagaacaaggccagattctccatcccatccatgacagagcaccatgcagggagataccgctgccactattacagctctgcaggctggtcagagcccagcgaccccctggagatggtgatgacaggagcctacagcaaacccaccctctcagccctgcccagccctgtggtggcctcaggggggaatatgaccctccgatgtggctcacagaagggatatcaccattttgttctgatgaaggaaggagaacaccagctcccccggaccctggactcacagcagctccacagtcgggggttccaggccctgttccctgtgggccccgtgacccccagccacaggtggaggttcacatgctattactattatacaaacaccccctgggtgtggtcccaccccagtgaccccctggagattctgccctcaggcgtgtctaggaagccctccctcctgaccctgcagggccctgtcctggcccctgggcagagcctgaccctccagtgtggctctgatgtcggctacaacagatttgttctgtataaggagggggaacgtgacttcctccagcgccctggccagcagccccaggctgggctctcccaggccaacttcaccctgggccctgtgagcccctccaatgggggccagtacaggtgctacggtgcacacaacctctcctccgagtggtcggcccccagcgaccccctgaacatcctgatggcaggacagatctatgacaccgtctccctgtcagcacagccgggccccacagtggcctcaggagagaacgtgaccctgctgtgtcagtcatggtggcagtttgacactttccttctgaccaaagaaggggcagcccatcccccactgcgtctgagatcaatgtacggagctcataagtaccaggctgaattccccatgagtcctgtgacctcagcccacgcggggacctacaggtgctacggctcatacagctccaacccccacctgctgtctcaccccagtgagcccctggagctcgtggtctcaggacactctggaggctccagcctcccacccacagggccgccctccacacctggtctgggaagatacctggaggttttgattggggtctcggtggccttcgtcctgctgctcttcctcctcctcttcctcctcctccgacgtcagcgtcacagcaaacacaggacatctgaccagagaaagactgatttccagcgtcctgcaggggctgcggagacagagcccaaggacaggggcctgctgaggaggtccagcccagctgctgacgtccaggaagaaaacctctatgctgccgtgaaggacacacagtctgaggacagggtggagctggacagtcagagcccacacgatgaagacccccaggcagtgacgtatgccccggtgaaacactccagtcctaggagagaaatggcctctcctccctcctcactgtctggggaattcctggacacaaaggacagacaggtggaagaggacaggcagatggacactgaggctgctgcatctgaagcctcccaggatgtgacctacgcccagctgcacagcttgacccttagacggaaggcaactgagcctcctccatcccaggaaggggaacctccagctgagcccagcatctacgccactctggccatccactagcccggggggtacgcagaccccacactcagcagaaggagactcaggactgctgaaggcacgggagctgcccccagtggacaccagtgaaccccagtcagcctggacccctaacacagaccatgaggagacgctgggaacttgtgggactcacctgactcaaagatgactaatatcgtcccattttggaaataaagcaacagacttctcaacaatcaatgagttaataac

SEQ ID NO: 148687 - DNA, 1924 bp, Homo sapiens
  Payload ID: 9418
  Gene Symbol: LILRB3
  Gene Name: leukocyte immunoglobulin-like receptor, subfamily B (with TM and ITIM domains), member 3
  ENST ID: ENST00000613710
  CDS Start-End: 3-584
ccatgacgcccgccctcacagccctgctctgccttgggctgagtctgggccccaggacccgcgtgcaggcagggcccttccccaaacccaccctctgggctgagccaggctctgtgatcagctgggggagccccgtgaccatctggtgtcaggggagccaggaggcccaggagtaccgactgcataaagagggaagcccagagcccttggacagaaataacccactggaacccaagaacaaggccagattctccatcccatccatgacagagcaccatgcagggagataccgctgccactattacagctctgcaggctggtcagagcccagcgaccccctggagatggtgatgacaggagcctacagcaaacccaccctctcagccctgcccagccctgtggtggcctcaggggggaatatgaccctccgatgtggctcacagaagggatatcaccattttgttctgatgaaggaaggagaacaccagctcccccggaccctggactcacagcagctccacagtcgggggttccaggccctgttccctgtgggccccgtgacccccagccacaggcgtgtctaggaagccctccctcctgaccctgcagggccctgtcctggcccctgggcagagcctgaccctccagtgtggctctgatgtcggctacaacagatttgttctgtataaggagggggaacgtgacttcctccagcgccctggccagcagccccaggctgggctctcccaggccaacttcaccctgggccctgtgagcccctccaatgggggccagtacaggtgctacggtgcacacaacctctcctccgagtggtcggcccccagcgaccccctgaacatcctgatggcaggacagatctatgacaccgtctccctgtcagcacagccgggccccacagtggcctcaggagagaacgtgaccctgctgtgtcagtcatggtggcagtttgacactttccttctgaccaaagaaggggcagcccatcccccactgcgtctgagatcaatgtacggagctcataagtaccaggctgaattccccatgagtcctgtgacctcagcccacgcggggacctacaggtgctacggctcatacagctccaacccccacctgctgtctcaccccagtgagcccctggagctcgtggtctcaggacactctggaggctccagcctcccacccacagggccgccctccacacctggtctgggaagatacctggaggttttgattggggtctcggtggccttcgtcctgctgctcttcctcctcctcttcctcctcctccgacgtcagcgtcacagcaaacacaggacatctgaccagagaaagactgatttccagcgtcctgcaggggctgcggagacagagcccaaggacaggggcctgctgaggaggtccagcccagctgctgacgtccaggaagaaaacctctagcccacacgatgaagacccccaggcagtgacgtatgccccggtgaaacactccagtcctaggagagaaatggcctctcctccctcctcactgtctggggaattcctggacacaaaggacagacaggtggaagaggacaggcagatggacactgaggctgctgcatctgaagcctcccaggatgtgacctacgcccagctgcacagcttgacccttagacggaaggcaactgagcctcctccatcccaggaaggggaacctccagctgagcccagcatctacgccactctggccatccactagcccggggggtacgcagaccccacactcagcagaaggagactcaggactgctgaaggcacgggagctgcccccagtggacaccagtgaaccccagtcagcctggacccctaacacagaccatgaggagacgctgggaacttgtgggactcacctgactcaaagatg

SEQ ID NO: 148688 - DNA, 2154 bp, Homo sapiens
  Payload ID: 9418
  Gene Symbol: LILRB3
  Gene Name: leukocyte immunoglobulin-like receptor, subfamily B (with TM and ITIM domains), member 3
  ENST ID: ENST00000622504
  CDS Start-End: 3-1472
ccatgacgcccgccctcacagccctgctctgccttgggctgagtctgggccccaggacccgcgtgcaggcagggcccttccccaaacccaccctctgggctgagccaggctctgtgatcagctgggggagccccgtgaccatctggtgtcaggggagcctggaggcccaggagtaccgactggataaagagggaagcccagagcccttggacagaaataacccactggaacccaagaacaaggccagattctccatcccatccatgacagagcaccatgcggggagataccgctgccactattacagctctgcaggctggtcagagcccagcgaccccctggagctggtgatgacaggattctacaacaaacccaccctctcagccctgcccagccctgtggtggcctcaggggggaatatgaccctccgatgtggctcacagaagggatatcaccattttgttctgatgaaggaaggagaacaccagctcccccggaccctggactcacagcagctccacagtggggggttccaggccctgttccctgtgggccccgtgaaccccagccacaggtggaggttcacatgctattactattatatgaacaccccccaggtgtggtcccaccccagtgaccccctggagattctgccctcaggcgtgtctaggaagccctccctcctgaccctgcagggccctgtcctggcccctgggcagagcctgaccctccagtgtggctctgatgtcggctacgacagatttgttctgtataaggagggggaacgtgacttcctccagcgccctggccagcagccccaggctgggctctcccaggccaacttcaccctgggccctgtgagcccctcccacgggggccagtacaggtgctatggtgcacacaacctctcctccgagtggtcggcccccagcgaccccctgaacatcctgatggcaggacagatctatgacaccgtctccctgtcagcacagccgggccccacagtggcctcaggagagaacgtgaccctgctgtgtcagtcatggtggcagtttgacactttccttctgaccaaagaaggggcagcccatcccccactgcgtctgagatcaatgtacggagctcataagtaccaggctgaattccccatgagtcctgtgacctcagcccacgcggggacctacaggtgctacggctcatacagctccaacccccacctgctgtctttccccagtgagcccctggaactcatggtctcaggacactctggaggctccagcctcccacccacagggccgccctccacacctggtctgggaagatacctggaggttttgattggggtctcggtggccttcgtcctgctgctcttcctcctcctcttcctcctcctccgacgtcagcgtcacagcaaacacaggacatctgggctgagactctgtccatcttcacccagaccagagaaagactgatttccagcgtcctgcaggggctgcggagacagagcccaaggacaggggcctgctgaggaggtccagcccagctgctgacgtccaggaagaaaacctctatgctgccgtgaaggacacacagtctgaggacagggtggagctggacagtcagcagagcccacacgatgaagacccccaggcagtgacgtatgccccggtgaaacactccagtcctaggagagaaatggcctctcctccctcctcactgtctggggaattcctggacacaaaggacagacaggtggaagaggacaggcagatggacactgaggctgctgcatctgaagcctcccaggatgtgacctacgcccagctgcacagcttgacccttagacggaaggcaactgagcctcctccatcccaggaaggggaacctccagctgagcccagcatctacgccactctggccatccactagcccggggggtacgcagaccccacactcagcagaaggagactcaggactgctgaaggcacgggagctgcccccagtggacaccagtgaaccccagtcagcctggacccctaacacagaccatgaggagacgctgggaacttgtgggactcacctgactcaaagatgactaatatcgtcccattttggaaataaagcaacagacttctcaacaatcaatgagttaat

SEQ ID NO: 148689 - DNA, 2066 bp, Homo sapiens
  Payload ID: 9418
  Gene Symbol: LILRB3
  Gene Name: leukocyte immunoglobulin-like receptor, subfamily B (with TM and ITIM domains), member 3
  ENST ID: ENST00000620468
  CDS Start-End: 3-1901
ccatgacgcccgccctcacagccctgctctgccttgggctgagtctgggccccaggacccgcgtgcaggcagggcccttccccaaacccaccctctgggctgagccaggctctgtgatcagctgggggagccccgtgaccatctggtgtcaggggagcctggaggcccaggagtaccaactggataaagagggaagcccagagcccttggacagaaataacccactggaacccaagaacaaggccagattctccatcccatccatgacacagcaccatgcagggagataccgctgccactattacagctctgcaggctggtcagagcccagcgaccccctggagctggtgatgacaggattctacaacaaacccaccctctcagccctgcccagccctgtggtggcctcaggggggaatatgaccctccgatgtggctcacagaagggatatcaccattttgttctgatgaaggaaggagaacaccagctcccccggaccctggactcacagcagctccacagtggggggttccaggccctgttccctgtgggccccgtgacccccagccacaggtggaggttcacatgctattactattatacaaacaccccccgggtgtggtcccaccccagtgaccccctggagattctgccctcaggcgtgtctaggaagccctccctcctgaccctgcagggccctgtcctggcccctgggcagagcctgaccctccagtgtggctctgatgtcggctacaacagatttgttctgtataaggagggggaacgtgacttcctccagcgccctggccagcagccccaggctgggctctcccaggccaacttcaccctgggccctgtgagcccctccaatgggggccagtacaggtgctacggtgcacacaacctctcctccgagtggtcggcccccagcgaccccctgaacatcctgatggcaggacagatctatgacaccgtctccctgtcagcacagccgggccccacagtggcctcaggagagaacgtgaccctgctgtgtcagtcatggtggcagtttgacactttccttctgaccaaagaaggggcagcccatcccccactgcgtctgagatcaatgtacggagctcataagtaccaggctgaattccccatgagtcctgtgacctcagcccacgcggggacctacaggtgctacggctcatacagctccaacccccacctgctgtctcaccccagtgagcccctggagctcgtggtctcaggacactctggaggctccagcctcccacccacagggccgccctccacacctggtctgggaagatacctggaggttttgattggggtctcggtggccttcgtcctgctgctcttcctcctcctcttcctcctcctccgacgtcagcgtcacagcaaacacaggacatctgaccagagaaagactgatttccagcgtcctgcaggggctgcggagacagagcccaaggacaggggcctgctgaggaggtccagcccagctgctgacgtccaggaagaaaacctctatgctgccgtgaaggacacacagtctgaggacagggtggagctggacagtcagcagagcccacacgatgaagacccccaggcagtgacgtatgccccggtgaaacactccagtcctaggagagaaatggcctctcctccctcctcactgtctggggaattcctggacacaaaggacagacaggtggaagaggacaggcagatggacactgaggctgctgcatctgaagcctcccaggatgtgacctacgcccagctgcacagcttgacccttagacggaaggcaactgagcctcctccatcccaggaaggggaacctccagctgagcccagcatctacgccactctggccatccactagcccggggggtacgcagaccccacactcagcagaaggagactcaggactgctgaaggcacgggagctgcccccagtggacaccagtgaaccccagtcagcctggacccctaacacagaccatgaggagacgctgggaacttgtgggactcacctgactcaaagatg

SEQ ID NO: 148690 - DNA, 2114 bp, Homo sapiens
  Payload ID: 9418
  Gene Symbol: LILRB3
  Gene Name: leukocyte immunoglobulin-like receptor, subfamily B (with TM and ITIM domains), member 3
  ENST ID: ENST00000622614
  CDS Start-End: 3-1949
ccatgacgcccgccctcacagccctgctctgccttgggctgagtctgggccccaggacccgcgtgcaggcagggcccttccccaaacccaccctctgggctgagccaggctctgtgatcagctgggggagccccgtgaccatctggtgtcaggggagcctggaggcccaggagtaccaactggataaagagggaagcccagagcccttggacagaaataacccactggaacccaagaacaaggccagattctccatcccatccatgacacagcaccatgcagggagataccgctgccactattacagctctgcaggctggtcagagcccagcgaccccctggagctggtgatgacaggagcctacagcaaacccaccctctcagccctgcccagccctgtggtggcctcaggggggaatatgaccctccgatgtggctcacagaagggatatcaccattttgttctgatgaaggaaggagaacaccagctcccccggaccctggactcacagcagctccacagtcgggggttccaggccctgttccctgtgggccccgtgacccccagccacaggtggaggttcacatgctattactattatacaaacaccccctgggtgtggtcccaccccagtgaccccctggagattctgccctcaggcgtgtctaggaagccctccctcctgaccctgcagggccctgtcctggcccctgggcagagcctgaccctccagtgtggctctgatgtcggctacaacagatttgttctgtataaggagggggaacgtgacttcctccagcgccctggccagcagccccaggctgggctctcccaggccaacttcaccctgggccctgtgagcccctccaatgggggccagtacaggtgctacggtgcacacaacctctcctccgagtggtcggcccccagcgaccccctgaacatcctgatggcaggacagatctatgacaccgtctccctgtcagcacagccgggccccacagtggcctcaggagagaacgtgaccctgctgtgtcagtcatggtggcagtttgacactttccttctgaccaaagaaggggcagcccatcccccactgcgtctgagatcaatgtacggagctcataagtaccaggctgaattccccatgagtcctgtgacctcagcccacgcggggacctacaggtgctacggctcatacagctccaacccccacctgctgtctcaccccagtgagcccctggagctcgtggtctcaggacactctggaggctccagcctcccacccacagggccgccctccacacctggaggtcctgaggaccagccccttaaccccccagggtcaggccctcagaatcgtctgggaagatacctggaggttttgattggggtctcggtggccttcgtcctgctgctcttcctcctcctcttcctcctcctccgacgtcagcgtcacagcaaacacaggacatctgaccagagaaagactgatttccagcgtcctgcaggggctgcggagacagagcccaaggacaggggcctgctgaggaggtccagcccagctgctgacgtccaggaagaaaacctctatgctgccgtgaaggacacacagtctgaggacagggtggagctggacagtcagagcccacacgatgaagacccccaggcagtgacgtatgccccggtgaaacactccagtcctaggagagaaatggcctctcctccctcctcactgtctggggaattcctggacacaaaggacagacaggtggaagaggacaggcagatggacactgaggctgctgcatctgaagcctcccaggatgtgacctacgcccagctgcacagcttgacccttagacggaaggcaactgagcctcctccatcccaggaaggggaacctccagctgagcccagcatctacgccactctggccatccactagcccggggggtacgcagaccccacactcagcagaaggagactcaggactgctgaaggcacgggagctgcccccagtggacaccagtgaaccccagtcagcctggacccctaacacagaccatgaggagacgctgggaacttgtgggactcacctgactcaaagatg

SEQ ID NO: 148691 - DNA, 1896 bp, Homo sapiens
  Payload ID: 9418
  Gene Symbol: LILRB3
  Gene Name: leukocyte immunoglobulin-like receptor, subfamily B (with TM and ITIM domains), member 3
  Uniprot ID: O75022
  ENST ID: ENST00000621210
  CDS Start-End: 1-1896
atgacgcccgccctcacagccctgctctgccttgggctgagtctgggccccaggacccgcgtgcaggcagggcccttccccaaacccaccctctgggctgagccaggctctgtgatcagctgggggagccccgtgaccatctggtgtcaggggagcctggaggcccaggagtaccgactggataaagagggaagcccagagcccttggacagaaataacccactggaacccaagaacaaggccagattctccatcccatccatgacagagcaccatgcggggagataccgctgccactattacagctctgcaggctggtcagagcccagcgaccccctggagctggtgatgacaggattctacaacaaacccaccctctcagccctgcccagccctgtggtggcctcaggggggaatatgaccctccgatgtggctcacagaagggatatcaccattttgttctgatgaaggaaggagaacaccagctcccccggaccctggactcacagcagctccacagtggggggttccaggccctgttccctgtgggccccgtgaaccccagccacaggtggaggttcacatgctattactattatatgaacaccccccaggtgtggtcccaccccagtgaccccctggagattctgccctcaggcgtgtctaggaagccctccctcctgaccctgcagggccctgtcctggcccctgggcagagcctgaccctccagtgtggctctgatgtcggctacgacagatttgttctgtataaggagggggaacgtgacttcctccagcgccctggccagcagccccaggctgggctctcccaggccaacttcaccctgggccctgtgagcccctcccacgggggccagtacaggtgctatggtgcacacaacctctcctccgagtggtcggcccccagcgaccccctgaacatcctgatggcaggacagatctatgacaccgtctccctgtcagcacagccgggccccacagtggcctcaggagagaacgtgaccctgctgtgtcagtcatggtggcagtttgacactttccttctgaccaaagaaggggcagcccatcccccactgcgtctgagatcaatgtacggagctcataagtaccaggctgaattccccatgagtcctgtgacctcagcccacgcggggacctacaggtgctacggctcatacagctccaacccccacctgctgtctttccccagtgagcccctggaactcatggtctcaggacactctggaggctccagcctcccacccacagggccgccctccacacctggtctgggaagatacctggaggttttgattggggtctcggtggccttcgtcctgctgctcttcctcctcctcttcctcctcctccgacgtcagcgtcacagcaaacacaggacatctgaccagagaaagactgatttccagcgtcctgcaggggctgcggagacagagcccaaggacaggggcctgctgaggaggtccagcccagctgctgacgtccaggaagaaaacctctatgctgccgtgaaggacacacagtctgaggacagggtggagctggacagtcagagcccacacgatgaagacccccaggcagtgacgtatgccccggtgaaacactccagtcctaggagagaaatggcctctcctccctcctcactgtctggggaattcctggacacaaaggacagacaggtggaagaggacaggcagatggacactgaggctgctgcatctgaagcctcccaggatgtgacctacgcccagctgcacagcttgacccttagacggaaggcaactgagcctcctccatcccaggaaggggaacctccagctgagcccagcatctacgccactctggccatccactag

SEQ ID NO: 148692 - DNA, 539 bp, Homo sapiens
  Payload ID: 9419
  Gene Symbol: LILRB4
  Gene Name: leukocyte immunoglobulin-like receptor, subfamily B (with TM and ITIM domains), member 4
  ENST ID: ENST00000270452
  CDS Start-End: 145-539
tgcagcatggacctgcaactttcctgaagcatctccagggctggatgccatgagaacctggtgcctgcctcagccctagctctggggaaatgaaagccaggctggggttcaaatgagggcagtttcccttcctgtgggctgctgatggaacaaccccatgacgagaaggacccagcctccaagcggccacaccctgtgtgtctctttgtcctgccggcactgaggactcatccatctgcacagctggggcccctgggaggagacgccatgatccccaccttcacggctctgctctgcctcgggctgagtctgggccccaggacccacatgcaggcagggcccctccccaaacccaccctctgggctgagccaggctctgtgatcagctgggggaactctgtgaccatctggtgtcaggggaccctggaggctcgggagtaccgtctggataaagaggaaagcccagcaccctgggacagacagaacccactggagcccaagaacaaggccagattctccatcccatccatgacagagga

SEQ ID NO: 148693 - DNA, 1742 bp, Homo sapiens
  Payload ID: 9419
  Gene Symbol: LILRB4
  Gene Name: leukocyte immunoglobulin-like receptor, subfamily B (with TM and ITIM domains), member 4
  ENST ID: ENST00000391733
  CDS Start-End: 15-1364
tgggaggagacgccatgatccccaccttcacggctctgctctgcctcgggctgagtctgggccccaggacccacatgcaggcagggcccctccccaaacccaccctctgggctgagccaggctctgtgatcagctgggggaactctgtgaccatctggtgtcaggggaccctggaggctcgggagtaccgtctggataaagaggaaagcccagcaccctgggacagacagaacccactggagcccaagaacaaggccagattctccatcccatccatgacagaggactatgcagggagataccgctgttactatcgcagccctgtaggctggtcacagcccagtgaccccctggagctggtgatgacaggagcctacagtaaacccaccctttcagccctgccgagtcctcttgtgacctcaggaaagagcgtgaccctgctgtgtcagtcacggagcccaatggacacttttcttctgatcaaggagcgggcagcccatcccctactgcatctgagatcagagcacggagctcagcagcaccaggctgaattccccatgagtcctgtgacctcagtgcacggggggacctacaggtgcttcagctcacacggcttctcccactacctgctgtcacaccccagtgaccccctggagctcatagtctcaggatccttggagggtcccaggccctcacccacaaggtccgtctcaacagctgcaggccctgaggaccagcccctcatgcctacagggtcagtcccccacagtggtctgagaaggcactgggaggtactgatcggggtcttggtggtctccatcctgcttctctccctcctcctcttcctcctcctccaacactggcgtcagggaaaacacaggacattggcccagagacaggctgatttccaacgtcctccaggggctgccgagccagagcccaaggacgggggcctacagaggaggtccagcccagctgctgacgtccagggagaaaacttctcaggtgctgccgtgaagaacacacagcctgaggacggggtggaaatggacactcggcagagcccacacgatgaagacccccaggcagtgacgtatgccaaggtgaaacactccagacctaggagagaaatggcctctcctccctccccactgtctggggaattcctggacacaaaggacagacaggcagaagaggacagacagatggacactgaggctgctgcatctgaagccccccaggatgtgacctacgcccggctgcacagctttaccctcagacagaaggcaactgagcctcctccatcccaggaaggggcctctccagctgagcccagtgtctatgccactctggccatccactaatccaggggggacccagaccccacaagccatggagactcaggaccccagaaggcatggaagctgcctccagtagacatcactgaaccccagccagcccagacccctgacacagaccactagaagattccgggaacgttgggagtcacctgattctgcaaagataaataatatccctgcattatcaaaataaagtagcagacctctcaattcacaatgagttaactgataaaacaaaacagaagtcagacaatgttttaaattgaatgatcatgtaaatattacacatcaaaccaatgacatgggaaaatgggagcttctaatgaggacaaacaaaaaatagagaaaaattaataaagtcaaaatgtttattcttgaaaa

SEQ ID NO: 148694 - DNA, 1602 bp, Homo sapiens
  Payload ID: 9419
  Gene Symbol: LILRB4
  Gene Name: leukocyte immunoglobulin-like receptor, subfamily B (with TM and ITIM domains), member 4
  ENST ID: ENST00000391734
  CDS Start-End: 37-1224
ccatctgcacagctggggcccctgggaggagacgccatgatccccaccttcacggctctgctctgcctcgggctgagtctgggccccaggacccacatgcaggcagggcccctccccaaacccaccctctgggctgagccaggctctgtgatcagctgggggaactctgtgaccatctggtgtcaggggaccctggaggctcgggagtaccgtctggataaagaggaaagcccagcaccctgggacagacagaacccactggagcccaagaacaaggccagattctccatcccatccatgacagaggactatgcagggagataccgctgttactatcgcagccctgtaggctggtcacagcccagtgaccccctggagctggtgatgacaggagcctacagtaaacccaccctttcagccctgccgagtcctcttgtgacctcaggaaagagcgtgaccctgctgtgtcagtcacggagcccaatggacacttttcttctgatcaaggagcgggcagcccatcccctactgcatctgagatcagagcacggagctcagcagcaccaggctgaattccccatgagtcctgtgacctcagtgcacggggggacctacaggtgcttcagctcacacggcttctcccactacctgctgtcacaccccagtgaccccctggagctcatagtctcaggatccttggagggtcccaggccctcacccacaaggtccgtctcaacagctgcaggccctgaggaccagcccctcatgcctacagggtcagtcccccacagtggtctgagaaggcactgggaggtactgatcggggtcttggtggtctccatcctgcttctctccctcctcctcttcctcctcctccaacactggcgtcagggaaaacacaggacattggcccagagacaggctgatttccaacgtcctccaggggctgccgagccagagcccaaggacgggggcctacagaggaggtccagcccagctgctgacgtccagggagaaaacttctgtgctgccgtgaagaacacacagcctgaggacggggtggaaatggacactcgggctgctgcatctgaagccccccaggatgtgacctacgcccggctgcacagctttaccctcagacagaaggcaactgagcctcctccatcccaggaaggggcctctccagctgagcccagtgtctatgccactctggccatccactaatccaggggggacccagaccccacaagccatggagactcaggaccccagaaggcatggaagctgcctccagtagacatcactgaaccccagccagcccagacccctgacacagaccactagaagattccgggaacgttgggagtcacctgattctgcaaagataaataatatccctgcattatcaaaataaagtagcagacctctcaattcacaatgagttaactgataaaacaaaacagaagtcagacaatgttttaaattgaatgatcatgtaaatattacacatcaaaccaatgacatgggaaaatgggagcttctaatgaggacaaacaaaaaatagagaaaaattaataaagtcaaaatgtttattcttgaaaa

SEQ ID NO: 148695 - DNA, 4002 bp, Homo sapiens
  Payload ID: 9419
  Gene Symbol: LILRB4
  Gene Name: leukocyte immunoglobulin-like receptor, subfamily B (with TM and ITIM domains), member 4
  Uniprot ID: Q8NHJ6
  ENST ID: ENST00000391736
  CDS Start-End: 316-1662
ggcctgtgggaggcagaatagtgacctcccagagatgtccacctcctgaggcccagaccctcccagggagacccattttggacttgtgacctccgggacgagaacctggtgcctgcctcagccctagctctggggaaatgaaagccaggctggggttcaaatgagggcagtttcccttcctgtgggctgctgatggaacaaccccatgacgagaaggacccagcctccaagcggccacaccctgtgtgtctctttgtcctgccggcactgaggactcatccatctgcacagctggggcccctgggaggagacgccatgatccccaccttcacggctctgctctgcctcgggctgagtctgggccccaggacccacatgcaggcagggcccctccccaaacccaccctctgggctgagccaggctctgtgatcagctgggggaactctgtgaccatctggtgtcaggggaccctggaggctcgggagtaccgtctggataaagaggaaagcccagcaccctgggacagacagaacccactggagcccaagaacaaggccagattctccatcccatccatgacagaggactatgcagggagataccgctgttactatcgcagccctgtaggctggtcacagcccagtgaccccctggagctggtgatgacaggagcctacagtaaacccaccctttcagccctgccgagtcctcttgtgacctcaggaaagagcgtgaccctgctgtgtcagtcacggagcccaatggacacttttcttctgatcaaggagcgggcagcccatcccctactgcatctgagatcagagcacggagctcagcagcaccaggctgaattccccatgagtcctgtgacctcagtgcacggggggacctacaggtgcttcagctcacacggcttctcccactacctgctgtcacaccccagtgaccccctggagctcatagtctcaggatccttggagggtcccaggccctcacccacaaggtccgtctcaacagctgcaggccctgaggaccagcccctcatgcctacagggtcagtcccccacagtggtctgagaaggcactgggaggtactgatcggggtcttggtggtctccatcctgcttctctccctcctcctcttcctcctcctccaacactggcgtcagggaaaacacaggacattggcccagagacaggctgatttccaacgtcctccaggggctgccgagccagagcccaaggacgggggcctacagaggaggtccagcccagctgctgacgtccagggagaaaacttctgtgctgccgtgaagaacacacagcctgaggacggggtggaaatggacactcggcagagcccacacgatgaagacccccaggcagtgacgtatgccaaggtgaaacactccagacctaggagagaaatggcctctcctccctccccactgtctggggaattcctggacacaaaggacagacaggcagaagaggacagacagatggacactgaggctgctgcatctgaagccccccaggatgtgacctacgcccggctgcacagctttaccctcagacagaaggcaactgagcctcctccatcccaggaaggggcctctccagctgagcccagtgtctatgccactctggccatccactaatccaggggggacccagaccccacaagccatggagactcaggaccccagaaggcatggaagctgcctccagtagacatcactgaaccccagccagcccagacccctgacacagaccactagaagattccgggaacgttgggagtcacctgattctgcaaagataaataatatccctgcattatcaaaataaagtagcagacctctcaattcacaatgagttaactgataaaacaaaacagaagtcagacaatgttttaaattgaatgatcatgtaaatattacacatcaaaccaatgacatgggaaaatgggagcttctaatgaggacaaacaaaaaatagagaaaaattaataaagtcaaaatgtttattcttgaaaacattaatgatacatgaatcttggccacaatgagaaaaataaaaatgaaaaaagagcaggcatccatttccatacaggaacaaaataggaggcagcactacagaccctacacacagctttacagaggtgaaagaaaactgtcagcaattctatgctgacataacagaaaatgtagatgagatagatgaaatacgaaaaattacagtttacttaatgaacataaggataaatagaaaaactgaatcatcatacataaacatatataaaatgcattgatcctgtaatcaaaaatgttcccacaaagtaaatgccacttcagcaaggtttgttggtggttttttcaaactcttatgcactcatgaaacacacagacacacacacacacaaacttgcataaattttccctgagaatattttgtatatatttacacaaatacatttgatcagactaggaacaagttgataccaaaacctgaaaaggaaactacagaatgggaaagtcatagaagatctctcacagaaatataaatcccttaacaaatattaacaagtaagattcatgtctctataaaatagacagtatatcatgaccacactggttttttgttatcctttgattttgtttatgaaaagcaaggatagcttaattttcaaaaactcaatcaatgtaattcagtattttaacaaaaggaatgaaaaattatcatctcaatagacaaagcttttgtctgagcaccttttcatatagctgctgaccatttgtatgtcttcttttgagaaatgcctgttcagctactttgcccatgtttcaagtagtttttggtttcttgctgttgctttgttttagttccttacatatttttgcatattaaccctttatcaggtatacagcttgcaactattttctcccatttctgagttgtctcttcattctgtttgcagaagctgtttagaagccacaccttttgtctatttttgcttttgttgcttgtgttttcagggccatatccaaaaaaaccttgcccggaccaacgtcttgaagcttttctcccacccatttttgtatatgggataagggttcaatttcattcttcttcatatgaatatccccaggatgtgtcctatgcccagctgcacagcttaccctcaaacagaaaataatgaagccttcttcctcccaggaaaggggacgttcagctgagccgagtgtgtatactgctctggccatccactagcccagggaggacccagacctccacactccatggagactcagttctcctaggaccatttattcaaaaggactgccctctcttgttcttggaaactttgttgaggatcaattcaccataaatatgtgtgtttccttctttgctttcatccctgttgcactgatcactgtacctgtttctattccagttccatgatgtcttcctggctgtagctttgtaggatatttggggattccatagtgtgatatccccttcttccctttgctcaagattgttttggctatttggggtccttttgtagtcccattcaaattttaggattgtttttctatttctgtggaaaacgaccttggaattttgttaggaattgcattgagtctgcaggtatgaacttttttttaaagttccagggcacatgtacaggacctgcagctttgttacataggtaggcttgtgccatggtggtttgctgcacctatcaacccattacctagttattaagcccagcatgcattagctctttttcctgatgctctccctcccttcatcatccgccctcccactacaagccccagtgtgtgttgttcccctccctgtgtccatgtgttctcattgttatacgaacattttaacaatgttaattcttgcagaccatgaacataagctaccttcccatttatatgcgtcttgttcaatttcattcatcaatgttataaagattttagtgcaga

SEQ ID NO: 148696 - DNA, 1204 bp, Homo sapiens
  Payload ID: 9419
  Gene Symbol: LILRB4
  Gene Name: leukocyte immunoglobulin-like receptor, subfamily B (with TM and ITIM domains), member 4
  ENST ID: ENST00000434286
  CDS Start-End: 8-1204
agacgccatgatccccaccttcacggctctgctctgcctcgggctgagtctgggccccaggacccacatgcaggcagggcccctccccaaacccaccctctgggctgagccaggctctgtgatcagctgggggaactctgtgaccatctggtgtcaggggaccctggaggctcgggagtaccgtctggataaagaggaaagcccagcaccctgggacagacagaacccactggagcccaagaacaaggccagattctccatcccatccatgacagaggactatgcagggagataccgctgttactatcgcagccctgtaggctggtcacagcccagtgaccccctggagctggtgatgacaggagcctacagtaaacccaccctttcagccctgccgagtcctcttgtgacctcaggaaagagcgtgaccctgctgtgtcagtcacggagcccaatggacacttttcttctgatcaaggagcgggcagcccatcccctactgcatctgagatcagagcacggagctcagcagcaccaggctgaattccccatgagtcctgtgacctcagtgcacggggggacctacaggtgcttcagctcacacggcttctcccactacctgctgtcacaccccagtgaccccctggagctcatagtctcaggatccttggagggtcccaggccctcacccacaaggtccgtctcaacagctggccctgaggaccagcccctcatgcctacagggtcagtcccccacagtggtctgagaaggcactgggaggtactgatcggggtcttggtggtctccatcctgcttctctccctcctcctcttcctcctcctccaacactggcgtcagggaaaacacaggacattggcccagagacaggctgatttccaacgtcctccaggggctgccgagccagagcccaaggacgggggcctacagaggaggtccagcccagctgctgacgtccagggagaaaacttctgtgctgccgtgaagaacacacagcctgaggacggggtggaaatggacactcggcagagcccacacgatgaagacccccaggcagtgacgtatgccaaggtgaaacactccagacctaggagagaaatggcctctcctccctccccactgtctggggaattcctggacacaaaggacagacaggcagaagaggacagacagatggacactgag

SEQ ID NO: 148697 - DNA, 1761 bp, Homo sapiens
  Payload ID: 9419
  Gene Symbol: LILRB4
  Gene Name: leukocyte immunoglobulin-like receptor, subfamily B (with TM and ITIM domains), member 4
  ENST ID: ENST00000430952
  CDS Start-End: 40-1383
catccatctgcacagctggggcccctgggaggagacgccatgatccccaccttcacggctctgctctgcctcgggctgagtctgggccccaggacccacatgcaggcagggcccctccccaaacccaccctctgggctgagccaggctctgtgatcagctgggggaactctgtgaccatctggtgtcaggggaccctggaggctcgggagtaccgtctggataaagaggaaagcccagcaccctgggacagacagaacccactggagcccaagaacaaggccagattctccatcccatccatgacagaggactatgcagggagataccgctgttactatcgcagccctgtaggctggtcacagcccagtgaccccctggagctggtgatgacaggagcctacagtaaacccaccctttcagccctgccgagtcctcttgtgacctcaggaaagagcgtgaccctgctgtgtcagtcacggagcccaatggacacttttcttctgatcaaggagcgggcagcccatcccctactgcatctgagatcagagcacggagctcagcagcaccaggctgaattccccatgagtcctgtgacctcagtgcacggggggacctacaggtgcttcagctcacacggcttctcccactacctgctgtcacaccccagtgaccccctggagctcatagtctcaggatccttggagggtcccaggccctcacccacaaggtccgtctcaacagctgcaggccctgaggaccagcccctcatgcctacagggtcagtcccccacagtggtctgagaaggcactgggaggtactgatcggggtcttggtggtctccatcctgcttctctccctcctcctcttcctcctcctccaacactggcgtcagggaaaacacaggacattggcccagagacaggctgatttccaacgtcctccaggggctgccgagccagagcccaaggacgggggcctacagaggaggtccagcccagctgctgacgtccagggagaaaacttctgtgctgccgtgaagaacacacagcctgaggacggggtggaaatggacactcggagcccacacgatgaagacccccaggcagtgacgtatgccaaggtgaaacactccagacctaggagagaaatggcctctcctccctccccactgtctggggaattcctggacacaaaggacagacaggcagaagaggacagacagatggacactgaggctgctgcatctgaagccccccaggatgtgacctacgcccggctgcacagctttaccctcagacagaaggcaactgagcctcctccatcccaggaaggggcctctccagctgagcccagtgtctatgccactctggccatccactaatccaggggggacccagaccccacaagccatggagactcaggaccccagaaggcatggaagctgcctccagtagacatcactgaaccccagccagcccagacccctgacacagaccactagaagattccgggaacgttgggagtcacctgattctgcaaagataaataatatccctgcattatcaaaataaagtagcagacctctcaattcacaatgagttaactgataaaacaaaacagaagtcagacaatgttttaaattgaatgatcatgtaaatattacacatcaaaccaatgacatgggaaaatgggagcttctaatgaggacaaacaaaaaatagagaaaaattaataaagtcaaaatgtttattcttgaaaa

SEQ ID NO: 148698 - DNA, 4002 bp, Homo sapiens
  Payload ID: 9419
  Gene Symbol: LILRB4
  Gene Name: leukocyte immunoglobulin-like receptor, subfamily B (with TM and ITIM domains), member 4
  ENST ID: ENST00000616137
  CDS Start-End: 316-1662
ggcctgtgggaggcagaatagtgacctcccagagatgtccacctcctgaggcccagaccctcccagggagacccattttggacttgtgacctccgggacgagaacctggtgcctgcctcagccctagctctggggaaatgaaagccaggctggggttcaaatgagggcagtttcccttcctgtgggctgctgatggaacaaccccatgacgagaaggacccagcctccaagcggccacaccctgtgtgtctctttgtcctgccggcactgaggactcatccatctgcacagctggggcccctgggaggagacgccatgatccccaccttcacggctctgctctgcctcgggctgagtctgggccccaggacccacatgcaggcagggcccctccccaaacccaccctctgggctgagccaggctctgtgatcagctgggggaactctgtgaccatctggtgtcaggggaccctggaggctcgggagtaccgtctggataaagaggaaagcccagcaccctgggacagacagaacccactggagcccaagaacaaggccagattctccatcccatccatgacagaggactatgcagggagataccgctgttactatcgcagccctgtaggctggtcacagcccagtgaccccctggagctggtgatgacaggagcctacagtaaacccaccctttcagccctgccgagtcctcttgtgacctcaggaaagagcgtgaccctgctgtgtcagtcacggagcccaatggacactttccttctgatcaaggagcgggcagcccatcccctactgcatctgagatcagagcacggagctcagcagcaccaggctgaattccccatgagtcctgtgacctcagtgcacggggggacctacaggtgcttcagctcacacggcttctcccactacctgctgtcacaccccagtgaccccctggagctcatagtctcaggatccttggagggtcccaggccctcacccacaaggtccgtctcaacagctgcaggccctgaggaccagcccctcatgcctacagggtcagtcccccacagtggtctgagaaggcactgggaggtactgatcggggtcttggtggtctccatcctgcttctctccctcctcctcttcctcctcctccaacactggcgtcagggaaaacacaggacattggcccagagacaggctgatttccaacgtcctccaggggctgccgagccagagcccaaggacgggggcctacagaggaggtccagcccagctgctgacgtccagggagaaaacttctgtgctgccgtgaaggacacacagcctgaggacggggtggaaatggacactcggcagagcccacacgatgaagacccccaggcagtgacgtatgccaaggtgaaacactccagacctaggagagaaatggcctctcctccctccccactgtctggggaattcctggacacaaaggacagacaggcagaagaggacagacagatggacactgaggctgctgcatctgaagccccccaggatgtgacctacgcccagctgcacagctttaccctcagacagaaggcaactgagcctcctccatcccaggaaggggcctctccagctgagcccagtgtctatgccactctggccatccactaatccaggggggacccagaccccacaagccatggagactcaggaccccagaaggcatggaagctgcctccagtagacatcactgaaccccagccagcccagacccctgacacagaccactagaagattccgggaacgttgggagtcacctgattctgcaaagataaataatatccctgcattatcaaaataaagtagcagacctctcaattcacaatgagttaactgataaaacaaaacagaagtcagacaatgttttaaattgaatgatcatgtaaatattacacatcaaaccaatgacatgggaaaatgggagcttctaatgaggacaaacaaaaaatagagaaaaattaataaagtcaaaatgtttattcttgaaaacattaatgatacatgaatcttggccacaatgagaaaaataaaaatgaaaaaagagcaggcatccatttccatacaggaacaaaataggaggcagcactacagaccctacacacagctttacagaggtgaaagaaaactgtcagcaattctatgctgacataacagaaaatgtagatgagatagatgaaatacgaaaaattacagtttacttaatgaacataaggataaatagaaaaactgaatcatcatacataaacatatataaaatgcattgatcctgtaatcaaaaatgttcccacaaagtaaatgccacttcagcaaggtttgttggtggttttttcaaactcttatgcactcatgaaacacacagacacacacacacacaaacttgcataaattttccctgagaatattttgtatatatttacacaaatacatttgatcagactaggaacaagttgataccaaaacctgaaaaggaaactacagaatgggaaagtcatagaagatctctcacagaaatataaatcccttaacaaatattaacaagtaagattcatgtctctataaaatagacagtatatcatgaccacactggttttttgttatcctttgattttgtttatgaaaagcaaggatagcttaattttcaaaaactcaatcaatgtaattcagtattttaacaaaaggaatgaaaaattatcatctcaatagacaaagcttttgtctgagcaccttttcatatagctgctgaccatttgtatgtcttcttttgagaaatgcctgttcagctactttgcccatgtttcaagtagtttttggtttcttgctgttgctttgttttagttccttacatatttttgcatattaaccctttatcaggtatacagcttgcaactattttctcccatttctgagttgtctcttcattctgtttgcagaagctgtttagaagccacaccttttgtctatttttgcttttgttgcttgtgttttcagggccatatccaaaaaaaccttgcccggaccaacgtcttgaagcttttctcccacccatttttgtatatgggataagggttcaatttcattcttcttcatatgaatatccccaggatgtgtcctatgcccagctgcacagcttaccctcaaacagaaaataatgaagccttcttcctcccaggaaaggggacgttcagctgagccgagtgtgtatactgctctggccatccactagcccagggaggacccagacctccacactccatggagactcagttctcctaggaccatttattcaaaaggactgccctctcttgttcttggaaactttgttgaggatcaattcaccataaatatgtgtgtttccttctttgctttcatccctgttgcactgatcactgtacctgtttctattccagttccatgatgtcttcctggctgtagctttgtaggatatttggggattccatagtgtgatatccccttcttccctttgctcaagattgttttggctatttggggtccttttgtagtcccattcaaattttaggattgtttttctatttctgtggaaaacgaccttggaattttgttaggaattgcattgagtctgcaggtatgaacttttttttaaagttccagggcacatgtacaggacctgcagctttgttacataggtaggcttgtgccatggtggtttgctgcacctatcaacccattacctagttattaagcccagcatgcattagctctttttcctgatgctctccctcccttcatcatccgccctcccactacaagccccagtgtgtgttgttcccctccctgtgtccatgtgttctcattgttatacgaacattttaacaatgttaattcttgcagaccatgaacataagctaccttcccatttatatgcgtcttgttcaatttcattcatcaatgttataaagattttagtgcaga

SEQ ID NO: 148699 - DNA, 1377 bp, Homo sapiens
  Payload ID: 9419
  Gene Symbol: LILRB4
  Gene Name: leukocyte immunoglobulin-like receptor, subfamily B (with TM and ITIM domains), member 4
  ENST ID: ENST00000621368
  CDS Start-End: 64-1377
tttgtcctgccggcactgaggactcatccatctgcacagctggggcccctgggaggagacgccatgatccccaccctcacggctctgctctgcctcgggcccctccccaaacccaccctctgggctgagccaggctctgtgatcagctgggggaactctgtgaccatctggtgtcaggggaccctggaggctcgggagtaccgtctggataaagaggaaagcccagcaccctgggacagacagaacccactggagcccaagaacaaggccagattctccatcccatccatgacagaggactatgcagggagataccgctgttactatcgcagccctgtaggctggtcacagcccagtgaccccctggagctggtgatgacaggagcctacagtaaacccaccctttcagccctgccgagtcctcttgtgacctcaggaaagagcgtgaccctgctgtgtcagtcacggagcccaatggacacttttcttctgatcaaggagcgggcagcccatcccctactgcatctgagatcagagcacggagctcagcagcaccaggctgaattccccatgagtcctgtgacctcagtgcacggggggacctacaggtgcttcagctcacacggcttctcccactacctgctgtcacaccccagtgaccccctggagctcatagtctcaggatccttggagggtcccaggccctcacccacaaggtccgtctcaacagctgcaggccctgaggaccagcccctcatgcctacagggtcagtcccccacagtggtctgagaaggcactgggaggtactgatcggggtcttggtggtctccatcctgcttctctccctcctcctcttcctcctcctccaacactggcgtcagggaaaacacaggacattggcccagagacaggctgatttccaacgtcctccaggggctgccgagccagagcccaaggacgggggcctacagaggaggtccagcccagctgctgacgtccagggagaaaacttctcaggtgctgccgtgaagaacacacagcctgaggacggggtggaaatggacactcggcagagcccacacgatgaagacccccaggcagtgacgtatgccaaggtgaaacactccagacctaggagagaaatggcctctcctccctccccactgtctggggaattcctggacacaaaggacagacaggcagaagaggacagacagatggacactgaggctgctgcatctgaagccccccaggatgtgacctacgcccggctgcacagctttaccctcagacagaaggcaactgagcctcctccatcccaggaaggggcctctccagctgagcccagtgtctatgccactctggccatccactaa

SEQ ID NO: 148700 - DNA, 1204 bp, Homo sapiens
  Payload ID: 9419
  Gene Symbol: LILRB4
  Gene Name: leukocyte immunoglobulin-like receptor, subfamily B (with TM and ITIM domains), member 4
  ENST ID: ENST00000621149
  CDS Start-End: 8-1204
agacgccatgatccccaccttcacggctctgctctgcctcgggctgagtctgggccccaggacccacatgcaggcagggcccctccccaaacccaccctctgggctgagccaggctctgtgatcagctgggggaactctgtgaccatctggtgtcaggggaccctggaggctcgggagtaccgtctggataaagaggaaagcccagcaccctgggacagacagaacccactggagcccaagaacaaggccagattctccatcccatccatgacagaggactatgcagggagataccgctgttactatcgcagccctgtaggctggtcacagcccagtgaccccctggagctggtgatgacaggagcctacagtaaacccaccctttcagccctgccgagtcctcttgtgacctcaggaaagagcgtgaccctgctgtgtcagtcacggagcccaatggacactttccttctgatcaaggagcgggcagcccatcccctactgcatctgagatcagagcacggagctcagcagcaccaggctgaattccccatgagtcctgtgacctcagtgcacggggggacctacaggtgcttcagctcacacggcttctcccactacctgctgtcacaccccagtgaccccctggagctcatagtctcaggatccttggaggatcccaggccctcacccacaaggtccgtctcaacagctggccctgaggaccagcccctcatgcctacagggtcagtcccccacagtggtctgagaaggcactgggaggtactgatcggggtcttggtggtctccatcctgcttctctccctcctcctcttcctcctcctccaacactggcgtcagggaaaacacaggacattggcccagagacaggctgatttccaacgtcctccaggggctgccgagccagagcccaaggacgggggcctacagaggaggtccagcccagctgctgacgtccagggagaaaacttctgtgctgccgtgaagaacacacagcctgaggacggggtggaaatggacactcggcagagcccacacgatgaagacccccaggcagtgacgtatgccaaggtgaaacactccagacctaggagagaaatggcctctcctccctccccactgtctggggaattcctggacacaaaggacagacaggcagaagaggacagacagatggacactgag

SEQ ID NO: 148701 - DNA, 1742 bp, Homo sapiens
  Payload ID: 9419
  Gene Symbol: LILRB4
  Gene Name: leukocyte immunoglobulin-like receptor, subfamily B (with TM and ITIM domains), member 4
  Uniprot ID: Q8NHJ6
  ENST ID: ENST00000614699
  CDS Start-End: 15-1364
tgggaggagacgccatgatccccaccttcacggctctgctctgcctcgggctgagtctgggccccaggacccacatgcaggcagggcccctccccaaacccaccctctgggctgagccaggctctgtgatcagctgggggaactctgtgaccatctggtgtcaggggaccctggaggctcgggagtaccgtctggataaagaggaaagcccagcaccctgggacagacagaacccactggagcccaagaacaaggccagattctccatcccatccatgacagaggactatgcagggagataccgctgttactatcgcagccctgtaggctggtcacagcccagtgaccccctggagctggtgatgacaggagcctacagtaaacccaccctttcagccctgccgagtcctcttgtgacctcaggaaagagcgtgaccctgctgtgtcagtcacggagcccaatggacactttccttctgatcaaggagcgggcagcccatcccctactgcatctgagatcagagcacggagctcagcagcaccaggctgaattccccatgagtcctgtgacctcagtgcacggggggacctacaggtgcttcagctcacacggcttctcccactacctgctgtcacaccccagtgaccccctggagctcatagtctcaggatccttggaggatcccaggccctcacccacaaggtccgtctcaacagctgcaggccctgaggaccagcccctcatgcctacagggtcagtcccccacagtggtctgagaaggcactgggaggtactgatcggggtcttggtggtctccatcctgcttctctccctcctcctcttcctcctcctccaacactggcgtcagggaaaacacaggacattggcccagagacaggctgatttccaacgtcctccaggggctgccgagccagagcccaaggacgggggcctacagaggaggtccagcccagctgctgacgtccagggagaaaacttctcaggtgctgccgtgaagaacacacagcctgaggacggggtggaaatggacactcggcagagcccacacgatgaagacccccaggcagtgacgtatgccaaggtgaaacactccagacctaggagagaaatggcctctcctccctccccactgtctggggaattcctggacacaaaggacagacaggcagaagaggacagacagatggacactgaggctgctgcatctgaagccccccaggatgtgacctacgcccagctgcacagctttaccctcagacagaaggcaactgagcctcctccatcccaggaaggggcctctccagctgagcccagtgtctatgccactctggccatccactaatccaggggggacccagaccccacaagccatggagactcaggaccccagaaggcatggaagctgcctccagtagacatcactgaaccccagccagcccagacccctgacacagaccactagaagattccgggaacgttgggagtcacctgattctgcaaagataaataatatccctgcattatcaaaataaagtagcagacctctcaattcacaatgagttaactgataaaacaaaacagaagtcagacaatgttttaaattgaatgatcatgtaaatattacacatcaaaccaatgacatgggaaaatgggagcttctaatgaggacaaacaaaaaatagagaaaaattaataaagtcaaaatgtttattcttgaaaa

SEQ ID NO: 148702 - DNA, 1588 bp, Homo sapiens
  Payload ID: 9419
  Gene Symbol: LILRB4
  Gene Name: leukocyte immunoglobulin-like receptor, subfamily B (with TM and ITIM domains), member 4
  ENST ID: ENST00000621985
  CDS Start-End: 40-1383
catccatctgcacagctggggcccctgggaggagacgccatgatccccaccttcacggctctgctctgcctcgggctgagtctgggccccaggacccacatgcaggcagggcccctccccaaacccaccctctgggctgagccaggctctgtgatcagctgggggaactctgtgaccatctggtgtcaggggaccctggaggctcgggagtaccgtctggataaagaggaaagcccagcaccctgggacagacagaacccactggagcccaagaacaaggccagattctccatcccatccatgacagaggactatgcagggagataccgctgttactatcgcagccctgtaggctggtcacagcccagtgaccccctggagctggtgatgacaggagcctacagtaaacccaccctttcagccctgccgagtcctcttgtgacctcaggaaagagcgtgaccctgctgtgtcagtcacggagcccaatggacactttccttctgatcaaggagcgggcagcccatcccctactgcatctgagatcagagcacggagctcagcagcaccaggctgaattccccatgagtcctgtgacctcagtgcacggggggacctacaggtgcttcagctcacacggcttctcccactacctgctgtcacaccccagtgaccccctggagctcatagtctcaggatccttggagggtcccaggccctcacccacaaggtccgtctcaacagctgcaggccctgaggaccagcccctcatgcctacagggtcagtcccccacagtggtctgagaaggcactgggaggtactgatcggggtcttggtggtctccatcctgcttctctccctcctcctcttcctcctcctccaacactggcgtcagggaaaacacaggacattggcccagagacaggctgatttccaacgtcctccaggggctgccgagccagagcccaaggacgggggcctacagaggaggtccagcccagctgctgacgtccagggagaaaacttctgtgctgccgtgaaggacacacagcctgaggacggggtggaaatggacactcggagcccacacgatgaagacccccaggcagtgacgtatgccaaggtgaaacactccagacctaggagagaaatggcctctcctccctccccactgtctggggaattcctggacacaaaggacagacaggcagaagaggacagacagatggacactgaggctgctgcatctgaagccccccaggatgtgacctacgcccagctgcacagctttaccctcagacagaaggcaactgagcctcctccatcccaggaaggggcctctccagctgagcccagtgtctatgccactctggccatccactaatccaggggggacccagaccccacaagccatggagactcaggaccccagaaggcatggaagctgcctccagtagacatcactgaaccccagccagcccagacccctgacacagaccactagaagattccgggaacgttgggagtcacctgattctgcaaagataaataatatccctgcattatcaaaataaagtagcagacctctc

SEQ ID NO: 148703 - DNA, 1811 bp, Homo sapiens
  Payload ID: 9419
  Gene Symbol: LILRB4
  Gene Name: leukocyte immunoglobulin-like receptor, subfamily B (with TM and ITIM domains), member 4
  ENST ID: ENST00000620735
  CDS Start-End: 80-1426
acaccctgtgtgtctctttgtcctgccggcactgaggactcatccatctgcacagctggggcccctgggaggagacgccatgatccccaccttcacggctctgctctgcctcgggctgagtctgggccccaggacccacatgcaggcagggcccctccccaaacccaccctctgggctgagccaggctctgtgatcagctgggggaactctgtgaccatctggtgtcaggggaccctggaggctcgggagtaccgtctggataaagaggaaagcccagcaccctgggacagacagaacccactggagcccaagaacaaggccagattctccatcccatccatgacagaggactatgcagggagataccgctgttactatcgcagccctgtaggctggtcacagcccagtgaccccctggagctggtgatgacaggagcctacagtaaacccaccctttcagccctgccgagtcctcttgtgacctcaggaaagagcgtgaccctgctgtgtcagtcacggagcccaatggacactttccttctgatcaaggagcgggcagcccatcccctactgcatctgagatcagagcacggagctcagcagcaccaggctgaattccccatgagtcctgtgacctcagtgcacggggggacctacaggtgcttcagctcacacggcttctcccactacctgctgtcacaccccagtgaccccctggagctcatagtctcaggatccttggagggtcccaggccctcacccacaaggtccgtctcaacagctgcaggccctgaggaccagcccctcatgcctacagggtcagtcccccacagtggtctgagaaggcactgggaggtactgatcggggtcttggtggtctccatcctgcttctctccctcctcctcttcctcctcctccaacactggcgtcagggaaaacacaggacattggcccagagacaggctgatttccaacgtcctccaggggctgccgagccagagcccaaggacgggggcctacagaggaggtccagcccagctgctgacgtccagggagaaaacttctcaggtgctgccgtgaaggacacacagcctgaggacggggtggaaatggacactcggagcccacacgatgaagacccccaggcagtgacgtatgccaaggtgaaacactccagacctaggagagaaatggcctctcctccctccccactgtctggggaattcctggacacaaaggacagacaggcagaagaggacagacagatggacactgaggctgctgcatctgaagccccccaggatgtgacctacgcccagctgcacagctttaccctcagacagaaggcaactgagcctcctccatcccaggaaggggcctctccagctgagcccagtgtctatgccactctggccatccactaatccaggggggacccagaccccacaagccatggagactcaggaccccagaaggcatggaagctgcctccagtagacatcactgaaccccagccagcccagacccctgacacagaccactagaagattccgggaacgttgggagtcacctgattctgcaaagataaataatatccctgcattatcaaaataaagtagcagacctctcaattcacaatgagttaactgataaaacaaaacagaagtcagacaatgttttaaattgaatgatcatgtaaatattacacatcaaaccaatgacatgggaaaatgggagcttctaatgaggacaaacaaaaaatagagaaaaattaataaagtcaaaatgtttattcttgaaaacattaat

SEQ ID NO: 148704 - DNA, 1540 bp, Homo sapiens
  Payload ID: 9419
  Gene Symbol: LILRB4
  Gene Name: leukocyte immunoglobulin-like receptor, subfamily B (with TM and ITIM domains), member 4
  ENST ID: ENST00000622693
  CDS Start-End: 15-1364
tgggaggagacgccatgatccccaccttcacggctctgctctgcctcgggctgagtctgggccccaggacccacatgcaggcagggcccctccccaaacccaccctctgggctgagccaggctctgtgatcagctgggggaactctgtgaccatctggtgtcaggggaccctggaggctcgggagtaccgtctggataaagaggaaagcccagcaccctgggacagacagaacccactggagcccaagaacaaggccagattctccatcccatccatgacagaggactatgcagggagataccgctgttactatcgcagccctgtaggctggtcacagcccagtgaccccctggagctggtgatgacaggagcctacagtaaacccaccctttcagccctgccgagtcctcttgtgacctcaggaaagagcgtgaccctgctgtgtcagtcacggagcccaatggacactttccttctgatcaaggagcgggcagcccatcccctactgcatctgagatcagagcacggagctcagcagcaccaggctgaattccccatgagtcctgtgacctcagtgcacggggggacctacaggtgcttcagctcacacggcttctcccactacctgctgtcacaccccagtgaccccctggagctcatagtctcaggatccttggagggtcccaggccctcacccacaaggtccgtctcaacagctgcaggccctgaggaccagcccctcatgcctacagggtcagtcccccacagtggtctgagaaggcactgggaggtactgatcggggtcttggtggtctccatcctgcttctctccctcctcctcttcctcctcctccaacactggcgtcagggaaaacacaggacattggcccagagacaggctgatttccaacgtcctccaggggctgccgagccagagcccaaggacgggggcctacagaggaggtccagcccagctgctgacgtccagggagaaaacttctcaggtgctgccgtgaaggacacacagcctgaggacggggtggaaatggacactcggcagagcccacacgatgaagacccccaggcagtgacgtatgccaaggtgaaacactccagacctaggagagaaatggcctctcctccctccccactgtctggggaattcctggacacaaaggacagacaggcagaagaggacagacagatggacactgaggctgctgcatctgaagccccccaggatgtgacctacgcccggctgcacagctttaccctcagacagaaggcaactgagcctcctccatcccaggaaggggcctctccagctgagcccagtgtctatgccactctggccatccactaatccaggggggacccagaccccacaagccatggagactcaggaccccagaaggcatggaagctgcctccagtagacatcactgaaccccagccagcccagacccctgacacagaccactagaagattccgggaacgttgggagtcacctgattctgcaaagataaataatatccctg

SEQ ID NO: 148705 - DNA, 3718 bp, Homo sapiens
  Payload ID: 9419
  Gene Symbol: LILRB4
  Gene Name: leukocyte immunoglobulin-like receptor, subfamily B (with TM and ITIM domains), member 4
  ENST ID: ENST00000613131
  CDS Start-End: 35-1381
atctgcacagctggggcccctgggaggagacgccatgatccccaccttcacggctctgctctgcctcgggctgagtctgggccccaggacccacatgcaggcagggcccctccccaaacccaccctctgggctgagccaggctctgtgatcagctgggggaactctgtgaccatctggtgtcaggggaccctggaggctcgggagtaccgtctggataaagaggaaagcccagcaccctgggacagacagaacccactggagcccaagaacaaggccagattctccatcccatccatgacagaggactatgcagggagataccgctgttactatcgcagccctgtaggctggtcacagcccagtgaccccctggagctggtgatgacaggagcctacagtaaacccaccctttcagccctgccgagtcctcttgtgacctcaggaaagagcgtgaccctgctgtgtcagtcacggagcccaatggacactttccttctgatcaaggagcgggcagcccatcccctactgcatctgagatcagagcacggagctcagcagcaccaggctgaattccccatgagtcctgtgacctcagtgcacggggggacctacaggtgcttcagctcacacggcttctcccactacctgctgtcacaccccagtgaccccctggagctcatagtctcaggatccttggagggtcccaggccctcacccacaaggtccgtctcaacagctgcaggccctgaggaccagcccctcatgcctacagggtcagtcccccacagtggtctgagaaggcactgggaggtactgatcggggtcttggtggtctccatcctgcttctctccctcctcctcttcctcctcctccaacactggcgtcagggaaaacacaggacattggcccagagacaggctgatttccaacgtcctccaggggctgccgagccagagcccaaggacgggggcctacagaggaggtccagcccagctgctgacgtccagggagaaaacttctgtgctgccgtgaaggacacacagcctgaggacggggtggaaatggacactcggcagagcccacacgatgaagacccccaggcagtgacgtatgccaaggtgaaacactccagacctaggagagaaatggcctctcctccctccccactgtctggggaattcctggacacaaaggacagacaggcagaagaggacagacagatggacactgaggctgctgcatctgaagccccccaggatgtgacctacgcccagctgcacagctttaccctcagacagaaggcaactgagcctcctccatcccaggaaggggcctctccagctgagcccagtgtctatgccactctggccatccactaatccaggggggacccagaccccacaagccatggagactcaggaccccagaaggcatggaagctgcctccagtagacatcactgaaccccagccagcccagacccctgacacagaccactagaagattccgggaacgttgggagtcacctgattctgcaaagataaataatatccctgcattatcaaaataaagtagcagacctctcaattcacaatgagttaactgataaaacaaaacagaagtcagacaatgttttaaattgaatgatcatgtaaatattacacatcaaaccaatgacatgggaaaatgggagcttctaatgaggacaaacaaaaaatagagaaaaattaataaagtcaaaatgtttattcttgaaaacattaatgatacatgaatcttggccacaatgagaaaaataaaaatgaaaaaagagcaggcatccatttccatacaggaacaaaataggaggcagcactacagaccctacacacagctttacagaggtgaaagaaaactgtcagcaattctatgctgacataacagaaaatgtagatgagatagatgaaatacgaaaaattacagtttacttaatgaacataaggataaatagaaaaactgaatcatcatacataaacatatataaaatgcattgatcctgtaatcaaaaatgttcccacaaagtaaatgccacttcagcaaggtttgttggtggttttttcaaactcttatgcactcatgaaacacacagacacacacacacacaaacttgcataaattttccctgagaatattttgtatatatttacacaaatacatttgatcagactaggaacaagttgataccaaaacctgaaaaggaaactacagaatgggaaagtcatagaagatctctcacagaaatataaatcccttaacaaatattaacaagtaagattcatgtctctataaaatagacagtatatcatgaccacactggttttttgttatcctttgattttgtttatgaaaagcaaggatagcttaattttcaaaaactcaatcaatgtaattcagtattttaacaaaaggaatgaaaaattatcatctcaatagacaaagcttttgtctgagcaccttttcatatagctgctgaccatttgtatgtcttcttttgagaaatgcctgttcagctactttgcccatgtttcaagtagtttttggtttcttgctgttgctttgttttagttccttacatatttttgcatattaaccctttatcaggtatacagcttgcaactattttctcccatttctgagttgtctcttcattctgtttgcagaagctgtttagaagccacaccttttgtctatttttgcttttgttgcttgtgttttcagggccatatccaaaaaaaccttgcccggaccaacgtcttgaagcttttctcccacccatttttgtatatgggataagggttcaatttcattcttcttcatatgaatatccccaggatgtgtcctatgcccagctgcacagcttaccctcaaacagaaaataatgaagccttcttcctcccaggaaaggggacgttcagctgagccgagtgtgtatactgctctggccatccactagcccagggaggacccagacctccacactccatggagactcagttctcctaggaccatttattcaaaaggactgccctctcttgttcttggaaactttgttgaggatcaattcaccataaatatgtgtgtttccttctttgctttcatccctgttgcactgatcactgtacctgtttctattccagttccatgatgtcttcctggctgtagctttgtaggatatttggggattccatagtgtgatatccccttcttccctttgctcaagattgttttggctatttggggtccttttgtagtcccattcaaattttaggattgtttttctatttctgtggaaaacgaccttggaattttgttaggaattgcattgagtctgcaggtatgaacttttttttaaagttccagggcacatgtacaggacctgcagctttgttacataggtaggcttgtgccatggtggtttgctgcacctatcaacccattacctagttattaagcccagcatgcattagctctttttcctgatgctctccctcccttcatcatccgccctcccactacaagccccagtgtgtgttgttcccctccctgtgtccatgtgttctcattgttatacgaacattttaacaatgttaattcttgcagaccatgaacataagctaccttcccatttatatgcgtcttgttcaatttcattcatcaatgttataaagattttagtgc

SEQ ID NO: 148706 - DNA, 3902 bp, Homo sapiens
  Payload ID: 9419
  Gene Symbol: LILRB4
  Gene Name: leukocyte immunoglobulin-like receptor, subfamily B (with TM and ITIM domains), member 4
  Uniprot ID: Q8NHJ6
  ENST ID: ENST00000612454
  CDS Start-End: 216-1562
agaacctggtgcctgcctcagccctagctctggggaaatgaaagccaggctggggttcaaatgagggcagtttcccttcctgtgggctgctgatggaacaaccccatgacgagaaggacccagcctccaagcggccacaccctgtgtgtctctttgtcctgccggcactgaggactcatccatctgcacagctggggcccctgggaggagacgccatgatccccaccttcacggctctgctctgcctcgggctgagtctgggccccaggacccacatgcaggcagggcccctccccaaacccaccctctgggctgagccaggctctgtgatcagctgggggaactctgtgaccatctggtgtcaggggaccctggaggctcgggagtaccgtctggataaagaggaaagcccagcaccctgggacagacagaacccactggagcccaagaacaaggccagattctccatcccatccatgacagaggactatgcagggagataccgctgttactatcgcagccctgtaggctggtcacagcccagtgaccccctggagctggtgatgacaggagcctacagtaaacccaccctttcagccctgccgagtcctcttgtgacctcaggaaagagcgtgaccctgctgtgtcagtcacggagcccaatggacactttccttctgatcaaggagcgggcagcccatcccctactgcatctgagatcagagcacggagctcagcagcaccaggctgaattccccatgagtcctgtgacctcagtgcacggggggacctacaggtgcttcagctcacacggcttctcccactacctgctgtcacaccccagtgaccccctggagctcatagtctcaggatccttggaggatcccaggccctcacccacaaggtccgtctcaacagctgcaggccctgaggaccagcccctcatgcctacagggtcagtcccccacagtggtctgagaaggcactgggaggtactgatcggggtcttggtggtctccatcctgcttctctccctcctcctcttcctcctcctccaacactggcgtcagggaaaacacaggacattggcccagagacaggctgatttccaacgtcctccaggggctgccgagccagagcccaaggacgggggcctacagaggaggtccagcccagctgctgacgtccagggagaaaacttctgtgctgccgtgaagaacacacagcctgaggacggggtggaaatggacactcggcagagcccacacgatgaagacccccaggcagtgacgtatgccaaggtgaaacactccagacctaggagagaaatggcctctcctccctccccactgtctggggaattcctggacacaaaggacagacaggcagaagaggacagacagatggacactgaggctgctgcatctgaagccccccaggatgtgacctacgcccagctgcacagctttaccctcagacagaaggcaactgagcctcctccatcccaggaaggggcctctccagctgagcccagtgtctatgccactctggccatccactaatccaggggggacccagaccccacaagccatggagactcaggaccccagaaggcatggaagctgcctccagtagacatcactgaaccccagccagcccagacccctgacacagaccactagaagattccgggaacgttgggagtcacctgattctgcaaagataaataatatccctgcattatcaaaataaagtagcagacctctcaattcacaatgagttaactgataaaacaaaacagaagtcagacaatgttttaaattgaatgatcatgtaaatattacacatcaaaccaatgacatgggaaaatgggagcttctaatgaggacaaacaaaaaatagagaaaaattaataaagtcaaaatgtttattcttgaaaacattaatgatacatgaatcttggccacaatgagaaaaataaaaatgaaaaaagagcaggcatccatttccatacaggaacaaaataggaggcagcactacagaccctacacacagctttacagaggtgaaagaaaactgtcagcaattctatgctgacataacagaaaatgtagatgagatagatgaaatacgaaaaattacagtttacttaatgaacataaggataaatagaaaaactgaatcatcatacataaacatatataaaatgcattgatcctgtaatcaaaaatgttcccacaaagtaaatgccacttcagcaaggtttgttggtggttttttcaaactcttatgcactcatgaaacacacagacacacacacacacaaacttgcataaattttccctgagaatattttgtatatatttacacaaatacatttgatcagactaggaacaagttgataccaaaacctgaaaaggaaactacagaatgggaaagtcatagaagatctctcacagaaatataaatcccttaacaaatattaacaagtaagattcatgtctctataaaatagacagtatatcatgaccacactggttttttgttatcctttgattttgtttatgaaaagcaaggatagcttaattttcaaaaactcaatcaatgtaattcagtattttaacaaaaggaatgaaaaattatcatctcaatagacaaagcttttgtctgagcaccttttcatatagctgctgaccatttgtatgtcttcttttgagaaatgcctgttcagctactttgcccatgtttcaagtagtttttggtttcttgctgttgctttgttttagttccttacatatttttgcatattaaccctttatcaggtatacagcttgcaactattttctcccatttctgagttgtctcttcattctgtttgcagaagctgtttagaagccacaccttttgtctatttttgcttttgttgcttgtgttttcagggccatatccaaaaaaaccttgcccggaccaacgtcttgaagcttttctcccacccatttttgtatatgggataagggttcaatttcattcttcttcatatgaatatccccaggatgtgtcctatgcccagctgcacagcttaccctcaaacagaaaataatgaagccttcttcctcccaggaaaggggacgttcagctgagccgagtgtgtatactgctctggccatccactagcccagggaggacccagacctccacactccatggagactcagttctcctaggaccatttattcaaaaggactgccctctcttgttcttggaaactttgttgaggatcaattcaccataaatatgtgtgtttccttctttgctttcatccctgttgcactgatcactgtacctgtttctattccagttccatgatgtcttcctggctgtagctttgtaggatatttggggattccatagtgtgatatccccttcttccctttgctcaagattgttttggctatttggggtccttttgtagtcccattcaaattttaggattgtttttctatttctgtggaaaacgaccttggaattttgttaggaattgcattgagtctgcaggtatgaacttttttttaaagttccagggcacatgtacaggacctgcagctttgttacataggtaggcttgtgccatggtggtttgctgcacctatcaacccattacctagttattaagcccagcatgcattagctctttttcctgatgctctccctcccttcatcatccgccctcccactacaagccccagtgtgtgttgttcccctccctgtgtccatgtgttctcattgttatacgaacattttaacaatgttaattcttgcagaccatgaacataagctaccttcccatttatatgcgtcttgttcaatttcattcatcaatgttataaagattttagtgcaga

SEQ ID NO: 148707 - DNA, 1202 bp, Homo sapiens
  Payload ID: 9419
  Gene Symbol: LILRB4
  Gene Name: leukocyte immunoglobulin-like receptor, subfamily B (with TM and ITIM domains), member 4
  ENST ID: ENST00000611165
  CDS Start-End: 361-1202
agaacctggtgcctgcctcagccctagctctggggaaatgaaagccaggctggggttcaaatgagggcagtttcccttcctgtgggctgctgatggaacaaccccatgacgagaaggacccagcctccaagcggccacaccctgtgtgtctctttgtcctgccggcactgaggactcatccatctgcacagctggggcccctgggaggagacgccatgatccccaccttcacggctctgctctgcctcggggaccctggaggctcgggagtaccgtctggataaagaggaaagcccagcaccctgggacagacagaacccactggagcccaagaacaaggccagattctccatcccatccatgacagaggactatgcagggagataccgctgttactatcgcagccctgtaggctggtcacagcccagtgaccccctggagctggtgatgacaggagcctacagtaaacccaccctttcagccctgccgagtcctcttgtgacctcaggaaagagcgtgaccctgctgtgtcagtcacggagcccaatggacactttccttctgatcaaggagcgggcagcccatcccctactgcatctgagatcagagcacggagctcagcagcaccaggctgaattccccatgagtcctgtgacctcagtgcacggggggacctacaggtgcttcagctcacacggcttctcccactacctgctgtcacaccccagtgaccccctggagctcatagtctcaggatccttggaggatcccaggccctcacccacaaggtccgtctcaacagctgcaggccctgaggaccagcccctcatgcctacagggtcagtcccccacagtggtctgagaaggcactgggaggtactgatcggggtcttggtggtctccatcctgcttctctccctcctcctcttcctcctcctccaacactggcgtcagggaaaacacaggacattggcccagagacaggctgatttccaacgtcctccaggggctgccgagccagagcccaaggacgggggcctacagaggaggtccagcccagctgctgacgtccagggagaaaacttctgtgctgccgtgaagaacacacagcctgaggacggggtggaaatggacactcggagcccacacgatgaagacccccaggcagtgacgtatgccaaggtgaaacactccagacctag

SEQ ID NO: 148708 - DNA, 1811 bp, Homo sapiens
  Payload ID: 9419
  Gene Symbol: LILRB4
  Gene Name: leukocyte immunoglobulin-like receptor, subfamily B (with TM and ITIM domains), member 4
  ENST ID: ENST00000618480
  CDS Start-End: 80-1426
acaccctgtgtgtctctttgtcctgccggcactgaggactcatccatctgcacagctggggcccctgggaggagacgccatgatccccaccttcacggctctgctctgcctcgggctgagtctgggccccaggacccacatgcaggcagggcccctccccaaacccaccctctgggctgagccaggctctgtgatcagctgggggaactctgtgaccatctggtgtcaggggaccctggaggctcgggagtaccgtctggataaagaggaaagcccagcaccctgggacagacagaacccactggagcccaagaacaaggccagattctccatcccatccatgacagaggactatgcagggagataccgctgttactatcgcagccctgtaggctggtcacagcccagtgaccccctggagctggtgatgacaggagcctacagtaaacccaccctttcagccctgccgagtcctcttgtgacctcaggaaagagcgtgaccctgctgtgtcagtcacggagcccaatggacactttccttctgatcaaggagcgggcagcccatcccctactgcatctgagatcagagcacggagctcagcagcaccaggctgaattccccatgagtcctgtgacctcagtgcacggggggacctacaggtgcttcagctcacacggcttctcccactacctgctgtcacaccccagtgaccccctggagctcatagtctcaggatccttggagggtcccaggccctcacccacaaggtccgtctcaacagctgcaggccctgaggaccagcccctcatgcctacagggtcagtcccccacagtggtctgagaaggcactgggaggtactgatcggggtcttggtggtctccatcctgcttctctccctcctcctcttcctcctcctccaacactggcgtcagggaaaacacaggacattggcccagagacaggctgatttccaacgtcctccaggggctgccgagccagagcccaaggacgggggcctacagaggaggtccagcccagctgctgacgtccagggagaaaacttctcaggtgctgccgtgaaggacacacagcctgaggacggggtggaaatggacactcggagcccacacgatgaagacccccaggcagtgacgtatgccaaggtgaaacactccagacctaggagagaaatggcctctcctccctccccactgtctggggaattcctggacacaaaggacagacaggcagaagaggacagacagatggacactgaggctgctgcatctgaagccccccaggatgtgacctacgcccggctgcacagctttaccctcagacagaaggcaactgagcctcctccatcccaggaaggggcctctccagctgagcccagtgtctatgccactctggccatccactaatccaggggggacccagaccccacaagccatggagactcaggaccccagaaggcatggaagctgcctccagtagacatcactgaaccccagccagcccagacccctgacacagaccactagaagattccgggaacgttgggagtcacctgattctgcaaagataaataatatccctgcattatcaaaataaagtagcagacctctcaattcacaatgagttaactgataaaacaaaacagaagtcagacaatgttttaaattgaatgatcatgtaaatattacacatcaaaccaatgacatgggaaaatgggagcttctaatgaggacaaacaaaaaatagagaaaaattaataaagtcaaaatgtttattcttgaaaacattaat

SEQ ID NO: 148709 - DNA, 3869 bp, Homo sapiens
  Payload ID: 9419
  Gene Symbol: LILRB4
  Gene Name: leukocyte immunoglobulin-like receptor, subfamily B (with TM and ITIM domains), member 4
  ENST ID: ENST00000619525
  CDS Start-End: 93-1529
agaacctggtgcctgcctcagccctagctctggggaaatgaaagccaggctggggttcaaatgagggcagtttcccttcctgtgggctgctgatggaacaaccccatgacgagaaggacccagcctccaagcggccacaccctgtgtgtctctttgtcctgccggcactgaggactcatccatctgcacagctggggcccctgggaggagacgccatgatccccaccttcacggctctgctctgcctcgggcccctccccaaacccaccctctgggctgagccaggctctgtgatcagctgggggaactctgtgaccatctggtgtcaggggaccctggaggctcgggagtaccgtctggataaagaggaaagcccagcaccctgggacagacagaacccactggagcccaagaacaaggccagattctccatcccatccatgacagaggactatgcagggagataccgctgttactatcgcagccctgtaggctggtcacagcccagtgaccccctggagctggtgatgacaggagcctacagtaaacccaccctttcagccctgccgagtcctcttgtgacctcaggaaagagcgtgaccctgctgtgtcagtcacggagcccaatggacactttccttctgatcaaggagcgggcagcccatcccctactgcatctgagatcagagcacggagctcagcagcaccaggctgaattccccatgagtcctgtgacctcagtgcacggggggacctacaggtgcttcagctcacacggcttctcccactacctgctgtcacaccccagtgaccccctggagctcatagtctcaggatccttggaggatcccaggccctcacccacaaggtccgtctcaacagctgcaggccctgaggaccagcccctcatgcctacagggtcagtcccccacagtggtctgagaaggcactgggaggtactgatcggggtcttggtggtctccatcctgcttctctccctcctcctcttcctcctcctccaacactggcgtcagggaaaacacaggacattggcccagagacaggctgatttccaacgtcctccaggggctgccgagccagagcccaaggacgggggcctacagaggaggtccagcccagctgctgacgtccagggagaaaacttctcaggtgctgccgtgaagaacacacagcctgaggacggggtggaaatggacactcggcagagcccacacgatgaagacccccaggcagtgacgtatgccaaggtgaaacactccagacctaggagagaaatggcctctcctccctccccactgtctggggaattcctggacacaaaggacagacaggcagaagaggacagacagatggacactgaggctgctgcatctgaagccccccaggatgtgacctacgcccagctgcacagctttaccctcagacagaaggcaactgagcctcctccatcccaggaaggggcctctccagctgagcccagtgtctatgccactctggccatccactaatccaggggggacccagaccccacaagccatggagactcaggaccccagaaggcatggaagctgcctccagtagacatcactgaaccccagccagcccagacccctgacacagaccactagaagattccgggaacgttgggagtcacctgattctgcaaagataaataatatccctgcattatcaaaataaagtagcagacctctcaattcacaatgagttaactgataaaacaaaacagaagtcagacaatgttttaaattgaatgatcatgtaaatattacacatcaaaccaatgacatgggaaaatgggagcttctaatgaggacaaacaaaaaatagagaaaaattaataaagtcaaaatgtttattcttgaaaacattaatgatacatgaatcttggccacaatgagaaaaataaaaatgaaaaaagagcaggcatccatttccatacaggaacaaaataggaggcagcactacagaccctacacacagctttacagaggtgaaagaaaactgtcagcaattctatgctgacataacagaaaatgtagatgagatagatgaaatacgaaaaattacagtttacttaatgaacataaggataaatagaaaaactgaatcatcatacataaacatatataaaatgcattgatcctgtaatcaaaaatgttcccacaaagtaaatgccacttcagcaaggtttgttggtggttttttcaaactcttatgcactcatgaaacacacagacacacacacacacaaacttgcataaattttccctgagaatattttgtatatatttacacaaatacatttgatcagactaggaacaagttgataccaaaacctgaaaaggaaactacagaatgggaaagtcatagaagatctctcacagaaatataaatcccttaacaaatattaacaagtaagattcatgtctctataaaatagacagtatatcatgaccacactggttttttgttatcctttgattttgtttatgaaaagcaaggatagcttaattttcaaaaactcaatcaatgtaattcagtattttaacaaaaggaatgaaaaattatcatctcaatagacaaagcttttgtctgagcaccttttcatatagctgctgaccatttgtatgtcttcttttgagaaatgcctgttcagctactttgcccatgtttcaagtagtttttggtttcttgctgttgctttgttttagttccttacatatttttgcatattaaccctttatcaggtatacagcttgcaactattttctcccatttctgagttgtctcttcattctgtttgcagaagctgtttagaagccacaccttttgtctatttttgcttttgttgcttgtgttttcagggccatatccaaaaaaaccttgcccggaccaacgtcttgaagcttttctcccacccatttttgtatatgggataagggttcaatttcattcttcttcatatgaatatccccaggatgtgtcctatgcccagctgcacagcttaccctcaaacagaaaataatgaagccttcttcctcccaggaaaggggacgttcagctgagccgagtgtgtatactgctctggccatccactagcccagggaggacccagacctccacactccatggagactcagttctcctaggaccatttattcaaaaggactgccctctcttgttcttggaaactttgttgaggatcaattcaccataaatatgtgtgtttccttctttgctttcatccctgttgcactgatcactgtacctgtttctattccagttccatgatgtcttcctggctgtagctttgtaggatatttggggattccatagtgtgatatccccttcttccctttgctcaagattgttttggctatttggggtccttttgtagtcccattcaaattttaggattgtttttctatttctgtggaaaacgaccttggaattttgttaggaattgcattgagtctgcaggtatgaacttttttttaaagttccagggcacatgtacaggacctgcagctttgttacataggtaggcttgtgccatggtggtttgctgcacctatcaacccattacctagttattaagcccagcatgcattagctctttttcctgatgctctccctcccttcatcatccgccctcccactacaagccccagtgtgtgttgttcccctccctgtgtccatgtgttctcattgttatacgaacattttaacaatgttaattcttgcagaccatgaacataagctaccttcccatttatatgcgtcttgttcaatttcattcatcaatgttataaagattttagtgcaga

SEQ ID NO: 148710 - DNA, 1761 bp, Homo sapiens
  Payload ID: 9419
  Gene Symbol: LILRB4
  Gene Name: leukocyte immunoglobulin-like receptor, subfamily B (with TM and ITIM domains), member 4
  Uniprot ID: Q8NHJ6
  ENST ID: ENST00000621693
  CDS Start-End: 40-1383
catccatctgcacagctggggcccctgggaggagacgccatgatccccaccttcacggctctgctctgcctcgggctgagtctgggccccaggacccacatgcaggcagggcccctccccaaacccaccctctgggctgagccaggctctgtgatcagctgggggaactctgtgaccatctggtgtcaggggaccctggaggctcgggagtaccgtctggataaagaggaaagcccagcaccctgggacagacagaacccactggagcccaagaacaaggccagattctccatcccatccatgacagaggactatgcagggagataccgctgttactatcgcagccctgtaggctggtcacagcccagtgaccccctggagctggtgatgacaggagcctacagtaaacccaccctttcagccctgccgagtcctcttgtgacctcaggaaagagcgtgaccctgctgtgtcagtcacggagcccaatggacactttccttctgatcaaggagcgggcagcccatcccctactgcatctgagatcagagcacggagctcagcagcaccaggctgaattccccatgagtcctgtgacctcagtgcacggggggacctacaggtgcttcagctcacacggcttctcccactacctgctgtcacaccccagtgaccccctggagctcatagtctcaggatccttggaggatcccaggccctcacccacaaggtccgtctcaacagctgcaggccctgaggaccagcccctcatgcctacagggtcagtcccccacagtggtctgagaaggcactgggaggtactgatcggggtcttggtggtctccatcctgcttctctccctcctcctcttcctcctcctccaacactggcgtcagggaaaacacaggacattggcccagagacaggctgatttccaacgtcctccaggggctgccgagccagagcccaaggacgggggcctacagaggaggtccagcccagctgctgacgtccagggagaaaacttctgtgctgccgtgaagaacacacagcctgaggacggggtggaaatggacactcggagcccacacgatgaagacccccaggcagtgacgtatgccaaggtgaaacactccagacctaggagagaaatggcctctcctccctccccactgtctggggaattcctggacacaaaggacagacaggcagaagaggacagacagatggacactgaggctgctgcatctgaagccccccaggatgtgacctacgcccagctgcacagctttaccctcagacagaaggcaactgagcctcctccatcccaggaaggggcctctccagctgagcccagtgtctatgccactctggccatccactaatccaggggggacccagaccccacaagccatggagactcaggaccccagaaggcatggaagctgcctccagtagacatcactgaaccccagccagcccagacccctgacacagaccactagaagattccgggaacgttgggagtcacctgattctgcaaagataaataatatccctgcattatcaaaataaagtagcagacctctcaattcacaatgagttaactgataaaacaaaacagaagtcagacaatgttttaaattgaatgatcatgtaaatattacacatcaaaccaatgacatgggaaaatgggagcttctaatgaggacaaacaaaaaatagagaaaaattaataaagtcaaaatgtttattcttgaaaa

SEQ ID NO: 148711 - DNA, 3098 bp, Homo sapiens
  Payload ID: 9419
  Gene Symbol: LILRB4
  Gene Name: leukocyte immunoglobulin-like receptor, subfamily B (with TM and ITIM domains), member 4
  ENST ID: ENST00000617098
  CDS Start-End: 35-1381
atctgcacagctggggcccctgggaggagacgccatgatccccaccctcacggctctgctctgcctcgggctgagtctgggccccaggacccacatgcaggcagggcccctccccaaacccaccctctgggctgagccaggctctgtgatcagctgggggaactctgtgaccatctggtgtcaggggaccctggaggctcgggagtaccgtctggataaagaggaaagcccagcaccctgggacagacagaacccactggagcccaagaacaaggccagattctccatcccatccatgacagaggactatgcagggagataccgctgttactatcgcagccctgtaggctggtcacagcccagtgaccccctggagctggtgatgacaggagcctacagtaaacccaccctttcagccctgccgagtcctcttgtgacctcaggaaagagcgtgaccctgctgtgtcagtcacggagcccaatggacacttttcttctgatcaaggagcgggcagcccatcccctactgcatctgagatcagagcacggagctcagcagcaccaggctgaattccccatgagtcctgtgacctcagtgcacggggggacctacaggtgcttcagctcacacggcttctcccactacctgctgtcacaccccagtgaccccctggagctcatagtctcaggatccttggagggtcccaggccctcacccacaaggtccgtctcaacagctgcaggccctgaggaccagcccctcatgcctacagggtcagtcccccacagtggtctgagaaggcactgggaggtactgatcggggtcttggtggtctccatcctgcttctctccctcctcctcttcctcctcctccaacactggcgtcagggaaaacacaggacattggcccagagacaggctgatttccaacgtcctccaggggctgccgagccagagcccaaggacgggggcctacagaggaggtccagcccagctgctgacgtccagggagaaaacttctgtgctgccgtgaagaacacacagcctgaggacggggtggaaatggacactcggcagagcccacacgatgaagacccccaggcagtgacgtatgccaaggtgaaacactccagacctaggagagaaatggcctctcctccctccccactgtctggggaattcctggacacaaaggacagacaggcagaagaggacagacagatggacactgaggctgctgcatctgaagccccccaggatgtgacctacgcccggctgcacagctttaccctcagacagaaggcaactgagcctcctccatcccaggaaggggcctctccagctgagcccagtgtctatgccactctggccatccactaatccaggggggacccagaccccacaagccatggagactcaggaccccagaaggcatggaagctgcctccagtagacatcactgaaccccagccagcccagacccctgacacagaccactagaagattccgggaacgttgggagtcacctgattctgcaaagataaataatatccctgcattatcaaaataaagtagcagacctctcaattcacaatgagttaactgataaaacaaaacagaagtcagacaatgttttaaattgaatgatcatgtaaatattacacatcaaaccaatgacatgggaaaatgggagcttctaatgaggacaaacaaaaaatagagaaaaattaataaagtcaaaatgtttattcttgaaaacattaatgatacatgaatcttggccacaatgagaaaaataaaaatgaaaaaagagcaggcatccatttccatacaggaacaaaataggaggcagcactacagaccctacacacagctttacagaggtgaaagaaaactgtcagcaattctatgctgacataacagaaaatgtagatgagatagatgaaatacgaaaaattacagtttacttaatgaacataaggataaatagaaaaactgaatcatcatacataaacatatataaaatgcattgatcctgtaatcaaaaatgttcccacaaagtaaatgccacttcagcaaggtttgttggtggttttttcaaactgttatgcactcatgaaacacacagacacacacacacacaaacttgcataaattttccctgagaatattttgtatatatttacacaaatacatttgatcagactaggaacaagttgataccaaaacctgaaaaggaaactacagaatgggaaagtcatagaagatctctcacagaaatataaatcccttaacaaatattaacaagtaagattcatgtctctataaaatagacagtatatcatgaccacactggttttttgttatcctttgattttgtttatgaaaagcaaggatagcttaattttcaaaaactcaatcaatgtaattcagtattttaacaaaaggaatgaaaaattatcatctcaatagacaaagcttttgtctgagcaccttttcatatagctgctgaccatttgtatgtcttcttttgagaaatgcctgttcagctactttgcccatgtttcaagtagtttttggtttcttgctgttgctttgttttagttccttacatatttttgcatattaaccctttatcaggtatacagcttgcaactattttctcccatttctgagttgtctcttcattctgtttgcagaagctgtttagaagccacaccttttgtctatttttgcttttgttgcttgtgttttcagggccatatccaaaaaaaccttgcccggaccaacgtcttgaagcttttctcccacccatttttgtatatgggataagggttcaatttcattcttcttcatatgaatatccccaggatgtgtcctatgcccagctgcacagcttaccctcaaacagaaaataatgaagccttcttcctcccaggaaaggggacgttcagctgagccgagtgtgtatactgctctggccatccactagcccagggaggacccagacctccacactccatggagactcagttctcctaggaccatttattcaaaaggactgccctctcttgttcttggaaactttgttgaggat

SEQ ID NO: 148712 - DNA, 1588 bp, Homo sapiens
  Payload ID: 9419
  Gene Symbol: LILRB4
  Gene Name: leukocyte immunoglobulin-like receptor, subfamily B (with TM and ITIM domains), member 4
  ENST ID: ENST00000619910
  CDS Start-End: 40-1383
catccatctgcacagctggggcccctgggaggagacgccatgatccccaccctcacggctctgctctgcctcgggctgagtctgggccccaggacccacatgcaggcagggcccctccccaaacccaccctctgggctgagccaggctctgtgatcagctgggggaactctgtgaccatctggtgtcaggggaccctggaggctcgggagtaccgtctggataaagaggaaagcccagcaccctgggacagacagaacccactggagcccaagaacaaggccagattctccatcccatccatgacagaggactatgcagggagataccgctgttactatcgcagccctgtaggctggtcacagcccagtgaccccctggagctggtgatgacaggagcctacagtaaacccaccctttcagccctgccgagtcctcttgtgacctcaggaaagagcgtgaccctgctgtgtcagtcacggagcccaatggacacttttcttctgatcaaggagcgggcagcccatcccctactgcatctgagatcagagcacggagctcagcagcaccaggctgaattccccatgagtcctgtgacctcagtgcacggggggacctacaggtgcttcagctcacacggcttctcccactacctgctgtcacaccccagtgaccccctggagctcatagtctcaggatccttggagggtcccaggccctcacccacaaggtccgtctcaacagctgcaggccctgaggaccagcccctcatgcctacagggtcagtcccccacagtggtctgagaaggcactgggaggtactgatcggggtcttggtggtctccatcctgcttctctccctcctcctcttcctcctcctccaacactggcgtcagggaaaacacaggacattggcccagagacaggctgatttccaacgtcctccaggggctgccgagccagagcccaaggacgggggcctacagaggaggtccagcccagctgctgacgtccagggagaaaacttctgtgctgccgtgaagaacacacagcctgaggacggggtggaaatggacactcggagcccacacgatgaagacccccaggcagtgacgtatgccaaggtgaaacactccagacctaggagagaaatggcctctcctccctccccactgtctggggaattcctggacacaaaggacagacaggcagaagaggacagacagatggacactgaggctgctgcatctgaagccccccaggatgtgacctacgcccggctgcacagctttaccctcagacagaaggcaactgagcctcctccatcccaggaaggggcctctccagctgagcccagtgtctatgccactctggccatccactaatccaggggggacccagaccccacaagccatggagactcaggaccccagaaggcatggaagctgcctccagtagacatcactgaaccccagccagcccagacccctgacacagaccactagaagattccgggaacgttgggagtcacctgattctgcaaagataaataatatccctgcattatcaaaataaagtagcagacctctc

SEQ ID NO: 148713 - DNA, 1602 bp, Homo sapiens
  Payload ID: 9419
  Gene Symbol: LILRB4
  Gene Name: leukocyte immunoglobulin-like receptor, subfamily B (with TM and ITIM domains), member 4
  ENST ID: ENST00000613090
  CDS Start-End: 37-1224
ccatctgcacagctggggcccctgggaggagacgccatgatccccaccttcacggctctgctctgcctcgggctgagtctgggccccaggacccacatgcaggcagggcccctccccaaacccaccctctgggctgagccaggctctgtgatcagctgggggaactctgtgaccatctggtgtcaggggaccctggaggctcgggagtaccgtctggataaagaggaaagcccagcaccctgggacagacagaacccactggagcccaagaacaaggccagattctccatcccatccatgacagaggactatgcagggagataccgctgttactatcgcagccctgtaggctggtcacagcccagtgaccccctggagctggtgatgacaggagcctacagtaaacccaccctttcagccctgccgagtcctcttgtgacctcaggaaagagcgtgaccctgctgtgtcagtcacggagcccaatggacactttccttctgatcaaggagcgggcagcccatcccctactgcatctgagatcagagcacggagctcagcagcaccaggctgaattccccatgagtcctgtgacctcagtgcacggggggacctacaggtgcttcagctcacacggcttctcccactacctgctgtcacaccccagtgaccccctggagctcatagtctcaggatccttggaggatcccaggccctcacccacaaggtccgtctcaacagctgcaggccctgaggaccagcccctcatgcctacagggtcagtcccccacagtggtctgagaaggcactgggaggtactgatcggggtcttggtggtctccatcctgcttctctccctcctcctcttcctcctcctccaacactggcgtcagggaaaacacaggacattggcccagagacaggctgatttccaacgtcctccaggggctgccgagccagagcccaaggacgggggcctacagaggaggtccagcccagctgctgacgtccagggagaaaacttctgtgctgccgtgaagaacacacagcctgaggacggggtggaaatggacactcgggctgctgcatctgaagccccccaggatgtgacctacgcccagctgcacagctttaccctcagacagaaggcaactgagcctcctccatcccaggaaggggcctctccagctgagcccagtgtctatgccactctggccatccactaatccaggggggacccagaccccacaagccatggagactcaggaccccagaaggcatggaagctgcctccagtagacatcactgaaccccagccagcccagacccctgacacagaccactagaagattccgggaacgttgggagtcacctgattctgcaaagataaataatatccctgcattatcaaaataaagtagcagacctctcaattcacaatgagttaactgataaaacaaaacagaagtcagacaatgttttaaattgaatgatcatgtaaatattacacatcaaaccaatgacatgggaaaatgggagcttctaatgaggacaaacaaaaaatagagaaaaattaataaagtcaaaatgtttattcttgaaaa

SEQ ID NO: 148714 - DNA, 1272 bp, Homo sapiens
  Payload ID: 9419
  Gene Symbol: LILRB4
  Gene Name: leukocyte immunoglobulin-like receptor, subfamily B (with TM and ITIM domains), member 4
  ENST ID: ENST00000494796
  CDS Start-End: 163-354
agagatgtccacctcctgaggcccagaccctcccagggagacccattttggacttgtgacctccgggacgagaacctggtgcctgcctcagccctagctctggggaaatgaaagccaggctggggttcaaatgagggcagtttcccttcctgtgggctgctgatggaacaaccccatgacgagaaggacccagcctccaagcggccacaccctgtgtgtctctttgtcctgccggcactgaggactcatccatctgcacagctggggcccctgggaggagacgccatgatccccaccttcacggctctgctctgcctcggggaccctggaggctcgggagtaccgtctggataaagaggaaagcccagcaccctgggacagacagaacccactggagcccaagaacaaggccagattctccatcccatccatgacagaggactatgcagggagataccgctgttactatcgcagccctgtaggctggtcacagcccagtgaccccctggagctggtgatgacaggagcctacagtaaacccaccctttcagccctgccgagtcctcttgtgacctcaggaaagagcgtgaccctgctgtgtcagtcacggagcccaatggacacttttcttctgatcaaggagcgggcagcccatcccctactgcatctgagatcagagcacggagctcagcagcaccaggctgaattccccatgagtcctgtgacctcagtgcacggggggacctacaggtgcttcagctcacacggcttctcccactacctgctgtcacaccccagtgaccccctggagctcatagtctcaggatccttggagggtcccaggccctcacccacaaggtccgtctcaacagctgcaggccctgaggaccagcccctcatgcctacagggtcagtcccccacagtggtctgagaaggcactgggaggtactgatcggggtcttggtggtctccatcctgcttctctccctcctcctcttcctcctcctccaacactggcgtcagggaaaacacaggacattggcccagagacaggctgatttccaacgtcctccaggggctgccgagccagagcccaaggacgggggcctacagaggaggtccagcccagctgctgacgtccagggagaaaacttctgtgctgccgtgaagaacacacagcctgaggacggggtggaaatggacactcggagcccacacgatgaagacccccaggcagtgacgtatgccaaggtgaaacactccagacctag

SEQ ID NO: 148715 - DNA, 1588 bp, Homo sapiens
  Payload ID: 9419
  Gene Symbol: LILRB4
  Gene Name: leukocyte immunoglobulin-like receptor, subfamily B (with TM and ITIM domains), member 4
  ENST ID: ENST00000621555
  CDS Start-End: 40-1383
catccatctgcacagctggggcccctgggaggagacgccatgatccccaccttcacggctctgctctgcctcgggctgagtctgggccccaggacccacatgcaggcagggcccctccccaaacccaccctctgggctgagccaggctctgtgatcagctgggggaactctgtgaccatctggtgtcaggggaccctggaggctcgggagtaccgtctggataaagaggaaagcccagcaccctgggacagacagaacccactggagcccaagaacaaggccagattctccatcccatccatgacagaggactatgcagggagataccgctgttactatcgcagccctgtaggctggtcacagcccagtgaccccctggagctggtgatgacaggagcctacagtaaacccaccctttcagccctgccgagtcctcttgtgacctcaggaaagagcgtgaccctgctgtgtcagtcacggagcccaatggacactttccttctgatcaaggagcgggcagcccatcccctactgcatctgagatcagagcacggagctcagcagcaccaggctgaattccccatgagtcctgtgacctcagtgcacggggggacctacaggtgcttcagctcacacggcttctcccactacctgctgtcacaccccagtgaccccctggagctcatagtctcaggatccttggagggtcccaggccctcacccacaaggtccgtctcaacagctgcaggccctgaggaccagcccctcatgcctacagggtcagtcccccacagtggtctgagaaggcactgggaggtactgatcggggtcttggtggtctccatcctgcttctctccctcctcctcttcctcctcctccaacactggcgtcagggaaaacacaggacattggcccagagacaggctgatttccaacgtcctccaggggctgccgagccagagcccaaggacgggggcctacagaggaggtccagcccagctgctgacgtccagggagaaaacttctgtgctgccgtgaaggacacacagcctgaggacggggtggaaatggacactcggagcccacacgatgaagacccccaggcagtgacgtatgccaaggtgaaacactccagacctaggagagaaatggcctctcctccctccccactgtctggggaattcctggacacaaaggacagacaggcagaagaggacagacagatggacactgaggctgctgcatctgaagccccccaggatgtgacctacgcccggctgcacagctttaccctcagacagaaggcaactgagcctcctccatcccaggaaggggcctctccagctgagcccagtgtctatgccactctggccatccactaatccaggggggacccagaccccacaagccatggagactcaggaccccagaaggcatggaagctgcctccagtagacatcactgaaccccagccagcccagacccctgacacagaccactagaagattccgggaacgttgggagtcacctgattctgcaaagataaataatatccctgcattatcaaaataaagtagcagacctctc

SEQ ID NO: 148716 - DNA, 820 bp, Homo sapiens
  Payload ID: 9419
  Gene Symbol: LILRB4
  Gene Name: leukocyte immunoglobulin-like receptor, subfamily B (with TM and ITIM domains), member 4
  ENST ID: ENST00000614214
  CDS Start-End: 316-820
ggcctgtgggaggcagaatagtgacctcccagagatgtccacctcctgaggcccagaccctcccagggagacccattttggacttgtgacctccgggacgagaacctggtgcctgcctcagccctagctctggggaaatgaaagccaggctggggttcaaatgagggcagtttcccttcctgtgggctgctgatggaacaaccccatgacgagaaggacccagcctccaagcggccacaccctgtgtgtctctttgtcctgccggcactgaggactcatccatctgcacagctggggcccctgggaggagacgccatgatccccaccctcacggctctgctctgcctcgggctgagtctgggccccaggacccacatgcaggcagggcccctccccaaacccaccctctgggctgagccaggctctgtgatcagctgggggaactctgtgaccatctggtgtcaggggaccctggaggctcgggagtaccgtctggataaagaggaaagcccagcaccctgggacagacagaacccactggagcccaagaacaaggccagattctccatcccatccatgacagaggactatgcagggagataccgctgttactatcgcagccctgtaggctggtcacagcccagtgaccccctggagctggtgatgacaggagcctacagtaaacccaccctttcagccctgccgagtcctcttgtgacctcaggaaagagcgtgaccctgctgtgtcagtcacggagcccaatggacacttttcttctgatcaaggagcgggcagcccatcccctactgcatctgagat

SEQ ID NO: 148717 - DNA, 1540 bp, Homo sapiens
  Payload ID: 9419
  Gene Symbol: LILRB4
  Gene Name: leukocyte immunoglobulin-like receptor, subfamily B (with TM and ITIM domains), member 4
  ENST ID: ENST00000614340
  CDS Start-End: 15-1364
tgggaggagacgccatgatccccaccttcacggctctgctctgcctcgggctgagtctgggccccaggacccacatgcaggcagggcccctccccaaacccaccctctgggctgagccaggctctgtgatcagctgggggaactctgtgaccatctggtgtcaggggaccctggaggctcgggagtaccgtctggataaagaggaaagcccagcaccctgggacagacagaacccactggagcccaagaacaaggccagattctccatcccatccatgacagaggactatgcagggagataccgctgttactatcgcagccctgtaggctggtcacagcccagtgaccccctggagctggtgatgacaggagcctacagtaaacccaccctttcagccctgccgagtcctcttgtgacctcaggaaagagcgtgaccctgctgtgtcagtcacggagcccaatggacactttccttctgatcaaggagcgggcagcccatcccctactgcatctgagatcagagcacggagctcagcagcaccaggctgaattccccatgagtcctgtgacctcagtgcacggggggacctacaggtgcttcagctcacacggcttctcccactacctgctgtcacaccccagtgaccccctggagctcatagtctcaggatccttggagggtcccaggccctcacccacaaggtccgtctcaacagctgcaggccctgaggaccagcccctcatgcctacagggtcagtcccccacagtggtctgagaaggcactgggaggtactgatcggggtcttggtggtctccatcctgcttctctccctcctcctcttcctcctcctccaacactggcgtcagggaaaacacaggacattggcccagagacaggctgatttccaacgtcctccaggggctgccgagccagagcccaaggacgggggcctacagaggaggtccagcccagctgctgacgtccagggagaaaacttctcaggtgctgccgtgaaggacacacagcctgaggacggggtggaaatggacactcggcagagcccacacgatgaagacccccaggcagtgacgtatgccaaggtgaaacactccagacctaggagagaaatggcctctcctccctccccactgtctggggaattcctggacacaaaggacagacaggcagaagaggacagacagatggacactgaggctgctgcatctgaagccccccaggatgtgacctacgcccagctgcacagctttaccctcagacagaaggcaactgagcctcctccatcccaggaaggggcctctccagctgagcccagtgtctatgccactctggccatccactaatccaggggggacccagaccccacaagccatggagactcaggaccccagaaggcatggaagctgcctccagtagacatcactgaaccccagccagcccagacccctgacacagaccactagaagattccgggaacgttgggagtcacctgattctgcaaagataaataatatccctg

SEQ ID NO: 148718 - DNA, 430 bp, Homo sapiens
  Payload ID: 9419
  Gene Symbol: LILRB4
  Gene Name: leukocyte immunoglobulin-like receptor, subfamily B (with TM and ITIM domains), member 4
  ENST ID: ENST00000618034
  CDS Start-End: 1-76
agagcccaaggacgggggcctacagaggaggtccagcccagctgctgacgtccagggagaaaacttctgtgagtgagaggcagagaaggtgctgccgtgaagaacacacagcctgaggacggggtggaaatggacactcgggtgagaacccgcccctgtccccggcaccaaaggcctcctggtgccagatctaatcctgcaggacttctctgtcctccttcccccggctctcagcatcgtcacggtggacccctccttgtccagcacgctgcctcctgcctgctgggacctcactctctcctgctgtcctgggacctcatgggcctcctcccgggtccccttcctgctcctcatcctctgtttggccatctggttgttagagagctccccaggcctcaggaggatgacgaataaatgaaccactccagtc

SEQ ID NO: 148719 - DNA, 1540 bp, Homo sapiens
  Payload ID: 9419
  Gene Symbol: LILRB4
  Gene Name: leukocyte immunoglobulin-like receptor, subfamily B (with TM and ITIM domains), member 4
  ENST ID: ENST00000616806
  CDS Start-End: 15-1364
tgggaggagacgccatgatccccaccctcacggctctgctctgcctcgggctgagtctgggccccaggacccacatgcaggcagggcccctccccaaacccaccctctgggctgagccaggctctgtgatcagctgggggaactctgtgaccatctggtgtcaggggaccctggaggctcgggagtaccgtctggataaagaggaaagcccagcaccctgggacagacagaacccactggagcccaagaacaaggccagattctccatcccatccatgacagaggactatgcagggagataccgctgttactatcgcagccctgtaggctggtcacagcccagtgaccccctggagctggtgatgacaggagcctacagtaaacccaccctttcagccctgccgagtcctcttgtgacctcaggaaagagcgtgaccctgctgtgtcagtcacggagcccaatggacacttttcttctgatcaaggagcgggcagcccatcccctactgcatctgagatcagagcacggagctcagcagcaccaggctgaattccccatgagtcctgtgacctcagtgcacggggggacctacaggtgcttcagctcacacggcttctcccactacctgctgtcacaccccagtgaccccctggagctcatagtctcaggatccttggagggtcccaggccctcacccacaaggtccgtctcaacagctgcaggccctgaggaccagcccctcatgcctacagggtcagtcccccacagtggtctgagaaggcactgggaggtactgatcggggtcttggtggtctccatcctgcttctctccctcctcctcttcctcctcctccaacactggcgtcagggaaaacacaggacattggcccagagacaggctgatttccaacgtcctccaggggctgccgagccagagcccaaggacgggggcctacagaggaggtccagcccagctgctgacgtccagggagaaaacttctcaggtgctgccgtgaagaacacacagcctgaggacggggtggaaatggacactcggcagagcccacacgatgaagacccccaggcagtgacgtatgccaaggtgaaacactccagacctaggagagaaatggcctctcctccctccccactgtctggggaattcctggacacaaaggacagacaggcagaagaggacagacagatggacactgaggctgctgcatctgaagccccccaggatgtgacctacgcccggctgcacagctttaccctcagacagaaggcaactgagcctcctccatcccaggaaggggcctctccagctgagcccagtgtctatgccactctggccatccactaatccaggggggacccagaccccacaagccatggagactcaggaccccagaaggcatggaagctgcctccagtagacatcactgaaccccagccagcccagacccctgacacagaccactagaagattccgggaacgttgggagtcacctgattctgcaaagataaataatatccctg

SEQ ID NO: 148720 - DNA, 4002 bp, Homo sapiens
  Payload ID: 9419
  Gene Symbol: LILRB4
  Gene Name: leukocyte immunoglobulin-like receptor, subfamily B (with TM and ITIM domains), member 4
  ENST ID: ENST00000615614
  CDS Start-End: 316-1662
ggcctgtgggaggcagaatagtgacctcccagagatgtccacctcctgaggcccagaccctcccagggagacccattttggacttgtgacctccgggacgagaacctggtgcctgcctcagccctagctctggggaaatgaaagccaggctggggttcaaatgagggcagtttcccttcctgtgggctgctgatggaacaaccccatgacgagaaggacccagcctccaagcggccacaccctgtgtgtctctttgtcctgccggcactgaggactcatccatctgcacagctggggcccctgggaggagacgccatgatccccaccttcacggctctgctctgcctcgggctgagtctgggccccaggacccacatgcaggcagggcccctccccaaacccaccctctgggctgagccaggctctgtgatcagctgggggaactctgtgaccatctggtgtcaggggaccctggaggctcgggagtaccgtctggataaagaggaaagcccagcaccctgggacagacagaacccactggagcccaagaacaaggccagattctccatcccatccatgacagaggactatgcagggagataccgctgttactatcgcagccctgtaggctggtcacagcccagtgaccccctggagctggtgatgacaggagcctacagtaaacccaccctttcagccctgccgagtcctcttgtgacctcaggaaagagcgtgaccctgctgtgtcagtcacggagcccaatggacactttccttctgatcaaggagcgggcagcccatcccctactgcatctgagatcagagcacggagctcagcagcaccaggctgaattccccatgagtcctgtgacctcagtgcacggggggacctacaggtgcttcagctcacacggcttctcccactacctgctgtcacaccccagtgaccccctggagctcatagtctcaggatccttggagggtcccaggccctcacccacaaggtccgtctcaacagctgcaggccctgaggaccagcccctcatgcctacagggtcagtcccccacagtggtctgagaaggcactgggaggtactgatcggggtcttggtggtctccatcctgcttctctccctcctcctcttcctcctcctccaacactggcgtcagggaaaacacaggacattggcccagagacaggctgatttccaacgtcctccaggggctgccgagccagagcccaaggacgggggcctacagaggaggtccagcccagctgctgacgtccagggagaaaacttctgtgctgccgtgaaggacacacagcctgaggacggggtggaaatggacactcggcagagcccacacgatgaagacccccaggcagtgacgtatgccaaggtgaaacactccagacctaggagagaaatggcctctcctccctccccactgtctggggaattcctggacacaaaggacagacaggcagaagaggacagacagatggacactgaggctgctgcatctgaagccccccaggatgtgacctacgcccggctgcacagctttaccctcagacagaaggcaactgagcctcctccatcccaggaaggggcctctccagctgagcccagtgtctatgccactctggccatccactaatccaggggggacccagaccccacaagccatggagactcaggaccccagaaggcatggaagctgcctccagtagacatcactgaaccccagccagcccagacccctgacacagaccactagaagattccgggaacgttgggagtcacctgattctgcaaagataaataatatccctgcattatcaaaataaagtagcagacctctcaattcacaatgagttaactgataaaacaaaacagaagtcagacaatgttttaaattgaatgatcatgtaaatattacacatcaaaccaatgacatgggaaaatgggagcttctaatgaggacaaacaaaaaatagagaaaaattaataaagtcaaaatgtttattcttgaaaacattaatgatacatgaatcttggccacaatgagaaaaataaaaatgaaaaaagagcaggcatccatttccatacaggaacaaaataggaggcagcactacagaccctacacacagctttacagaggtgaaagaaaactgtcagcaattctatgctgacataacagaaaatgtagatgagatagatgaaatacgaaaaattacagtttacttaatgaacataaggataaatagaaaaactgaatcatcatacataaacatatataaaatgcattgatcctgtaatcaaaaatgttcccacaaagtaaatgccacttcagcaaggtttgttggtggttttttcaaactcttatgcactcatgaaacacacagacacacacacacacaaacttgcataaattttccctgagaatattttgtatatatttacacaaatacatttgatcagactaggaacaagttgataccaaaacctgaaaaggaaactacagaatgggaaagtcatagaagatctctcacagaaatataaatcccttaacaaatattaacaagtaagattcatgtctctataaaatagacagtatatcatgaccacactggttttttgttatcctttgattttgtttatgaaaagcaaggatagcttaattttcaaaaactcaatcaatgtaattcagtattttaacaaaaggaatgaaaaattatcatctcaatagacaaagcttttgtctgagcaccttttcatatagctgctgaccatttgtatgtcttcttttgagaaatgcctgttcagctactttgcccatgtttcaagtagtttttggtttcttgctgttgctttgttttagttccttacatatttttgcatattaaccctttatcaggtatacagcttgcaactattttctcccatttctgagttgtctcttcattctgtttgcagaagctgtttagaagccacaccttttgtctatttttgcttttgttgcttgtgttttcagggccatatccaaaaaaaccttgcccggaccaacgtcttgaagcttttctcccacccatttttgtatatgggataagggttcaatttcattcttcttcatatgaatatccccaggatgtgtcctatgcccagctgcacagcttaccctcaaacagaaaataatgaagccttcttcctcccaggaaaggggacgttcagctgagccgagtgtgtatactgctctggccatccactagcccagggaggacccagacctccacactccatggagactcagttctcctaggaccatttattcaaaaggactgccctctcttgttcttggaaactttgttgaggatcaattcaccataaatatgtgtgtttccttctttgctttcatccctgttgcactgatcactgtacctgtttctattccagttccatgatgtcttcctggctgtagctttgtaggatatttggggattccatagtgtgatatccccttcttccctttgctcaagattgttttggccatttggggtccttttgtagtcccattcaaattttaggattgtttttctatttctgtggaaaacgaccttggaattttgttaggaattgcattgagtctgcaggtatgaacttttttttaaagttccagggcacatgtacaggacctgcagctttgttacataggtaggcttgtgccatggtggtttgctgcacctatcaacccattacctagttattaagcccagcatgcattagctctttttcctgatgctctccctcccttcatcatccgccctcccactacaagccccagtgtgtgttgttcccctccctgtgtccatgtgttctcattgttatacgaacattttaacaatgttaattcttgcagaccatgaacataagctaccttcccatttatatgcgtcttgttcaatttcattcatcaatgttataaagattttagtgcaga

SEQ ID NO: 148721 - DNA, 1811 bp, Homo sapiens
  Payload ID: 9419
  Gene Symbol: LILRB4
  Gene Name: leukocyte immunoglobulin-like receptor, subfamily B (with TM and ITIM domains), member 4
  ENST ID: ENST00000617426
  CDS Start-End: 80-1426
acaccctgtgtgtctctttgtcctgccggcactgaggactcatccatctgcacagctggggcccctgggaggagacgccatgatccccaccctcacggctctgctctgcctcgggctgagtctgggccccaggacccacatgcaggcagggcccctccccaaacccaccctctgggctgagccaggctctgtgatcagctgggggaactctgtgaccatctggtgtcaggggaccctggaggctcgggagtaccgtctggataaagaggaaagcccagcaccctgggacagacagaacccactggagcccaagaacaaggccagattctccatcccatccatgacagaggactatgcagggagataccgctgttactatcgcagccctgtaggctggtcacagcccagtgaccccctggagctggtgatgacaggagcctacagtaaacccaccctttcagccctgccgagtcctcttgtgacctcaggaaagagcgtgaccctgctgtgtcagtcacggagcccaatggacacttttcttctgatcaaggagcgggcagcccatcccctactgcatctgagatcagagcacggagctcagcagcaccaggctgaattccccatgagtcctgtgacctcagtgcacggggggacctacaggtgcttcagctcacacggcttctcccactacctgctgtcacaccccagtgaccccctggagctcatagtctcaggatccttggagggtcccaggccctcacccacaaggtccgtctcaacagctgcaggccctgaggaccagcccctcatgcctacagggtcagtcccccacagtggtctgagaaggcactgggaggtactgatcggggtcttggtggtctccatcctgcttctctccctcctcctcttcctcctcctccaacactggcgtcagggaaaacacaggacattggcccagagacaggctgatttccaacgtcctccaggggctgccgagccagagcccaaggacgggggcctacagaggaggtccagcccagctgctgacgtccagggagaaaacttctcaggtgctgccgtgaagaacacacagcctgaggacggggtggaaatggacactcggagcccacacgatgaagacccccaggcagtgacgtatgccaaggtgaaacactccagacctaggagagaaatggcctctcctccctccccactgtctggggaattcctggacacaaaggacagacaggcagaagaggacagacagatggacactgaggctgctgcatctgaagccccccaggatgtgacctacgcccggctgcacagctttaccctcagacagaaggcaactgagcctcctccatcccaggaaggggcctctccagctgagcccagtgtctatgccactctggccatccactaatccaggggggacccagaccccacaagccatggagactcaggaccccagaaggcatggaagctgcctccagtagacatcactgaaccccagccagcccagacccctgacacagaccactagaagattccgggaacgttgggagtcacctgattctgcaaagataaataatatccctgcattatcaaaataaagtagcagacctctcaattcacaatgagttaactgataaaacaaaacagaagtcagacaatgttttaaattgaatgatcatgtaaatattacacatcaaaccaatgacatgggaaaatgggagcttctaatgaggacaaacaaaaaatagagaaaaattaataaagtcaaaatgtttattcttgaaaacattaat

SEQ ID NO: 148722 - DNA, 1864 bp, Homo sapiens
  Payload ID: 9420
  Gene Symbol: LILRB5
  Gene Name: leukocyte immunoglobulin-like receptor, subfamily B (with TM and ITIM domains), member 5
  Uniprot ID: O75023
  ENST ID: ENST00000345866
  CDS Start-End: 70-1545
gtttttgtgtcctgccaggcaccgtggtctcatccgcctgcacagctgagtccagtgggagctgacgccatgaccctcaccctctcagtcctgatttgcctcgggctgagtgtgggccccaggacctgcgtgcaggcaggcaccctccccaaacccaccctctgggctgagccagcctctgtgatagctcgggggaagcccgtgaccctctggtgtcaggggcccctggagactgaggagtaccgtctggataaggagggactcccatgggcccggaagagacagaacccactggagcctggagccaaggccaagttccacattccatccacggtgtatgacagtgcagggcgataccgctgctactatgagacccctgcaggctggtcagagcccagtgaccccctggagctggtggcgacaggcgtgtctaggaagccctccctcctgatcccgcagggctctgtcgtggcccgcggaggcagcctgaccctgcagtgtcgctctgatgtcggctatgacatattcgttctgtacaaggagggggaacatgacctcgtccagggctctggccagcagccccaggctgggctctcccaggccaacttcaccctgggccctgtgagccgctcccacgggggccagtacagatgctacggtgcacacaacctctcccctaggtggtcggcccccagcgaccccctggacatcctgatcgcaggactgatccctgacatacccgccctctcggtgcagccgggccccaaggtggcctcaggagagaacgtgaccctgctgtgtcagtcatggcatcagatagacactttctttttgaccaaggagggggcagcccatcccccgctgtgtctaaagtcaaagtaccagtcttatagacaccaggctgaattctccatgagtcctgtgacctcagcccagggtggaacctaccgatgctacagcgcaatcaggtcctacccctacctgctgtccagccctagttacccccaggagctcgtggtctcaggaccctctggggatcccagcctctcacctacaggctccacccccacacctgcaggccctgaggaccagcccctcacccccacggggttggatccccagagtggtctgggaaggcacctgggggttgtgactggggtctcagtggccttcgtcctgctgctgttcctcctcctcttcctcctcctccgacatcggcatcagagcaaacacaggacatcggcccatttctaccgtcctgcaggggctgcggggccagagcccaaggaccagggcctgcagaagagggccagcccagttgctgacatccaggaggaaattctcaatgctgccgtgaaggacacacagcccaaggacggggtggagatggatgctccggctgctgcatctgaagccccccaggatgtgacctacgcccagctgcacagcttgaccctcagacgggaggcaactgagcctcctccatcccaggaaagggaacctccagctgaacccagcatctacgcccccctggccatccactagcccacgggggacccagatctcatactcaacagaaggagactcagagactccagaaggcacaggagctgcccccagtggacaccaatgaaccccagccagcctggacccctaacaaagaccaccaggacatcctgggaactctgggactcactagattctgcagtcaaagatgactaatatccttgcatttttgaaatgaagccacagacttctcaataaatcaatgagctgagaaaactgaaacagaaattagagcatggtataaatttggaatgataatgtaaatattacacattaaatgatgaaatcggaaaactac

SEQ ID NO: 148723 - DNA, 3236 bp, Homo sapiens
  Payload ID: 9420
  Gene Symbol: LILRB5
  Gene Name: leukocyte immunoglobulin-like receptor, subfamily B (with TM and ITIM domains), member 5
  Uniprot ID: O75023
  ENST ID: ENST00000316219
  CDS Start-End: 109-1881
gtgacagggagaacccagcctccagtccacactctgcgtgtttttgtgtcctgccaggcaccgtggtctcatccgcctgcacagctgagtccagtgggagctgacgccatgaccctcaccctctcagtcctgatttgcctcgggctgagtgtgggccccaggacctgcgtgcaggcaggcaccctccccaaacccaccctctgggctgagccagcctctgtgatagctcgggggaagcccgtgaccctctggtgtcaggggcccctggagactgaggagtaccgtctggataaggagggactcccatgggcccggaagagacagaacccactggagcctggagccaaggccaagttccacattccatccacggtgtatgacagtgcagggcgataccgctgctactatgagacccctgcaggctggtcagagcccagtgaccccctggagctggtggcgacaggattctatgcagaacccactcttttagccctgccgagtcctgtggtggcctcaggaggaaatgtgaccctccagtgtgatacactggacggacttctcacgtttgttcttgttgaggaagaacagaagctccccaggaccctgtactcacagaagctccccaaagggccatcccaggccctgttccctgtgggtcccgtgacccccagctgcaggtggaggttcagatgctattactattacaggaaaaaccctcaggtgtggtcgaaccccagtgacctcctggagattctggtcccaggcgtgtctaggaagccctccctcctgatcccgcagggctctgtcgtggcccgcggaggcagcctgaccctgcagtgtcgctctgatgtcggctatgacatattcgttctgtacaaggagggggaacatgacctcgtccagggctctggccagcagccccaggctgggctctcccaggccaacttcaccctgggccctgtgagccgctcccacgggggccagtacagatgctacggtgcacacaacctctcccctaggtggtcggcccccagcgaccccctggacatcctgatcgcaggactgatccctgacatacccgccctctcggtgcagccgggccccaaggtggcctcaggagagaacgtgaccctgctgtgtcagtcatggcatcagatagacactttctttttgaccaaggagggggcagcccatcccccgctgtgtctaaagtcaaagtaccagtcttatagacaccaggctgaattctccatgagtcctgtgacctcagcccagggtggaacctaccgatgctacagcgcaatcaggtcctacccctacctgctgtccagccctagttacccccaggagctcgtggtctcaggaccctctggggatcccagcctctcacctacaggctccacccccacacctggccctgaggaccagcccctcacccccacggggttggatccccagagtggtctgggaaggcacctgggggttgtgactggggtctcagtggccttcgtcctgctgctgttcctcctcctcttcctcctcctccgacatcggcatcagagcaaacacaggacatcggcccatttctaccgtcctgcaggggctgcggggccagagcccaaggaccagggcctgcagaagagggccagcccagttgctgacatccaggaggaaattctcaatgctgccgtgaaggacacacagcccaaggacggggtggagatggatgctccggctgctgcatctgaagccccccaggatgtgacctacgcccagctgcacagcttgaccctcagacgggaggcaactgagcctcctccatcccaggaaagggaacctccagctgaacccagcatctacgcccccctggccatccactagcccacgggggacccagatctcatactcaacagaaggagactcagagactccagaaggcacaggagctgcccccagtggacaccaatgaaccccagccagcctggacccctaacaaagaccaccaggacatcctgggaactctgggactcactagattctgcagtcaaagatgactaatatccttgcatttttgaaatgaagccacagacttctcaataaatcaatgagctgagaaaactgaaacagaaattagagcatggtataaatttggaatgataatgtaaatattacacattaaatgatgaaatcggaaaactacaaatgagcgaatgaattagaaaagaataaaacctacgtaattaatgaccttggcaatgacagaaagaatttagaaaaagaacaacaaattattccaaatgaaggtgtgaggaaggggacaaaaataacaagaggagttactaatgagggctacgtgaaaactcgatgaagccaaaaaagctcattcttgagaatgtgaattacattcacaaatcctagccacaataagcaaggaaaaaagcggggttcaggcacacatttccatatgggggtgaaacagcagacaccaccacaaatctgacacatattgcctttatttttttcacttttaagttcagggatacatgtgcaggtttgttagacagataaacttgtgtcaaggggatttgtcttggtttttgtgtgagggtttttgttttgttttgttttgttttttgagacggagtctcgctctatcaccaggctggagtacagtggagtgatctcggctcactgcaacctctgcctcccgggttcaagcgattctcctgcctcagtctcccgagtaactgggactacaggcacctgccaccacgcccggctaatttttgtatttttagtagagacagggtttctccatgttggtcaggctggtctcaaactcccgacctcaggtgatccgcccgcctcagcctcccaaagtgctgggcttacaggcgtgagccaccacgtccagcccatacatttcaattttaaagggatgcgccctagtccttagttagtctctcctcatctctataaaatgttcagctactcacctcttgggctattgctagacatcgttttctcttccttctttctgacgcctacaatagataggacattccccctcctcattctattctcccaagtactttaaattgcaatttataaagtttctatgctacactctaaaaaaaattctgttttgttttctaatttcataattggtgcttcactgtgtcttgtcctcgaaggaatgagtattttgattgtgttcattaaatctgatttttcta

SEQ ID NO: 148724 - DNA, 2137 bp, Homo sapiens
  Payload ID: 9420
  Gene Symbol: LILRB5
  Gene Name: leukocyte immunoglobulin-like receptor, subfamily B (with TM and ITIM domains), member 5
  Uniprot ID: O75023
  ENST ID: ENST00000449561
  CDS Start-End: 72-1847
gtgtttttgtgtcctgccaggcaccgtggtctcatccgcctgcacagctgagtccagtgggagctgacgccatgaccctcaccctctcagtcctgatttgcctcgggctgagtgtgggccccaggacctgcgtgcaggcaggcaccctccccaaacccaccctctgggctgagccagcctctgtgatagctcgggggaagcccgtgaccctctggtgtcaggggcccctggagactgaggagtaccgtctggataaggagggactcccatgggcccggaagagacagaacccactggagcctggagccaaggccaagttccacattccatccacggtgtatgacagtgcagggcgataccgctgctactatgagacccctgcaggctggtcagagcccagtgaccccctggagctggtggcgacaggattctatgcagaacccactcttttagccctgccgagtcctgtggtggcctcaggaggaaatgtgaccctccagtgtgatacactggacggacttctcacgtttgttcttgttgaggaagaacagaagctccccaggaccctgtactcacagaagctccccaaagggccatcccaggccctgttccctgtgggtcccgtgacccccagctgcaggtggaggttcagatgctattactattacaggaaaaaccctcaggtgtggtcgaaccccagtgacctcctggagattctggtcccaggcgtgtctaggaagccctccctcctgatcccgcagggctctgtcgtggcccgcggaggcagcctgaccctgcagtgtcgctctgatgtcggctatgacatattcgttctgtacaaggagggggaacatgacctcgtccagggctctggccagcagccccaggctgggctctcccaggccaacttcaccctgggccctgtgagccgctcccacgggggccagtacagatgctacggtgcacacaacctctcccctaggtggtcggcccccagcgaccccctggacatcctgatcgcaggactgatccctgacatacccgccctctcggtgcagccgggccccaaggtggcctcaggagagaacgtgaccctgctgtgtcagtcatggcatcagatagacactttctttttgaccaaggagggggcagcccatcccccgctgtgtctaaagtcaaagtaccagtcttatagacaccaggctgaattctccatgagtcctgtgacctcagcccagggtggaacctaccgatgctacagcgcaatcaggtcctacccctacctgctgtccagccctagttacccccaggagctcgtggtctcaggaccctctggggatcccagcctctcacctacaggctccacccccacacctgcaggccctgaggaccagcccctcacccccacggggttggatccccagagtggtctgggaaggcacctgggggttgtgactggggtctcagtggccttcgtcctgctgctgttcctcctcctcttcctcctcctccgacatcggcatcagagcaaacacaggacatcggcccatttctaccgtcctgcaggggctgcggggccagagcccaaggaccagggcctgcagaagagggccagcccagttgctgacatccaggaggaaattctcaatgctgccgtgaaggacacacagcccaaggacggggtggagatggatgctccggctgctgcatctgaagccccccaggatgtgacctacgcccagctgcacagcttgaccctcagacgggaggcaactgagcctcctccatcccaggaaagggaacctccagctgaacccagcatctacgcccccctggccatccactagcccacgggggacccagatctcatactcaacagaaggagactcagagactccagaaggcacaggagctgcccccagtggacaccaatgaaccccagccagcctggacccctaacaaagaccaccaggacatcctgggaactctgggactcactagattctgcagtcaaagatgactaatatccttgcatttttgaaatgaagccacagacttctcaataaatcaatgagctgagaaaactgaaacagaaattagagcatggtataaatttggaatgataatgtaaatatta

SEQ ID NO: 148725 - DNA, 2204 bp, Homo sapiens
  Payload ID: 9420
  Gene Symbol: LILRB5
  Gene Name: leukocyte immunoglobulin-like receptor, subfamily B (with TM and ITIM domains), member 5
  ENST ID: ENST00000614807
  CDS Start-End: 70-2001
gtttttgtgtcctgccaggcaccgtggtctcatccgcctgcacagctgagtccagtgggagctgacgccatgaccctcaccctctcagtcctgatttgcctcgggctgagtgtgggccccaggacctgcgtgcaggcaggcaccctccccaaacccaccctctgggctgagccagcctctgtgatagctcgggggaagcccgtgaccctctggtgtcaggggcccctggagactgaggagtaccgtctggataaggagggactcccatgggcccggaagagacagaacccactggagcctggagccaaggccaagttccacattccatccacggtgtatgacagtgcagggcgataccgctgctactatgagacccctgcaggctggtcagagcccagtgaccccctggagctggtggcgacaggattctatgcagaacccactcttttagccctgccgagtcctgtggtggcctcaggaggaaatgtgaccctccagtgtgatacactggacggacttctcacgtttgttcttgttgaggaagaacagaagctccccaggaccctgtactcacagaagctccccaaagggccatcccaggccctgttccctgtgggtcccgtgacccccagctgcaggtggaggttcagatgctattactattacaggaaaaaccctcaggtgtggtcgaaccccagtgacctcctggagattctggtcccaggcgtgtctaggaagccctccctcctgatcccgcagggctctgtcgtggcccgcggaggcagcctgaccctgcagtgtcgctctgatgtcggctatgacatattcgttctgtacaaggagggggaacatgacctcgtccagggctctggccagcagccccaggctgggctctcccaggccaacttcaccctgggccctgtgagccgctcccacgggggccagtacagatgctacggtgcacacaacctctcccctaggtggtcggcccccagcgaccccctggacatcctgatcgcaggactgatccctgacatacccgccctctcggtgcagccgggccccaaggtggcctcaggagagaacgtgaccctgctgtgtcagtcatggcatcagatagacactttctttttgaccaaggagggggcagcccatcccccgctgtgtctaaagtcaaagtaccagtcttatagacaccaggctgaattctccatgagtcctgtgacctcagcccagggtggaacctaccgatgctacagcgcaatcaggtcctacccctacctgctgtccagccctagttacccccaggagctcgtggtctcaggaccctctggggatcccagcctctcacctacaggctccacccccacacctggccctgaggaccagcccctcacccccacggggttggatccccagagtggtctgggaaggcacctgggggttgtgactggggtctcagtggccttcgtcctgctgctgttcctcctcctcttcctcctcctccgacatcggcatcagagcaaacacaggacatcggcccatttctaccgtcctgcaggggctgcggggccagagcccaaggaccagggcctgcagaagagggccagcccagttgctgacatccaggaggaaattctcaatgctgccgtgaaggacacacagcccaaggacggggtggagatggatgctcggcagagcccacacgatgaagacccccaggcagtgacgtatgccccggtgaaacactccagacctaggagagaaatggcctctcctccttccccactgtctggggaattcctggacacaaaggacagacaggcagaagaggacagacagatggacactgaggctgctgcatctgaagccccccaggatgtgacctacgcccagctgcacagcttgaccctcagacgggaggcaactgagcctcctccatcccaggaaagggaacctccagctgaacccagcatctacgcccccctggccatccactagcccacgggggacccagatctcatactcaacagaaggagactcagagactccagaaggcacaggagctgcccccagtggacaccaatgaaccccagccagcctggacccctaacaaagaccaccaggacatcctgggaactctgggactcactagattctgcagtcaaagatgactaatatccttgcatttttgaaatgaagcc

SEQ ID NO: 148726 - DNA, 2211 bp, Homo sapiens
  Payload ID: 9420
  Gene Symbol: LILRB5
  Gene Name: leukocyte immunoglobulin-like receptor, subfamily B (with TM and ITIM domains), member 5
  Uniprot ID: O75023
  ENST ID: ENST00000615837
  CDS Start-End: 122-1894
atgggacagtcttgtgacagggagaacccagcctccagtccacactctgcgtgtttttgtgtcctgccaggcaccgtggtctcatccgcctgcacagctgagtccagtgggagctgacgccatgaccctcaccctctcagtcctgatttgcctcgggctgagtgtgggccccaggacctgcgtgcaggcaggcaccctccccaaacccaccctctgggctgagccagcctctgtgatagctcgggggaagcccgtgaccctctggtgtcaggggcccctggagactgaggagtaccgtctggataaggagggactcccatgggcccggaagagacagaacccactggagcctggagccaaggccaagttccacattccatccacggtgtatgacagtgcagggcgataccgctgctactatgagacccctgcaggctggtcagagcccagtgaccccctggagctggtggcgacaggattctatgcagaacccactcttttagccctgccgagtcctgtggtggcctcaggaggaaatgtgaccctccagtgtgatacactggacggacttctcacgtttgttcttgttgaggaagaacagaagctccccaggaccctgtactcacagaagctccccaaagggccatcccaggccctgttccctgtgggtcccgtgacccccagctgcaggtggaggttcagatgctattactattacaggaaaaaccctcaggtgtggtcgaaccccagtgacctcctggagattctggtcccaggcgtgtctaggaagccctccctcctgatcccgcagggctctgtcgtggcccgcggaggcagcctgaccctgcagtgtcgctctgatgtcggctatgacatattcgttctgtacaaggagggggaacatgacctcgtccagggctctggccagcagccccaggctgggctctcccaggccaacttcaccctgggccctgtgagccgctcccacgggggccagtacagatgctacggtgcacacaacctctcccctaggtggtcggcccccagcgaccccctggacatcctgatcgcaggactgatccctgacatacccgccctctcggtgcagccgggccccaaggtggcctcaggagagaacgtgaccctgctgtgtcagtcatggcatcagatagacactttctttttgaccaaggagggggcagcccatcccccgctgtgtctaaagtcaaagtaccagtcttatagacaccaggctgaattctccatgagtcctgtgacctcagcccagggtggaacctaccgatgctacagcgcaatcaggtcctacccctacctgctgtccagccctagttacccccaggagctcgtggtctcaggaccctctggggatcccagcctctcacctacaggctccacccccacacctggccctgaggaccagcccctcacccccacggggttggatccccagagtggtctgggaaggcacctgggggttgtgactggggtctcagtggccttcgtcctgctgctgttcctcctcctcttcctcctcctccgacatcggcatcagagcaaacacaggacatcggcccatttctaccgtcctgcaggggctgcggggccagagcccaaggaccagggcctgcagaagagggccagcccagttgctgacatccaggaggaaattctcaatgctgccgtgaaggacacacagcccaaggacggggtggagatggatgctcgggctgctgcatctgaagccccccaggatgtgacctacgcccagctgcacagcttgaccctcagacgggaggcaactgagcctcctccatcccaggaaagggaacctccagctgaacccagcatctacgcccccctggccatccactagcccacgggggacccagatctcatactcaacagaaggagactcagagactccagaaggcacaggagctgcccccagtggacaccaatgaaccccagccagcctggacccctaacaaagaccaccaggacatcctgggaactctgggactcactagattctgcagtcaaagatgactaatatccttgcatttttgaaatgaagccacagacttctcaataaatcaatgagctgagaaaactgaaacagaaattagagcatggtataaatttggaatgataatgtaaatattacacattaaatgatgaaatcggaaaact

SEQ ID NO: 148727 - DNA, 2137 bp, Homo sapiens
  Payload ID: 9420
  Gene Symbol: LILRB5
  Gene Name: leukocyte immunoglobulin-like receptor, subfamily B (with TM and ITIM domains), member 5
  Uniprot ID: O75023
  ENST ID: ENST00000616618
  CDS Start-End: 72-1847
gtgtttttgtgtcctgccaggcaccgtggtctcatccgcctgcacagctgagtccagtgggagctgacgccatgaccctcaccctctcagtcctgatttgcctcgggctgagtgtgggccccaggacctgcgtgcaggcaggcaccctccccaaacccaccctctgggctgagccagcctctgtgatagctcgggggaagcccgtgaccctctggtgtcaggggcccctggagactgaggagtaccgtctggataaggagggactcccatgggcccggaagagacagaacccactggagcctggagccaaggccaagttccacattccatccacggtgtatgacagtgcagggcgataccgctgctactatgagacccctgcaggctggtcagagcccagtgaccccctggagctggtggcgacaggattctatgcagaacccactcttttagccctgccgagtcctgtggtggcctcaggaggaaatgtgaccctccagtgtgatacactggacggacttctcacgtttgttcttgttgaggaagaacagaagctccccaggaccctgtactcacagaagctccccaaagggccatcccaggccctgttccctgtgggtcccgtgacccccagctgcaggtggaggttcagatgctattactattacaggaaaaaccctcaggtgtggtcgaaccccagtgacctcctggagattctggtcccaggcgtgtctaggaagccctccctcctgatcccgcagggctctgtcgtggcccgcggaggcagcctgaccctgcagtgtcgctctgatgtcggctatgacatattcgttctgtacaaggagggggaacatgacctcgtccagggctctggccagcagccccaggctgggctctcccaggccaacttcaccctgggccctgtgagccgctcccacgggggccagtacagatgctacggtgcacacaacctctcccctaggtggtcggcccccagcgaccccctggacatcctgatcgcaggactgatccctgacatacccgccctctcggtgcagccgggccccaaggtggcctcaggagagaacgtgaccctgctgtgtcagtcatggcatcagatagacactttctttttgaccaaggagggggcagcccatcccccgctgtgtctaaagtcaaagtaccagtcttatagacaccaggctgaattctccatgagtcctgtgacctcagcccagggtggaacctaccgatgctacagcgcaatcaggtcctacccctacctgctgtccagccctagttacccccaggagctcgtggtctcaggaccctctggggatcccagcctctcacctacaggctccacccccacacctgcaggccctgaggaccagcccctcacccccacggggttggatccccagagtggtctgggaaggcacctgggggttgtgactggggtctcagtggccttcgtcctgctgctgttcctcctcctcttcctcctcctccgacatcggcatcagagcaaacacaggacatcggcccatttctaccgtcctgcaggggctgcggggccagagcccaaggaccagggcctgcagaagagggccagcccagttgctgacatccaggaggaaattctcaatgctgccgtgaaggacacacagcccaaggacggggtggagatggatgctcgggctgctgcatctgaagccccccaggatgtgacctacgcccagctacacagcttgaccctcagacgggaggcaactgagcctcctccatcccaggaaagggaacctccagctgaacccagcatctacgcccccctggccatccactagcccacgggggacccagatctcatactcaacagaaggagactcagagactccagaaggcacaggagctgcccccagtggacaccaatgaaccccagccagcctggacccctaacaaagaccaccaggacatcctgggaactctgggactcactagattctgcagtcaaagatgactaatatccttgcatttttgaaatgaagccacagacttctcaataaatcaatgagctgagaaaactgaaacagaaattagagcatggtataaatttggaatgataatgtaaatatta

SEQ ID NO: 148728 - DNA, 1875 bp, Homo sapiens
  Payload ID: 9420
  Gene Symbol: LILRB5
  Gene Name: leukocyte immunoglobulin-like receptor, subfamily B (with TM and ITIM domains), member 5
  Uniprot ID: O75023
  ENST ID: ENST00000610764
  CDS Start-End: 81-1556
acactctgcgtgtttttgtgtcctgccaggcaccgtggtctcatccgcctgcacagctgagtccagtgggagctgacgccatgaccctcaccctctcagtcctgatttgcctcgggctgagtgtgggccccaggacctgcgtgcaggcaggcaccctccccaaacccaccctctgggctgagccagcctctgtgatagctcgggggaagcccgtgaccctctggtgtcaggggcccctggagactgaggagtaccgtctggataaggagggactcccatgggcccggaagagacagaacccactggagcctggagccaaggccaagttccacattccatccacggtgtatgacagtgcagggcgataccgctgctactatgagacccctgcaggctggtcagagcccagtgaccccctggagctggtggcgacaggcgtgtctaggaagccctccctcctgatcccgcagggctctgtcgtggcccgcggaggcagcctgaccctgcagtgtcgctctgatgtcggctatgacatattcgttctgtacaaggagggggaacatgacctcgtccagggctctggccagcagccccaggctgggctctcccaggccaacttcaccctgggccctgtgagccgctcccacgggggccagtacagatgctacggtgcacacaacctctcccctaggtggtcggcccccagcgaccccctggacatcctgatcgcaggactgatccctgacatacccgccctctcggtgcagccgggccccaaggtggcctcaggagagaacgtgaccctgctgtgtcagtcatggcatcagatagacactttctttttgaccaaggagggggcagcccatcccccgctgtgtctaaagtcaaagtaccagtcttatagacaccaggctgaattctccatgagtcctgtgacctcagcccagggtggaacctaccgatgctacagcgcaatcaggtcctacccctacctgctgtccagccctagttacccccaggagctcgtggtctcaggaccctctggggatcccagcctctcacctacaggctccacccccacacctgcaggccctgaggaccagcccctcacccccacggggttggatccccagagtggtctgggaaggcacctgggggttgtgactggggtctcagtggccttcgtcctgctgctgttcctcctcctcttcctcctcctccgacatcggcatcagagcaaacacaggacatcggcccatttctaccgtcctgcaggggctgcggggccagagcccaaggaccagggcctgcagaagagggccagcccagttgctgacatccaggaggaaattctcaatgctgccgtgaaggacacacagcccaaggacggggtggagatggatgctcgggctgctgcatctgaagccccccaggatgtgacctacgcccagctgcacagcttgaccctcagacgggaggcaactgagcctcctccatcccaggaaagggaacctccagctgaacccagcatctacgcccccctggccatccactagcccacgggggacccagatctcatactcaacagaaggagactcagagactccagaaggcacaggagctgcccccagtggacaccaatgaaccccagccagcctggacccctaacaaagaccaccaggacatcctgggaactctgggactcactagattctgcagtcaaagatgactaatatccttgcatttttgaaatgaagccacagacttctcaataaatcaatgagctgagaaaactgaaacagaaattagagcatggtataaatttggaatgataatgtaaatattacacattaaatgatgaaatcggaaaactac

SEQ ID NO: 148729 - DNA, 2137 bp, Homo sapiens
  Payload ID: 9420
  Gene Symbol: LILRB5
  Gene Name: leukocyte immunoglobulin-like receptor, subfamily B (with TM and ITIM domains), member 5
  Uniprot ID: O75023
  ENST ID: ENST00000619608
  CDS Start-End: 72-1847
gtgtttttgtgtcctgccaggcaccgtggtctcatccgcctgcacagctgagtccagtgggagctgacgccatgaccctcaccctctcagtcctgatttgcctcgggctgagtgtgggccccaggacctgcgtgcaggcaggcaccctccccaaacccaccctctgggctgagccagcctctgtgatagctcgggggaagcccgtgaccctctggtgtcaggggcccctggagactgaggagtaccgtctggataaggagggactcccatgggcccggaagagacagaacccactggagcctggagccaaggccaagttccacattccatccacggtgtatgacagtgcagggcgataccgctgctactatgagacccctgcaggctggtcagagcccagtgaccccctggagctggtggcgacaggattctatgcagaacccactcttttagccctgccgagtcctgtggtggcctcaggaggaaatgtgaccctccagtgtgatacactggacggacttctcacgtttgttcttgttgaggaagaacagaagctccccaggaccctgtactcacagaagctccccaaagggccatcccaggccctgttccctgtgggtcccgtgacccccagctgcaggtggaggttcagatgctattactattacaggaaaaaccctcaggtgtggtcgaaccccagtgacctcctggagattctggtcccaggcgtgtctaggaagccctccctcctgatcccgcagggctctgtcgtggcccgcggaggcagcctgaccctgcagtgtcgctctgatgtcggctatgacatattcgttctgtacaaggagggggaacatgacctcgtccagggctctggccagcagccccaggctgggctctcccaggccaacttcaccctgggccctgtgagccgctcccacgggggccagtacagatgctacggtgcacacaacctctcccctaggtggtcggcccccagcgaccccctggacatcctgatcgcaggactgatccctgacatacccgccctctcggtgcagccgggccccaaggtggcctcaggagagaacgtgaccctgctgtgtcagtcatggcatcagatagacactttctttttgaccaaggagggggcagcccatcccccgctgtgtctaaagtcaaagtaccagtcttatagacaccaggctgaattctccatgagtcctgtgacctcagcccagggtggaacctaccgatgctacagcgcaatcaggtcctacccctacctgctgtccagccctagttacccccaggagctcgtggtctcaggaccctctggggatcccagcctctcacctacaggctccacccccacacctgcaggccctgaggaccagcccctcacccccacggggttggatccccagagtggtctgggaaggcacctgggggttgtgactggggtctcagtggccttcgtcctgctgctgttcctcctcctcttcctcctcctccgacatcggcatcagagcaaacacaggacatcggcccatttctaccgtcctgcaggggctgcggggccagagcccaaggaccagggcctgcagaagagggccagcccagttgctgacatccaggaggaaattctcaatgctgccgtgaaggacacacagcccaaggacggggtggagatggatgctcgggctgctgcatctgaagccccccaggatgtgacctacgcccagctgcacagcttgaccctcagacgggaggcaactgagcctcctccatcccaggaaagggaacctccagctgaacccagcatctacgcccccctggccatccactagcccacgggggacccagatctcatactcaacagaaggagactcagagactccagaaggcacaggagctgcccccagtggacaccaatgaaccccagccagcctggacccctaacaaagaccaccaggacatcctgggaactctgggactcactagattctgcagtcaaagatgactaatatccttgcatttttgaaatgaagccacagacttctcaataaatcaatgagctgagaaaactgaaacagaaattagagcatggtataaatttggaatgataatgtaaatatta

SEQ ID NO: 148730 - DNA, 660 bp, Homo sapiens
  Payload ID: 9420
  Gene Symbol: LILRB5
  Gene Name: leukocyte immunoglobulin-like receptor, subfamily B (with TM and ITIM domains), member 5
  ENST ID: ENST00000614645
  CDS Start-End: 185-660
aattgttctgaaaaccttgaacatggttggaggcacagagggacggccaaggacaaaggggcactgaggaggcaggaacgacttagaggttcattcccagcggaggggttttgttgctctgccctagcccttggcaccgtggtctcatccgcctgcacagctgagtccagtgggagctgacgccatgaccctcaccctctcagtcctgatttgcctcgggctgagtgtgggccccaggacctgcgtgcaggcaggcaccctccccaaacccaccctctgggctgagccagcctctgtgatagctcgggggaagcccgtgaccctctggtgtcaggggcccctggagactgaggagtaccgtctggataaggagggactcccatgggcccggaagagacagaacccactggagcctggagccaaggccaagttccacattccatccacggtgtatgacagtgcagggcgataccgctgctactatgagacccctgcaggctggtcagagcccagtgaccccctggagctggtggcgacaggattctatgcagaacccactcttttagccctgccgagtcctgtggtggcctcaggaggaaatgtgaccctccagtgtgatacactggacggacttctcacgtttgttcttgttgaggaaga

SEQ ID NO: 148731 - DNA, 2444 bp, Homo sapiens
  Payload ID: 9420
  Gene Symbol: LILRB5
  Gene Name: leukocyte immunoglobulin-like receptor, subfamily B (with TM and ITIM domains), member 5
  ENST ID: ENST00000620244
  CDS Start-End: 79-1947
actctgcgtgtttttgtgtcctgccaggcaccgtggtctcatccgcctgcacagctgagtccagtgggagctgacgccatgaccctcaccctctcagtcctgatttgcctcgggctgagtgtgggccccaggacctgcgtgcaggcaggcaccctccccaaacccaccctctgggctgagccagcctctgtgatagctcgggggaagcccgtgaccctctggtgtcaggggcccctggagactgaggagtaccgtctggataaggagggactcccatgggcccggaagagacagaacccactggagcctggagccaaggccaagttccacattccatccacggtgtatgacagtgcagggcgataccgctgctactatgagacccctgcaggctggtcagagcccagtgaccccctggagctggtggcgacagccctgccgagtcctgtggtggcctcaggaggaaatgtgaccctccagtgtgatacactggacggacttctcacgtttgttcttgttgaggaagaacagaagctccccaggaccctgtactcacagaagctccccaaagggccatcccaggccctgttccctgtgggtcccgtgacccccagctgcaggtggaggttcagatgctattactattacaggaaaaaccctcaggtgtggtcgaaccccagtgacctcctggagattctggtcccaggcgtgtctaggaagccctccctcctgatcccgcagggctctgtcgtggcccgcggaggcagcctgaccctgcagtgtcgctctgatgtcggctatgacatattcgttctgtacaaggagggggaacatgacctcgtccagggctctggccagcagccccaggctgggctctcccaggccaacttcaccctgggccctgtgagccgctcccacgggggccagtacagatgctacggtgcacacaacctctcccctaggtggtcggcccccagcgaccccctggacatcctgatcgcaggactgatccctgacatacccgccctctcggtgcagccgggccccaaggtggcctcaggagagaacgtgaccctgctgtgtcagtcatggcatcagatagacactttctttttgaccaaggagggggcagcccatcccccgctgtgtctaaagtcaaagtaccagtcttatagacaccaggctgaattctccatgagtcctgtgacctcagcccagggtggaacctaccgatgctacagcgcaatcaggtcctacccctacctgctgtccagccctagttacccccaggagctcgtggtctcaggaccctctggggatcccagcctctcacctacaggctccacccccacacctgcaggccctgaggaccagcccctcacccccacggggttggatccccagagtggtctgggaaggcacctgggggttgtgactggggtctcagtggccttcgtcctgctgctgttcctcctcctcttcctcctcctccgacatcggcatcagagcaaacacaggacatcggcccatttctaccgtcctgcaggggctgcggggccagagcccaaggaccagggcctgcagaagagggccagcccagttgctgacatccaggaggaaattctcaatgctgccgtgaaggacacacagcccaaggacggggtggagatggatgctcggcagagcccacacgatgaagacccccaggcagtgacgtatgccgaggtgaaacactccagacctaggagagaaatggcctctcctccctccccactgtctggggaattcctggacacaaaggacagacaggcagaagaggacagacagatggacactgagagagtcctttcctctccaggcccccaggcctccccacccccaccacgttccttacctctcactctcccccgctgcaggctgctgcatctgaagccccccaggatgtgacctacgcccagctacacagcttgaccctcagacgggaggcaactgagcctcctccatcccaggaaagggaacctccagctgaacccagcatctacgcccccctggccatccactagcccacgggggacccagatctcatactcaacagaaggagactcagagactccagaaggcacaggagctgcccccagtggacaccaatgaaccccagccagcctggacccctaacaaagaccaccaggacatcctgggaactctgggactcactagattctgcagtcaaagatgactaatatccttgcatttttgaaatgaagccacagacttctcaataaatcaatgagctgagaaaactgaaacagaaattagagcatggtataaatttggaatgataatgtaaatattacacattaaatgatgaaatcggaaaactacaaatgagcgaatgaattagaaaagaataaaacctacgtaattaatgaccttggcaatgacag

SEQ ID NO: 148732 - DNA, 1864 bp, Homo sapiens
  Payload ID: 9420
  Gene Symbol: LILRB5
  Gene Name: leukocyte immunoglobulin-like receptor, subfamily B (with TM and ITIM domains), member 5
  Uniprot ID: O75023
  ENST ID: ENST00000620714
  CDS Start-End: 70-1545
gtttttgtgtcctgccaggcaccgtggtctcatccgcctgcacagctgagtccagtgggagctgacgccatgaccctcaccctctcagtcctgatttgcctcgggctgagtgtgggccccaggacctgcgtgcaggcaggcaccctccccaaacccaccctctgggctgagccagcctctgtgatagctcgggggaagcccgtgaccctctggtgtcaggggcccctggagactgaggagtaccgtctggataaggagggactcccatgggcccggaagagacagaacccactggagcctggagccaaggccaagttccacattccatccacggtgtatgacagtgcagggcgataccgctgctactatgagacccctgcaggctggtcagagcccagtgaccccctggagctggtggcgacaggcgtgtctaggaagccctccctcctgatcccgcagggctctgtcgtggcccgcggaggcagcctgaccctgcagtgtcgctctgatgtcggctatgacatattcgttctgtacaaggagggggaacatgacctcgtccagggctctggccagcagccccaggctgggctctcccaggccaacttcaccctgggccctgtgagccgctcccacgggggccagtacagatgctacggtgcacacaacctctcccctaggtggtcggcccccagcgaccccctggacatcctgatcgcaggactgatccctgacatacccgccctctcggtgcagccgggccccaaggtggcctcaggagagaacgtgaccctgctgtgtcagtcatggcatcagatagacactttctttttgaccaaggagggggcagcccatcccccgctgtgtctaaagtcaaagtaccagtcttatagacaccaggctgaattctccatgagtcctgtgacctcagcccagggtggaacctaccgatgctacagcgcaatcaggtcctacccctacctgctgtccagccctagttacccccaggagctcgtggtctcaggaccctctggggatcccagcctctcacctacaggctccacccccacacctgcaggccctgaggaccagcccctcacccccacggggttggatccccagagtggtctgggaaggcacctgggggttgtgactggggtctcagtggccttcgtcctgctgctgttcctcctcctcttcctcctcctccgacatcggcatcagagcaaacacaggacatcggcccatttctaccgtcctgcaggggctgcggggccagagcccaaggaccagggcctgcagaagagggccagcccagttgctgacatccaggaggaaattctcaatgctgccgtgaaggacacacagcccaaggacggggtggagatggatgctcgggctgctgcatctgaagccccccaggatgtgacctacgcccagctgcacagcttgaccctcagacgggaggcaactgagcctcctccatcccaggaaagggaacctccagctgaacccagcatctacgcccccctggccatccactagcccacgggggacccagatctcatactcaacagaaggagactcagagactccagaaggcacaggagctgcccccagtggacaccaatgaaccccagccagcctggacccctaacaaagaccaccaggacatcctgggaactctgggactcactagattctgcagtcaaagatgactaatatccttgcatttttgaaatgaagccacagacttctcaataaatcaatgagctgagaaaactgaaacagaaattagagcatggtataaatttggaatgataatgtaaatattacacattaaatgatgaaatcggaaaactac

SEQ ID NO: 148733 - DNA, 2137 bp, Homo sapiens; identical to SEQ ID NO: 148729
  Payload ID: 9420
  Gene Symbol: LILRB5
  Gene Name: leukocyte immunoglobulin-like receptor, subfamily B (with TM and ITIM domains), member 5
  Uniprot ID: O75023
  ENST ID: ENST00000621867
  CDS Start-End: 72-1847

SEQ ID NO: 148734 - DNA, 639 bp, Homo sapiens
  Payload ID: 9420
  Gene Symbol: LILRB5
  Gene Name: leukocyte immunoglobulin-like receptor, subfamily B (with TM and ITIM domains), member 5
  ENST ID: ENST00000622648
  CDS Start-End: 185-639
aattgttctgaaaaccttgaacatggttggaggcacagagggacggccaaggacaaaggggcactgaggaggcaggaacgacttagaggttcattcccagcggaggggttttgttgctctgccctagcccttggcaccgtggtctcatccgcctgcacagctgagtccagtgggagctgacgccatgaccctcaccctctcagtcctgatttgcctcgggctgagtgtgggccccaggacctgcgtgcaggcaggcaccctccccaaacccaccctctgggctgagccagcctctgtgatagctcgggggaagcccgtgaccctctggtgtcaggggcccctggagactgaggagtaccgtctggataaggagggactcccatgggcccggaagagacagaacccactggagcctggagccaaggccaagttccacattccatccacggtgtatgacagtgcagggcgataccgctgctactatgagacccctgcaggctggtcagagcccagtgaccccctggagctggtggcgacaggattctatgcagaacccactcttttagccctgccgagtcctgtggtggcctcaggaggaaatgtgaccctccagtgtgatacactggacggacttctcac

SEQ ID NO: 148735 - DNA, 2204 bp, Homo sapiens; identical to SEQ ID NO: 148725
  Payload ID: 9420
  Gene Symbol: LILRB5
  Gene Name: leukocyte immunoglobulin-like receptor, subfamily B (with TM and ITIM domains), member 5
  ENST ID: ENST00000610568
  CDS Start-End: 70-2001

SEQ ID NO: 148736 - DNA, 665 bp, Homo sapiens
  Payload ID: 9420
  Gene Symbol: LILRB5
  Gene Name: leukocyte immunoglobulin-like receptor, subfamily B (with TM and ITIM domains), member 5
  ENST ID: ENST00000618355
  CDS Start-End: 185-665
aattgttctgaaaaccttgaacatggttggaggcacagagggacggccaaggacaaaggggcactgaggaggcaggaacgacttagaggttcattcccagcggaggggttttgttgctctgccctagcccttggcaccgtggtctcatccgcctgcacagctgagtccagtgggagctgacgccatgaccctcaccctctcagtcctgatttgcctcgggctgagtgtgggccccaggacctgcgtgcaggcaggcaccctccccaaacccaccctctgggctgagccagcctctgtgatagctcgggggaagcccgtgaccctctggtgtcaggggcccctggagactgaggagtaccgtctggataaggagggactcccatgggcccggaagagacagaacccactggagcctggagccaaggccaagttccacattccatccacggtgtatgacagtgcagggcgataccgctgctactatgagacccctgcaggctggtcagagcccagtgaccccctggagctggtggcgacaggattctatgcagaacccactcttttagccctgccgagtcctgtggtggcctcaggaggaaatgtgaccctccagtgtgatacactggacggacttctcacgtttgttcttgttgaggaagaacaga

SEQ ID NO: 148737 - DNA, 2189 bp, Homo sapiens
  Payload ID: 9420
  Gene Symbol: LILRB5
  Gene Name: leukocyte immunoglobulin-like receptor, subfamily B (with TM and ITIM domains), member 5
  Uniprot ID: O75023
  ENST ID: ENST00000621193
  CDS Start-End: 100-1872
agaacccagcctccagtccacactctgcgtgtttttgtgtcctgccaggcaccgtggtctcatccgcctgcacagctgagtccagtgggagctgacgccatgaccctcaccctctcagtcctgatttgcctcgggctgagtgtgggccccaggacctgcgtgcaggcaggcaccctccccaaacccaccctctgggctgagccagcctctgtgatagctcgggggaagcccgtgaccctctggtgtcaggggcccctggagactgaggagtaccgtctggataaggagggactcccatgggcccggaagagacagaacccactggagcctggagccaaggccaagttccacattccatccacggtgtatgacagtgcagggcgataccgctgctactatgagacccctgcaggctggtcagagcccagtgaccccctggagctggtggcgacaggattctatgcagaacccactcttttagccctgccgagtcctgtggtggcctcaggaggaaatgtgaccctccagtgtgatacactggacggacttctcacgtttgttcttgttgaggaagaacagaagctccccaggaccctgtactcacagaagctccccaaagggccatcccaggccctgttccctgtgggtcccgtgacccccagctgcaggtggaggttcagatgctattactattacaggaaaaaccctcaggtgtggtcgaaccccagtgacctcctggagattctggtcccaggcgtgtctaggaagccctccctcctgatcccgcagggctctgtcgtggcccgcggaggcagcctgaccctgcagtgtcgctctgatgtcggctatgacatattcgttctgtacaaggagggggaacatgacctcgtccagggctctggccagcagccccaggctgggctctcccaggccaacttcaccctgggccctgtgagccgctcccacgggggccagtacagatgctacggtgcacacaacctctcccctaggtggtcggcccccagcgaccccctggacatcctgatcgcaggactgatccctgacatacccgccctctcggtgcagccgggccccaaggtggcctcaggagagaacgtgaccctgctgtgtcagtcatggcatcagatagacactttctttttgaccaaggagggggcagcccatcccccgctgtgtctaaagtcaaagtaccagtcttatagacaccaggctgaattctccatgagtcctgtgacctcagcccagggtggaacctaccgatgctacagcgcaatcaggtcctacccctacctgctgtccagccctagttacccccaggagctcgtggtctcaggaccctctggggatcccagcctctcacctacaggctccacccccacacctggccctgaggaccagcccctcacccccacggggttggatccccagagtggtctgggaaggcacctgggggttgtgactggggtctcagtggccttcgtcctgctgctgttcctcctcctcttcctcctcctccgacatcggcatcagagcaaacacaggacatcggcccatttctaccgtcctgcaggggctgcggggccagagcccaaggaccagggcctgcagaagagggccagcccagttgctgacatccaggaggaaattctcaatgctgccgtgaaggacacacagcccaaggacggggtggagatggatgctcgggctgctgcatctgaagccccccaggatgtgacctacgcccagctacacagcttgaccctcagacgggaggcaactgagcctcctccatcccaggaaagggaacctccagctgaacccagcatctacgcccccctggccatccactagcccacgggggacccagatctcatactcaacagaaggagactcagagactccagaaggcacaggagctgcccccagtggacaccaatgaaccccagccagcctggacccctaacaaagaccaccaggacatcctgggaactctgggactcactagattctgcagtcaaagatgactaatatccttgcatttttgaaatgaagccacagacttctcaataaatcaatgagctgagaaaactgaaacagaaattagagcatggtataaatttggaatgataatgtaaatattacacattaaatgatgaaatcggaaaact

SEQ ID NO: 148738 - DNA, 1872 bp, Homo sapiens
  Payload ID: 9420
  Gene Symbol: LILRB5
  Gene Name: leukocyte immunoglobulin-like receptor, subfamily B (with TM and ITIM domains), member 5
  ENST ID: ENST00000621221
  CDS Start-End: 81-1553
acactctgcgtgtttttgtgtcctgccaggcaccgtggtctcatccgcctgcacagctgagtccagtgggagctgacgccatgaccctcaccctctcagtcctgatttgcctcgggctgagtgtgggccccaggacctgcgtgcaggcaggcaccctccccaaacccaccctctgggctgagccagcctctgtgatagctcgggggaagcccgtgaccctctggtgtcaggggcccctggagactgaggagtaccgtctggataaggagggactcccatgggcccggaagagacagaacccactggagcctggagccaaggccaagttccacattccatccacggtgtatgacagtgcagggcgataccgctgctactatgagacccctgcaggctggtcagagcccagtgaccccctggagctggtggcgacaggcgtgtctaggaagccctccctcctgatcccgcagggctctgtcgtggcccgcggaggcagcctgaccctgcagtgtcgctctgatgtcggctatgacatattcgttctgtacaaggagggggaacatgacctcgtccagggctctggccagcagccccaggctgggctctcccaggccaacttcaccctgggccctgtgagccgctcccacgggggccagtacagatgctacggtgcacacaacctctcccctaggtggtcggcccccagcgaccccctggacatcctgatcgcaggactgatccctgacatacccgccctctcggtgcagccgggccccaaggtggcctcaggagagaacgtgaccctgctgtgtcagtcatggcatcagatagacactttctttttgaccaaggagggggcagcccatcccccgctgtgtctaaagtcaaagtaccagtcttatagacaccaggctgaattctccatgagtcctgtgacctcagcccagggtggaacctaccgatgctacagcgcaatcaggtcctacccctacctgctgtccagccctagttacccccaggagctcgtggtctcaggaccctctggggatcccagcctctcacctacaggctccacccccacacctggccctgaggaccagcccctcacccccacggggttggatccccagagtggtctgggaaggcacctgggggttgtgactggggtctcagtggccttcgtcctgctgctgttcctcctcctcttcctcctcctccgacatcggcatcagagcaaacacaggacatcggcccatttctaccgtcctgcaggggctgcggggccagagcccaaggaccagggcctgcagaagagggccagcccagttgctgacatccaggaggaaattctcaatgctgccgtgaaggacacacagcccaaggacggggtggagatggatgctcgggctgctgcatctgaagccccccaggatgtgacctacgcccagctacacagcttgaccctcagacgggaggcaactgagcctcctccatcccaggaaagggaacctccagctgaacccagcatctacgcccccctggccatccactagcccacgggggacccagatctcatactcaacagaaggagactcagagactccagaaggcacaggagctgcccccagtggacaccaatgaaccccagccagcctggacccctaacaaagaccaccaggacatcctgggaactctgggactcactagattctgcagtcaaagatgactaatatccttgcatttttgaaatgaagccacagacttctcaataaatcaatgagctgagaaaactgaaacagaaattagagcatggtataaatttggaatgataatgtaaatattacacattaaatgatgaaatcggaaaactac

SEQ ID NO: 148739 - DNA, 1964 bp, Homo sapiens
  Payload ID: 9420
  Gene Symbol: LILRB5
  Gene Name: leukocyte immunoglobulin-like receptor, subfamily B (with TM and ITIM domains), member 5
  Uniprot ID: O75023
  ENST ID: ENST00000615429
  CDS Start-End: 112-1587
cttgtgacagggagaacccagcctccagtccacactctgcgtgtttttgtgtcctgccaggcaccgtggtctcatccgcctgcacagctgagtccagtgggagctgacgccatgaccctcaccctctcagtcctgatttgcctcgggctgagtgtgggccccaggacctgcgtgcaggcaggcaccctccccaaacccaccctctgggctgagccagcctctgtgatagctcgggggaagcccgtgaccctctggtgtcaggggcccctggagactgaggagtaccgtctggataaggagggactcccatgggcccggaagagacagaacccactggagcctggagccaaggccaagttccacattccatccacggtgtatgacagtgcagggcgataccgctgctactatgagacccctgcaggctggtcagagcccagtgaccccctggagctggtggcgacaggcgtgtctaggaagccctccctcctgatcccgcagggctctgtcgtggcccgcggaggcagcctgaccctgcagtgtcgctctgatgtcggctatgacatattcgttctgtacaaggagggggaacatgacctcgtccagggctctggccagcagccccaggctgggctctcccaggccaacttcaccctgggccctgtgagccgctcccacgggggccagtacagatgctacggtgcacacaacctctcccctaggtggtcggcccccagcgaccccctggacatcctgatcgcaggactgatccctgacatacccgccctctcggtgcagccgggccccaaggtggcctcaggagagaacgtgaccctgctgtgtcagtcatggcatcagatagacactttctttttgaccaaggagggggcagcccatcccccgctgtgtctaaagtcaaagtaccagtcttatagacaccaggctgaattctccatgagtcctgtgacctcagcccagggtggaacctaccgatgctacagcgcaatcaggtcctacccctacctgctgtccagccctagttacccccaggagctcgtggtctcaggaccctctggggatcccagcctctcacctacaggctccacccccacacctgcaggccctgaggaccagcccctcacccccacggggttggatccccagagtggtctgggaaggcacctgggggttgtgactggggtctcagtggccttcgtcctgctgctgttcctcctcctcttcctcctcctccgacatcggcatcagagcaaacacaggacatcggcccatttctaccgtcctgcaggggctgcggggccagagcccaaggaccagggcctgcagaagagggccagcccagttgctgacatccaggaggaaattctcaatgctgccgtgaaggacacacagcccaaggacggggtggagatggatgctcgggctgctgcatctgaagccccccaggatgtgacctacgcccagctacacagcttgaccctcagacgggaggcaactgagcctcctccatcccaggaaagggaacctccagctgaacccagcatctacgcccccctggccatccactagcccacgggggacccagatctcatactcaacagaaggagactcagagactccagaaggcacaggagctgcccccagtggacaccaatgaaccccagccagcctggacccctaacaaagaccaccaggacatcctgggaactctgggactcactagattctgcagtcaaagatgactaatatccttgcatttttgaaatgaagccacagacttctcaataaatcaatgagctgagaaaactgaaacagaaattagagcatggtataaatttggaatgataatgtaaatattacacattaaatgatgaaatcggaaaactacaaatgagcgaatgaattagaaaagaataaaacctacgtaattaatgaccttggcaatg

SEQ ID NO: 148740 - DNA, 1864 bp, Homo sapiens
  Payload ID: 9420
  Gene Symbol: LILRB5
  Gene Name: leukocyte immunoglobulin-like receptor, subfamily B (with TM and ITIM domains), member 5
  Uniprot ID: O75023
  ENST ID: ENST00000622596
  CDS Start-End: 70-1545
gtttttgtgtcctgccaggcaccgtggtctcatccgcctgcacagctgagtccagtgggagctgacgccatgaccctcaccctctcagtcctgatttgcctcgggctgagtgtgggccccaggacctgcgtgcaggcaggcaccctccccaaacccaccctctgggctgagccagcctctgtgatagctcgggggaagcccgtgaccctctggtgtcaggggcccctggagactgaggagtaccgtctggataaggagggactcccatgggcccggaagagacagaacccactggagcctggagccaaggccaagttccacattccatccacggtgtatgacagtgcagggcgataccgctgctactatgagacccctgcaggctggtcagagcccagtgaccccctggagctggtggcgacaggcgtgtctaggaagccctccctcctgatcccgcagggctctgtcgtggcccgcggaggcagcctgaccctgcagtgtcgctctgatgtcggctatgacatattcgttctgtacaaggagggggaacatgacctcgtccagggctctggccagcagccccaggctgggctctcccaggccaacttcaccctgggccctgtgagccgctcccacgggggccagtacagatgctacggtgcacacaacctctcccctaggtggtcggcccccagcgaccccctggacatcctgatcgcaggactgatccctgacatacccgccctctcggtgcagccgggccccaaggtggcctcaggagagaacgtgaccctgctgtgtcagtcatggcatcagatagacactttctttttgaccaaggagggggcagcccatcccccgctgtgtctaaagtcaaagtaccagtcttatagacaccaggctgaattctccatgagtcctgtgacctcagcccagggtggaacctaccgatgctacagcgcaatcaggtcctacccctacctgctgtccagccctagttacccccaggagctcgtggtctcaggaccctctggggatcccagcctctcacctacaggctccacccccacacctgcaggccctgaggaccagcccctcacccccacggggttggatccccagagtggtctgggaaggcacctgggggttgtgactggggtctcagtggccttcgtcctgctgctgttcctcctcctcttcctcctcctccgacatcggcatcagagcaaacacaggacatcggcccatttctaccgtcctgcaggggctgcggggccagagcccaaggaccagggcctgcagaagagggccagcccagttgctgacatccaggaggaaattctcaatgctgccgtgaaggacacacagcccaaggacggggtggagatggatgctcgggctgctgcatctgaagccccccaggatgtgacctacgcccagctacacagcttgaccctcagacgggaggcaactgagcctcctccatcccaggaaagggaacctccagctgaacccagcatctacgcccccctggccatccactagcccacgggggacccagatctcatactcaacagaaggagactcagagactccagaaggcacaggagctgcccccagtggacaccaatgaaccccagccagcctggacccctaacaaagaccaccaggacatcctgggaactctgggactcactagattctgcagtcaaagatgactaatatccttgcatttttgaaatgaagccacagacttctcaataaatcaatgagctgagaaaactgaaacagaaattagagcatggtataaatttggaatgataatgtaaatattacacattaaatgatgaaatcggaaaactac

SEQ ID NO: 148741 - DNA, 2189 bp, Homo sapiens; identical to SEQ ID NO: 148737
  Payload ID: 9420
  Gene Symbol: LILRB5
  Gene Name: leukocyte immunoglobulin-like receptor, subfamily B (with TM and ITIM domains), member 5
  Uniprot ID: O75023
  ENST ID: ENST00000617355
  CDS Start-End: 100-1872

SEQ ID NO: 148742 - DNA, 2189 bp, Homo sapiens
  Payload ID: 9420
  Gene Symbol: LILRB5
  Gene Name: leukocyte immunoglobulin-like receptor, subfamily B (with TM and ITIM domains), member 5
  Uniprot ID: O75023
  ENST ID: ENST00000616805
  CDS Start-End: 100-1872
agaacccagcctccagtccacactctgcgtgtttttgtgtcctgccaggcaccgtggtctcatccgcctgcacagctgagtccagtgggagctgacgccatgaccctcaccctctcagtcctgatttgcctcgggctgagtgtgggccccaggacctgcgtgcaggcaggcaccctccccaaacccaccctctgggctgagccagcctctgtgatagctcgggggaagcccgtgaccctctggtgtcaggggcccctggagactgaggagtaccgtctggataaggagggactcccatgggcccggaagagacagaacccactggagcctggagccaaggccaagttccacattccatccacggtgtatgacagtgcagggcgataccgctgctactatgagacccctgcaggctggtcagagcccagtgaccccctggagctggtggcgacaggattctatgcagaacccactcttttagccctgccgagtcctgtggtggcctcaggaggaaatgtgaccctccagtgtgatacactggacggacttctcacgtttgttcttgttgaggaagaacagaagctccccaggaccctgtactcacagaagctccccaaagggccatcccaggccctgttccctgtgggtcccgtgacccccagctgcaggtggaggttcagatgctattactattacaggaaaaaccctcaggtgtggtcgaaccccagtgacctcctggagattctggtcccaggcgtgtctaggaagccctccctcctgatcccgcagggctctgtcgtggcccgcggaggcagcctgaccctgcagtgtcgctctgatgtcggctatgacatattcgttctgtacaaggagggggaacatgacctcgtccagggctctggccagcagccccaggctgggctctcccaggccaacttcaccctgggccctgtgagccgctcccacgggggccagtacagatgctacggtgcacacaacctctcccctaggtggtcggcccccagcgaccccctggacatcctgatcgcaggactgatccctgacatacccgccctctcggtgcagccgggccccaaggtggcctcaggagagaacgtgaccctgctgtgtcagtcatggcatcagatagacactttctttttgaccaaggagggggcagcccatcccccgctgtgtctaaagtcaaagtaccagtcttatagacaccaggctgaattctccatgagtcctgtgacctcagcccagggtggaacctaccgatgctacagcgcaatcaggtcctacccctacctgctgtccagccctagttacccccaggagctcgtggtctcaggaccctctggggatcccagcctctcacctacaggctccacccccacacctggccctgaggaccagcccctcacccccacggggttggatccccagagtggtctgggaaggcacctgggggttgtgactggggtctcagtggccttcgtcctgctgctgttcctcctcctcttcctcctcctccgacatcggcatcagagcaaacacaggacatcggcccatttctaccgtcctgcaggggctgcggggccagagcccaaggaccagggcctgcagaagagggccagcccagttgctgacatccaggaggaaattctcaatgctgccgtgaaggacacacagcccaaggacggggtggagatggatgctcgggctgctgcatctgaagccccccaggatgtgacctacgcccagctgcacagcttgaccctcagacgggaggcaactgagcctcctccatcccaggaaagggaacctccagctgaacccagcatctacgcccccctggccatccactagcccacgggggacccagatctcatactcaacagaaggagactcagagactccagaaggcacaggagctgcccccagtggacaccaatgaaccccagccagcctggacccctaacaaagaccaccaggacatcctgggaactctgggactcactagattctgcagtcaaagatgactaatatccttgcatttttgaaatgaagccacagacttctcaataaatcaatgagctgagaaaactgaaacagaaattagagcatggtataaatttggaatgataatgtaaatattacacattaaatgatgaaatcggaaaact

SEQ ID NO: 148743 - DNA, 2264 bp, Homo sapiens
  Payload ID: 9420
  Gene Symbol: LILRB5
  Gene Name: leukocyte immunoglobulin-like receptor, subfamily B (with TM and ITIM domains), member 5
  Uniprot ID: O75023
  ENST ID: ENST00000614318
  CDS Start-End: 112-1887
cttgtgacagggagaacccagcctccagtccacactctgcgtgtttttgtgtcctgccaggcaccgtggtctcatccgcctgcacagctgagtccagtgggagctgacgccatgaccctcaccctctcagtcctgatttgcctcgggctgagtgtgggccccaggacctgcgtgcaggcaggcaccctccccaaacccaccctctgggctgagccagcctctgtgatagctcgggggaagcccgtgaccctctggtgtcaggggcccctggagactgaggagtaccgtctggataaggagggactcccatgggcccggaagagacagaacccactggagcctggagccaaggccaagttccacattccatccacggtgtatgacagtgcagggcgataccgctgctactatgagacccctgcaggctggtcagagcccagtgaccccctggagctggtggcgacaggattctatgcagaacccactcttttagccctgccgagtcctgtggtggcctcaggaggaaatgtgaccctccagtgtgatacactggacggacttctcacgtttgttcttgttgaggaagaacagaagctccccaggaccctgtactcacagaagctccccaaagggccatcccaggccctgttccctgtgggtcccgtgacccccagctgcaggtggaggttcagatgctattactattacaggaaaaaccctcaggtgtggtcgaaccccagtgacctcctggagattctggtcccaggcgtgtctaggaagccctccctcctgatcccgcagggctctgtcgtggcccgcggaggcagcctgaccctgcagtgtcgctctgatgtcggctatgacatattcgttctgtacaaggagggggaacatgacctcgtccagggctctggccagcagccccaggctgggctctcccaggccaacttcaccctgggccctgtgagccgctcccacgggggccagtacagatgctacggtgcacacaacctctcccctaggtggtcggcccccagcgaccccctggacatcctgatcgcaggactgatccctgacatacccgccctctcggtgcagccgggccccaaggtggcctcaggagagaacgtgaccctgctgtgtcagtcatggcatcagatagacactttctttttgaccaaggagggggcagcccatcccccgctgtgtctaaagtcaaagtaccagtcttatagacaccaggctgaattctccatgagtcctgtgacctcagcccagggtggaacctaccgatgctacagcgcaatcaggtcctacccctacctgctgtccagccctagttacccccaggagctcgtggtctcaggaccctctggggatcccagcctctcacctacaggctccacccccacacctgcaggccctgaggaccagcccctcacccccacggggttggatccccagagtggtctgggaaggcacctgggggttgtgactggggtctcagtggccttcgtcctgctgctgttcctcctcctcttcctcctcctccgacatcggcatcagagcaaacacaggacatcggcccatttctaccgtcctgcaggggctgcggggccagagcccaaggaccagggcctgcagaagagggccagcccagttgctgacatccaggaggaaattctcaatgctgccgtgaaggacacacagcccaaggacggggtggagatggatgctcgggctgctgcatctgaagccccccaggatgtgacctacgcccagctacacagcttgaccctcagacgggaggcaactgagcctcctccatcccaggaaagggaacctccagctgaacccagcatctacgcccccctggccatccactagcccacgggggacccagatctcatactcaacagaaggagactcagagactccagaaggcacaggagctgcccccagtggacaccaatgaaccccagccagcctggacccctaacaaagaccaccaggacatcctgggaactctgggactcactagattctgcagtcaaagatgactaatatccttgcatttttgaaatgaagccacagacttctcaataaatcaatgagctgagaaaactgaaacagaaattagagcatggtataaatttggaatgataatgtaaatattacacattaaatgatgaaatcggaaaactacaaatgagcgaatgaattagaaaagaataaaacctacgtaattaatgaccttggcaatg

SEQ ID NO: 148744 - DNA, 2318 bp, Homo sapiens
  Payload ID: 9420
  Gene Symbol: LILRB5
  Gene Name: leukocyte immunoglobulin-like receptor, subfamily B (with TM and ITIM domains), member 5
  ENST ID: ENST00000615267
  CDS Start-End: 70-2001
gtttttgtgtcctgccaggcaccgtggtctcatccgcctgcacagctgagtccagtgggagctgacgccatgaccctcaccctctcagtcctgatttgcctcgggctgagtgtgggccccaggacctgcgtgcaggcaggcaccctccccaaacccaccctctgggctgagccagcctctgtgatagctcgggggaagcccgtgaccctctggtgtcaggggcccctggagactgaggagtaccgtctggataaggagggactcccatgggcccggaagagacagaacccactggagcctggagccaaggccaagttccacattccatccacggtgtatgacagtgcagggcgataccgctgctactatgagacccctgcaggctggtcagagcccagtgaccccctggagctggtggcgacaggattctatgcagaacccactcttttagccctgccgagtcctgtggtggcctcaggaggaaatgtgaccctccagtgtgatacactggacggacttctcacgtttgttcttgttgaggaagaacagaagctccccaggaccctgtactcacagaagctccccaaagggccatcccaggccctgttccctgtgggtcccgtgacccccagctgcaggtggaggttcagatgctattactattacaggaaaaaccctcaggtgtggtcgaaccccagtgacctcctggagattctggtcccaggcgtgtctaggaagccctccctcctgatcccgcagggctctgtcgtggcccgcggaggcagcctgaccctgcagtgtcgctctgatgtcggctatgacatattcgttctgtacaaggagggggaacatgacctcgtccagggctctggccagcagccccaggctgggctctcccaggccaacttcaccctgggccctgtgagccgctcccacgggggccagtacagatgctacggtgcacacaacctctcccctaggtggtcggcccccagcgaccccctggacatcctgatcgcaggactgatccctgacatacccgccctctcggtgcagccgggccccaaggtggcctcaggagagaacgtgaccctgctgtgtcagtcatggcatcagatagacactttctttttgaccaaggagggggcagcccatcccccgctgtgtctaaagtcaaagtaccagtcttatagacaccaggctgaattctccatgagtcctgtgacctcagcccagggtggaacctaccgatgctacagcgcaatcaggtcctacccctacctgctgtccagccctagttacccccaggagctcgtggtctcaggaccctctggggatcccagcctctcacctacaggctccacccccacacctggccctgaggaccagcccctcacccccacggggttggatccccagagtggtctgggaaggcacctgggggttgtgactggggtctcagtggccttcgtcctgctgctgttcctcctcctcttcctcctcctccgacatcggcatcagagcaaacacaggacatcggcccatttctaccgtcctgcaggggctgcggggccagagcccaaggaccagggcctgcagaagagggccagcccagttgctgacatccaggaggaaattctcaatgctgccgtgaaggacacacagcccaaggacggggtggagatggatgctcggcagagcccacacgatgaagacccccaggcagtgacgtatgccgaggtgaaacactccagacctaggagagaaatggcctctcctccctccccactgtctggggaattcctggacacaaaggacagacaggcagaagaggacagacagatggacactgaggctgctgcatctgaagccccccaggatgtgacctacgcccagctacacagcttgaccctcagacgggaggcaactgagcctcctccatcccaggaaagggaacctccagctgaacccagcatctacgcccccctggccatccactagcccacgggggacccagatctcatactcaacagaaggagactcagagactccagaaggcacaggagctgcccccagtggacaccaatgaaccccagccagcctggacccctaacaaagaccaccaggacatcctgggaactctgggactcactagattctgcagtcaaagatgactaatatccttgcatttttgaaatgaagccacagacttctcaataaatcaatgagctgagaaaactgaaacagaaattagagcatggtataaatttggaatgataatgtaaatattacacattaaatgatgaaatcggaaaact

SEQ ID NO: 148745 - DNA, 1542 bp, Homo sapiens
  Payload ID: 9421
  Gene Symbol: LENG1
  Gene Name: leukocyte receptor cluster (LRC) member 1
  Uniprot ID: Q96BZ8
  ENST ID: ENST00000222224
  CDS Start-End: 188-982
aacgcctagcattcgctgtgataaagggcgtctcagccaatcacctgtcgctacaggccagggggccgtaccaactaattcggaaccaatccgcggtcgaagtagggacaagaaaaaggggggcatcctctcgccaatcggaagtgcaaagaggcgggcgtgccagtccctggacagctacgacgccatgaatatcttgcccaagaagagctggcacgtccggaacaaggacaatgtcgcccgcgtgcggcgtgacgaggcccaggcccgggaggaggagaaggagcgtgagcggagggtgctgctggctcagcaagaggcccgtacagaattcctacggaagaaagccagacatcagaactcactgcctgagcttgaagcagcagaggcgggagccccaggttctggccctgtggacctgtttcgggagctgctggaggaagggaaaggagtgatcagaggcaataaagagtacaaggaagaaaagcgacaggagaaagagaggcaagagaaagctctgggcatcctgacatacctgggccagagtgcagcggaggcacagactcaacccccttggtaccagctacccccagggcgagggggccccccgcccggcccagccccagatgagaagatcaagagccgtctggaccctctgcgggagatgcagaagcatctggggaagaagagacagcacggcggtgatgaaggcagtcgcagcagaaaggaaaaggaggggtctgagaagcagcgacccaaggagcctccatccctggaccagcttcgagctgaacgtctgcggagggaagcagctgagaggtctcgggcagaggccctgctggcccgggtccaaggccgggcactacaggagggtcagccggaagaagacgagacggatgaccggcggcggcggtacaactcccaattcaacccccagctggcccggcgcccccgccagcaggaccctcaccttactcactgactcctgagggggtacaggagaggccgctgctgccagccgtcatataaaactatttattcataaatattttccaaaatgaaaataggtttaccaaaaaatgtccctcactggggaggggaggagggggcagccctcgcccccgggcccccagggtggggctgagaggaaaacctcccggccccctccctgcttcctgggagagggggatgccccgtggcttggggcctccctccagtcttccagggcagggccctcacctgggcagggggatcagcatgcgggggaagggggtgggtagagggaggggccggtgtcactggaggtcccggtcctccaggtagcggtactcaaaggtgaagccttccttcttccgctggccccacttctcgtagtcaaagtagatgtaggtgccctggccgggggagaaggcggtcagtgagtggacgaggaggtggtctgggatctgggccggaccaacagacaaaggggacaattcttagggctgtggatgtgtcaggcaccgggccagctgccctgcacgcacacactctcatccatcc

SEQ ID NO: 148746 - DNA, 886 bp, Homo sapiens
  Payload ID: 9421
  Gene Symbol: LENG1
  Gene Name: leukocyte receptor cluster (LRC) member 1
  ENST ID: ENST00000619669
  CDS Start-End: 14-808
cagctacgacgccatgaatatcttgcccaagaagagctggcacgtccggaacaaggacaatgtcgcccgcgtgcggcgtgacgaggcccaggcccgggaggaggagaaggagcgtgagcggagggtgctgctggctcagcaagaggcccgtacagaattcctacggaagaaagccagacatcagaactcactgcctgagcttgaagcagcagaggcgggagccccaggttctggccctgtggacctgtttcgggagctgctggaggaagggaaaggagtgatcagaggcaataaagagtacgaggaagaaaagcgacaggagaaagagaggcaagagaaagctctgggcatcctgacatacctgggccagagtgcagcggaggcacagactcaacccccttggtaccagctacccccagggcgagggggccccccgcccggcccagccccagatgagaagatcaagagccgtctggaccctctgcgggagatgcagaagcatctggggaagaagagacagcacggcggtgatgaaggcagtcgcagcagaaaggaaaaggaggggtctgagaagcagcgacccaaggagcctccatccctggaccagcttcgagctgaacgtctgcggagggaagcagctgagaggtctcgggcagaggccctgctggcccgggtccaaggccgggcactacaggagggtcagccggaagaagacgagacggatgaccggcggcggcggtacaactcccaattcaacccccagctggcccggcgcccccgccagcaggaccctcaccttactcactgactcctgagggggtacaggagaggccgctgctgccagccgtcatataaaactatttattcataaatattttccaaaatg

SEQ ID NO: 148747 - DNA, 941 bp, Homo sapiens
  Payload ID: 9421
  Gene Symbol: LENG1
  Gene Name: leukocyte receptor cluster (LRC) member 1
  Uniprot ID: Q96BZ8
  ENST ID: ENST00000613622
  CDS Start-End: 49-843
ggaagtgcaaagaggcgggcgtgccagtccctggacagctacgacgccatgaatatcttgcccaagaagagctggcacgtccggaacaaggacaatgtcgcccgcgtgcggcgtgacgaggcccaggcccgggaggaggagaaggagcgtgagcggagggtgctgctggctcagcaagaggcccgtacagaattcctacggaagaaagccagacatcagaactcactgcctgagcttgaagcagcagaggcgggagccccaggttctggccctgtggacctgtttcgggagctgctggaggaagggaaaggagtgatcagaggcaataaagagtacgaggaagaaaagcgacaggagaaagagaggcaagagaaagctctgggcatcctgacatacctgggccagagtgcagcggaggcacagactcaacccccttggtaccagctacccccagggcgagggggccccccgcccggcccagccccagatgagaagatcaagagccgtctggaccctctgcgggagatgcagaagcatctggggaagaagagacagcacggcggtgatgaaggcagtcgcagcagaaaggaaaaggaggggtctgagaagcagcgacccaaggagcctccatccctggaccagcttcgagctgaacgtctgcggagggaagcagctgagaggtctcgggcagaggccctgctggcccgggtccaaggccgggcactacaggagggtcagccggaagaagacgagacggatgaccggcggcggcggtacaactcccaattcaacccccagctggcccggcgcccccgccagcaggaccctcaccttactcactgactcctgagggggtacaggagaggccgctgctgccagccgtcatataaaactatttattcataaatattttccaaaatgaaaataggtttaccaaaaaa

SEQ ID NO: 148748 - DNA, 886 bp, Homo sapiens; identical to SEQ ID NO: 148746
  Payload ID: 9421
  Gene Symbol: LENG1
  Gene Name: leukocyte receptor cluster (LRC) member 1
  ENST ID: ENST00000621285
  CDS Start-End: 14-808

SEQ ID NO: 148749 - DNA, 886 bp, Homo sapiens; identical to SEQ ID NO: 148746
  Payload ID: 9421
  Gene Symbol: LENG1
  Gene Name: leukocyte receptor cluster (LRC) member 1
  ENST ID: ENST00000616816
  CDS Start-End: 14-808

SEQ ID NO: 148750 - DNA, 886 bp, Homo sapiens; identical to SEQ ID NO: 148746
  Payload ID: 9421
  Gene Symbol: LENG1
  Gene Name: leukocyte receptor cluster (LRC) member 1
  ENST ID: ENST00000617592
  CDS Start-End: 14-808

SEQ ID NO: 148751 - DNA, 943 bp, Homo sapiens
  Payload ID: 9421
  Gene Symbol: LENG1
  Gene Name: leukocyte receptor cluster (LRC) member 1
  Uniprot ID: Q96BZ8
  ENST ID: ENST00000616103
  CDS Start-End: 49-843
ggaagtgcaaagaggcgggcgtgccagtccctggacagctacgacgccatgaatatcttgcccaagaagagctggcacgtccggaacaaggacaatgtcgcccgcgtgcggcgtgacgaggcccaggcccgggaggaggagaaggagcgtgagcggagggtgctgctggctcagcaagaggcccgtacagaattcctacggaagaaagccagacatcagaactcactgcctgagcttgaagcagcagaggcgggagccccaggttctggccctgtggacctgtttcgggagctgctggaggaagggaaaggagtgatcagaggcaataaagagtacgaggaagaaaagcgacaggagaaagagaggcaagagaaagctctgggcatcctgacatacctgggccagagtgcagcggaggcacagactcaacccccttggtaccagctacccccagggcgagggggccccccgcccggcccagccccagatgagaagatcaagagccgtctggaccctctgcgggagatgcagaagcatctggggaagaagagacagcacggcggtgatgaaggcagtcgcagcagaaaggaaaaggaggggtctgagaagcagcgacccaaggagcctccatccctggaccagcttcgagctgaacgtctgcggagggaagcagctgagaggtctcgggcagaggccctgctggcccgggtccaaggccgggcactacaggagggtcagccggaagaagacgagacggatgaccggcggcggcggtacaactcccaattcaacccccagctggcccggcgcccccgccagcaggaccctcaccttactcactgactcctgagggggtacaggagaggccgctgctgccagccgtcatataaaactatttattcataaatattttccaaaatgaaaataggtttaccaaaaaatg

SEQ ID NO: 148752 - DNA, 890 bp, Homo sapiens
  Payload ID: 9421
  Gene Symbol: LENG1
  Gene Name: leukocyte receptor cluster (LRC) member 1
  Uniprot ID: Q96BZ8
  ENST ID: ENST00000610998
  CDS Start-End: 14-808
cagctacgacgccatgaatatcttgcccaagaagagctggcacgtccggaacaaggacaatgtcgcccgcgtgcggcgtgacgaggcccaggcccgggaggaggagaaggagcgtgagcggagggtgctgctggctcagcaagaggcccgtacagaattcctacggaagaaagccagacatcagaactcactgcctgagcttgaagcagcagaggcgggagccccaggttctggccctgtggacctgtttcgggagctgctggaggaagggaaaggagtgatcagaggcaataaagagtacgaggaagaaaagcgacaggagaaagagaggcaagagaaagctctgggcatcctgacatacctgggccagagtgcagcggaggcacagactcaacccccttggtaccagctacccccagggcgagggggccccccgcccggcccagccccagatgagaagatcaagagccgtctggaccctctgcgggagatgcagaagcatctggggaagaagagacagcacggcggtgatgaaggcagtcgcagcagaaaggaaaaggaggggtctgagaagcagcgacccaaggagcctccatccctggaccagcttcgagctgaacgtctgcggagggaagcagctgagaggtctcgggcagaggccctgctggcccgggtccaaggccgggcactacaggagggtcagccggaagaagacgagacggatgaccggcggcggcggtacaactcccaattcaacccccagctggcccggcgcccccgccagcaggaccctcaccttactcactgactcctgagggggtacaggagaggccgctgctgccagccgtcatataaaactatttattcataaatattttccaaaatgaaaa

SEQ ID NO: 148753 - DNA, 886 bp, Homo sapiens; identical to SEQ ID NO: 148746
  Payload ID: 9421
  Gene Symbol: LENG1
  Gene Name: leukocyte receptor cluster (LRC) member 1
  Uniprot ID: Q96BZ8
  ENST ID: ENST00000621927
  CDS Start-End: 14-808

SEQ ID NO: 148754 - DNA, 886 bp, Homo sapiens; identical to SEQ ID NO: 148746
  Payload ID: 9421
  Gene Symbol: LENG1
  Gene Name: leukocyte receptor cluster (LRC) member 1
  ENST ID: ENST00000614037
  CDS Start-End: 14-808

SEQ ID NO: 148755 - DNA, 3991 bp, Homo sapiens
  Payload ID: 9422
  Gene Symbol: LENG8
  Gene Name: leukocyte receptor cluster (LRC) member 8
  Uniprot ID: Q96PV6
  ENST ID: ENST00000326764
  CDS Start-End: 480-2882
ccactgtactctatcgtgggcgacgacagagcaagagcaagactccgtctccgagaacaacaacaacagcaacaagaaaacaacaataaaaaaaataaggctgcgtgggaggcagaaagagctaatgcggccacgcttgtctcctcggggccaccgtccccacccagacttccggtctgccttaaaatgttcatgcgtaagtgcgtgggcaggaaggcgggctcaagcgcagctcgtggcgttcattggctgtgcagggccgagggaggcggtgcaaggccgccgcgtgacgtcaggacgccgcggtcaggacgtcgaagccaaagaagaccagagccagccgggtggcacagcggtgtcgtggccgtgttgctgatcgcctgggtggttgttggcgtgtccctgcagcgaaggatcctggttgacagtgaaaaagcagtctggctcccgaggtccaccccttataccccaaggtccagatggcggccaacgtgggtgatcaacgtagcacagattggtcttctcagtacagcatggtggctggggcaggccgagagaatggcatggagacgccgatgcacgagaacccggagtgggagaaggcccgtcaggccctggccagcatcagcaagtcaggagctgccggcggctctgccaagtccagcagcaatgggcctgtggccagtgcacagtacgtgtcccaggcagaagcctcagctttgcagcagcagcagtactaccagtggtaccagcagtacaactatgcctacccctacagctactactatcccatgagcatgtaccagagctatggctccccttcccagtatgggatggccggctcctatggctcagccacaccccagcagccatccgcaccccaacaccaagggactctgaaccagcccccagtccccggcatggatgagagcatgtcctaccaggctccccctcagcagctgccgtcggctcagccccctcagccctcaaatcccccacatggggctcacacgctgaacagtggccctcagcctgggacagctccagccacacagcacagccaggcggggcccgccacgggccaggcctatgggccacacacctacaccgaacctgccaagcccaagaagggccaacagctgtggaaccgcatgaaacccgcccctgggactggaggtctcaagttcaacatccagaagcgaccctttgctgttaccacccagagctttggctccaacgcagagggccagcacagtggttttggcccccagcccaaccctgagaaagttcagaaccacagcgggtcctctgcccgggggaacctgtctgggaagccggatgactggccccaggacatgaaagagtatgtggagcgctgcttcaccgcctgtgagtcggaggaggacaaggaccgcacggaaaagctgctcaaggaggtgctgcaggcgcggctgcaggacggctcggcctataccattgactggagccgggagcccttgccggggctgacccgggagcctgtggctgagagccctaagaagaagcggtgggaggccgctagcagccttcaccctcctagaggggcaggctcggcgacaaggggcgggggtgccccgtcccagcgagggacgcccggggctgggggtgccggtcgagcccggggcaacagcttcaccaagtttggcaaccgcaacgtcttcatgaaggacaacagctcttcttccagcacagactcccgctcccgctcctcctccaggtccccgacgcgccacttccgcagaagtgactcccactcagactccgacagctcctactcagggaatgagtgtcaccctgtgggccgcaggaacccgccccctaagggccggggcggtcgaggggcccatatggatcggggccgaggcagggcgcagcgtgggaagaggcacgatctggcgcccaccaagcgcagtcgaaagaagatggcggcgctggagtgtgaggacccggagcgagagctgaagaagcagaagcgggcagcccgcttccagcacggacactcccgccgcctgcgcctcgagcccctggtgctgcagatgagcagcctggagagcagtggggctgaccctgactggcaggagctgcagatcgtgggcacctgccctgacatcaccaagcactacctgcgcctcacctgtgcccccgacccgtccaccgtgcgccctgtggcagttttgaaaaagtcgctgtgcatggtcaagtgccactggaaagagaagcaggactacgcgtttgcctgcgagcagatgaagtcgatccggcaggatctgacggtgcagggcatccgcaccgagttcacggtggaggtgtacgagacccatgcccggatcgccttggagaagggtgaccatgaagagtttaaccagtgccagacgcagctcaagtcgctgtacgccgagaacttgcctggcaatgtgggcgagtttactgcctaccgaatcctctactacatcttcaccaagaactcgggagacatcaccacggagctggcatacctcacacgagaactgaaggcagatccttgcgtggcccacgccttggcattaaggacagcctgggccctgggcaactaccaccgctttttccggctctactgccatgcaccctgcatgtctggctacctcgtggacaagtttgcagatcgggagcgcaaggtcgccctcaaggccatgatcaaaaccttccgccctgcgctgccagtctcctacctgcaggccgagctggccttcgagggcgaggccgcctgccgggccttcctagagcccctgggcctggcctacacgggcccggacaactccagcatcgactgccgcctcagcctggcgcagctgtcagccttctgagcacccagcgaggaggggcgggggcaggggctgcagcccccagcgctgcctttgcggattctgtttttgagccgtggacttgggttgtaaatttatttgtggggagtgcgctccaggaagagccaccatccctgcccccgttttcccaccggggagtctgtacagagatttttctacgtttttattttttgcctcagagggatgggattggggaggaggggatgggcagcggagggttgggggcatggtctgcaggctcatctgtgtccgcctttcactccactaatgctgtctcagtgttttctctctctctctttcgagcttgcactccggtacccgacccggcgccctggcccatcccatgccggggggccagtggaaagaagacaggccgtccagcccgtgcccgcctgcggcgggggcacccagcaagcccgcccaccgcccgctgcctcacctgcttcgccacagactcttgttcccagccccttggggcctccgtgtttggggtgggggagctgcttagagactgtgcccgtcctcggccccccaccctgaagtgccagcaccaccagcaccagatcctccgccgccacaccgcactgaggacacgccggccgggccgcctcgtctcaagttgtataaagttgtctccgtgtcccctcctccctctgcccccagtgtttcttctgatttttttttcccctttccctccctccctctccgcattcttcccttggttcagcacaggtaaaacggttcccctccctccctgccttcatggatcaccagctcacgtcatgttgccttctcttttctttgtgtgtgtgtttatttaagttatttttcttcctcctctcccttttctttttggccctccctccctccctcttctgccatgtaactggaggatgtgctatgagtttgcaaacagctggactgtcaggctgctttttttccagatgttcctcctctgcctccccttcccctcctctcccctccttttccttccttccttcctttccttggagcactgagcaccatttggaagcttgagagaaaccaaaattaaagagagaaagagagagcgtgcacgctcctgctttgtc

SEQ ID NO: 148756 - DNA, 5146 bp, Homo sapiens
  Payload ID: 9422
  Gene Symbol: LENG8
  Gene Name: leukocyte receptor cluster (LRC) member 8
  ENST ID: ENST00000376514
  CDS Start-End: 139-2652
cagccgggtggcacagcggtgtcgtggccgtgttgctgatcgcctgggtggttgttggcgtgtccctgcagcgaaggatcctgacagtgaaaaagcagtctggctcccgaggtccaccccttataccccaaggtccagatggcggccaacgtgggtgatcaacgtagcacagattggtcttctcagtacagcatggtggctggggcaggccgagagaatggcatggagacgccgatgcacgagaacccggagtgggagaaggcccgtcaggccctggccagcatcagcaagtcaggagctgccggcggctctgccaagtccagcagcaatgggcctgtggccagtgcacagtacgtgtcccaggcagaagcctcagctttgcagcagcagcagtactaccagtggtaccagcagtacaactatgcctacccctacagctactactatcccatgcccccagtccccggcatggatgagagcatgtcctaccaggctccccctcagcagctgccgtcggctcagccccctcagccctcaaatcccccacatggggctcacacgctgaacagtggccctcagcctgggacagctccagccacacagcacagccaggcggggcccgccacgggccaggcctatgggccacacacctacaccgaacctgccaagcccaagaagggccaacagctgtggaaccgcatgaaacccgcccctgggactggaggtctcaagttcaacatccagaagcgaccctttgctgttaccacccagagctttggctccaacgcagagggccagcacagtggttttggcccccagcccaaccctgagaaagttcagaaccacagcgggtcctctgcccgggggaacctgtctgggaagccggatgactggccccaggacatgaaagagtatgtggagcgctgcttcaccgcctgtgagtcggaggaggacaaggaccgcacggaaaagctgctcaaggaggtgctgcaggcgcggctgcaggacggctcggcctataccattgactggagccgggagcccttgccggggctgacccgggagcctgtggctgagagccctaagaagaagcggtgggaggccgctagcagccttcaccctcctagaggggcaggctcggcgacaaggggcgggggtgccccgtcccagcgagggacgcccggggctgggggtgccggtcgagcccggggcaacagcttcaccaagtttggcaaccgcaacgtcttcatgaaggacaacagctcttcttccagcacagactcccgctcccgctcctcctccaggtccccgacgcgccacttccgcagaagtgactcccactcagactccgacagctcctactcagggaatgagtgtcaccctgtgggccgcaggaacccgccccctaagggccggggcggtcgaggggcccatatggatcggggccgaggcagggcgcagcgtgggaagaggcacgatctggcgcccaccaagcgcagtcgaaagaagatggcggcgctggagtgtgaggacccggagcgagagctgaagaagcagaagcgggcagcccgcttccagcacggacactcccgccgcctgcgcctcgagcccctggtgctgcagatgagcagcctggagagcagtggggctgaccctgactggcaggagctgcagatcgtgggcacctgccctgacatcaccaagcactacctgcgcctcacctgtgcccccgacccgtccaccgtgcgccctgtggcagttttgaaaaagtcgctgtgcatggtcaagtgccactggaaagagaagcaggactacgcgtttgcctgcgagcagatgaagtcgatccggcaggatctgacggtgcagggcatccgcaccgagttcacggtggaggtgtacgagacccatgcccggatcgccttggagaagggtgaccatgaagagtttaaccagtgccagacgcagctcaagtcgctgtacgccgagaacttgcctggcaatgtgggcgagtttactgcctaccgaatcctctactacatcttcaccaagaactcgggagacatcaccacggagctggcatacctcacacgagaactgaaggcagatccttgcgtggcccacgccttggcattaaggacagcctgggccctgggcaactaccaccgctttttccggctctactgccatgcaccctgcatgtctggctacctcgtggacaagtttgcagatcgggagcgcaaggtcgccctcaaggccatgatcaaaacgtatgtggtgccaagctcccttctgcctttgctcttcccatccttccgcctcgcaccgcccctcagaccagctcctggccgcaggcctcccccagcccccaacccttgtcctggtccttgcttccccatcatctttctccattcagccctcccctctccagttcctcttgctctccttgttggtcacctctgtgttccgggtcactcctctccctctccccactgttcccagctcactgcctctggggcctcttctccaccccatctgtgtgtctcttcctcctgttctctcctgcctggaccccctagttcactccttgccctgggcttcctcagaaccctgaggtctctgctttctcagcttgtcgctgtgctcccaccatagagaccatctagacagcctctggtctaccaggacaaggcccagtcccactcagctcctttgagagcaccagaaacgcttagggagacacctgtgttgaggccacactgggcgcggtgccagaggcccctggtcaggccatgcccctgcagtgtccttcgttcactagacattgcgcctggcttgctgtgggtggggatgagttgcttgactcatgtttagacgcatggttctgtctggtgattgaggtgcccaggcgacgctgggcaatgtcaagagaggttttcgcttgtcacagcaaggggatgctcttggcatctagtgagtggaggccagggatgctgccctgccactgccattgggcctcagagctcagtcttgccaaggtggagaaattctggtcgaagaggttgaccggtagactgaagaggccttgagagcctggccaggtggctgtccacgtgaggtcatagtcacagcatggaggccttgagagcctggccaggtggccctccacgtgaggtcatggtcacagcatgggggccttgagtgcctggccaggtggccctccacgtgaggtcatggtcacagcatggaggccttgagagcctggccaggtggccctccacgtgaggttgtggtcacagcatgggggccttgagagcctggccaggtggccctccacgtgaggtcatggtcacagcatggaggccttgagagcctggccaggtggccctccgtgtgaggtcatggtcacagcatagtttggagctagggagggactgtcagcctggaggtttggagactcattctggaatctagtgtgggtcaagccaacttcagggagaggctgagccagggtaggagtcacaggagcagacgaggatgtggggtgccgtgcacagagctccatgaccagcttgggaagttagaaggaaggggaggcaggaggctgcttagtctgctgccatgatgggccccatgaatggtggctctcaagcttctgtgctacacaggggtgtgtggttgggcgagtgtccttgttaattgatacctaattggccttggttgggaacatagccatgagtgcccctcgtgggtggggcgccagtctgtcattgacctcattgtgtcagcaccttccccccaaggaggctgaccctgccctgccagctgagactgggagacggagtgggctctgatcccagggcttccaggaaagctctggctttggagcagaagcgggttctaggacttagtgcccctcactcggtgcctgggttcctgtgtgtgtggaaagggtagggctgcaccctgtggaagagggttcagggagctctgaggacctggctcgtgctagatgctcagtcagtagtgtgttttagcagcagccggaagtgactgctttcagtgtgtagtggtgagtgctagctggcacccctgcgcctggcttcccagacactgtaacgcagggcaggggaggcagcgagggctgggtccccacggtggccctggcagccccgccatccccatcccctgccacgtgctgctccctccatctggtccctgcccctcagccagcggaggagcccgctgggcccttccctgcccgtccccgctcctccctggcccccgcacaggtaagtgagggtgaggggggcacaggggactggggtcactaaccccccccgggccccccccgagcccctgaggtggggaggctgggaggcgggtggggagccagcaggcactgtgctgaggaaatcctgtgggcacccgaatgggggggcctccccgctcgtggggccctcccctgccctcccgcccgcccgcctcatcaccttctcctcttgtctccatagcttccgccctgcgctgccagtctcctacctgcaggccgagctggccttcgagggcgaggccgcctgccgggccttcctagagcccctgggcctggcctacacgggcccggacaactccagcatcgactgccgcctcagcctggcgcagctgtcagccttctgagcacccagcgaggaggggcgggggcaggggctgcagcccccagcgctgcctttgcggattctgtttttgagccgtggacttgggttgtaaatttatttgtggggagtgcgctccaggaagagccaccatccctgcccccgttttcccaccggggagtctgtacagagatttttctacgtttttattttttgcctcagagggatgggattggggaggaggggatgggcagcggagggttgggggcatggtctgcaggctcatctgtgtccgcctttcactccactaatgctgtctcagtgttttctctctctctctttcgagcttgcactccggtacccgacccggcgccctggcccatcccatgccggggggccagtggaaagaagacaggccgtccagcccgtgcccgcctgcggcgggggcacccagcaagcccgcccaccgcccgctgcctcacctgcttcgccacaga

SEQ ID NO: 148757 - DNA, 463 bp, Homo sapiens
  Payload ID: 9422
  Gene Symbol: LENG8
  Gene Name: leukocyte receptor cluster (LRC) member 8
  ENST ID: ENST00000443957
  CDS Start-End: 189-463
tcctgcgcgtctttctggggcgtggtgcgcaggcgcggcctgggcagtggctccgtggctagtcgtggggatccgagcggcctcctccacccggcgtcctcctttgccttcgcccagcctgcgggacggccagacagtgaaaaagcagtctggctcccgaggtccaccccttataccccaaggtccagatggcggccaacgtgggtgatcaacgtagcacagattggtcttctcagtacagcatggtggctggggcaggccgagagaatggcatggagacgccgatgcacgagaacccggagtgggagaaggcccgtcaggccctggccagcatcagcaagtcaggagctgccggcggctctgccaagtccagcagcaatgggcctgtggccagtgcacagtacgtgtcccaggcagaagcctcagctttgcagcagcagcagtactaccagtggtaccagca

SEQ ID NO: 148758 - DNA, 594 bp, Homo sapiens
  Payload ID: 9422
  Gene Symbol: LENG8
  Gene Name: leukocyte receptor cluster (LRC) member 8
  ENST ID: ENST00000421200
  CDS Start-End: 1-336
caccgctttttccggctctactgccatgcaccctgcatgtctggctacctcgtggacaagtttgcagatcgggagcgcaaggtcgccctcaaggccatgatcaaaactgttttctctctctctctttcgagcttgcactccggtacccgacccggcgccctggcccatcccatgccggggggccagtggaaagaagacaggccgtccagcccgtgcccgcctgcggcgggggcacccagcaagcccgcccaccgcccgctgcctcacctgcttcgccacagactcttgttcccagccccttggggcctccgtgtttggggtgggggagctgcttagagactgtgcccgtcctcggccccccaccctgaagtgccagcaccaccagcaccagatcctccgccgccacaccgcactgaggacacgccggccgggccgcctcgtctcaagttgtataaagttgtctccgtgtcccctcctccctctgcccccagtgtttcttctgatttttttttcccctttccctccctccctctccgcattcttcccttggttcagcacaggtaaaacggttcccctccctccctgccttcatgg

SEQ ID NO: 148759 - DNA, 1073 bp, Homo sapiens
  Payload ID: 9422
  Gene Symbol: LENG8
  Gene Name: leukocyte receptor cluster (LRC) member 8
  ENST ID: ENST00000439657
  CDS Start-End: 173-1073
cggtcaggacgtcgaagccaaagaagaccagagccagccgggtggcacagcggtgtcgtggccgtgttgctgatcgcctgggtggttgttggcgtgtccctgcagcgaaggatcctgacagtgaaaaagcagtctggctcccgaggtccaccccttataccccaaggtccagatggcggccaacgtgggtgatcaacgtagcacagattggtcttctcagtacagcatggtggctggggcaggccgagagaatggcatggagacgccgatgcacgagaacccggagtgggagaaggcccgtcaggccctggccagcatcagcaagtcaggagctgccggcggctctgccaagtccagcagcaatgggcctgtggccagtgcacagtacgtgtcccaggcagaagcctcagctttgcagcagcagcagtactaccagtggtaccagcagtacaactatgcctacccctacagctactactatcccatgagcatgtaccagagctatggctccccttcccagtatgggatggccggctcctatggctcagccacaccccagcagccatccgcaccccaacaccaagggactctgaaccagcccccagtccccggcatggatgagagcatgtcctaccaggctccccctcagcagctgccgtcggctcagccccctcagccctcaaatcccccacatggggctcacacgctgaacagtggccctcagcctgggacagctccagccacacagcacagccaggcggggcccgccacgggccaggcctatgggccacacacctacaccgaacctgccaagcccaagaagggccaacagctgtggaaccgcatgaaacccgcccctgggactggaggtctcaagttcaacatccagaagcgaccctttgctgttaccacccagagctttggctccaacgcagagggccagcacagtggttttggcccccagcccaaccctgagaaagttcagaaccacagcgggtcctctgcccgggggaacctgtctgggaagccggatgactggccccaggacatgaaagagtatgtggagcgctgct

SEQ ID NO: 148760 - DNA, 320 bp, Homo sapiens
  Payload ID: 9422
  Gene Symbol: LENG8
  Gene Name: leukocyte receptor cluster (LRC) member 8
  ENST ID: ENST00000436479
  CDS Start-End: 96-320
cgggtggcacagcggtgtcgtggccgtgttgctgatcgcctgggtggttgttggcgtgtccctgcagcgaaggatcctggtcttctcagtacagcatggtggctggggcaggccgagagaatggcatggagacgccgatgcacgagaacccggagtgggagaaggcccgtcaggccctggccagcatcagcaagtcaggagctgccggcggctctgccaagtccagcagcaatgggcctgtggccagtgcacagtacgtgtcccaggcagaagcctcagctttgcagcagcagcagtactaccagtggtaccagcagtac

SEQ ID NO: 148761 - DNA, 2825 bp, Homo sapiens
  Payload ID: 9422
  Gene Symbol: LENG8
  Gene Name: leukocyte receptor cluster (LRC) member 8
  ENST ID: ENST00000616932
  CDS Start-End: 480-2825
ccactgtactctatcgtgggcgacgacagagcaagagcaagactccgtctccgagaacaacaacaacagcaacaagaaaacaacaataaaaaaaataaggctgcgtgggaggcagaaagagctaatgcggccacgcttgtctcctcggggccaccgtccccacccagacttccggtctgccttaaaatgttcatgcgtaagtgcgtgggcaggaaggcgggctcaagcgcagctcgtggcgttcattggctgtgcagggccgagggaggcggtgcaaggccgccgcgtgacgtcaggacgccgcggtcaggacgtcgaagccaaagaagaccagagccagccgggtggcacagcggtgtcgtggccgtgttgctgatcgcctgggtggttgttggcgtgtccctgcagcgaaggatcctggttgacagtgaaaaagcagtctggctcccgaggtccaccccttataccccaaggtccagatggcggccaacgtgggtgatcaacgtagcacagattggtcttctcagtacagcatggtggctggggcaggccgagagaatggcatggagacgccgatgcacgagaacccggagtgggagaaggcccgtcaggccctggccagcatcagcaagtcaggagctgccggcggctctgccaagtccagcagcaatgggcctgtggccagtgcacagtacgtgtcccaggcagaagcctcagctttgcagcagcagcagtactaccagtggtaccagcagtacaactatgcctacccctacagctactactatcccatgcccccagtccccggcatggatgagagcatgtcctaccaggctccccctcagcagctgccgtcggctcagccccctcagccctcaaatcccccacatggggctcacacgctgaacagtggccctcagcctgggacagctccagccacacagcacagccaggcggggcccgccacgggccaggcctatgggccacacacctacaccgaacctgccaagcccaagaagggccaacagctgtggaaccgcatgaaacccgcccctgggactggaggtctcaagttcaacatccagaagcgaccctttgctgttaccacccagagctttggctccaacgcagagggccagcacagtggttttggcccccagcccaaccctgagaaagttcagaaccacagcgggtcctctgcccgggggaacctgtctgggaagccggatgactggccccaggacatgaaagagtatgtggagcgctgcttcaccgcctgtgagtcggaggaggacaaggaccgcacggaaaagctgctcaaggaggtgctgcaggcgcggctgcaggacggctcggcctataccattgactggagccgggagcccttgccggggctgacccgggagcctgtggctgagagccctaagaagaagcggtgggaggccgctagcagccttcaccctcctagaggggcaggctcggcgacaaggggcgggggtgccccgtcccagcgagggacgcccggggctgggggtgccggtcgagcccggggcaacagcttcaccaagtttggcaaccgcaacgtcttcatgaaggacaacagctcttcttccagcacagactcccgctcccgctcctcctccaggtccccgacgcgccacttccgcagaagtgactcccactcagactccgacagctcctactcagggaatgagtgtcaccctgtgggccgcaggaacccgccccctaagggccggggcggtcgaggggcccatatggatcggggccgaggcagggcgcagcgtgggaagaggcacgatctggcgcccaccaagcgcagtcgaaagaagatggcggcgctggagtgtgaggacccggagcgagagctgaagaagcagaagcgggcagcccgcttccagcacggacactcccgccgcctgcgcctcgagcccctggtgctgcagatgagcagcctggagagcagtggggctgaccctgactggcaggagctgcagatcgtgggcacctgccctgacatcaccaagcactacctgcgcctcacctgtgcccccgacccgtccaccgtgcgccctgtggcagttttgaaaaagtcgctgtgcatggtcaagtgccactggaaagagaagcaggactacgcgtttgcctgcgagcagatgaagtcgatccggcaggatctgacggtgcagggcatccgcaccgagttcacggtggaggtgtacgagacccatgcccggatcgccttggagaagggtgaccatgaagagtttaaccagtgccagacgcagctcaagtcgctgtacgccgagaacttgcctggcaatgtgggcgagtttactgcctaccgaatcctctactacatcttcaccaagaactcgggagacatcaccacggagctggcatacctcacacgagaactgaaggcagatccttgcgtggcccacgccttggcattaaggacagcctgggccctgggcaactaccaccgctttttccggctctactgccatgcaccctgcatgtctggctacctcgtggacaagtttgcagatcgggagcgcaaggtcgccctcaaggccatgatcaaaacgtatgtggtgccaagctcccttctgcctttgctcttcccatccttccgcctcgtctcaagttgtataaagttgtctccgtgtcccctcctccctctgcccccagtgtttcttctgatttttttttcccctttccctccctccctctccgcattcttcccttggttcagcacaggtaaaacggttcccccctccctccctccctcttctgccatgtaa

SEQ ID NO: 148762 - DNA, 393 bp, Homo sapiens
  Payload ID: 9422
  Gene Symbol: LENG8
  Gene Name: leukocyte receptor cluster (LRC) member 8
  ENST ID: ENST00000613722
  CDS Start-End: 119-393
atccgagcggcctcctccacccggcgtcctcctttgccttcgcccagcctgcgggacggccaggcagtgaaaaagcagtctggctcccgaggtccaccccttataccccaaggtccagatggcggccaacgtgggtgatcaacgtagcacagattggtcttctcagtacagcatggtggctggggcaggccgagagaatggcatggagacgccgatgcacgagaacccggagtgggagaaggcccgtcaggccctggccagcatcagcaagtcaggagctgccggcggctctgccaagtccagcagcaatgggcctgtggccagtgcacagtacgtgtcccaggcagaagcctcagctttgcagcagcagcagtactaccagtggtaccagca

SEQ ID NO: 148763 - DNA, 4138 bp, Homo sapiens
  Payload ID: 9422
  Gene Symbol: LENG8
  Gene Name: leukocyte receptor cluster (LRC) member 8
  Uniprot ID: Q96PV6
  ENST ID: ENST00000621306
  CDS Start-End: 648-3050
gtcaggagttcgagaacagcctggccgacatggtgaaaccccgtctttactaaaaacacaaaaattagccgggcatagtggcgcgcgcctgtaatcccagctactccggaggctgaggcagaattgtttgaacccaggaggcggaggttgcagtgagcagagatcacgccactgtactctatcgtgggcgacgacagagcaagagcaagactccgtctccgagaacaacaacaacagcaacaagaaaacaacaataaaaaaaataaggctgcgtgggaggcagaaagagctaatgcggccacgcttgtctcctcggggccaccgtccccacccagacttccggtctgccttaaaatgttcatgcgtaagtgcgtgggcaggaaggcgggctcaagcgcagctcgtggcgttcattggctgtgcagggccgagggaggcggtgcaaggccgccgcgtgacgtcaggacgccgcggtcaggacgtcgaagccaaagaagaccagagccagccgggtggcacagcggtgtcgtggccgtgttgctgatcgcctgggtggttgttggcgtgtccctgcagcgaaggatcctggttgacagtgaaaaagcagtctggctcccgaggtccaccccttataccccaaggtccagatggcggccaacgtgggtgatcaacgtagcacagattggtcttctcagtacagcatggtggctggggcaggccgagagaatggcatggagacgccgatgcacgagaacccggagtgggagaaggcccgtcaggccctggccagcatcagcaagtcaggagctgccggcggctctgccaagtccagcagcaatgggcctgtggccagtgcacagtacgtgtcccaggcagaagcctcagctttgcagcagcagcagtactaccagtggtaccagcagtacaactatgcctacccctacagctactactatcccatgagcatgtaccagagctatggctccccttcccagtatgggatggccggctcctatggctcagccacaccccagcagccatccgcaccccaacaccaagggactctgaaccagcccccagtccccggcatggatgagagcatgtcctaccaggctccccctcagcagctgccgtcggctcagccccctcagccctcaaatcccccacatggggctcacacgctgaacagtggccctcagcctgggacagctccagccacacagcacagccaggcggggcccgccacgggccaggcctatgggccacacacctacaccgaacctgccaagcccaagaagggccaacagctgtggaaccgcatgaaacccgcccctgggactggaggtctcaagttcaacatccagaagcgaccctttgctgttaccacccagagctttggctccaacgcagagggccagcacagtggttttggcccccagcccaaccctgagaaagttcagaaccacagcgggtcctctgcccgggggaacctgtctgggaagccggatgactggccccaggacatgaaagagtatgtggagcgctgcttcaccgcctgtgagtcggaggaggacaaggaccgcacggaaaagctgctcaaggaggtgctgcaggcgcggctgcaggacggctcggcctataccattgactggagccgggagcccttgccggggctgacccgggagcctgtggctgagagccctaagaagaagcggtgggaggccgctagcagccttcaccctcctagaggggcaggctcggcgacaaggggcgggggtgccccgtcccagcgagggacgcccggggctgggggtgccggtcgagcccggggcaacagcttcaccaagtttggcaaccgcaacgtcttcatgaaggacaacagctcttcttccagcacagactcccgctcccgctcctcctccaggtccccgacgcgccacttccgcagaagtgactcccactcagactccgacagctcctactcagggaatgagtgtcaccctgtgggccgcaggaacccgccccctaagggccggggcggtcgaggggcccatatggatcggggccgaggcagggcgcagcgtgggaagaggcacgatctggcgcccaccaagcgcagtcgaaagaagatggcggcgctggagtgtgaggacccggagcgagagctgaagaagcagaagcgggcagcccgcttccagcacggacactcccgccgcctgcgcctcgagcccctggtgctgcagatgagcagcctggagagcagtggggctgaccctgactggcaggagctgcagatcgtgggcacctgccctgacatcaccaagcactacctgcgcctcacctgtgcccccgacccgtccaccgtgcgccctgtggcagttttgaaaaagtcgctgtgcatggtcaagtgccactggaaagagaagcaggactacgcgtttgcctgcgagcagatgaagtcgatccggcaggatctgacggtgcagggcatccgcaccgagttcacggtggaggtgtacgagacccatgcccggatcgccttggagaagggtgaccatgaagagtttaaccagtgccagacgcagctcaagtcgctgtacgccgagaacttgcctggcaatgtgggcgagtttactgcctaccgaatcctctactacatcttcaccaagaactcgggagacatcaccacggagctggcatacctcacacgagaactgaaggcagatccttgcgtggcccacgccttggcattaaggacagcctgggccctgggcaactaccaccgctttttccggctctactgccatgcaccctgcatgtctggctacctcgtggacaagtttgcagatcgggagcgcaaggtcgccctcaaggccatgatcaaaaccttccgccctgcgctgccagtctcctacctgcaggccgagctggccttcgagggcgaggccgcctgccgggccttcctagagcccctgggcctggcctacacgggcccggacaactccagcatcgactgccgcctcagcctggcgcagctgtcagccttctgagcacccagcgaggaggggcgggggcaggggctgcagcccccagcgctgcctttgcggattctgtttttgagccgtggacttgggttgtaaatttatttgtggggagtgcgctccaggaagagccaccatccctgcccccgttttcccaccggggagtctgtacagagatttttctacgtttttattttttgcctcagagggatgggattggggaggaggggatgggcagcggagggttgggggcatggtctgcaggctcatctgtgtccgcctttcactccactaatgctgtctcagtgttttctctctctctctttcgagcttgcactccggtacccgacccggcgccctggcccatcccatgccggggggccagtggaaagaagacaggccgtccagcccgtgcccgcctgcggcgggggcacccagcaagcccgcccaccgcccgctgcctcacctgcttcgccacagactcttgttcccagccccttggggcctccgtgtttggggtgggggagctgcttagagactgtgcccgtcctcggccccccaccctgaagtgccagcaccaccagcaccagatcctccgccgccacaccgcactgaggacacgccggccgggccgcctcgtctcaagttgtataaagttgtctccgtgtcccctcctccctctgcccccagtgtttcttctgatttttttttcccctttccctccctccctctccgcattcttcccttggttcagcacaggtaaaacggttcccctccctccctgccttcatggatcaccagctcacgtcatgttgccttctcttttctttgtgtgtgtgtttatttaagttatttttcttcctcctctcccttttctttttggccctccctccctccctcttctgccatgtaactggaggatgtgctatgagtttgcaaacagctggactgtcaggctgctttttttccagatgttcctcctctgcctccccttcccctcctctcccctccttttccttccttccttcctttccttggagcactgagcaccatttggaagcttgagagaaaccaaaattaaagagagaaagagagag

SEQ ID NO: 148764 - DNA, 5789 bp, Homo sapiens
  Payload ID: 9422
  Gene Symbol: LENG8
  Gene Name: leukocyte receptor cluster (LRC) member 8
  ENST ID: ENST00000610347
  CDS Start-End: 56-2680
acagtgaaaaagcagtctggctcccgaggtccaccccttataccccaaggtccagatggcggccaacgtgggtgatcaacgtagcacagattggtcttctcagtacagcatggtggctggggcaggccgagagaatggcatggagacgccgatgcacgagaacccggagtgggagaaggcccgtcaggccctggccagcatcagcaagtcaggagctgccggcggctctgccaagtccagcagcaatgggcctgtggccagtgcacagtacgtgtcccaggcagaagcctcagctttgcagcagcagcagtactaccagtggtaccagcagtacaactatgcctacccctacagctactactatcccatgagcatgtaccagagctatggctccccttcccagtatgggatggccggctcctatggctcagccacaccccagcagccatccgcaccccaacaccaagggactctgaaccagcccccagtccccggcatggatgagagcatgtcctaccaggctccccctcagcagctgccgtcggctcagccccctcagccctcaaatcccccacatggggctcacacgctgaacagtggccctcagcctgggacagctccagccacacagcacagccaggcggggcccgccacgggccaggcctatgggccacacacctacaccgaacctgccaagcccaagaagggccaacagctgtggaaccgcatgaaacccgcccctgggactggaggtctcaagttcaacatccagaagcgaccctttgctgttaccacccagagctttggctccaacgcagagggccagcacagtggttttggcccccagcccaaccctgagaaagttcagaaccacagcgggtcctctgcccgggggaacctgtctgggaagccggatgactggccccaggacatgaaagagtatgtggagcgctgcttcaccgcctgtgagtcggaggaggacaaggaccgcacggaaaagctgctcaaggaggtgctgcaggcgcggctgcaggacggctcggcctataccattgactggagccgggagcccttgccggggctgacccgggagcctgtggctgagagccctaagaagaagcggtgggaggccgctagcagccttcaccctcctagaggggcaggctcggcgacaaggggcgggggtgccccgtcccagcgagggacgcccggggctgggggtgccggtcgagcccggggcaacagcttcaccaagtttggcaaccgcaacgtcttcatgaaggacaacagctcttcttccagcacagactcccgctcccgctcctcctccaggtccccgacgcgccacttccgcagaagtgactcccactcagactccgacagctcctactcagggaatgagtgtcaccctgtgggccgcaggaacccgccccctaagggccggggcggtcgaggggcccatatggatcggggccgaggcagggcgcagcgtgggaagaggcacgatctggcgcccaccaagcgcagtcgaaagaagatggcggcgctggagtgtgaggacccggagcgagagctgaagaagcagaagcgggcagcccgcttccagcacggacactcccgccgcctgcgcctcgagcccctggtgctgcagatgagcagcctggagagcagtggggctgaccctgactggcaggagctgcagatcgtgggcacctgccctgacatcaccaagcactacctgcgcctcacctgtgcccccgacccgtccaccgtgcgccctgtggcagttttgaaaaagtcgctgtgcatggtcaagtgccactggaaagagaagcaggactacgcgtttgcctgcgagcagatgaagtcgatccggcaggatctgacggtgcagggcatccgcaccgagttcacggtggaggtgtacgagacccatgcccggatcgccttggagaagggtgaccatgaagagtttaaccagtgccagacgcagctcaagtcgctgtacgccgagaacttgcctggcaatgtgggcgagtttactgcctaccgaatcctctactacatcttcaccaagaactcgggagacatcaccacggagctggcatacctcacacgagaactgaaggcagatccttgcgtggcccacgccttggcattaaggacagcctgggccctgggcaactaccaccgctttttccggctctactgccatgcaccctgcatgtctggctacctcgtggacaagtttgcagatcgggagcgcaaggtcgccctcaaggccatgatcaaaacgtatgtggtgccaagctcccttctgcctttgctcttcccatccttccgcctcgcaccgcccctcagaccagctcctggccgcaggcctcccccagcccccaacccttgtcctggtccttgcttccccatcatctttctccattcagccctcccctctccagttcctcttgctctccttgttggtcacctctgtgttccgggtcactcctctccctctccccactgttcccagctcactgcctctggggcctcttctccaccccatctgtgtgtctcttcctcctgttctctcctgcctggaccccctagttcactccttgccctgggcttcctcagaaccctgaggtctctgctttctcagcttgtcgctgtgctcccaccatagagaccatctagacagcctctggtctaccaggacaaggcccagtcccactcagctcctttgagagcaccagaaacgcttagggagacacctgtgttgaggccacactgggcgcggtgccagaggcccctggtcaggccatgcccctgcagtgtccttcgttcactagacattgcgcctggcttgctgtgggtggggatgagttgcttgactcatgtttagacgcatggttctgtctggtgattgaggtgcccaggcgacgctgggcaatgtcaagagaggttttcgcttgtcacagcaaggggatgctcttggcatctagtgagtggaggccagggatgctgccctgccactgccattgggcctcagagctcagtcttgccaaggtggagaaattctggtcgaagaggttgaccggtagactgaagaggccttgagagcctggccaggtggctgtccacgtgaggtcatagtcacagcatggaggccttgagagcctggccaggtggccctccacgtgaggtcatggtcacagcatgggggccttgagtgcctggccaggtggccctccacgtgaggtcatggtcacagcatggaggccttgagagcctggccaggtggccctccacgtgaggttgtggtcacagcatgggggccttgagagcctggccaggtggccctccacgtgaggtcatggtcacagcatggaggccttgagagcctggccaggtggccctccgtgtgaggtcatggtcacagcatagtttggagctagggagggactgtcagcctggaggtttggagactcattctggaatctagtgtgggtcaagccaacttcagggagaggctgagccagggtaggagtcacaggagcagacgaggatgtggggtgccgtgcacagagctccatgaccagcttgggaagttagaaggaaggggaggcaggaggctgcttagtctgctgccatgatgggccccatgaatggtggctctcaagcttctgtgctacacaggggtgtgtggttgggcgagtgtccttgttaattgatacctaattggccttggttgggaacatagccatgagtgcccctcgtgggtggggcgccagtctgtcattgacctcattgtgtcagcaccttccccccaaggaggctgaccctgccctgccagctgagactgggagacggagtgggctctgatcccagggcttccaggaaagctctggctttggagcagaagcgggttctaggacttagtgcccctcactcggtgcctgggttcctgtgtgtgtggaaagggtagggctgcaccctgtggaagagggttcagggagctctgaggacctggctcgtgctagatgctcagtcagtagtgtgttttagcagcagccggaagtgactgctttcagtgtgtagtggtgagtgctagctggcacccctgcgcctggcttcccagacactgtaacgcagggcaggggaggcagcgagggctgggtccccacggtggccctggcagccccgccatccccatcccctgccacgtgctgctccctccatctggtccctgcccctcagccagcggaggagcccgctgggcccttccctgcccgtccccgctcctccctggcccccgcacaggtaagtgagggtgaggggggcacaggggactggggtcactaaccccccccgggccccccccgagcccctgaggtggggaggctgggaggcgggtggggagccagcaggcactgtgctgaggaaatcctgtgggcacccgaatgggggggcctccccgctcgtggggccctcccctgccctcccgcccgcccgcctcatcaccttctcctcttgtctccatagcttccgccctgcgctgccagtctcctacctgcaggccgagctggccttcgagggcgaggccgcctgccgggccttcctagagcccctgggcctggcctacacgggcccggacaactccagcatcgactgccgcctcagcctggcgcagctgtcagccttctgagcacccagcgaggaggggcgggggcaggggctgcagcccccagcgctgcctttgcggattctgtttttgagccgtggacttgggttgtaaatttatttgtggggagtgcgctccaggaagagccaccatccctgcccccgttttcccaccggggagtctgtacagagatttttctacgtttttattttttgcctcagagggatgggattggggaggaggggatgggcagcggagggttgggggcatggtctgcaggctcatctgtgtccgcctttcactccactaatgctgtctcagtgttttctctctctctctttcgagcttgcactccggtacccgacccggcgccctggcccatcccatgccggggggccagtggaaagaagacaggccgtccagcccgtgcccgcctgcggcgggggcacccagcaagcccgcccaccgcccgctgcctcacctgcttcgccacagactcttgttcccagccccttggggcctccgtgtttggggtgggggagctgcttagagactgtgcccgtcctcggccccccaccctgaagtgccagcaccaccagcaccagatcctccgccgccacaccgcactgaggacacgccggccgggccgcctcgtctcaagttgtataaagttgtctccgtgtcccctcctccctctgcccccagtgtttcttctgatttttttttcccctttccctccctccctctccgcattcttcccttggttcagcacaggtaaaacggttcccctccctccctgccttcatggatcaccagctcacgtcatgttgccttctcttttctttgtgtgtgtgtttatttaagttatttttcttcctcctctcccttttctttttggccctccctccctccctcttctgccatgtaactggaggatgtgctatgagtttgcaaacagctggactgtcaggctgctttttttccagatgttcctcctctgcctccccttcccctcctctcccctccttttccttccttccttcctttccttggagcactgagcaccatttggaagcttgagagaaaccaaaattaaagagagaaagagaga

SEQ ID NO: 148765 - DNA, 4138 bp, Homo sapiens
  Payload ID: 9422
  Gene Symbol: LENG8
  Gene Name: leukocyte receptor cluster (LRC) member 8
  Uniprot ID: Q96PV6
  ENST ID: ENST00000622672
  CDS Start-End: 648-3050
gtcaggagttcgagaacagcctggccgacatggtgaaaccccgtctttactaaaaacacaaaaattagccgggcatagtggcgcgcgcctgtaatcccagctactccggaggctgaggcagaattgtttgaacccaggaggcggaggttgcagtgagcagagatcacgccactgtactctatcgtgggcgacgacagagcaagagcaagactccgtctccgagaacaacaacaacagcaacaagaaaacaacaataaaaaaaataaggctgcgtgggaggcagaaagagctaatgcggccacgcttgtcccctcggggccaccgtccccacccagacttccggtctgccttaaaatgttcatgcgtaagtgcgtgggcaggaaggcgggctcaagcgcagctcgtggcgttcattggctgtgcagggccgagggaggcggtgcaaggccgccgcgtgacgtcaggacgccgcggtcaggacgtcgaagccaaagaagaccagagccagccgggtggcacagcggtgtcgtggccgtgttgctgatcgcctgggtggttgttggcgtgtccctgcagcgaaggatcctggttggcagtgaaaaagcagtctggctcccgaggtccaccccttataccccaaggtccagatggcggccaacgtgggtgatcaacgtagcacagattggtcttctcagtacagcatggtggctggggcaggccgagagaatggcatggagacgccgatgcacgagaacccggagtgggagaaggcccgtcaggccctggccagcatcagcaagtcaggagctgccggcggctctgccaagtccagcagcaatgggcctgtggccagtgcacagtacgtgtcccaggcagaagcctcagctttgcagcagcagcagtactaccagtggtaccagcagtacaactatgcctacccctacagctactactatcccatgagcatgtaccagagctatggctccccttcccagtatgggatggccggctcctatggctcagccacaccccagcagccatccgcaccccaacaccaagggactctgaaccagcccccagtccccggcatggatgagagcatgtcctaccaggctccccctcagcagctgccgtcggctcagccccctcagccctcaaatcccccacatggggctcacacgctgaacagtggccctcagcctgggacagctccagccacacagcacagccaggcggggcccgccacgggccaggcctatgggccacacacctacaccgaacctgccaagcccaagaagggccaacagctgtggaaccgcatgaagcccgcccctgggactggaggtctcaagttcaacatccagaagcgaccctttgctgttaccacccagagctttggctccaacgcagagggccagcacagtggttttggcccccagcccaaccctgagaaagttcagaaccacagcgggtcctctgcccgggggaacctgtctgggaagcccgatgactggccccaggacatgaaagagtatgtggagcgctgcttcaccgcctgtgagtcggaggaggacaaggaccgcacggaaaagctgctcaaggaggtgctgcaggcgcggctgcaggacggctcggcctataccattgactggagccgggagcccttgccggggctgacccgggagcctgtggctgagagccctaagaagaagcggtgggaggccgctagcagccttcaccctcctagaggggcaggctcggcgacaaggggcgggggtgccccgtcccagcgagggacgcccggggctgggggtgccggtcgagcccggggcaacagcttcaccaagtttggcaaccgcaacgtcttcatgaaggacaacagctcttcttccagcacagactcccgctcccgctcctcctccaggtccccgacgcgccacttccgcagaagtgactcccactcagactccgacagctcctactcagggaatgagtgtcaccctgtgggccgcaggaacccgccccctaagggccggggcggtcgaggggcccatatggatcggggccgaggcagggcgcagcgtgggaagaggcacgatctggcgcccaccaagcgcagtcgaaagaagatggcggcgctggagtgtgaggacccggagcgagagctgaagaagcagaagcgggcagcccgcttccagcacggacactcccgccgcctgcgcctcgagcccctggtgctgcagatgagcagcctggagagcagtggggctgaccctgactggcaggagctgcagatcgtgggcacctgccctgacatcaccaagcactacctgcgcctcacctgtgcccccgacccgtccaccgtgcgccctgtggcagttttgaaaaagtcgctgtgcatggtcaagtgccactggaaagagaagcaggactacgcgtttgcctgcgagcagatgaagtcgatccggcaggatctgacggtgcagggcatccgcaccgagttcacggtggaggtgtacgagacccatgcccggatcgccttggagaagggtgaccatgaagagtttaaccagtgccagacgcagctcaagtcgctgtacgccgagaacttgcctggcaatgtgggcgagtttactgcctaccgaatcctctactacatcttcaccaagaactcgggagacatcaccacggagctggcatacctcacacgagaactgaaggcagatccttgcgtggcccacgccttggcattaaggacagcctgggccctgggcaactaccaccgctttttccggctctactgccatgcaccctgcatgtctggctacctcgtggacaagtttgcagatcgggagcgcaaggtcgccctcaaggccatgatcaaaaccttccgccctgcgctgccagtctcctacctgcaggccgagctggccttcgagggcgaggccgcctgccgggccttcctagagcccctgggcctggcctacacgggcccggacaactccagcatcgactgccgcctcagcctggcgcagctgtcagccttctgagcacccagcgaggaggggcgggggcaggggctgcagcccccagcgctgcctttgcggattctgtttttgagccgtggacttgggttgtaaatttatttgtggggagtgcgctccaggaagagccaccatccctgcccccgttttcccaccggggagtctgtacagagatttttctacgtttttattttttgcctcagagggatgggattggggaggaggggatgggcagcggagggttgggggcatggtctgcaggctcatctgtgtccgcctttcactccactaatgctgtctcagtgttttctctctctctctttcgagcttgcactccggtacccgacccggcgccctggcccatcccatgccggggggccagtggaaagaagacaggccgtccagcccgtgcccgcctgcggcgggggcacccagcaagcccgcccaccgcccgctgcctcacctgcttcgccacagactcttgttcccagccccttggggcctccgtgtttggggtgggggagctgcttagagactgtgcccgtcctcggccccccaccctgaagtgccagcaccaccagcaccagatcctccgccgccacaccgcactgaggacacgccggccgggccgcctcgtctcaagttgtataaagttgtctccgtgtcccctcctccctctgcccccagtgtttcttctgatttttttttcccctttccctccctccctctccgcattcttcccttggttcagcacaggtaaaacggttcccctccctccctgccttcatggatcaccagctcacgtcatgttgccttctcttttctttgtgtgtgtgtttatttaagttatttttcttcctcctctcccttttctttttggccctccctccctccctcttctgccatgtaactggaggatgtgctatgagtttgcaaacagctggactgtcaggctgctttttttccagatgttcctcctctgcctccccttcccctcctctcccctccttttccttccttccttcctttccttggagcactgagcaccatttggaagcttgagagaaaccaaaattaaagagagaaagagagag

SEQ ID NO: 148766 - DNA, 2825 bp, Homo sapiens
  Payload ID: 9422
  Gene Symbol: LENG8
  Gene Name: leukocyte receptor cluster (LRC) member 8
  ENST ID: ENST00000611866
  CDS Start-End: 480-2825
ccactgtactctatcgtgggcgacgacagagcaagagcaagactccgtctccgagaacaacaacaacagcaacaagaaaacaacaataaaaaaaataaggctgcgtgggaggcagaaagagctaatgcggccacgcttgtcccctcggggccaccgtccccacccagacttccggtctgccttaaaatgttcatgcgtaagtgcgtgggcaggaaggcgggctcaagcgcagctcgtggcgttcattggctgtgcagggccgagggaggcggtgcaaggccgccgcgtgacgtcaggacgccgcggtcaggacgtcgaagccaaagaagaccagagccagccgggtggcacagcggtgtcgtggccgtgttgctgatcgcctgggtggttgttggcgtgtccctgcagcgaaggatcctggttggcagtgaaaaagcagtctggctcccgaggtccaccccttataccccaaggtccagatggcggccaacgtgggtgatcaacgtagcacagattggtcttctcagtacagcatggtggctggggcaggccgagagaatggcatggagacgccgatgcacgagaacccggagtgggagaaggcccgtcaggccctggccagcatcagcaagtcaggagctgccggcggctctgccaagtccagcagcaatgggcctgtggccagtgcacagtacgtgtcccaggcagaagcctcagctttgcagcagcagcagtactaccagtggtaccagcagtacaactatgcctacccctacagctactactatcccatgcccccagtccccggcatggatgagagcatgtcctaccaggctccccctcagcagctgccgtcggctcagccccctcagccctcaaatcccccacatggggctcacacgctgaacagtggccctcagcctgggacagctccagccacacagcacagccaggcggggcccgccacgggccaggcctatgggccacacacctacaccgaacctgccaagcccaagaagggccaacagctgtggaaccgcatgaagcccgcccctgggactggaggtctcaagttcaacatccagaagcgaccctttgctgttaccacccagagctttggctccaacgcagagggccagcacagtggttttggcccccagcccaaccctgagaaagttcagaaccacagcgggtcctctgcccgggggaacctgtctgggaagcccgatgactggccccaggacatgaaagagtatgtggagcgctgcttcaccgcctgtgagtcggaggaggacaaggaccgcacggaaaagctgctcaaggaggtgctgcaggcgcggctgcaggacggctcggcctataccattgactggagccgggagcccttgccggggctgacccgggagcctgtggctgagagccctaagaagaagcggtgggaggccgctagcagccttcaccctcctagaggggcaggctcggcgacaaggggcgggggtgccccgtcccagcgagggacgcccggggctgggggtgccggtcgagcccggggcaacagcttcaccaagtttggcaaccgcaacgtcttcatgaaggacaacagctcttcttccagcacagactcccgctcccgctcctcctccaggtccccgacgcgccacttccgcagaagtgactcccactcagactccgacagctcctactcagggaatgagtgtcaccctgtgggccgcaggaacccgccccctaagggccggggcggtcgaggggcccatatggatcggggccgaggcagggcgcagcgtgggaagaggcacgatctggcgcccaccaagcgcagtcgaaagaagatggcggcgctggagtgtgaggacccggagcgagagctgaagaagcagaagcgggcagcccgcttccagcacggacactcccgccgcctgcgcctcgagcccctggtgctgcagatgagcagcctggagagcagtggggctgaccctgactggcaggagctgcagatcgtgggcacctgccctgacatcaccaagcactacctgcgcctcacctgtgcccccgacccgtccaccgtgcgccctgtggcagttttgaaaaagtcgctgtgcatggtcaagtgccactggaaagagaagcaggactacgcgtttgcctgcgagcagatgaagtcgatccggcaggatctgacggtgcagggcatccgcaccgagttcacggtggaggtgtacgagacccatgcccggatcgccttggagaagggtgaccatgaagagtttaaccagtgccagacgcagctcaagtcgctgtacgccgagaacttgcctggcaatgtgggcgagtttactgcctaccgaatcctctactacatcttcaccaagaactcgggagacatcaccacggagctggcatacctcacacgagaactgaaggcagatccttgcgtggcccacgccttggcattaaggacagcctgggccctgggcaactaccaccgctttttccggctctactgccatgcaccctgcatgtctggctacctcgtggacaagtttgcagatcgggagcgcaaggtcgccctcaaggccatgatcaaaacgtatgtggtgccaagctcccttctgcctttgctcttcccatccttccgcctcgtctcaagttgtataaagttgtctccgtgtcccctcctccctctgcccccagtgtttcttctgatttttttttcccctttccctccctccctctccgcattcttcccttggttcagcacaggtaaaacggttcccccctccctccctccctcttctgccatgtaa

SEQ ID NO: 148767 - DNA, 3635 bp, Homo sapiens
  Payload ID: 9422
  Gene Symbol: LENG8
  Gene Name: leukocyte receptor cluster (LRC) member 8
  Uniprot ID: Q96PV6
  ENST ID: ENST00000617180
  CDS Start-End: 145-2547
gccagccgggtggcacagcggtgtcgtggccgtgttgctgatcgcctgggtggttgttggcgtgtccctgcagcgaaggatcctggttggcagtgaaaaagcagtctggctcccgaggtccaccccttataccccaaggtccagatggcggccaacgtgggtgatcaacgtagcacagattggtcttctcagtacagcatggtggctggggcaggccgagagaatggcatggagacgccgatgcacgagaacccggagtgggagaaggcccgtcaggccctggccagcatcagcaagtcaggagctgccggcggctctgccaagtccagcagcaatgggcctgtggccagtgcacagtacgtgtcccaggcagaagcctcagctttgcagcagcagcagtactaccagtggtaccagcagtacaactatgcctacccctacagctactactatcccatgagcatgtaccagagctatggctccccttcccagtatgggatggccggctcctatggctcagccacaccccagcagccatccgcaccccaacaccaagggactctgaaccagcccccagtccccggcatggatgagagcatgtcctaccaggctccccctcagcagctgccgtcggctcagccccctcagccctcaaatcccccacatggggctcacacgctgaacagtggccctcagcctgggacagctccagccacacagcacagccaggcggggcccgccacgggccaggcctatgggccacacacctacaccgaacctgccaagcccaagaagggccaacagctgtggaaccgcatgaagcccgcccctgggactggaggtctcaagttcaacatccagaagcgaccctttgctgttaccacccagagctttggctccaacgcagagggccagcacagtggttttggcccccagcccaaccctgagaaagttcagaaccacagcgggtcctctgcccgggggaacctgtctgggaagcccgatgactggccccaggacatgaaagagtatgtggagcgctgcttcaccgcctgtgagtcggaggaggacaaggaccgcacggaaaagctgctcaaggaggtgctgcaggcgcggctgcaggacggctcggcctataccattgactggagccgggagcccttgccggggctgacccgggagcctgtggctgagagccctaagaagaagcggtgggaggccgctagcagccttcaccctcctagaggggcaggctcggcgacaaggggcgggggtgccccgtcccagcgagggacgcccggggctgggggtgccggtcgagcccggggcaacagcttcaccaagtttggcaaccgcaacgtcttcatgaaggacaacagctcttcttccagcacagactcccgctcccgctcctcctccaggtccccgacgcgccacttccgcagaagtgactcccactcagactccgacagctcctactcagggaatgagtgtcaccctgtgggccgcaggaacccgccccctaagggccggggcggtcgaggggcccatatggatcggggccgaggcagggcgcagcgtgggaagaggcacgatctggcgcccaccaagcgcagtcgaaagaagatggcggcgctggagtgtgaggacccggagcgagagctgaagaagcagaagcgggcagcccgcttccagcacggacactcccgccgcctgcgcctcgagcccctggtgctgcagatgagcagcctggagagcagtggggctgaccctgactggcaggagctgcagatcgtgggcacctgccctgacatcaccaagcactacctgcgcctcacctgtgcccccgacccgtccaccgtgcgccctgtggcagttttgaaaaagtcgctgtgcatggtcaagtgccactggaaagagaagcaggactacgcgtttgcctgcgagcagatgaagtcgatccggcaggatctgacggtgcagggcatccgcaccgagttcacggtggaggtgtacgagacccatgcccggatcgccttggagaagggtgaccatgaagagtttaaccagtgccagacgcagctcaagtcgctgtacgccgagaacttgcctggcaatgtgggcgagtttactgcctaccgaatcctctactacatcttcaccaagaactcgggagacatcaccacggagctggcatacctcacacgagaactgaaggcagatccttgcgtggcccacgccttggcattaaggacagcctgggccctgggcaactaccaccgctttttccggctctactgccatgcaccctgcatgtctggctacctcgtggacaagtttgcagatcgggagcgcaaggtcgccctcaaggccatgatcaaaaccttccgccctgcgctgccagtctcctacctgcaggccgagctggccttcgagggcgaggccgcctgccgggccttcctagagcccctgggcctggcctacacgggcccggacaactccagcatcgactgccgcctcagcctggcgcagctgtcagccttctgagcacccagcgaggaggggcgggggcaggggctgcagcccccagcgctgcctttgcggattctgtttttgagccgtggacttgggttgtaaatttatttgtggggagtgcgctccaggaagagccaccatccctgcccccgttttcccaccggggagtctgtacagagatttttctacgtttttattttttgcctcagagggatgggattggggaggaggggatgggcagcggagggttgggggcatggtctgcaggctcatctgtgtccgcctttcactccactaatgctgtctcagtgttttctctctctctctttcgagcttgcactccggtacccgacccggcgccctggcccatcccatgccggggggccagtggaaagaagacaggccgtccagcccgtgcccgcctgcggcgggggcacccagcaagcccgcccaccgcccgctgcctcacctgcttcgccacagactcttgttcccagccccttggggcctccgtgtttggggtgggggagctgcttagagactgtgcccgtcctcggccccccaccctgaagtgccagcaccaccagcaccagatcctccgccgccacaccgcactgaggacacgccggccgggccgcctcgtctcaagttgtataaagttgtctccgtgtcccctcctccctctgcccccagtgtttcttctgatttttttttcccctttccctccctccctctccgcattcttcccttggttcagcacaggtaaaacggttcccctccctccctgccttcatggatcaccagctcacgtcatgttgccttctcttttctttgtgtgtgtgtttatttaagttatttttcttcctcctctcccttttctttttggccctccctccctccctcttctgccatgtaactggaggatgtgctatgagtttgcaaacagctggactgtcaggctgctttttttccagatgttcctcctctgcctccccttcccctcctctcccctccttttccttccttccttcctttccttggagcactgagcaccatttggaagcttgagagaaaccaaaattaaagagagaaagagagag

SEQ ID NO: 148768 - DNA, 582 bp, Homo sapiens
  Payload ID: 9422
  Gene Symbol: LENG8
  Gene Name: leukocyte receptor cluster (LRC) member 8
  ENST ID: ENST00000613009
  CDS Start-End: 128-582
gtcgaagccaaagaagaccagagccagccgggtggcacagcggtgtcgtggccgtgttgctgatcgcctgggtggttgttggcgtgtccctgcagcgaaggatcctggttggtcttctcagtacagcatggtggctggggcaggccgagagaatggcatggagacgccgatgcacgagaacccggagtgggagaaggcccgtcaggccctggccagcatcagcaagtcaggagctgccggcggctctgccaagtccagcagcaatgggcctgtggccagtgcacagtacgtgtcccaggcagaagcctcagctttgcagcagcagcagtactaccagtggtaccagcagtacaactatgcctacccctacagctactactatcccatgcccccagtccccggcatggatgagagcatgtcctaccaggctccccctcagcagctgccgtcggctcagccccctcagccctcaaatcccccacatggggctcacacgctgaacagtggccctcagcctgggacagctccagccacacagcacagccaggcggggcccgccacgggccaggcctatgggccaca

SEQ ID NO: 148769 - DNA, 393 bp, Homo sapiens
  Payload ID: 9422
  Gene Symbol: LENG8
  Gene Name: leukocyte receptor cluster (LRC) member 8
  ENST ID: ENST00000620984
  CDS Start-End: 119-393
atccgagcggcctcctccacccggcgtcctcctttgccttcgcccagcctgcgggacggccagacagtgaaaaagcagtctggctcccgaggtccaccccttataccccaaggtccagatggcggccaacgtgggtgatcaacgtagcacagattggtcttctcagtacagcatggtggctggggcaggccgagagaatggcatggagacgccgatgcacgagaacccggagtgggagaaggcccgtcaggccctggccagcatcagcaagtcaggagctgccggcggctctgccaagtccagcagcaatgggcctgtggccagtgcacagtacgtgtcccaggcagaagcctcagctttgcagcagcagcagtactaccagtggtaccagca

SEQ ID NO: 148770 - DNA, 2825 bp, Homo sapiens; identical to SEQ ID NO: 148761
  Payload ID: 9422
  Gene Symbol: LENG8
  Gene Name: leukocyte receptor cluster (LRC) member 8
  ENST ID: ENST00000617420
  CDS Start-End: 480-2825

SEQ ID NO: 148771 - DNA, 4673 bp, Homo sapiens
  Payload ID: 9422
  Gene Symbol: LENG8
  Gene Name: leukocyte receptor cluster (LRC) member 8
  ENST ID: ENST00000617297
  CDS Start-End: 1-2179
tgagagcatgtcctaccaggctccccctcagcagctgccgtcggctcagccccctcagccctcaaatcccccacatggggctcacacgctgaacagtggccctcagcctgggacagctccagccacacagcacagccaggcggggcccgccacgggccaggcctatgggccacacacctacaccgaacctgccaagcccaagaagggccaacagctgtggaaccgcatgaaacccgcccctgggactggaggtctcaagttcaacatccagaagcgaccctttgctgttaccacccagagctttggctccaacgcagagggccagcacagtggttttggcccccagcccaaccctgagaaagttcagaaccacagcgggtcctctgcccgggggaacctgtctgggaagccggatgactggccccaggacatgaaagagtatgtggagcgctgcttcaccgcctgtgagtcggaggaggacaaggaccgcacggaaaagctgctcaaggaggtgctgcaggcgcggctgcaggacggctcggcctataccattgactggagccgggagcccttgccggggctgacccgggagcctgtggctgagagccctaagaagaagcggtgggaggccgctagcagccttcaccctcctagaggggcaggctcggcgacaaggggcgggggtgccccgtcccagcgagggacgcccggggctgggggtgccggtcgagcccggggcaacagcttcaccaagtttggcaaccgcaacgtcttcatgaaggacaacagctcttcttccagcacagactcccgctcccgctcctcctccaggtccccgacgcgccacttccgcagaagtgactcccactcagactccgacagctcctactcagggaatgagtgtcaccctgtgggccgcaggaacccgccccctaagggccggggcggtcgaggggcccatatggatcggggccgaggcagggcgcagcgtgggaagaggcacgatctggcgcccaccaagcgcagtcgaaagaagatggcggcgctggagtgtgaggacccggagcgagagctgaagaagcagaagcgggcagcccgcttccagcacggacactcccgccgcctgcgcctcgagcccctggtgctgcagatgagcagcctggagagcagtggggctgaccctgactggcaggagctgcagatcgtgggcacctgccctgacatcaccaagcactacctgcgcctcacctgtgcccccgacccgtccaccgtgcgccctgtggcagttttgaaaaagtcgctgtgcatggtcaagtgccactggaaagagaagcaggactacgcgtttgcctgcgagcagatgaagtcgatccggcaggatctgacggtgcagggcatccgcaccgagttcacggtggaggtgtacgagacccatgcccggatcgccttggagaagggtgaccatgaagagtttaaccagtgccagacgcagctcaagtcgctgtacgccgagaacttgcctggcaatgtgggcgagtttactgcctaccgaatcctctactacatcttcaccaagaactcgggagacatcaccacggagctggcatacctcacacgagaactgaaggcagatccttgcgtggcccacgccttggcattaaggacagcctgggccctgggcaactaccaccgctttttccggctctactgccatgcaccctgcatgtctggctacctcgtggacaagtttgcagatcgggagcgcaaggtcgccctcaaggccatgatcaaaacgtatgtggtgccaagctcccttctgcctttgctcttcccatccttccgcctcgcaccgcccctcagaccagctcctggccgcaggcctcccccagcccccaacccttgtcctggtccttgcttccccatcatctttctccattcagccctcccctctccagttcctcttgctctccttgttggtcacctctgtgttccgggtcactcctctccctctccccactgttcccagctcactgcctctggggcctcttctccaccccatctgtgtgtctcttcctcctgttctctcctgcctggaccccctagttcactccttgccctgggcttcctcagaaccctgaggtctctgctttctcagcttgtcgctgtgctcccaccatagagaccatctagacagcctctggtctaccaggacaaggcccagtcccactcagctcctttgagagcaccagaaacgcttagggagacacctgtgttgaggccacactgggcgcggtgccagaggcccctggtcaggccatgcccctgcagtgtccttcgttcactagacattgcgcctggcttgctgtgggtggggatgagttgcttgactcatgtttagacgcatggttctgtctggtgattgaggtgcccaggcgacgctgggcaatgtcaagagaggttttcgcttgtcacagcaaggggatgctcttggcatctagtgagtggaggccagggatgctgccctgccactgccattgggcctcagagctcagtcttgccaaggtggagaaattctggtcgaagaggttgaccggtagactgaagaggccttgagagcctggccaggtggctgtccacgtgaggtcatagtcacagcatggaggccttgagagcctggccaggtggccctccacgtgaggtcatggtcacagcatgggggccttgagtgcctggccaggtggccctccacgtgaggtcatggtcacagcatggaggccttgagagcctggccaggtggccctccacgtgaggttgtggtcacagcatgggggccttgagagcctggccaggtggccctccacgtgaggtcatggtcacagcatggaggccttgagagcctggccaggtggccctccgtgtgaggtcatggtcacagcatagtttggagctagggagggactgtcagcctggaggtttggagactcattctggaatctagtgtgggtcaagccaacttcagggagaggctgagccagggtaggagtcacaggagcagacgaggatgtggggtgccgtgcacagagctccatgaccagcttgggaagttagaaggaaggggaggcaggaggctgcttagtctgctgccatgatgggccccatgaatggtggctctcaagcttctgtgctacacaggggtgtgtggttgggcgagtgtccttgttaattgatacctaattggccttggttgggaacatagccatgagtgcccctcgtgggtggggcgccagtctgtcattgacctcattgtgtcagcaccttccccccaaggaggctgaccctgccctgccagctgagactgggagacggagtgggctctgatcccagggcttccaggaaagctctggctttggagcagaagcgggttctaggacttagtgcccctcactcggtgcctgggttcctgtgtgtgtggaaagggtagggctgcaccctgtggaagagggttcagggagctctgaggacctggctcgtgctagatgctcagtcagtagtgtgttttagcagcagccggaagtgactgctttcagtgtgtagtggtgagtgctagctggcacccctgcgcctggcttcccagacactgtaacgcagggcaggggaggcagcgagggctgggtccccacggtggccctggcagccccgccatccccatcccctgccacgtgctgctccctccatctggtccctgcccctcagccagcggaggagcccgctgggcccttccctgcccgtccccgctcctccctggcccccgcacaggtaagtgagggtgaggggggcacaggggactggggtcactaaccccccccgggccccccccgagcccctgaggtggggaggctgggaggcgggtggggagccagcaggcactgtgctgaggaaatcctgtgggcacccgaatgggggggcctccccgctcgtggggccctcccctgccctcccgcccgcccgcctcatcaccttctcctcttgtctccatagcttccgccctgcgctgccagtctcctacctgcaggccgagctggccttcgagggcgaggccgcctgccgggccttcctagagcccctgggcctggcctacacgggcccggacaactccagcatcgactgccgcctcagcctggcgcagctgtcagccttctgagcacccagcgaggaggggcgggggcaggggctgcagcccccagcgctgcctttgcggattctgtttttgagccgtggacttgggttgtaaatttatttgtggggagtgcgctccaggaagagccaccatccctgcccccgttttcccaccggggagtctgtacagagatttttctacgtttttattttttgcctcagagggatgggattggggaggaggggatgggcagcggagggttgggggcatggtctgcaggctcatctgtgtccgcctttcactccactaatgctgtctcagtgttttctctctctctctttcgagcttgcactccggtacccgacccggcgccctggcccatcccatgccggggggccagtggaaagaagacaggccgtccagcccgtgcccgcctgcggcgggggcacccagcaagcccgcccaccgcccgctgcctcacctgcttcgccacaga

SEQ ID NO: 148772 - DNA, 4674 bp, Homo sapiens
  Payload ID: 9422
  Gene Symbol: LENG8
  Gene Name: leukocyte receptor cluster (LRC) member 8
  ENST ID: ENST00000619260
  CDS Start-End: 1-2179
tgagagcatgtcctaccaggctccccctcagcagctgccgtcggctcagccccctcagccctcaaatcccccacatggggctcacacgctgaacagtggccctcagcctgggacagctccagccacacagcacagccaggcggggcccgccacgggccaggcctatgggccacacacctacaccgaacctgccaagcccaagaagggccaacagctgtggaaccgcatgaagcccgcccctgggactggaggtctcaagttcaacatccagaagcgaccctttgctgttaccacccagagctttggctccaacgcagagggccagcacagtggttttggcccccagcccaaccctgagaaagttcagaaccacagcgggtcctctgcccgggggaacctgtctgggaagcccgatgactggccccaggacatgaaagagtatgtggagcgctgcttcaccgcctgtgagtcggaggaggacaaggaccgcacggaaaagctgctcaaggaggtgctgcaggcgcggctgcaggacggctcggcctataccattgactggagccgggagcccttgccggggctgacccgggagcctgtggctgagagccctaagaagaagcggtgggaggccgctagcagccttcaccctcctagaggggcaggctcggcgacaaggggcgggggtgccccgtcccagcgagggacgcccggggctgggggtgccggtcgagcccggggcaacagcttcaccaagtttggcaaccgcaacgtcttcatgaaggacaacagctcttcttccagcacagactcccgctcccgctcctcctccaggtccccgacgcgccacttccgcagaagtgactcccactcagactccgacagctcctactcagggaatgagtgtcaccctgtgggccgcaggaacccgccccctaagggccggggcggtcgaggggcccatatggatcggggccgaggcagggcgcagcgtgggaagaggcacgatctggcgcccaccaagcgcagtcgaaagaagatggcggcgctggagtgtgaggacccggagcgagagctgaagaagcagaagcgggcagcccgcttccagcacggacactcccgccgcctgcgcctcgagcccctggtgctgcagatgagcagcctggagagcagtggggctgaccctgactggcaggagctgcagatcgtgggcacctgccctgacatcaccaagcactacctgcgcctcacctgtgcccccgacccgtccaccgtgcgccctgtggcagttttgaaaaagtcgctgtgcatggtcaagtgccactggaaagagaagcaggactacgcgtttgcctgcgagcagatgaagtcgatccggcaggatctgacggtgcagggcatccgcaccgagttcacggtggaggtgtacgagacccatgcccggatcgccttggagaagggtgaccatgaagagtttaaccagtgccagacgcagctcaagtcgctgtacgccgagaacttgcctggcaatgtgggcgagtttactgcctaccgaatcctctactacatcttcaccaagaactcgggagacatcaccacggagctggcatacctcacacgagaactgaaggcagatccttgcgtggcccacgccttggcattaaggacagcctgggccctgggcaactaccaccgctttttccggctctactgccatgcaccctgcatgtctggctacctcgtggacaagtttgcagatcgggagcgcaaggtcgccctcaaggccatgatcaaaacgtatgtggtgccaagctcccttctgcctttgctcttcccatccttccgcctcgcaccgcccctcagaccagctcctggccgcaggcctcccccagcccccaacccttgtcctggtccttgcttccccatcatctttctccattcagccctcccctctccagttcctcttgctctccttgttggtcacctctgtgttccgggtcactcctctccctctccccactgttcccagctcactgcctctggggcctcttctccaccccatctgtgtgtctcttcctcctgttctctcctgcctggaccccctagttcactccttgccctgggcttcctcagaaccctgaggtctctgctttctcagcttgtcgctgtgctcccaccatagagaccatctagacagcctctggtctaccaggacaaggcccagtcccactcagctcctttgagagcaccagaaacgcttagggagacacctgtgttgaggccacactgggcgcggtgccagaggcccctggtcaggccatgcccctgcagtgtccttcgttcactagacattgcgcctggcttgctgtgggtggggatgagttgcttgactcatgtttagacgcatggttctgtctggtgattgaggtgcccaggcgacgctgggcaatgtcaagagaggttttggcttgtcacagcaaggggatgctcttggcatctagtgagtggaggccagggatgctgccctgccactgccattgggcctcagagctcagtcttgccaaggtggagaaattctggtcgaagaggttgaccggtagactgaagaggccttgagagcctggccaggtggctgtccacgtgaggtcatagtcacagcatggaggccttgagagcctggccaggtggccctccacgtgaggtcatggtcacagcatgggggccttgagtgcctggccaggtggccctccacgtgaggtcatggtcacagcatggaggccttgagagcctggccaggtggccctccatgtgaggttgtggtcacagcatgggggccttgagagcctggccaggtggccctccacgtgaggtcatggtcacagcatggaggccttgagagcctggccaggtggccctccgtgtgaggtcatggtcacagcatagtttggagctagggagggactgtcagcctggaggtttggagactcattctggaatctagtgtgggtcaagccaacttcagggagaggctgagccagggtaggagtcacaggagcagacgaggatgtggggtgccgtgcacagagctccatgaccagcttgggaagttagaaggaaggggaggcaggaggctgcttagtctgctgccatgatgggccccatgaatggtggctctcaagcttctgtgctacacaggggtgtgtggttgggcgagtgtccttgttaattgatacctaattggccttggttgggaacatagccatgagtgcccctcgtgggtggggcgccagtctgtcattgacctcattgtgtcagcaccttcccctcaaggaggctgaccctgccctgccagctgagactgggagacggagtgggctctgatcccagggcttccaggaaagctctggctttggagcagaagcgggttctaggacttagtgcccctcactcggtgcctgggttcctgtgtgtgtggaaagggtagggctgcaccctgtggaagagggttcagggagctctgaggacctggctcgtgctagatgctcagtcagtagtgtgttttagcagcagccggaagtgactgctttcagtgtgtagtggtgagtgctagctggcacccctgcgcctggcttcccagacactgtaacgcagggcaggggaggcagcgagggctgggtccccacggtggccctggcagccccgccatccccatcccctgccacgtgctgctccctccatctggtccctgcccctcagccagcggaggagcccgctgggcccttccctgcccgtccccgctcctccctggcccccgcacaggtaagtgagggtgaggggggcacaggggactggggtcactaacccccccccgggccccccccgagcccctgaggtggggaggctgggaggcgggtggggagccagcaggcactgtgctgaggaaatcctgtgggcacccgaatgggggggcctccccgctcgtggggccctcccctgccctcccgcccgcccgcctcatcaccttctcctcttgtctccatagcttccgccctgcgctgccagtctcctacctgcaggccgagctggccttcgagggcgaggccgcctgccgggccttcctagagcccctgggcctggcctacacgggcccggacaactccagcatcgactgccgcctcagcctggcgcagctgtcagccttctgagcacccagcgaggaggggcgggggcaggggctgcagcccccagcgctgcctttgcggattctgtttttgagccgtggacttgggttgtaaatttatttgtggggagtgcgctccaggaagagccaccatccctgcccccgttttcccaccggggagtctgtacagagatttttctacgtttttattttttgcctcagagggatgggattggggaggaggggatgggcagcggagggttgggggcatggtctgcaggctcatctgtgtccgcctttcactccactaatgctgtctcagtgttttctctctctctctttcgagcttgcactccggtacccgacccggcgccctggcccatcccatgccggggggccagtggaaagaagacaggccgtccagcccgtgcccgcctgcggcgggggcacccagcaagcccgcccaccgcccgctgcctcacctgcttcgccacaga

SEQ ID NO: 148773 - DNA, 4674 bp, Homo sapiens; identical to SEQ ID NO: 148772
  Payload ID: 9422
  Gene Symbol: LENG8
  Gene Name: leukocyte receptor cluster (LRC) member 8
  ENST ID: ENST00000611878
  CDS Start-End: 1-2179

SEQ ID NO: 148774 - DNA, 393 bp, Homo sapiens; identical to SEQ ID NO: 148762
  Payload ID: 9422
  Gene Symbol: LENG8
  Gene Name: leukocyte receptor cluster (LRC) member 8
  ENST ID: ENST00000614139
  CDS Start-End: 119-393

SEQ ID NO: 148775 - DNA, 742 bp, Homo sapiens
  Payload ID: 9422
  Gene Symbol: LENG8
  Gene Name: leukocyte receptor cluster (LRC) member 8
  ENST ID: ENST00000614208
  CDS Start-End: 145-742
cagagccagccgggtggcacagcggtgtcgtggccgtgttgctgatcgcctgggtggttgttggcgtgtccctgcagcgaaggatcctggcagtgaaaaagcagtctggctcccgaggtccaccccttataccccaaggtccagatggcggccaacgtgggtgatcaacgtagcacagattggtcttctcagtacagcatggtggctggggcaggccgagagaatggcatggagacgccgatgcacgagaacccggagtgggagaaggcccgtcaggccctggccagcatcagcaagtcaggagctgccggcggctctgccaagtccagcagcaatgggcctgtggccagtgcacagtacgtgtcccaggcagaagcctcagctttgcagcagcagcagtactaccagtggtaccagcagtacaactatgcctacccctacagctactactatcccatgagcatgtaccagagctatggctccccttcccagtatgggatggccggctcctatggctcagccacaccccagcagccatccgcaccccaacaccaagggactctgaaccagcccccagtccccggcatggatgagagcatgtcctaccaggctccccctcagcagctgccgtcggctcagccccctcagccctcaaatcccccacatggggctcacacgctgaacagtggccctcagcctgggacagctccagccacacagcacagccaggcggggcccgcca

SEQ ID NO: 148776 - DNA, 2825 bp, Homo sapiens; identical to SEQ ID NO: 148766
  Payload ID: 9422
  Gene Symbol: LENG8
  Gene Name: leukocyte receptor cluster (LRC) member 8
  ENST ID: ENST00000610314
  CDS Start-End: 480-2825

SEQ ID NO: 148777 - DNA, 594 bp, Homo sapiens; identical to SEQ ID NO: 148758
  Payload ID: 9422
  Gene Symbol: LENG8
  Gene Name: leukocyte receptor cluster (LRC) member 8
  ENST ID: ENST00000611220
  CDS Start-End: 1-336

SEQ ID NO: 148778 - DNA, 1919 bp, Homo sapiens
  Payload ID: 9423
  Gene Symbol: LENG9
  Gene Name: leukocyte receptor cluster (LRC) member 9
  Uniprot ID: Q96B70
  ENST ID: ENST00000622419
  CDS Start-End: 120-1625
aggctctccaccaaggagggactgggccagagtcctcgcgagggcacgcggcgtggtccccagagctaggccggagcgcgggccgctgacgccactgtcgggtgaggctcggtgcatccatggggagccgccctccgtgcggggcgacctcgtctgcgcggcgggcgtgccagttccccgcacccatggcagcggccagagagccggagttgccgcaggaagcccccgccacggaacccgcgcccccgccggcctgccgcttcttcctggaaggccgctgccgcttcggcgcccgctgccgccagccccaccctggggcgccggcgccgcctggccgcgaggcgcagccggaggccggggccaagaagccgccgctgcgcacagccgcggacgtcatccagcgcatccgctgggacccgcgcctcgaccccgccgacttctcggtgggctacgtcgaccgctttctgggtgtgcgcgaggagcccttcagcgccttttgctgggaccagccgctggcggcgctcgggccgggcgtgctggcagtgccccagcaccgcgtgcgcttcttccgcttccatggccgccttgtgtgggaccgcgcctcgcgcaccgacctcgtctttggctctggctcggcggcgggacgcgggcccaccatcctggacgcaccgaacaccgagggcgcccacggggcagagggtgccgagtggacactggcggggacaggtcaggaggcccaggctgcccccaagcgagggagcacaaggccgctctgcacagggcaccaggaaccaggcgtggaggaacccggagagctggaggcggcccaggagagggcgctgggcacagctgctgatttgggaacactggccccaagaggacgcctcgccggagtgactgaggaggcactgaagccaacagcagccaccaggaccacattgctggggggcaaggaagcacaggccctgggagtcccggggggctccgctgagacgacagaagccgagtggggtcctgcggcctggcccgaggacaaaagggcccgccttagtgttgcagccccttgccaaccgcgccccacacattttgtggccctcatggtgaccgagcctgggctacaagcagaagtgaccaaggcccaggaatacctggtccacgtggccccacactgcgccaacttcctagtgccctctcagaacctacacctgaccctggccctgctgcgactggcaggcgctggggaggaggccgctgccattggagctctgagacgggccctcttggccccggggctaaatgcaccccctcggctgagctttagaaagctggtcctcctgggcccgcatgtgctgtgtgccccaccctctcccacactggaaagcatggcacaagtgctgagccagaggctggaagccgaggggctgagtacactacagtctccagggcagctgcacccccacctcaccgtggccaaggtgccccatggttcccaggtccacctccccaagctggagttcaccctcagccaggaagtggggtgccagcccctgcagacactctggctgtgccgtatagggaggacaggggggcctttccagcccctggctgagatccgcctggagtgacacccccagacctctggaggagacaatggatgcaaacagcccacacaggaaagacaaagcaggagcgtgcacgctctctctttctctctttaattttggtttctctcaagcttccaaatggtgctcagtgctccaaggaaaggaaggaaggaaggaaaaggaggggagaggaggggaaggggaggcagaggaggaacatctggaaaaaaagcagcctgacagtccagctgtttgcaaactcatagcacatcctccagttacatggcagaagagggagggagggagggccaaaaa

SEQ ID NO: 148779 - DNA, 1921 bp, Homo sapiens
  Payload ID: 9423
  Gene Symbol: LENG9
  Gene Name: leukocyte receptor cluster (LRC) member 9
  ENST ID: ENST00000622643
  CDS Start-End: 186-1622
aggctctccaccaaggagggactgggccagagtcctcgcgagggcacgcggcgtggtccccagagctaggccggagcgcgggccgctgacgccactgtcgggtgaggctcggtgcatccaaggggagccgccctccgtgcggggcgacctcgtctgcgcggcgggcgtgccagttccccgcacccatggcagcggccagagagccggagttgccgcaggaagcccccgccacggaacccgcgcccccgccggcctgccgcttcttcctggaaggccgctgccgcttcggcgcccgctgccgccagccccaccctggggcgccggcgccgcctggccgcgaggcgcagccggaggccggggccaagaagccgccgctgcgcacagccgcggacgtcatccagcgcatccgctgggacccgcgcctcgaccccgccgacttctcggtgggctacgtcgaccgctttctgggtgtgcgcgaggagcccttcagcgccttttgctgggaccagccgctggcggcgctcgggccgggcgtgctggcagtgccccagcaccgcgtgcgcttcttccgcttccgtggccgccttgtgtgggaccgcgcctcgcgcaccgacctcgtctttggctctggctcggcggcgggacgcgggcccaccatcctggacgcaccgaacaccgagggcgcccacggggcagagggtgccgagtggacactggcggggacaggtcaggaggcccaggctgcccccaagcgagggagcacaaggccgctctgcacagggcaccaggaaccaggcgtggaggaacccggagagctggaggcggcccaggagagggcgctgggcacagctgctgatttgggaacactggccccaagaggacgcctcgccggagtgactgaggcactgaagccaacagcagccaccaggaccacattgctggggggcaaggaagcacaggccctgggagtcccggggggctccgctgagacgacagaagccgagtggggtcctgcggcctggcccgaggacaaaagggcccgccttagtgttgcagccccttgccaaccgcgccccacacattttgtggccctcatggtgaccgagcctgggctacaagcagaagtgaccaaggcccaggaatacctggtccacgtggccccacactgcgccaacttcctagtgccctctcagaacctacacctgaccctggccctgctgcgactggcaggcgctggggaggaggccgctgccattggagctctgagacgggccctcttggccccggggctaaatgcaccccctcggctgagctttagaaagctggtcctcctgggcccgcatgtgctgtgtgccccaccctctcccacactggaaagcatggcacaagtgctgagccagaggctggaagccgaggggctgagtacactacagtctccagggcagctgcacccccacctcaccgtggccaaggtgccccatggttcccaggtccacctccccaagctggagttcaccctcagccaggaagtggggtgccagcccctgcagacactctggctgtgccgtatagggaggacaggggggcctttccagcccctggctgagatccccctggagtgacacccccagacctctggaggagacaatggatgcaaacagcccacacaggaaagacaaagcaggagcgtgcacgctctctctttctctctttaattttggtttctctcaagcttccaaatggtgctcagtgctccaaggaaaggaaggaaggaaggaaaaggaggggagaggaggggaaggggaggcagaggaggaacatctggaaaaaaagcagcctgacagtccagctgtttgcaaactcatagcacatcctccagttacatggcagaagagggagggagggagggccaaaaagaaaa

SEQ ID NO: 148780 - DNA, 1916 bp, Homo sapiens
  Payload ID: 9423
  Gene Symbol: LENG9
  Gene Name: leukocyte receptor cluster (LRC) member 9
  ENST ID: ENST00000611161
  CDS Start-End: 186-1622
aggctctccaccaaggagggactgggccagagtcctcgcgagggcacgcggcgtggtccccagagctaggccggagcgcgggccgctgacgccactgtcgggtgaggctcggtgcatccaaggggagccgccctccgtgcggggcgacctcgtctgcgcggcgggcgtgccagttccccgcacccatggcagcggccagagagccggagttgccgcaggaagcccccgccacggaacccgcgcccccgccggcctgccgcttcttcctggaaggccgctgccgcttcggcgcccgctgccgccagccccaccctggggcgccggcgccgcctggccgcgaggcgcagccggaggccggggccaagaagccgccgctgcgcacagccgcggacgtcatccagcgcatccgctgggacccgcgcctcgaccccgccgacttctcggtgggctacgtcgaccgctttctgggtgtgcgcgaggagcccttcagcgccttttgctgggaccagccgctggcggcgctcgggccgggcgtgctggcagtgccccagcaccgcgtgcgcttcttccgcttccgtggccgccttgtgtgggaccgcgcctcgcgcaccgacctcgtctttggctctggctcggcggcgggacgcgggcccaccatcctggacgcaccgaacaccgagggcgcccacggggcagagggtgccgagtggacactggcggggacaggtcaggaggcccaggctgcccccaagcgagggagcacaaggccgctctgcacagggcaccaggaaccaggcgtggaggaacccggagagctggaggcggcccaggagagggcgctgggcacagctgctgatttgggaacactggccccaagaggacgcctcgccggagtgactgaggcactgaagccaacagcagccaccaggaccacattgctggggggcaaggaagcacaggccctgggagtcccggggggctccgctgagacgacagaagccgagtggggtcctgcggcctggcccgaggacaaaagggcccgccttagtgttgcagccccttgccaaccgcgccccacacattttgtggccctcatggtgaccgagcctgggctacaagcagaagtgaccaaggcccaggaatacctggtccacgtggccccacactgcgccaacttcctagtgccctctcagaacctacacctgaccctggccctgctgcgactggcaggcgctggggaggaggccgctgccattggagctctgagacgggccctcttggccccggggctaaatgcaccccctcggctgagctttagaaagctggtcctcctgggcccgcatgtgctgtgtgccccaccctctcccacactggaaagcatggcacaagtgctgagccagaggctggaagccgaggggctgagtacactacagtctccagggcagctgcacccccacctcaccgtggccaaggtgccccatggttcccaggtccacctccccaagctggagttcaccctcagccaggaagtggggtgccagcccctgcagacactctggctgtgccgtatagggaggacaggggggcctttccagcccctggctgagatccccctggagtgacacccccagacctctggaggagacaatggatgcaaacagcccacacaggaaagacaaagcaggagcgtgcacgctctctctttctctctttaattttggtttctctcaagcttccaaatggtgctcagtgctccaaggaaaggaaggaaggaaggaaaaggaggggagaggaggggaaggggaggcagaggaggaacatctggaaaaaaagcagcctgacagtccagctgtttgcaaactcatagcacatcctccagttacatggcagaagagggagggagggagggccaaaaa

SEQ ID NO: 148781 - DNA, 1924 bp, Homo sapiens
  Payload ID: 9423
  Gene Symbol: LENG9
  Gene Name: leukocyte receptor cluster (LRC) member 9
  Uniprot ID: Q96B70
  ENST ID: ENST00000614111
  CDS Start-End: 120-1625
aggctctccaccaaggagggactgggccagagtcctcgcgagggcacgcggcgtggtccccagagctaggccggagcgcgggccgctgacgccactgtcgggtgaggctcggtgcatccatggggagccgccctccgtgcggggcgacctcgtctgcgcggcgggcgtgccagttccccgcacccatggcagcggccagagagccggagttgccgcaggaagcccccgccacggaacccgcgcccccgccggcctgccgcttcttcctggaaggccgctgccgcttcggcgcccgctgccgccagccccaccctggggcgccggcgccgcctggccgcgaggcgcagccggaggccggggccaagaagccgccgctgcgcacagccgcggacgtcatccagcgcatccgctgggacccgcgcctcgaccccgccgacttctcggtgggctacgtcgaccgctttctgggtgtgcgcgaggagcccttcagcgccttttgctgggaccagccgctggcggcgctcgggccgggcgtgctggcagtgccccagcaccgcgtgcgcttcttccgcttccatggccgccttgtgtgggaccgcgcctcgcgcaccgacctcgtctttggctctggctcggcggcgggacgcgggcccaccatcctggacgcaccgaacaccgagggcgcccacggggcagagggtgccgagtggacactggcggggacaggtcaggaggcccaggctgcccccaagcgagggagcacaaggccgctctgcacagggcaccaggaaccaggcgtggaggaacccggagagctggaggcggcccaggagagggcgctgggcacagctgctgatttgggaacactggccccaagaggacgcctcgccggagtgactgaggaggcactgaagccaacagcagccaccaggaccacattgctggggggcaaggaagcacaggccctgggagtcccggggggctccgctgagacgacagaagccgagtggggtcctgcggcctggcccgaggacaaaagggcccgccttagtgttgcagccccttgccaaccgcgccccacacattttgtggccctcatggtgaccgagcctgggctacaagcagaagtgaccaaggcccaggaatacctggtccacgtggccccacactgcgccaacttcctagtgccctctcagaacctacacctgaccctggccctgctgcgactggcaggcgctggggaggaggccgctgccattggagctctgagacgggccctcttggccccggggctaaatgcaccccctcggctgagctttagaaagctggtcctcctgggcccgcatgtgctgtgtgccccaccctctcccacactggaaagcatggcacaagtgctgagccagaggctggaagccgaggggctgagtacactacagtctccagggcagctgcacccccacctcaccgtggccaaggtgccccatggttcccaggtccacctccccaagctggagttcaccctcagccaggaagtggggtgccagcccctgcagacactctggctgtgccgtatagggaggacaggggggcctttccagcccctggctgagatccgcctggagtgacacccccagacctctggaggagacaatggatgcaaacagcccacacaggaaagacaaagcaggagcgtgcacgctctctctttctctctttaattttggtttctctcaagcttccaaatggtgctcagtgctccaaggaaaggaaggaaggaaggaaaaggaggggagaggaggggaaggggaggcagaggaggaacatctggaaaaaaagcagcctgacagtccagctgtttgcaaactcatagcacatcctccagttacatggcagaagagggagggagggagggccaaaaagaaaa

SEQ ID NO: 148782 - DNA, 3046 bp, Homo sapiens
  Payload ID: 9424
  Gene Symbol: LTK
  Gene Name: leukocyte receptor tyrosine kinase
  Uniprot ID: P29376
  ENST ID: ENST00000263800
  CDS Start-End: 98-2692
gccagggctgccgtggcaaaatgagctgtcaactttaggttgacaggggtgtggccgcgaccgcaagggcttttgttgccgggtggacccaacagggatgggctgctggggacagctgctggtgtggttcggagccgcgggcgccattctctgctctagcccggggtcccaggagacttttctgcggtcctcgcccctgccgctggcaagtcccagcccccgggacccgaaagtcagcgccccgcctagtatcttggagccagcctccccgctgaattctccgggcaccgaggggtcttggctgttttctacctgcggggccagcggccggcatgggcccacacagacacaatgtgacggggcgtacgcggggaccagcgtggtggtgaccgtgggggccgccgggcagctgagaggcgtgcagctgtggcgcgtgccgggccctggccagtatctgatctcagcctacggagccgcgggcggcaaaggcgccaagaaccacctgtcgcgggcgcatggcgtcttcgtctcagcaatcttctccctcggtctcggggagtcgctgtacatcctggtggggcagcagggagaggacgcctgtcccggaggtagcccggagagccagctcgtctgcctcggggagtctcgagccgttgaagagcacgcggcgatggatgggagcgaaggggtcccggggtcgcggcgctgggcgggaggtggcgggggtggcgggggcgccacctacgttttccgggtgcgcgctggcgagctggaaccgttgctggtggcggccggaggcggcggtcgggcctacctgaggccgcgggaccgaggccggactcaggcctcccccgagaaactggagaaccgctcggaggcgcccgggagcggcgggagaggcggggcggcaggtggtgggggcggctggacgtcgcgggctccctctccgcaggccggccgctcactgcaggagggggcggagggcggccagggctgctccgaggcttgggcgacccttggctgggccgcggccggcggcttcgggggcggcggcggggcctgcactgcgggcggaggcggcggcggctacagggggggcgacgcttcagagactgacaacctctgggctgatggggaagatggagtatccttcatacaccccagcagcgagctcttcctgcagcctctggcagtcaccgagaaccacggagaggtagagatccgaaggcacctcaactgcagtcactgccctttgagagactgccaatggcaggcagagctccagctggctgaatgcctgtgcccagaaggcatggagctagctgtggataacgtcacctgcatggacctgcacaagcccccaggccctctggttctgatggtggctgtggtggcaacctcaacactgagcctccttatggtgtgtggggtcctgattctggtgaagcagaagaagtggcagggcctgcaggagatgaggctgccgagccctgagcttgagctgagcaagcttcgaacctctgccatcaggacagcccccaatccctattattgccaggtggggcttggcccggcccagtcctggcctctgccaccaggtgtcaccgaggtttccccagccaatgttactctgctcagagccctgggccatggtgcctttggggaggtgtatgagggactggtaattggccttcctggggactccagtcccctgcaggtagctatcaagaccctgccagaactctgctcgcctcaggatgagctggatttcctcatggaggccctcatcatcagcaagtttcgccatcagaacattgtgcggtgtgtggggctcagcctcagggccacccctcgcctcattctgctggaactgatgtctggaggggacatgaagagtttcctgaggcacagtcggccacacctgggccagccatcacctctggtcatgcgggacctgctgcaactggcccaggacatagcccagggctgccactacctggaggaaaatcacttcatccacagggatattgccgcccggaactgcctgctgagctgcgctggacccagccgagtggccaagattggggactttgggatggcacgagatatctaccgggccagttattaccgcaggggggaccgggccttgctcccagtcaagtggatgcccccagaggccttcctggagggcatcttcacatccaagacagattcctggtcttttggggtgctgctctgggagatcttctcactgggctacatgccctatcctgggcgcaccaaccaggaggtgctggacttcgtcgttggaggaggccggatggaccctcctaggggctgcccagggcctgtgtaccgcatcatgacccagtgttggcagcacgagcctgagctccgccctagctttgccagcatcttggagcgtctgcagtactgcactcaggacccggatgtgctgaattcactcctgccaatggagctggggcccaccccagaggaggaagggacttctgggctggggaacagatctttggagtgcctaagacccccacagccccaggaactgagtccagagaagttgaaaagctggggaggtagccctcttggcccctggctgtcctctggcctcaagcccctcaaatccaggggcctccaacctcagaacctttggaatcccacttatcgctcctgagccccaaggggccctgagggtaaggactgaggcactgagggtccctccctatactcctcaggctcctgggtggcctgttatgccagcggcctctgttccctgcagtctgtgctgtgtgtctgggcctgtctcggggctggcctggcagcgctgcacttgccatgctggaaaccagcccaggcctcccagggaagggcccagccacttccagcttttgatcttggggccagaggccgccttacacacaccccaggtgtccatggggagcactggattgctctcccattatgagcatccttcatctgggcagaccccccaccctgcagatgcttctaataaaaagctcttctcatc

SEQ ID NO: 148783 - DNA, 2940 bp, Homo sapiens
  Payload ID: 9424
  Gene Symbol: LTK
  Gene Name: leukocyte receptor tyrosine kinase
  Uniprot ID: P29376
  ENST ID: ENST00000355166
  CDS Start-End: 171-2582
aggtgggcgtggccagaccagctttaggtccggggagtgtctcgccagcggcagcacacccctgtaagtggtggccagggctgccgtggcaaaatgagctgtcaactttaggttgacaggggtgtggccgcgaccgcaagggcttttgttgccgggtggacccaacagggatgggctgctggggacagctgctggtgtggttcggagccgcgggcgccattctctgctctagcccggggtcccaggagacttttctgcggtcctcgcccctgccgctggcaagtcccagcccccgggacccgaaagtcagcgccccgcctagtatcttggagccagcctccccgctgaattctccgggcaccgaggggtcttggctgttttctacctgcggggccagcggccggcatgggcccacacagacacaatgtgacggggcgtacgcggggaccagcgtggtggtgaccgtgggggccgccgggcagctgagaggcgtgcagctgtggcgcgtgccgggccctggccagtatctgatctcagcctacggagccgcgggcggcaaaggcgccaagaaccacctgtcgcgggcgcatggcgtcttcgtctcagcaatcttctccctcggtctcggggagtcgctgtacatcctggtggggcagcagggagaggacgcctgtcccggaggtagcccggagagccagctcgtctgcctcggggagtctcgagccgttgaagagcacgcggcgatggatgggagcgaaggggtcccggggtcgcggcgctgggcgggaggtggcgggggtggcgggggcgccacctacgttttccgggtgcgcgctggcgagctggaaccgttgctggtggcggccggaggcggcggtcgggcctacctgaggccgcgggaccgaggccggactcaggcctcccccgagaaactggagaaccgctcggaggcgcccgggagcggcgggagaggcggggcggcagggggcgacgcttcagagactgacaacctctgggctgatggggaagatggagtatccttcatacaccccagcagcgagctcttcctgcagcctctggcagtcaccgagaaccacggagaggtagagatccgaaggcacctcaactgcagtcactgccctttgagagactgccaatggcaggcagagctccagctggctgaatgcctgtgcccagaaggcatggagctagctgtggataacgtcacctgcatggacctgcacaagcccccaggccctctggttctgatggtggctgtggtggcaacctcaacactgagcctccttatggtgtgtggggtcctgattctggtgaagcagaagaagtggcagggcctgcaggagatgaggctgccgagccctgagcttgagctgagcaagcttcgaacctctgccatcaggacagcccccaatccctattattgccaggtggggcttggcccggcccagtcctggcctctgccaccaggtgtcaccgaggtttccccagccaatgttactctgctcagagccctgggccatggtgcctttggggaggtgtatgagggactggtaattggccttcctggggactccagtcccctgcaggtagctatcaagaccctgccagaactctgctcgcctcaggatgagctggatttcctcatggaggccctcatcatcagcaagtttcgccatcagaacattgtgcggtgtgtggggctcagcctcagggccacccctcgcctcattctgctggaactgatgtctggaggggacatgaagagtttcctgaggcacagtcggccacacctgggccagccatcacctctggtcatgcgggacctgctgcaactggcccaggacatagcccagggctgccactacctggaggaaaatcacttcatccacagggatattgccgcccggaactgcctgctgagctgcgctggacccagccgagtggccaagattggggactttgggatggcacgagatatctaccgggccagttattaccgcaggggggaccgggccttgctcccagtcaagtggatgcccccagaggccttcctggagggcatcttcacatccaagacagattcctggtcttttggggtgctgctctgggagatcttctcactgggctacatgccctatcctgggcgcaccaaccaggaggtgctggacttcgtcgttggaggaggccggatggaccctcctaggggctgcccagggcctgtgtaccgcatcatgacccagtgttggcagcacgagcctgagctccgccctagctttgccagcatcttggagcgtctgcagtactgcactcaggacccggatgtgctgaattcactcctgccaatggagctggggcccaccccagaggaggaagggacttctgggctggggaacagatctttggagtgcctaagacccccacagccccaggaactgagtccagagaagttgaaaagctggggaggtagccctcttggcccctggctgtcctctggcctcaagcccctcaaatccaggggcctccaacctcagaacctttggaatcccacttatcgctcctgagccccaaggggccctgagggtaaggactgaggcactgagggtccctccctatactcctcaggctcctgggtggcctgttatgccagcggcctctgttccctgcagtctgtgctgtgtgtctgggcctgtctcggggctggcctggcagcgctgcacttgccatgctggaaaccagcccaggcctcccagggaagggcccagccacttccagcttttgatcttggggccagaggccgccttacacacaccccaggtgtccatggggagcactggattgctctcccattatgagcatccttcatctgggcagaccccccaccctgcagatgcttctaataaaaagctcttctcatcctcc

SEQ ID NO: 148784 - DNA, 2412 bp, Homo sapiens
  Payload ID: 9424
  Gene Symbol: LTK
  Gene Name: leukocyte receptor tyrosine kinase
  Uniprot ID: P29376
  ENST ID: ENST00000453182
  CDS Start-End: 179-2383
ggggtctgaggtgggcgtggccagaccagctttaggtccggggagtgtctcgccagcggcagcacacccctgtaagtggtggccagggctgccgtggcaaaatgagctgtcaactttaggttgacaggggtgtggccgcgaccgcaagggcttttgttgccgggtggacccaacagggatgggctgctggggacagctgctggtgtggttcggagccgcgggcgccattctctgctctagcccggggtcccaggagacttttctgcggtcctcgcccctgccgctggcaagtcccagcccccgggacccgaaagtcagcgccccgcctagtatcttggagccagcctccccgctgaattctccgggcaccgaggggtcttggctgttttctacctgcggggccagcggccggcatgggcccacacagacacaatgtgacggggcgtacgcggggaccagcgtggtggtgaccgtgggggccgccgggcagctgagaggcgtgcagctgtggcgcgtgccgggccctggccagtatctgatctcagcctacggagccgcgggcggcaaaggcgccaagaaccacctgtcgcgggcgcatggcgtcttcgtctcagcaatcttctccctcggtctcggggagtcgctgtacatcctggtggggcagcagggagaggacgcctgtcccggaggtagcccggagagccagctcgtctgcctcggggagtctcgagccgttgaagagcacgcggcgatggatgggagcgaaggggtcccggggtcgcggcgctgggcgggaggtggcgggggtggcgggggcgccacctacgttttccgggtgcgcgctggcgagctggaaccgttgctggtggcggccggaggcggcggtcgggcctacctgaggccgcgggaccgaggccggactcaggcctcccccgagaaactggagaaccgctcggaggcgcccgggagcggcgggagaggcggggcggcagggggcgacgcttcagagactgacaacctctgggctgatggggaagatggagtatccttcatacaccccagcagcgagctcttcctgcagcctctggcagtcaccgagaaccacggagaggtagagatccgaaggcacctcaactgcagtcactgccctttgagagactgccaatggcaggcagagctccagctggctgaatgcctgtgcccagaaggcatggagctagctgtggataacgtcacctgcatggacctgcacaagcccccaggccctctggttctgatggtggctgtggtggcaacctcaacactgagcctccttatggtgtgtggggtcctgattctgggtggggcttggcccggcccagtcctggcctctgccaccaggtgtcaccgaggtttccccagccaatgttactctgctcagaccctgccagaactctgctcgcctcaggatgagctggatttcctcatggaggccctcatcatcagcaagtttcgccatcagaacattgtgcggtgtgtggggctcagcctcagggccacccctcgcctcattctgctggaactgatgtctggaggggacatgaagagtttcctgaggcacagtcggccacacctgggccagccatcacctctggtcatgcgggacctgctgcaactggcccaggacatagcccagggctgccactacctggaggaaaatcacttcatccacagggatattgccgcccggaactgcctgctgagctgcgctggacccagccgagtggccaagattggggactttgggatggcacgagatatctaccgggccagttattaccgcaggggggaccgggccttgctcccagtcaagtggatgcccccagaggccttcctggagggcatcttcacatccaagacagattcctggtcttttggggtgctgctctgggagatcttctcactgggctacatgccctatcctgggcgcaccaaccaggaggtgctggacttcgtcgttggaggaggccggatggaccctcctaggggctgcccagggcctgtgtaccgcatcatgacccagtgttggcagcacgagcctgagctccgccctagctttgccagcatcttggagcgtctgcagtactgcactcaggacccggatgtgctgaattcactcctgccaatggagctggggcccaccccagaggaggaagggacttctgggctggggaacagatctttggagtgcctaagacccccacagccccaggaactgagtccagagaagttgaaaagctggggaggtagccctcttggcccctggctgtcctctggcctcaagcccctcaaatccaggggcctccaacctcagaacctttggaatcccacttatcgctcctgagccccaaggggccctgagggtaaggactg

SEQ ID NO: 148785 - DNA, 1821 bp, Homo sapiens
  Payload ID: 9424
  Gene Symbol: LTK
  Gene Name: leukocyte receptor tyrosine kinase
  ENST ID: ENST00000561619
  CDS Start-End: 88-1776
ccgtggcaaaatgagctgtcaactttaggttgacaggggtgtggccgcgaccgcaagggcttttgttgccgggtggacccaacagggatgggctgctggggacagctgctggtgtggttcggagccgcggggggcgacgcttcagagactgacaacctctgggctgatggggaagatggagtatccttcatacaccccagcagcgagctcttcctgcagcctctggcagtcaccgagaaccacggagaggtagagatccgaaggcacctcaactgcagtcactgccctttgagagactgccaatggcaggcagagctccagctggctgaatgcctgtgcccagaaggcatggagctagctgtggataacgtcacctgcatggacctgcacaagcccccaggccctctggttctgatggtggctgtggtggcaacctcaacactgagcctccttatggtgtgtggggtcctgattctgggtacgaagcgtctagcaggcacagttgattcaaggctgctcctctccatgaagcagaagaagtggcagggcctgcaggagatgaggctgccgagccctgagcttgagctgagcaagcttcgaacctctgccatcaggacagcccccaatccctattattgccaggtggggcttggcccggcccagtcctggcctctgccaccaggtgtcaccgaggtttccccagccaatgttactctgctcagagccctgggccatggtgcctttggggaggtgtatgagggactggtaattggccttcctggggactccagtcccctgcaggtagctatcaagaccctgccagaactctgctcgcctcaggatgagctggatttcctcatggaggccctcatcatcagcaagtttcgccatcagaacattgtgcggtgtgtggggctcagcctcagggccacccctcgcctcattctgctggaactgatgtctggaggggacatgaagagtttcctgaggcacagtcggccacacctgggccagccatcacctctggtcatgcgggacctgctgcaactggcccaggacatagcccagggctgccactacctggaggaaaatcacttcatccacagggatattgccgcccggaactgcctgctgagctgcgctggacccagccgagtggccaagattggggactttgggatggcacgagatatctaccgggccagttattaccgcaggggggaccgggccttgctcccagtcaagtggatgcccccagaggccttcctggagggcatcttcacatccaagacagattcctggtcttttggggtgctgctctgggagatcttctcactgggctacatgccctatcctgggcgcaccaaccaggaggtgctggacttcgtcgttggaggaggccggatggaccctcctaggggctgcccagggcctgtgtaccgcatcatgacccagtgttggcagcacgagcctgagctccgccctagctttgccagcatcttggagcgtctgcagtactgcactcaggacccggatgtgctgaattcactcctgccaatggagctggggcccaccccagaggaggaagggacttctgggctggggaacagatctttggagtgcctaagacccccacagccccaggaactgagtccagagaagttgaaaagctggggaggtagccctcttggcccctggctgtcctctggcctcaagcccctcaaatccaggggcctccaacctcagaacctttggaatcccacttatcgctcctgagccccaaggggccctgagggtaaggactgaggcactgagggtccc

SEQ ID NO: 148786 - DNA, 504 bp, Homo sapiens
  Payload ID: 9425
  Gene Symbol: LST1
  Gene Name: leukocyte specific transcript 1
  ENST ID: ENST00000211921
  CDS Start-End: 193-279
cacccacccaggcccaggctccttcccctccatcatccccttaccagcacctagaaccatccagggctgaaaagtcccctccaaaccacgtgatgaggaacttgaggcaagtcaccagcccctgatcatttcgcctaaaagagcaaggactagagttcctgacctccaggccagtccctgatccctgacctaatgttatcgcggaatgatggcccagggctcctcagagcaggaactccactatgcatctctgcagaggctgccagtgcccagcagtgagggacctgacctcaggggcagagacaagagaggcaccaaggaggatccaagagctgactatgcctgcattgctgagaacaaacccacctgagcaccccagacaccttcctcaacccaggcgggtggacagggtccccctgtggtccagccagtaaaaaccatggtccccccacttctgtgtctcagtcctctcagtccatctcgagcctccgttcaaattgatca

SEQ ID NO: 148787 - DNA, 604 bp, Homo sapiens
  Payload ID: 9425
  Gene Symbol: LST1
  Gene Name: leukocyte specific transcript 1
  Uniprot ID: O00453
  ENST ID: ENST00000303757
  CDS Start-End: 101-280
atgaggaacttgaggcaagtcaccagcccctgatcatttcgcctaaaagagcaaggactagagttcctgacctccaggccagtccctgatccctgacctaatgttatcgcggaatgatgatatatgtatctacgggggcctggggctgggcgggctcctgcttctggcagtggtccttctgtccgcctgcctgtgttggctgcatcgaagaggcccagggctcctcagagcaggaactccactatgcatctctgcagaggctgccagtgcccagcagtgagggacctgacctcaggggcagagacaagagaggcaccaaggaggatccaagagctgactatgcctgcattgctgagaacaaacccacctgagcaccccagacaccttcctcaacccaggcgggtggacagggtccccctgtggtccagccagtaaaaaccatggtccccccacttctgtgtctcagtcctctcagtccatctcgagcctccgttcaaattgatcatcatcaaaacttatgtggctttttgacctttgaatagggaattttttaaattttttaaaaattaaaataaaaaaaacacatggctcacccttccaccca

SEQ ID NO: 148788 - DNA, 635 bp, Homo sapiens
  Payload ID: 9425
  Gene Symbol: LST1
  Gene Name: leukocyte specific transcript 1
  Uniprot ID: O00453
  ENST ID: ENST00000339530
  CDS Start-End: 210-410
acttcagccctagcagcatctgcctgtgggaagcagctctccacaccagccaagggggcccccacactcccgcgctgctctgcggctcagggagcagcccacctgctggatgaggaacttgaggcaagtcaccagcccctgatcatttcgcctaaaagagcaaggactagagttcctgacctccaggccagtccctgatccctgacctaatgttatcgcggaatgatgatatatgtatctacgggggcctggggctgggcgggctcctgcttctggcagtggtccttctgtccgcctgcctgtgttggctgcatcgaagagcaccttctgtcctggtcccaggcccagggctcctcagagcaggaactccactatgcatctctgcagaggctgccagtgcccagcagtgagggacctgacctcaggggcagagacaagagaggcaccaaggaggatccaagagctgactatgcctgcattgctgagaacaaacccacctgagcaccccagacaccttcctcaacccaggcgggtggacagggtccccctgtggtccagccagtaaaaaccatggtccccccacttctgtgtctcagtcctctcagtccatctcgagcctccgttcaaattgatca

SEQ ID NO: 148789 - DNA, 554 bp, Homo sapiens
  Payload ID: 9425
  Gene Symbol: LST1
  Gene Name: leukocyte specific transcript 1
  Uniprot ID: O00453
  ENST ID: ENST00000376086
  CDS Start-End: 101-322
atgaggaacttgaggcaagtcaccagcccctgatcatttcgcctaaaagagcaaggactagagttcctgacctccaggccagtccctgatccctgacctaatgttatcgcggaatgatgtaaagaggctggagaggagctggcaccttctgtcctggtcccaggcccagggctcctcagagcaggaactccactatgcatctctgcagaggctgccagtgcccagcagtgagggacctgacctcaggggcagagacaagagaggcaccaaggaggatccaagagctgactatgcctgcattgctgagaacaaacccacctgagcaccccagacaccttcctcaacccaggcgggtggacagggtccccctgtggtccagccagtaaaaaccatggtccccccacttctgtgtctcagtcctctcagtccatctcgagcctccgttcaaattgatcatcatcaaaacttatgtggctttttgacctttgaatagggaattttttaaattttttaaaaattaaaataaaaaaaacacatggctcacccttccaccc

SEQ ID NO: 148790 - DNA, 680 bp, Homo sapiens
  Payload ID: 9425
  Gene Symbol: LST1
  Gene Name: leukocyte specific transcript 1
  Uniprot ID: O00453
  ENST ID: ENST00000376089
  CDS Start-End: 247-447
ggtctttacttgggcaacgggcaccatgataccctatgttctggggattagcagtgaggaatggaaagtgcccagctcagggttggcacataagggaggctccccagcctgggaacgattataacagagggcccctcacttcacagatgaggaacttgaggcaagtcaccagcccctgatcatttcgcctaaaagagcaaggactagagttcctgacctccaggccagtccctgatccctgacctaatgttatcgcggaatgatgtaaagaggctggagaggagctgggcccagggctcctcagagcaggaactccactatgcatctctgcagaggctgccagtgcccagcagtgagggacctgacctcaggggcagagacaagagaggcaccaaggaggatccaagagctgactatgcctgcattgctgagaacaaacccacctgagcaccccagacaccttcctcaacccaggcgggtggacagggtccccctgtggtccagccagtaaaaaccatggtccccccacttctgtgtctcagtcctctcagtccatctcgagcctccgttcaaattgatcatcatcaaaacttatgtggctttttgacctttgaatagggaattttttaaattttttaaaaattaaaataaaaaaaacacatggctcacccttccaccca

SEQ ID NO: 148791 - DNA, 689 bp, Homo sapiens
  Payload ID: 9425
  Gene Symbol: LST1
  Gene Name: leukocyte specific transcript 1
  ENST ID: ENST00000376090
  CDS Start-End: 279-365
ggtgacctagtaaagtccaggcttgaatctcgggtctttacttgggcaacgggcaccatgataccctatgttctggggattagcagtgaggaatggaaagtgcccagctcagggttggcacataagggaggctccccagcctgggaacgattataacagagggcccctcacttcacagatgaggaacttgaggcaagtcaccagcccctgatcatttcgcctaaaagagcaaggactagagttcctgacctccaggccagtccctgatccctgacctaatgttatcgcggaatgatggcccagggctcctcagagcaggaactccactatgcatctctgcagaggctgccagtgcccagcagtgagggacctgacctcaggggcagagacaagagaggcaccaaggaggatccaagagctgactatgcctgcattgctgagaacaaacccacctgagcaccccagacaccttcctcaacccaggcgggtggacagggtccccctgtggtccagccagtaaaaaccatggtccccccacttctgtgtctcagtcctctcagtccatctcgagcctccgttcaaattgatcatcatcaaaacttatgtggctttttgacctttgaatagggaattttttaaattttttaaaaattaaaataaaaaaaacacatggctcacccttccaccca

SEQ ID NO: 148792 - DNA, 285 bp, Homo sapiens
  Payload ID: 9425
  Gene Symbol: LST1
  Gene Name: leukocyte specific transcript 1
  Uniprot ID: O00453
  ENST ID: ENST00000376092
  CDS Start-End: 101-208
atgaggaacttgaggcaagtcaccagcccctgatcatttcgcctaaaagagcaaggactagagttcctgacctccaggccagtccctgatccctgacctaatgttatcgcggaatgatgcaccttctgtcctggtcccaggcccagggctcctcagagcaggaactccactatgcatctctgcagaggctgccagtgcccagcagtgagggacctgacctcaggggcagagacaagagaggcaccaaggaggatccaagagctgactatgcctgcattgctgaga

SEQ ID NO: 148793 - DNA, 648 bp, Homo sapiens
  Payload ID: 9425
  Gene Symbol: LST1
  Gene Name: leukocyte specific transcript 1
  Uniprot ID: O00453
  ENST ID: ENST00000376093
  CDS Start-End: 101-415
atgaggaacttgaggcaagtcaccagcccctgatcatttcgcctaaaagagcaaggactagagttcctgacctccaggccagtccctgatccctgacctaatgttatcgcggaatgatgatatatgtatctacgggggcctggggctgggcgggctcctgcttctggcagtggtccttctgtccgcctgcctgtgttggctgcatcgaagagtaaagaggctggagaggagctggcaccttctgtcctggtcccaggcccagggctcctcagagcaggaactccactatgcatctctgcagaggctgccagtgcccagcagtgagggacctgacctcaggggcagagacaagagaggcaccaaggaggatccaagagctgactatgcctgcattgctgagaacaaacccacctgagcaccccagacaccttcctcaacccaggcgggtggacagggtccccctgtggtccagccagtaaaaaccatggtccccccacttctgtgtctcagtcctctcagtccatctcgagcctccgttcaaattgatcatcatcaaaacttatgtggctttttgacctttgaatagggaattttttaaattttttaaaaattaaaataaaaaaaacacatggctcacccttccaccca

SEQ ID NO: 148794 - DNA, 565 bp, Homo sapiens
  Payload ID: 9425
  Gene Symbol: LST1
  Gene Name: leukocyte specific transcript 1
  Uniprot ID: O00453
  ENST ID: ENST00000376096
  CDS Start-End: 200-241
agaggaggggcaggaatgtctgaggtggcaacacttctcttcagccagacagcactggccagtttggagtctgtccatcctgcaggccacaagctctggatgaggaacttgaggcaagtcaccagcccctgatcatttcgcctaaaagagcaaggactagagttcctgacctccaggccagtccctgatccctgacctaatgttatcgcggaatgatgaggctgccagtgcccagcagtgagggacctgacctcaggggcagagacaagagaggcaccaaggaggatccaagagctgactatgcctgcattgctgagaacaaacccacctgagcaccccagacaccttcctcaacccaggcgggtggacagggtccccctgtggtccagccagtaaaaaccatggtccccccacttctgtgtctcagtcctctcagtccatctcgagcctccgttcaaattgatcatcatcaaaacttatgtggctttttgacctttgaatagggaattttttaaattttttaaaaattaaaataaaaaaaacacatggctcacccttccaccca

SEQ ID NO: 148795 - DNA, 610 bp, Homo sapiens
  Payload ID: 9425
  Gene Symbol: LST1
  Gene Name: leukocyte specific transcript 1
  ENST ID: ENST00000376099
  CDS Start-End: 200-286
agaggaggggcaggaatgtctgaggtggcaacacttctcttcagccagacagcactggccagtttggagtctgtccatcctgcaggccacaagctctggatgaggaacttgaggcaagtcaccagcccctgatcatttcgcctaaaagagcaaggactagagttcctgacctccaggccagtccctgatccctgacctaatgttatcgcggaatgatggcccagggctcctcagagcaggaactccactatgcatctctgcagaggctgccagtgcccagcagtgagggacctgacctcaggggcagagacaagagaggcaccaaggaggatccaagagctgactatgcctgcattgctgagaacaaacccacctgagcaccccagacaccttcctcaacccaggcgggtggacagggtccccctgtggtccagccagtaaaaaccatggtccccccacttctgtgtctcagtcctctcagtccatctcgagcctccgttcaaattgatcatcatcaaaacttatgtggctttttgacctttgaatagggaattttttaaattttttaaaaattaaaataaaaaaaacacatggctcacccttccaccca

SEQ ID NO: 148796 - DNA, 433 bp, Homo sapiens
  Payload ID: 9425
  Gene Symbol: LST1
  Gene Name: leukocyte specific transcript 1
  Uniprot ID: O00453
  ENST ID: ENST00000376110
  CDS Start-End: 197-352
ggaggggcaggaatgtctgaggtggcaacacttctcttcagccagacagcactggccagtttggagtctgtccatcctgcaggccacaagctctggatgaggaacttgaggcaagtcaccagcccctgatcatttcgcctaaaagagcaaggactagagttcctgacctccaggccagtccctgatccctgacctaatgttatcgcggaatgatgtaaagaggctggagaggagctggaggctgccagtgcccagcagtgagggacctgacctcaggggcagagacaagagaggcaccaaggaggatccaagagctgactatgcctgcattgctgagaacaaacccacctgagcaccccagacaccttcctcaacccaggcgggtggacagggtccccctgtggtccagccagtaaaaaccatggtcccccca

SEQ ID NO: 148797 - DNA, 555 bp, Homo sapiens
  Payload ID: 9425
  Gene Symbol: LST1
  Gene Name: leukocyte specific transcript 1
  Uniprot ID: O00453
  ENST ID: ENST00000383480
  CDS Start-End: 101-322
atgaggaacttgaggcaagtcaccagcccctgatcatttcgcctaaaagagcaaggactagagttcctgacctccaggccagtccctgatccctgacctaatgttatcgcggaatgatgtaaagaggctggagaggagctggcaccttctgtcctggtcccaggcccagggctcctcagagcaggaactccactatgcatctctgcagaggctgccagtgcccagcagtgagggacctgacctcaggggcagagacaagagaggcaccaaggaggatccaagagctgactatgcctgcattgctgagaacaaacccacctgagcaccccagacaccttcctcaacccaggcgggtggacagggtccccctgtggtccagccagtaaaaaccatggtccccccacttctgtgtctcagtcctctcagtccatctcgagcctccgttcaaattgatcatcatcaaaacttatgtggctttttgacctttgaatagggaattttttaaattttttaaaaattaaaataaaaaaaacacatggctcacccttccaccca

SEQ ID NO: 148798 - DNA, 532 bp, Homo sapiens
  Payload ID: 9425
  Gene Symbol: LST1
  Gene Name: leukocyte specific transcript 1
  Uniprot ID: O00453
  ENST ID: ENST00000383482
  CDS Start-End: 101-208
atgaggaacttgaggcaagtcaccagcccctgatcatttcgcctaaaagagcaaggactagagttcctgacctccaggccagtccctgatccctgacctaatgttatcgcggaatgatgcaccttctgtcctggtcccaggcccagggctcctcagagcaggaactccactatgcatctctgcagaggctgccagtgcccagcagtgagggacctgacctcaggggcagagacaagagaggcaccaaggaggatccaagagctgactatgcctgcattgctgagaacaaacccacctgagcaccccagacaccttcctcaacccaggcgggtggacagggtccccctgtggtccagccagtaaaaaccatggtccccccacttctgtgtctcagtcctctcagtccatctcgagcctccgttcaaattgatcatcatcaaaacttatgtggctttttgacctttgaatagggaattttttaaattttttaaaaattaaaataaaaaaaacacatggctcacccttccaccca

SEQ ID NO: 148799 - DNA, 734 bp, Homo sapiens
  Payload ID: 9425
  Gene Symbol: LST1
  Gene Name: leukocyte specific transcript 1
  Uniprot ID: O00453
  ENST ID: ENST00000383484
  CDS Start-End: 210-410
acttcagccctagcagcatctgcctgtgggaagcagctctccacaccagccaagggggcccccacactcccgcgctgctctgcggctcagggagcagcccacctgctggatgaggaacttgaggcaagtcaccagcccctgatcatttcgcctaaaagagcaaggactagagttcctgacctccaggccagtccctgatccctgacctaatgttatcgcggaatgatgatatatgtatctacgggggcctggggctgggcgggctcctgcttctggcagtggtccttctgtccgcctgcctgtgttggctgcatcgaagagcaccttctgtcctggtcccaggcccagggctcctcagagcaggaactccactatgcatctctgcagaggctgccagtgcccagcagtgagggacctgacctcaggggcagagacaagagaggcaccaaggaggatccaagagctgactatgcctgcattgctgagaacaaacccacctgagcaccccagacaccttcctcaacccaggcgggtggacagggtccccctgtggtccagccagtaaaaaccatggtccccccacttctgtgtctcagtcctctcagtccatctcgagcctccgttcaaattgatcatcatcaaaacttatgtggctttttgacctttgaatagggaattttttaaattttttaaaaattaaaataaaaaaaacacatggctcacccttccaccca

SEQ ID NO: 148800 - DNA, 648 bp, Homo sapiens; identical to SEQ ID NO: 148793
  Payload ID: 9425
  Gene Symbol: LST1
  Gene Name: leukocyte specific transcript 1
  Uniprot ID: O00453
  ENST ID: ENST00000383486
  CDS Start-End: 101-415

SEQ ID NO: 148801 - DNA, 459 bp, Homo sapiens
  Payload ID: 9425
  Gene Symbol: LST1
  Gene Name: leukocyte specific transcript 1
  ENST ID: ENST00000396101
  CDS Start-End: 1-135
atgttatcgcggaatgatgatatatgtatctacgggggcctggggctgggcgggctcctgcttctggcagtggtccttctgtccgcctgcctgtgttggctgcatcgaagagaggctgccagtgcccagcagtgagggacctgacctcaggggcagagacaagagaggcaccaaggaggatccaagagctgactatgcctgcattgctgagaacaaacccacctgagcaccccagacaccttcctcaacccaggcgggtggacagggtccccctgtggtccagccagtaaaaaccatggtccccccacttctgtgtctcagtcctctcagtccatctcgagcctccgttcaaattgatcatcatcaaaacttatgtggctttttgacctttgaatagggaattttttaaattttttaaaaattaaaataaaaaaaacacatggctcacccttccaccca

SEQ ID NO: 148802 - DNA, 382 bp, Homo sapiens
  Payload ID: 9425
  Gene Symbol: LST1
  Gene Name: leukocyte specific transcript 1
  ENST ID: ENST00000396112
  CDS Start-End: 184-382
gaaagtgcccagctcagggttggcacataagggaggctccccagcctgggaacgattataacagagggcccctcacttcacagatgaggaacttgaggcaagtcaccagcccctgatcatttcgcctaaaagagcaaggactagagttcctgacctccaggccagtccctgatccctgacctaatgttatcgcggaatgatgatatatgtatctacgggggcctggggctgggcgggctcctgcttctggcagtggtccttctgtccgcctgcctgtgttggctgcatcgaagagtaaagaggctggagaggagctggaggctgccagtgcccagcagtgagggacctgacctcaggggcagagacaagagaggcaccaagg

SEQ ID NO: 148803 - DNA, 624 bp, Homo sapiens
  Payload ID: 9425
  Gene Symbol: LST1
  Gene Name: leukocyte specific transcript 1
  Uniprot ID: O00453
  ENST ID: ENST00000400250
  CDS Start-End: 121-300
gggattagcagtgaggaatgatgaggaacttgaggcaagtcaccagcccctgatcatttcgcctaaaagagcaaggactagagttcctgacctccaggccagtccctgatccctgacctaatgttatcgcggaatgatgatatatgtatctacgggggcctggggctgggcgggctcctgcttctggcagtggtccttctgtccgcctgcctgtgttggctgcatcgaagaggcccagggctcctcagagcaggaactccactatgcatctctgcagaggctgccagtgcccagcagtgagggacctgacctcaggggcagagacaagagaggcaccaaggaggatccaagagctgactatgcctgcattgctgagaacaaacccacctgagcaccccagacaccttcctcaacccaggcgggtggacagggtccccctgtggtccagccagtaaaaaccatggtccccccacttctgtgtctcagtcctctcagtccatctcgagcctccgttcaaattgatcatcatcaaaacttatgtggctttttgacctttgaatagggaattttttaaattttttaaaaattaaaataaaaaaaacacatggctcacccttccaccca

SEQ ID NO: 148804 - DNA, 689 bp, Homo sapiens; identical to SEQ ID NO: 148791
  Payload ID: 9425
  Gene Symbol: LST1
  Gene Name: leukocyte specific transcript 1
  ENST ID: ENST00000400251
  CDS Start-End: 279-365

SEQ ID NO: 148805 - DNA, 619 bp, Homo sapiens
  Payload ID: 9425
  Gene Symbol: LST1
  Gene Name: leukocyte specific transcript 1
  ENST ID: ENST00000400252
  CDS Start-End: 209-295
cctttctgggatgggtgacctagtaaagtccaggcttgaatctcgggtctttacttgggcaacgggcaccatgataccctatgttctggggattagcagtgaggaatgatgaggaacttgaggcaagtcaccagcccctgatcatttcgcctaaaagagcaaggactagagttcctgacctccaggccagtccctgatccctgacctaatgttatcgcggaatgatggcccagggctcctcagagcaggaactccactatgcatctctgcagaggctgccagtgcccagcagtgagggacctgacctcaggggcagagacaagagaggcaccaaggaggatccaagagctgactatgcctgcattgctgagaacaaacccacctgagcaccccagacaccttcctcaacccaggcgggtggacagggtccccctgtggtccagccagtaaaaaccatggtccccccacttctgtgtctcagtcctctcagtccatctcgagcctccgttcaaattgatcatcatcaaaacttatgtggctttttgacctttgaatagggaattttttaaattttttaaaaattaaaataaaaaaaacacatggctcacccttccaccca

SEQ ID NO: 148806 - DNA, 603 bp, Homo sapiens
  Payload ID: 9425
  Gene Symbol: LST1
  Gene Name: leukocyte specific transcript 1
  ENST ID: ENST00000400253
  CDS Start-End: 193-279
cacccacccaggcccaggctccttcccctccatcatccccttaccagcacctagaaccatccagggctgaaaagtcccctccaaaccacgtgatgaggaacttgaggcaagtcaccagcccctgatcatttcgcctaaaagagcaaggactagagttcctgacctccaggccagtccctgatccctgacctaatgttatcgcggaatgatggcccagggctcctcagagcaggaactccactatgcatctctgcagaggctgccagtgcccagcagtgagggacctgacctcaggggcagagacaagagaggcaccaaggaggatccaagagctgactatgcctgcattgctgagaacaaacccacctgagcaccccagacaccttcctcaacccaggcgggtggacagggtccccctgtggtccagccagtaaaaaccatggtccccccacttctgtgtctcagtcctctcagtccatctcgagcctccgttcaaattgatcatcatcaaaacttatgtggctttttgacctttgaatagggaattttttaaattttttaaaaattaaaataaaaaaaacacatggctcacccttccaccca

SEQ ID NO: 148807 - DNA, 610 bp, Homo sapiens; identical to SEQ ID NO: 148795
  Payload ID: 9425
  Gene Symbol: LST1
  Gene Name: leukocyte specific transcript 1
  ENST ID: ENST00000400255
  CDS Start-End: 200-286

SEQ ID NO: 148808 - DNA, 565 bp, Homo sapiens; identical to SEQ ID NO: 148794
  Payload ID: 9425
  Gene Symbol: LST1
  Gene Name: leukocyte specific transcript 1
  Uniprot ID: O00453
  ENST ID: ENST00000400257
  CDS Start-End: 200-241

SEQ ID NO: 148809 - DNA, 665 bp, Homo sapiens
  Payload ID: 9425
  Gene Symbol: LST1
  Gene Name: leukocyte specific transcript 1
  ENST ID: ENST00000400261
  CDS Start-End: 184-432
gaaagtgcccagctcagggttggcacataagggaggctccccagcctgggaacgattataacagagggcccctcacttcacagatgaggaacttgaggcaagtcaccagcccctgatcatttcgcctaaaagagcaaggactagagttcctgacctccaggccagtccctgatccctgacctaatgttatcgcggaatgatgatatatgtatctacgggggcctggggctgggcgggctcctgcttctggcagtggtccttctgtccgcctgcctgtgttggctgcatcgaagagtaaagaggctggagaggagctggaggctgccagtgcccagcagtgagggacctgacctcaggggcagagacaagagaggcaccaaggaggatccaagagctgactatgcctgcattgctgagaacaaacccacctgagcaccccagacaccttcctcaacccaggcgggtggacagggtccccctgtggtccagccagtaaaaaccatggtccccccacttctgtgtctcagtcctctcagtccatctcgagcctccgttcaaattgatcatcatcaaaacttatgtggctttttgacctttgaatagggaattttttaaattttttaaaaattaaaataaaaaaaacacatggctcacccttccaccca

SEQ ID NO: 148810 - DNA, 571 bp, Homo sapiens
  Payload ID: 9425
  Gene Symbol: LST1
  Gene Name: leukocyte specific transcript 1
  Uniprot ID: O00453
  ENST ID: ENST00000400262
  CDS Start-End: 138-338
tgataccctatgttctggggattagcagtgaggaatgatgaggaacttgaggcaagtcaccagcccctgatcatttcgcctaaaagagcaaggactagagttcctgacctccaggccagtccctgatccctgacctaatgttatcgcggaatgatgtaaagaggctggagaggagctgggcccagggctcctcagagcaggaactccactatgcatctctgcagaggctgccagtgcccagcagtgagggacctgacctcaggggcagagacaagagaggcaccaaggaggatccaagagctgactatgcctgcattgctgagaacaaacccacctgagcaccccagacaccttcctcaacccaggcgggtggacagggtccccctgtggtccagccagtaaaaaccatggtccccccacttctgtgtctcagtcctctcagtccatctcgagcctccgttcaaattgatcatcatcaaaacttatgtggctttttgacctttgaatagggaattttttaaattttttaaaaattaaaataaaaaaaacacatggctcacccttccaccca

SEQ ID NO: 148811 - DNA, 668 bp, Homo sapiens
  Payload ID: 9425
  Gene Symbol: LST1
  Gene Name: leukocyte specific transcript 1
  Uniprot ID: O00453
  ENST ID: ENST00000400263
  CDS Start-End: 235-435
ggcaacgggcaccatgataccctatgttctggggattagcagtgaggaatggaaagtgcccagctcagggttggcacataagggaggctccccagcctgggaacgattataacagagggcccctcacttcacagatgaggaacttgaggcaagtcaccagcccctgatcatttcgcctaaaagagcaaggactagagttcctgacctccaggccagtccctgatccctgacctaatgttatcgcggaatgatgtaaagaggctggagaggagctgggcccagggctcctcagagcaggaactccactatgcatctctgcagaggctgccagtgcccagcagtgagggacctgacctcaggggcagagacaagagaggcaccaaggaggatccaagagctgactatgcctgcattgctgagaacaaacccacctgagcaccccagacaccttcctcaacccaggcgggtggacagggtccccctgtggtccagccagtaaaaaccatggtccccccacttctgtgtctcagtcctctcagtccatctcgagcctccgttcaaattgatcatcatcaaaacttatgtggctttttgacctttgaatagggaattttttaaattttttaaaaattaaaataaaaaaaacacatggctcacccttccaccca

SEQ ID NO: 148812 - DNA, 712 bp, Homo sapiens
  Payload ID: 9425
  Gene Symbol: LST1
  Gene Name: leukocyte specific transcript 1
  Uniprot ID: O00453
  ENST ID: ENST00000400264
  CDS Start-End: 186-479
taaagtccaggcttgaatctcgggtctttacttgggcaacgggcaccatgataccctatgttctggggattagcagtgaggaatgatgaggaacttgaggcaagtcaccagcccctgatcatttcgcctaaaagagcaaggactagagttcctgacctccaggccagtccctgatccctgacctaatgttatcgcggaatgatgatatatgtatctacgggggcctggggctgggcgggctcctgcttctggcagtggtccttctgtccgcctgcctgtgttggctgcatcgaagagtaaagaggctggagaggagctgggcccagggctcctcagagcaggaactccactatgcatctctgcagaggctgccagtgcccagcagtgagggacctgacctcaggggcagagacaagagaggcaccaaggaggatccaagagctgactatgcctgcattgctgagaacaaacccacctgagcaccccagacaccttcctcaacccaggcgggtggacagggtccccctgtggtccagccagtaaaaaccatggtccccccacttctgtgtctcagtcctctcagtccatctcgagcctccgttcaaattgatcatcatcaaaacttatgtggctttttgacctttgaatagggaattttttaaattttttaaaaattaaaataaaaaaaacacatggctcacccttccaccca

SEQ ID NO: 148813 - DNA, 585 bp, Homo sapiens
  Payload ID: 9425
  Gene Symbol: LST1
  Gene Name: leukocyte specific transcript 1
  Uniprot ID: O00453
  ENST ID: ENST00000400265
  CDS Start-End: 197-352
ggaggggcaggaatgtctgaggtggcaacacttctcttcagccagacagcactggccagtttggagtctgtccatcctgcaggccacaagctctggatgaggaacttgaggcaagtcaccagcccctgatcatttcgcctaaaagagcaaggactagagttcctgacctccaggccagtccctgatccctgacctaatgttatcgcggaatgatgtaaagaggctggagaggagctggaggctgccagtgcccagcagtgagggacctgacctcaggggcagagacaagagaggcaccaaggaggatccaagagctgactatgcctgcattgctgagaacaaacccacctgagcaccccagacaccttcctcaacccaggcgggtggacagggtccccctgtggtccagccagtaaaaaccatggtccccccacttctgtgtctcagtcctctcagtccatctcgagcctccgttcaaattgatcatcatcaaaacttatgtggctttttgacctttgaatagggaattttttaaattttttaaaaattaaaataaaaaaaacacatggctcacccttccaccca

SEQ ID NO: 148814 - DNA, 712 bp, Homo sapiens; identical to SEQ ID NO: 148812
  Payload ID: 9425
  Gene Symbol: LST1
  Gene Name: leukocyte specific transcript 1
  Uniprot ID: O00453
  ENST ID: ENST00000429874
  CDS Start-End: 186-479

SEQ ID NO: 148815 - DNA, 603 bp, Homo sapiens; identical to SEQ ID NO: 148806
  Payload ID: 9425
  Gene Symbol: LST1
  Gene Name: leukocyte specific transcript 1
  ENST ID: ENST00000453818
  CDS Start-End: 193-279

SEQ ID NO: 148816 - DNA, 455 bp, Homo sapiens
  Payload ID: 9425
  Gene Symbol: LST1
  Gene Name: leukocyte specific transcript 1
  ENST ID: ENST00000433420
  CDS Start-End: 1-131
tatcgcggaatgatgatatatgtatctacgggggcctggggctgggcgggctcctgcttctggcagtggtccttctgtccgcctgcctgtgttggctgcatcgaagagaggctgccagtgcccagcagtgagggacctgacctcaggggcagagacaagagaggcaccaaggaggatccaagagctgactatgcctgcattgctgagaacaaacccacctgagcaccccagacaccttcctcaacccaggcgggtggacagggtccccctgtggtccagccagtaaaaaccatggtccccccacttctgtgtctcagtcctctcagtccatctcgagcctccgttcaaaatgatcatcatcaaaacttatgtggctttttgacctttgaatagggaattttttaaattttttaaaaattaaaattaaaaaaacacatggctcacccttccaccca

SEQ ID NO: 148817 - DNA, 619 bp, Homo sapiens; identical to SEQ ID NO: 148805
  Payload ID: 9425
  Gene Symbol: LST1
  Gene Name: leukocyte specific transcript 1
  ENST ID: ENST00000448618
  CDS Start-End: 209-295

SEQ ID NO: 148818 - DNA, 610 bp, Homo sapiens; identical to SEQ ID NO: 148795
  Payload ID: 9425
  Gene Symbol: LST1
  Gene Name: leukocyte specific transcript 1
  ENST ID: ENST00000447512
  CDS Start-End: 200-286

SEQ ID NO: 148819 - DNA, 764 bp, Homo sapiens
  Payload ID: 9425
  Gene Symbol: LST1
  Gene Name: leukocyte specific transcript 1
  Uniprot ID: O00453
  ENST ID: ENST00000443741
  CDS Start-End: 238-531
gctggggaggaacccaggctgggggagaagttaaagccagaggaggggcaggaatgtctgaggtggcaacacttctcttcagccagacagcactggccagtttggagtctgtccatcctgcaggccacaagctctggatgaggaacttgaggcaagtcaccagcccctgatcatttcgcctaaaagagcaaggactagagttcctgacctccaggccagtccctgatccctgacctaatgttatcgcggaatgatgatatatgtatctacgggggcctggggctgggcgggctcctgcttctggcagtggtccttctgtccgcctgcctgtgttggctgcatcgaagagtaaagaggctggagaggagctgggcccagggctcctcagagcaggaactccactatgcatctctgcagaggctgccagtgcccagcagtgagggacctgacctcaggggcagagacaagagaggcaccaaggaggatccaagagctgactatgcctgcattgctgagaacaaacccacctgagcaccccagacaccttcctcaacccaggcgggtggacagggtccccctgtggtccagccagtaaaaaccatggtccccccacttctgtgtctcagtcctctcagtccatctcgagcctccgttcaaattgatcatcatcaaaacttatgtggctttttgacctttgaatagggaattttttaaattttttaaaaattaaaataaaaaaaacacatggctcacccttccaccca

SEQ ID NO: 148820 - DNA, 259 bp, Homo sapiens
  Payload ID: 9425
  Gene Symbol: LST1
  Gene Name: leukocyte specific transcript 1
  ENST ID: ENST00000418551
  CDS Start-End: 122-259
cctatgttctggggattagcaatgaggaacttgaggcaagtcaccagcccctgatcatttcgcctaaaagagcaaggactagagttcctgacctccaggccagtccctgatccctgacctaatgttatcgcggaatgatgatatatgtatctacgggggcctggggctgggcgggctcctgcttctggcagtggtccttctgtccgcctgcctgtgttggctgcatcgaagagaacactgcctggccctggagccactg

SEQ ID NO: 148821 - DNA, 565 bp, Homo sapiens; identical to SEQ ID NO: 148794
  Payload ID: 9425
  Gene Symbol: LST1
  Gene Name: leukocyte specific transcript 1
  Uniprot ID: O00453
  ENST ID: ENST00000428898
  CDS Start-End: 200-241

SEQ ID NO: 148822 - DNA, 624 bp, Homo sapiens; identical to SEQ ID NO: 148803
  Payload ID: 9425
  Gene Symbol: LST1
  Gene Name: leukocyte specific transcript 1
  Uniprot ID: O00453
  ENST ID: ENST00000430997
  CDS Start-End: 121-300

SEQ ID NO: 148823 - DNA, 571 bp, Homo sapiens; identical to SEQ ID NO: 148810
  Payload ID: 9425
  Gene Symbol: LST1
  Gene Name: leukocyte specific transcript 1
  Uniprot ID: O00453
  ENST ID: ENST00000433004
  CDS Start-End: 138-338

SEQ ID NO: 148824 - DNA, 571 bp, Homo sapiens; identical to SEQ ID NO: 148810
  Payload ID: 9425
  Gene Symbol: LST1
  Gene Name: leukocyte specific transcript 1
  Uniprot ID: O00453
  ENST ID: ENST00000420797
  CDS Start-End: 138-338

SEQ ID NO: 148825 - DNA, 532 bp, Homo sapiens
  Payload ID: 9425
  Gene Symbol: LST1
  Gene Name: leukocyte specific transcript 1
  Uniprot ID: O00453
  ENST ID: ENST00000415490
  CDS Start-End: 101-208
atgaggaacttgaggcaagtcaccagcccctgatcatttcgcctaaaagagcaaggactagagttcctgacctccaggccagtccctgatccctgacctaatgttatcgcggaatgatgcaccttctgtcctggtcccaggcccagggctcctcagagcaggaactccactatgcatctctgcagaggctgccagtgcccagcagtgagggacctgacctcaggggcagagacaagagaggcaccaaggaggatccaagagctgactatgcctgcattgctgagaacaaacccacctgagcaccccagacaccttcctcaacccaggcgggtggacagggtccccctgtggtccagccagtaaaaaccatggtccccccacttctgtgtctcagtcctctcagtccatctcgagcctccgttcaaaatgatcatcatcaaaacttatgtggctttttgacctttgaatagggaattttttaaattttttaaaaattaaaataaaaaaaacacatggctcacccttccaccca

SEQ ID NO: 148826 - DNA, 555 bp, Homo sapiens; identical to SEQ ID NO: 148797
  Payload ID: 9425
  Gene Symbol: LST1
  Gene Name: leukocyte specific transcript 1
  Uniprot ID: O00453
  ENST ID: ENST00000457549
  CDS Start-End: 101-322

SEQ ID NO: 148827 - DNA, 585 bp, Homo sapiens
  Payload ID: 9425
  Gene Symbol: LST1
  Gene Name: leukocyte specific transcript 1
  Uniprot ID: O00453
  ENST ID: ENST00000438349
  CDS Start-End: 197-352
ggaggggcaggaatgtctgaggtggcaacacttctcttcagccagacagcactggccagtttggagtctgtccatcctgcaggccacaagctctggatgaggaacttgaggcaagtcaccagcccctgatcatttcgcctaaaagagcaaggactagagttcctgacctccaggccagtccctgatccctgacctaatgttatcgcggaatgatgtaaagaggctggagaggagctggaggctgccagtgcccagcagtgagggacctgacctcaggggcagagacaagagaggcaccaaggaggatccaagagctgactatgcctgcattgctgagaacaaacccacctgagcaccccagacaccttcctcaacccaggcgggtggacagggtccccctgtggtccagccagtaaaaaccatggtccccccacttctgtgtctcagtcctctcagtccatctcgagcctccgttcaaaatgatcatcatcaaaacttatgtggctttttgacctttgaatagggaattttttaaattttttaaaaattaaaataaaaaaaacacatggctcacccttccaccca

SEQ ID NO: 148828 - DNA, 571 bp, Homo sapiens; identical to SEQ ID NO: 148810
  Payload ID: 9425
  Gene Symbol: LST1
  Gene Name: leukocyte specific transcript 1
  Uniprot ID: O00453
  ENST ID: ENST00000449236
  CDS Start-End: 138-338

SEQ ID NO: 148829 - DNA, 764 bp, Homo sapiens; identical to SEQ ID NO: 148819
  Payload ID: 9425
  Gene Symbol: LST1
  Gene Name: leukocyte specific transcript 1
  Uniprot ID: O00453
  ENST ID: ENST00000438075
  CDS Start-End: 238-531

SEQ ID NO: 148830 - DNA, 455 bp, Homo sapiens
  Payload ID: 9425
  Gene Symbol: LST1
  Gene Name: leukocyte specific transcript 1
  ENST ID: ENST00000418796
  CDS Start-End: 1-131
tatcgcggaatgatgatatatgtatctacgggggcctggggctgggcgggctcctgcttctggcagtggtccttctgtccgcctgcctgtgttggctgcatcgaagagaggctgccagtgcccagcagtgagggacctgacctcaggggcagagacaagagaggcaccaaggaggatccaagagctgactatgcctgcattgctgagaacaaacccacctgagcaccccagacaccttcctcaacccaggcgggtggacagggtccccctgtggtccagccagtaaaaaccatggtccccccacttctgtgtctcagtcctctcagtccatctcgagcctccgttcaaattgatcatcatcaaaacttatgtggctttttgacctttgaatagggaattttttaaattttttaaaaattaaaataaaaaaaacacatggctcacccttccaccca

SEQ ID NO: 148831 - DNA, 571 bp, Homo sapiens; identical to SEQ ID NO: 148810
  Payload ID: 9425
  Gene Symbol: LST1
  Gene Name: leukocyte specific transcript 1
  Uniprot ID: O00453
  ENST ID: ENST00000428405
  CDS Start-End: 138-338

SEQ ID NO: 148832 - DNA, 712 bp, Homo sapiens; identical to SEQ ID NO: 148812
  Payload ID: 9425
  Gene Symbol: LST1
  Gene Name: leukocyte specific transcript 1
  Uniprot ID: O00453
  ENST ID: ENST00000430632
  CDS Start-End: 186-479

SEQ ID NO: 148833 - DNA, 455 bp, Homo sapiens
  Payload ID: 9425
  Gene Symbol: LST1
  Gene Name: leukocyte specific transcript 1
  ENST ID: ENST00000415262
  CDS Start-End: 1-131
tatcgcggaatgatgatatatgtatctacgggggcctggggctgggcgggctcctgcttctggcagtggtccttctgtccgcctgcctgtgttggctgcatcgaagagaggctgccagtgcccagcagtgagggacctgacctcaggggcagagacaagagaggcaccaaggaggatccaagagctgactatgcctgcattgctgagaacaaacccacctgagcaccccagacaccttcctcaacccaggcgggtggacagggtccccctgtggtccagccagtaaaaaccatggtccccccacttctgtgtctcagtcctctcagtccatctcgagcctccgttcaaaatgatcatcatcaaaacttatgtggctttttgacctttgaatagggaattttttaaattttttaaaaattaaaataaaaaaaacacatggctcacccttccaccca

SEQ ID NO: 148834 - DNA, 259 bp, Homo sapiens; identical to SEQ ID NO: 148820
  Payload ID: 9425
  Gene Symbol: LST1
  Gene Name: leukocyte specific transcript 1
  ENST ID: ENST00000419469
  CDS Start-End: 122-259

SEQ ID NO: 148835 - DNA, 734 bp, Homo sapiens; identical to SEQ ID NO: 148799
  Payload ID: 9425
  Gene Symbol: LST1
  Gene Name: leukocyte specific transcript 1
  Uniprot ID: O00453
  ENST ID: ENST00000438381
  CDS Start-End: 210-410

SEQ ID NO: 148836 - DNA, 734 bp, Homo sapiens
  Payload ID: 9425
  Gene Symbol: LST1
  Gene Name: leukocyte specific transcript 1
  Uniprot ID: O00453
  ENST ID: ENST00000420785
  CDS Start-End: 210-410
acttcagccctagcagcatctgcctgtgggaagcagctctccacaccagccaagggggcccccacactcccgcgctgctctgcggctcagggagcagcccacctgctggatgaggaacttgaggcaagtcaccagcccctgatcatttcgcctaaaagagcaaggactagagttcctgacctccaggccagtccctgatccctgacctaatgttatcgcggaatgatgatatatgtatctacgggggcctggggctgggcgggctcctgcttctggcagtggtccttctgtccgcctgcctgtgttggctgcatcgaagagcaccttctgtcctggtcccaggcccagggctcctcagagcaggaactccactatgcatctctgcagaggctgccagtgcccagcagtgagggacctgacctcaggggcagagacaagagaggcaccaaggaggatccaagagctgactatgcctgcattgctgagaacaaacccacctgagcaccccagacaccttcctcaacccaggcgggtggacagggtccccctgtggtccagccagtaaaaaccatggtccccccacttctgtgtctcagtcctctcagtccatctcgagcctccgttcaaaatgatcatcatcaaaacttatgtggctttttgacctttgaatagggaattttttaaattttttaaaaattaaaataaaaaaaacacatggctcacccttccaccca

SEQ ID NO: 148837 - DNA, 689 bp, Homo sapiens; identical to SEQ ID NO: 148791
  Payload ID: 9425
  Gene Symbol: LST1
  Gene Name: leukocyte specific transcript 1
  ENST ID: ENST00000421478
  CDS Start-End: 279-365

SEQ ID NO: 148838 - DNA, 259 bp, Homo sapiens; identical to SEQ ID NO: 148820
  Payload ID: 9425
  Gene Symbol: LST1
  Gene Name: leukocyte specific transcript 1
  ENST ID: ENST00000412931
  CDS Start-End: 122-259

SEQ ID NO: 148839 - DNA, 712 bp, Homo sapiens
  Payload ID: 9425
  Gene Symbol: LST1
  Gene Name: leukocyte specific transcript 1
  Uniprot ID: O00453
  ENST ID: ENST00000417428
  CDS Start-End: 186-479
taaagtccaggcttgaatctcgggtctttacttgggcaacgggcaccatgataccctatgttctggggattagcagtgaggaatgatgaggaacttgaggcaagtcaccagcccctgatcatttcgcctaaaagagcaaggactagagttcctgacctccaggccagtccctgatccctgacctaatgttatcgcggaatgatgatatatgtatctacgggggcctggggctgggcgggctcctgcttctggcagtggtccttctgtccgcctgcctgtgttggctgcatcgaagagtaaagaggctggagaggagctgggcccagggctcctcagagcaggaactccactatgcatctctgcagaggctgccagtgcccagcagtgagggacctgacctcaggggcagagacaagagaggcaccaaggaggatccaagagctgactatgcctgcattgctgagaacaaacccacctgagcaccccagacaccttcctcaacccaggcgggtggacagggtccccctgtggtccagccagtaaaaaccatggtccccccacttctgtgtctcagtcctctcagtccatctcgagcctccgttcaaaatgatcatcatcaaaacttatgtggctttttgacctttgaatagggaattttttaaattttttaaaaattaaaattaaaaaaacacatggctcacccttccaccca

SEQ ID NO: 148840 - DNA, 555 bp, Homo sapiens
  Payload ID: 9425
  Gene Symbol: LST1
  Gene Name: leukocyte specific transcript 1
  Uniprot ID: O00453
  ENST ID: ENST00000440242
  CDS Start-End: 101-322
atgaggaacttgaggcaagtcaccagcccctgatcatttcgcctaaaagagcaaggactagagttcctgacctccaggccagtccctgatccctgacctaatgttatcgcggaatgatgtaaagaggctggagaggagctggcaccttctgtcctggtcccaggcccagggctcctcagagcaggaactccactatgcatctctgcagaggctgccagtgcccagcagtgagggacctgacctcaggggcagagacaagagaggcaccaaggaggatccaagagctgactatgcctgcattgctgagaacaaacccacctgagcaccccagacaccttcctcaacccaggcgggtggacagggtccccctgtggtccagccagtaaaaaccatggtccccccacttctgtgtctcagtcctctcagtccatctcgagcctccgttcaaaatgatcatcatcaaaacttatgtggctttttgacctttgaatagggaattttttaaattttttaaaaattaaaattaaaaaaacacatggctcacccttccaccca

SEQ ID NO: 148841 - DNA, 532 bp, Homo sapiens
  Payload ID: 9425
  Gene Symbol: LST1
  Gene Name: leukocyte specific transcript 1
  Uniprot ID: O00453
  ENST ID: ENST00000432164
  CDS Start-End: 101-208
atgaggaacttgaggcaagtcaccagcccctgatcatttcgcctaaaagagcaaggactagagttcctgacctccaggccagtccctgatccctgacctaatgttatcgcggaatgatgcaccttctgtcctggtcccaggcccagggctcctcagagcaggaactccactatgcatctctgcagaggctgccagtgcccagcagtgagggacctgacctcaggggcagagacaagagaggcaccaaggaggatccaagagctgactatgcctgcattgctgagaacaaacccacctgagcaccccagacaccttcctcaacccaggcgggtggacagggtccccctgtggtccagccagtaaaaaccatggtccccccacttctgtgtctcagtcctctcagtccatctcgagcctccgttcaaaatgatcatcatcaaaacttatgtggctttttgacctttgaatagggaattttttaaattttttaaaaattaaaattaaaaaaacacatggctcacccttccaccca

SEQ ID NO: 148842 - DNA, 585 bp, Homo sapiens; identical to SEQ ID NO: 148813
  Payload ID: 9425
  Gene Symbol: LST1
  Gene Name: leukocyte specific transcript 1
  Uniprot ID: O00453
  ENST ID: ENST00000437436
  CDS Start-End: 197-352

SEQ ID NO: 148843 - DNA, 712 bp, Homo sapiens; identical to SEQ ID NO: 148812
  Payload ID: 9425
  Gene Symbol: LST1
  Gene Name: leukocyte specific transcript 1
  Uniprot ID: O00453
  ENST ID: ENST00000411490
  CDS Start-End: 186-479

SEQ ID NO: 148844 - DNA, 259 bp, Homo sapiens; identical to SEQ ID NO: 148820
  Payload ID: 9425
  Gene Symbol: LST1
  Gene Name: leukocyte specific transcript 1
  ENST ID: ENST00000441641
  CDS Start-End: 122-259

SEQ ID NO: 148845 - DNA, 254 bp, Homo sapiens
  Payload ID: 9425
  Gene Symbol: LST1
  Gene Name: leukocyte specific transcript 1
  ENST ID: ENST00000429792
  CDS Start-End: 146-254
cacctagaaccatccagggctgaaaagtcccctccaaaccacgtgatgaggaacttgaggcaagtcaccagcccctgatcatttcgcctaaaagagcaaggactagagttcctgacctccaggccagtccctgatccctgacctaatgttatcgcggaatgatgatatatgtatctacgggggcctggggctgggcgggctcctgcttctggcagtggtccttctgtccgcctgcctgtgttggctgcatcgaa

SEQ ID NO: 148846 - DNA, 555 bp, Homo sapiens
  Payload ID: 9425
  Gene Symbol: LST1
  Gene Name: leukocyte specific transcript 1
  Uniprot ID: O00453
  ENST ID: ENST00000454168
  CDS Start-End: 101-322
atgaggaacttgaggcaagtcaccagcccctgatcatttcgcctaaaagagcaaggactagagttcctgacctccaggccagtccctgatccctgacctaatgttatcgcggaatgatgtaaagaggctggagaggagctggcaccttctgtcctggtcccaggcccagggctcctcagagcaggaactccactatgcatctctgcagaggctgccagtgcccagcagtgagggacctgacctcaggggcagagacaagagaggcaccaaggaggatccaagagctgactatgcctgcattgctgagaacaaacccacctgagcaccccagacaccttcctcaacccaggcgggtggacagggtccccctgtggtccagccagtaaaaaccatggtccccccacttctgtgtctcagtcctctcagtccatctcgagcctccgttcaaaatgatcatcatcaaaacttatgtggctttttgacctttgaatagggaattttttaaattttttaaaaattaaaataaaaaaaacacatggctcacccttccaccca

SEQ ID NO: 148847 - DNA, 648 bp, Homo sapiens
  Payload ID: 9425
  Gene Symbol: LST1
  Gene Name: leukocyte specific transcript 1
  Uniprot ID: O00453
  ENST ID: ENST00000437812
  CDS Start-End: 101-415
atgaggaacttgaggcaagtcaccagcccctgatcatttcgcctaaaagagcaaggactagagttcctgacctccaggccagtccctgatccctgacctaatgttatcgcggaatgatgatatatgtatctacgggggcctggggctgggcgggctcctgcttctggcagtggtccttctgtccgcctgcctgtgttggctgcatcgaagagtaaagaggctggagaggagctggcaccttctgtcctggtcccaggcccagggctcctcagagcaggaactccactatgcatctctgcagaggctgccagtgcccagcagtgagggacctgacctcaggggcagagacaagagaggcaccaaggaggatccaagagctgactatgcctgcattgctgagaacaaacccacctgagcaccccagacaccttcctcaacccaggcgggtggacagggtccccctgtggtccagccagtaaaaaccatggtccccccacttctgtgtctcagtcctctcagtccatctcgagcctccgttcaaaatgatcatcatcaaaacttatgtggctttttgacctttgaatagggaattttttaaattttttaaaaattaaaattaaaaaaacacatggctcacccttccaccca

SEQ ID NO: 148848 - DNA, 712 bp, Homo sapiens; identical to SEQ ID NO: 148812
  Payload ID: 9425
  Gene Symbol: LST1
  Gene Name: leukocyte specific transcript 1
  Uniprot ID: O00453
  ENST ID: ENST00000455003
  CDS Start-End: 186-479

SEQ ID NO: 148849 - DNA, 668 bp, Homo sapiens
  Payload ID: 9425
  Gene Symbol: LST1
  Gene Name: leukocyte specific transcript 1
  Uniprot ID: O00453
  ENST ID: ENST00000440253
  CDS Start-End: 235-435
ggcaacgggcaccatgataccctatgttctggggattagcagtgaggaatggaaagtgcccagctcagggttggcacataagggaggctccccagcctgggaacgattataacagagggcccctcacttcacagatgaggaacttgaggcaagtcaccagcccctgatcatttcgcctaaaagagcaaggactagagttcctgacctccaggccagtccctgatccctgacctaatgttatcgcggaatgatgtaaagaggctggagaggagctgggcccagggctcctcagagcaggaactccactatgcatctctgcagaggctgccagtgcccagcagtgagggacctgacctcaggggcagagacaagagaggcaccaaggaggatccaagagctgactatgcctgcattgctgagaacaaacccacctgagcaccccagacaccttcctcaacccaggcgggtggacagggtccccctgtggtccagccagtaaaaaccatggtccccccacttctgtgtctcagtcctctcagtccatctcgagcctccgttcaaaatgatcatcatcaaaacttatgtggctttttgacctttgaatagggaattttttaaattttttaaaaattaaaattaaaaaaacacatggctcacccttccaccca

SEQ ID NO: 148850 - DNA, 764 bp, Homo sapiens
  Payload ID: 9425
  Gene Symbol: LST1
  Gene Name: leukocyte specific transcript 1
  Uniprot ID: O00453
  ENST ID: ENST00000455901
  CDS Start-End: 238-531
gctggggaggaacccaggctgggggagaagttaaagccagaggaggggcaggaatgtctgaggtggcaacacttctcttcagccagacagcactggccagtttggagtctgtccatcctgcaggccacaagctctggatgaggaacttgaggcaagtcaccagcccctgatcatttcgcctaaaagagcaaggactagagttcctgacctccaggccagtccctgatccctgacctaatgttatcgcggaatgatgatatatgtatctacgggggcctggggctgggcgggctcctgcttctggcagtggtccttctgtccgcctgcctgtgttggctgcatcgaagagtaaagaggctggagaggagctgggcccagggctcctcagagcaggaactccactatgcatctctgcagaggctgccagtgcccagcagtgagggacctgacctcaggggcagagacaagagaggcaccaaggaggatccaagagctgactatgcctgcattgctgagaacaaacccacctgagcaccccagacaccttcctcaacccaggcgggtggacagggtccccctgtggtccagccagtaaaaaccatggtccccccacttctgtgtctcagtcctctcagtccatctcgagcctccgttcaaaatgatcatcatcaaaacttatgtggctttttgacctttgaatagggaattttttaaattttttaaaaattaaaataaaaaaaacacatggctcacccttccaccca

SEQ ID NO: 148851 - DNA, 585 bp, Homo sapiens; identical to SEQ ID NO: 148813
  Payload ID: 9425
  Gene Symbol: LST1
  Gene Name: leukocyte specific transcript 1
  Uniprot ID: O00453
  ENST ID: ENST00000422035
  CDS Start-End: 197-352

SEQ ID NO: 148852 - DNA, 764 bp, Homo sapiens; identical to SEQ ID NO: 148819
  Payload ID: 9425
  Gene Symbol: LST1
  Gene Name: leukocyte specific transcript 1
  Uniprot ID: O00453
  ENST ID: ENST00000443340
  CDS Start-End: 238-531

SEQ ID NO: 148853 - DNA, 668 bp, Homo sapiens; identical to SEQ ID NO: 148811
  Payload ID: 9425
  Gene Symbol: LST1
  Gene Name: leukocyte specific transcript 1
  Uniprot ID: O00453
  ENST ID: ENST00000436185
  CDS Start-End: 235-435

SEQ ID NO: 148854 - DNA, 565 bp, Homo sapiens; identical to SEQ ID NO: 148794
  Payload ID: 9425
  Gene Symbol: LST1
  Gene Name: leukocyte specific transcript 1
  Uniprot ID: O00453
  ENST ID: ENST00000447141
  CDS Start-End: 200-241

SEQ ID NO: 148855 - DNA, 668 bp, Homo sapiens
  Payload ID: 9425
  Gene Symbol: LST1
  Gene Name: leukocyte specific transcript 1
  Uniprot ID: O00453
  ENST ID: ENST00000455052
  CDS Start-End: 235-435
ggcaacgggcaccatgataccctatgttctggggattagcagtgaggaatggaaagtgcccagctcagggttggcacataagggaggctccccagcctgggaacgattataacagagggcccctcacttcacagatgaggaacttgaggcaagtcaccagcccctgatcatttcgcctaaaagagcaaggactagagttcctgacctccaggccagtccctgatccctgacctaatgttatcgcggaatgatgtaaagaggctggagaggagctgggcccagggctcctcagagcaggaactccactatgcatctctgcagaggctgccagtgcccagcagtgagggacctgacctcaggggcagagacaagagaggcaccaaggaggatccaagagctgactatgcctgcattgctgagaacaaacccacctgagcaccccagacaccttcctcaacccaggcgggtggacagggtccccctgtggtccagccagtaaaaaccatggtccccccacttctgtgtctcagtcctctcagtccatctcgagcctccgttcaaaatgatcatcatcaaaacttatgtggctttttgacctttgaatagggaattttttaaattttttaaaaattaaaataaaaaaaacacatggctcacccttccaccca

SEQ ID NO: 148856 - DNA, 455 bp, Homo sapiens; identical to SEQ ID NO: 148830
  Payload ID: 9425
  Gene Symbol: LST1
  Gene Name: leukocyte specific transcript 1
  ENST ID: ENST00000412125
  CDS Start-End: 1-131

SEQ ID NO: 148857 - DNA, 603 bp, Homo sapiens; identical to SEQ ID NO: 148806
  Payload ID: 9425
  Gene Symbol: LST1
  Gene Name: leukocyte specific transcript 1
  ENST ID: ENST00000454186
  CDS Start-End: 193-279

SEQ ID NO: 148858 - DNA, 603 bp, Homo sapiens; identical to SEQ ID NO: 148806
  Payload ID: 9425
  Gene Symbol: LST1
  Gene Name: leukocyte specific transcript 1
  ENST ID: ENST00000435428
  CDS Start-End: 193-279

SEQ ID NO: 148859 - DNA, 648 bp, Homo sapiens
  Payload ID: 9425
  Gene Symbol: LST1
  Gene Name: leukocyte specific transcript 1
  Uniprot ID: O00453
  ENST ID: ENST00000436037
  CDS Start-End: 101-415
atgaggaacttgaggcaagtcaccagcccctgatcatttcgcctaaaagagcaaggactagagttcctgacctccaggccagtccctgatccctgacctaatgttatcgcggaatgatgatatatgtatctacgggggcctggggctgggcgggctcctgcttctggcagtggtccttctgtccgcctgcctgtgttggctgcatcgaagagtaaagaggctggagaggagctggcaccttctgtcctggtcccaggcccagggctcctcagagcaggaactccactatgcatctctgcagaggctgccagtgcccagcagtgagggacctgacctcaggggcagagacaagagaggcaccaaggaggatccaagagctgactatgcctgcattgctgagaacaaacccacctgagcaccccagacaccttcctcaacccaggcgggtggacagggtccccctgtggtccagccagtaaaaaccatggtccccccacttctgtgtctcagtcctctcagtccatctcgagcctccgttcaaaatgatcatcatcaaaacttatgtggctttttgacctttgaatagggaattttttaaattttttaaaaattaaaataaaaaaaacacatggctcacccttccaccca

SEQ ID NO: 148860 - DNA, 668 bp, Homo sapiens; identical to SEQ ID NO: 148811
  Payload ID: 9425
  Gene Symbol: LST1
  Gene Name: leukocyte specific transcript 1
  Uniprot ID: O00453
  ENST ID: ENST00000420157
  CDS Start-End: 235-435

SEQ ID NO: 148861 - DNA, 726 bp, Homo sapiens
  Payload ID: 9425
  Gene Symbol: LST1
  Gene Name: leukocyte specific transcript 1
  Uniprot ID: O00453
  ENST ID: ENST00000455426
  CDS Start-End: 293-493
gaaaagaaagatgttgtaaccctaaccctggagccgaacttcctctcctaacaatgctggggaggaacccaggctgggggagaagttaaagccagaggaggggcaggaatgtctgaggtggcaacacttctcttcagccagacagcactggccagtttggagtctgtccatcctgcaggccacaagctctggatgaggaacttgaggcaagtcaccagcccctgatcatttcgcctaaaagagcaaggactagagttcctgacctccaggccagtccctgatccctgacctaatgttatcgcggaatgatgtaaagaggctggagaggagctgggcccagggctcctcagagcaggaactccactatgcatctctgcagaggctgccagtgcccagcagtgagggacctgacctcaggggcagagacaagagaggcaccaaggaggatccaagagctgactatgcctgcattgctgagaacaaacccacctgagcaccccagacaccttcctcaacccaggcgggtggacagggtccccctgtggtccagccagtaaaaaccatggtccccccacttctgtgtctcagtcctctcagtccatctcgagcctccgttcaaattgatcatcatcaaaacttatgtggctttttgacctttgaatagggaattttttaaattttttaaaaattaaaataaaaaaaacacatggctcacccttccaccca

SEQ ID NO: 148862 - DNA, 734 bp, Homo sapiens; identical to SEQ ID NO: 148799
  Payload ID: 9425
  Gene Symbol: LST1
  Gene Name: leukocyte specific transcript 1
  Uniprot ID: O00453
  ENST ID: ENST00000430680
  CDS Start-End: 210-410

SEQ ID NO: 148863 - DNA, 665 bp, Homo sapiens; identical to SEQ ID NO: 148809
  Payload ID: 9425
  Gene Symbol: LST1
  Gene Name: leukocyte specific transcript 1
  ENST ID: ENST00000426202
  CDS Start-End: 184-432

SEQ ID NO: 148864 - DNA, 624 bp, Homo sapiens
  Payload ID: 9425
  Gene Symbol: LST1
  Gene Name: leukocyte specific transcript 1
  Uniprot ID: O00453
  ENST ID: ENST00000429910
  CDS Start-End: 121-300
gggattagcagtgaggaatgatgaggaacttgaggcaagtcaccagcccctgatcatttcgcctaaaagagcaaggactagagttcctgacctccaggccagtccctgatccctgacctaatgttatcgcggaatgatgatatatgtatctacgggggcctggggctgggcgggctcctgcttctggcagtggtccttctgtccgcctgcctgtgttggctgcatcgaagaggcccagggctcctcagagcaggaactccactatgcatctctgcagaggctgccagtgcccagcagtgagggacctgacctcaggggcagagacaagagaggcaccaaggaggatccaagagctgactatgcctgcattgctgagaacaaacccacctgagcaccccagacaccttcctcaacccaggcgggtggacagggtccccctgtggtccagccagtaaaaaccatggtccccccacttctgtgtctcagtcctctcagtccatctcgagcctccgttcaaaatgatcatcatcaaaacttatgtggctttttgacctttgaatagggaattttttaaattttttaaaaattaaaattaaaaaaacacatggctcacccttccaccca

SEQ ID NO: 148865 - DNA, 619 bp, Homo sapiens
  Payload ID: 9425
  Gene Symbol: LST1
  Gene Name: leukocyte specific transcript 1
  ENST ID: ENST00000413900
  CDS Start-End: 209-295
cctttctgggatgggtgacctagtaaagtccaggcttgaatctcgggtctttacttgggcaacgggcaccatgataccctatgttctggggattagcagtgaggaatgatgaggaacttgaggcaagtcaccagcccctgatcatttcgcctaaaagagcaaggactagagttcctgacctccaggccagtccctgatccctgacctaatgttatcgcggaatgatggcccagggctcctcagagcaggaactccactatgcatctctgcagaggctgccagtgcccagcagtgagggacctgacctcaggggcagagacaagagaggcaccaaggaggatccaagagctgactatgcctgcattgctgagaacaaacccacctgagcaccccagacaccttcctcaacccaggcgggtggacagggtccccctgtggtccagccagtaaaaaccatggtccccccacttctgtgtctcagtcctctcagtccatctcgagcctccgttcaaaatgatcatcatcaaaacttatgtggctttttgacctttgaatagggaattttttaaattttttaaaaattaaaattaaaaaaacacatggctcacccttccaccca

SEQ ID NO: 148866 - DNA, 455 bp, Homo sapiens; identical to SEQ ID NO: 148830
  Payload ID: 9425
  Gene Symbol: LST1
  Gene Name: leukocyte specific transcript 1
  ENST ID: ENST00000455553
  CDS Start-End: 1-131

SEQ ID NO: 148867 - DNA, 648 bp, Homo sapiens; identical to SEQ ID NO: 148793
  Payload ID: 9425
  Gene Symbol: LST1
  Gene Name: leukocyte specific transcript 1
  Uniprot ID: O00453
  ENST ID: ENST00000412041
  CDS Start-End: 101-415

SEQ ID NO: 148868 - DNA, 532 bp, Homo sapiens; identical to SEQ ID NO: 148798
  Payload ID: 9425
  Gene Symbol: LST1
  Gene Name: leukocyte specific transcript 1
  Uniprot ID: O00453
  ENST ID: ENST00000427186
  CDS Start-End: 101-208

SEQ ID NO: 148869 - DNA, 734 bp, Homo sapiens; identical to SEQ ID NO: 148799
  Payload ID: 9425
  Gene Symbol: LST1
  Gene Name: leukocyte specific transcript 1
  Uniprot ID: O00453
  ENST ID: ENST00000442052
  CDS Start-End: 210-410

SEQ ID NO: 148870 - DNA, 254 bp, Homo sapiens; identical to SEQ ID NO: 148845
  Payload ID: 9425
  Gene Symbol: LST1
  Gene Name: leukocyte specific transcript 1
  ENST ID: ENST00000433492
  CDS Start-End: 146-254

SEQ ID NO: 148871 - DNA, 455 bp, Homo sapiens; identical to SEQ ID NO: 148830
  Payload ID: 9425
  Gene Symbol: LST1
  Gene Name: leukocyte specific transcript 1
  ENST ID: ENST00000420142
  CDS Start-End: 1-131

SEQ ID NO: 148872 - DNA, 585 bp, Homo sapiens
  Payload ID: 9425
  Gene Symbol: LST1
  Gene Name: leukocyte specific transcript 1
  Uniprot ID: O00453
  ENST ID: ENST00000423871
  CDS Start-End: 197-352
ggaggggcaggaatgtctgaggtggcaacacttctcttcagccagacagcactggccagtttggagtctgtccatcctgcaggccacaagctctggatgaggaacttgaggcaagtcaccagcccctgatcatttcgcctaaaagagcaaggactagagttcctgacctccaggccagtccctgatccctgacctaatgttatcgcggaatgatgtaaagaggctggagaggagctggaggctgccagtgcccagcagtgagggacctgacctcaggggcagagacaagagaggcaccaaggaggatccaagagctgactatgcctgcattgctgagaacaaacccacctgagcaccccagacaccttcctcaacccaggcgggtggacagggtccccctgtggtccagccagtaaaaaccatggtccccccacttctgtgtctcagtcctctcagtccatctcgagcctccgttcaaaatgatcatcatcaaaacttatgtggctttttgacctttgaatagggaattttttaaattttttaaaaattaaaattaaaaaaacacatggctcacccttccaccca

SEQ ID NO: 148873 - DNA, 689 bp, Homo sapiens; identical to SEQ ID NO: 148791
  Payload ID: 9425
  Gene Symbol: LST1
  Gene Name: leukocyte specific transcript 1
  ENST ID: ENST00000414519
  CDS Start-End: 279-365

SEQ ID NO: 148874 - DNA, 259 bp, Homo sapiens; identical to SEQ ID NO: 148820
  Payload ID: 9425
  Gene Symbol: LST1
  Gene Name: leukocyte specific transcript 1
  ENST ID: ENST00000425495
  CDS Start-End: 122-259

SEQ ID NO: 148875 - DNA, 619 bp, Homo sapiens; identical to SEQ ID NO: 148805
  Payload ID: 9425
  Gene Symbol: LST1
  Gene Name: leukocyte specific transcript 1
  ENST ID: ENST00000452762
  CDS Start-End: 209-295

SEQ ID NO: 148876 - DNA, 603 bp, Homo sapiens; identical to SEQ ID NO: 148806
  Payload ID: 9425
  Gene Symbol: LST1
  Gene Name: leukocyte specific transcript 1
  ENST ID: ENST00000433188
  CDS Start-End: 193-279

SEQ ID NO: 148877 - DNA, 532 bp, Homo sapiens; identical to SEQ ID NO: 148798
  Payload ID: 9425
  Gene Symbol: LST1
  Gene Name: leukocyte specific transcript 1
  Uniprot ID: O00453
  ENST ID: ENST00000440328
  CDS Start-End: 101-208

SEQ ID NO: 148878 - DNA, 555 bp, Homo sapiens; identical to SEQ ID NO: 148797
  Payload ID: 9425
  Gene Symbol: LST1
  Gene Name: leukocyte specific transcript 1
  Uniprot ID: O00453
  ENST ID: ENST00000451922
  CDS Start-End: 101-322

SEQ ID NO: 148879 - DNA, 619 bp, Homo sapiens; identical to SEQ ID NO: 148805
  Payload ID: 9425
  Gene Symbol: LST1
  Gene Name: leukocyte specific transcript 1
  ENST ID: ENST00000443931
  CDS Start-End: 209-295

SEQ ID NO: 148880 - DNA, 565 bp, Homo sapiens
  Payload ID: 9425
  Gene Symbol: LST1
  Gene Name: leukocyte specific transcript 1
  Uniprot ID: O00453
  ENST ID: ENST00000455493
  CDS Start-End: 200-241
agaggaggggcaggaatgtctgaggtggcaacacttctcttcagccagacagcactggccagtttggagtctgtccatcctgcaggccacaagctctggatgaggaacttgaggcaagtcaccagcccctgatcatttcgcctaaaagagcaaggactagagttcctgacctccaggccagtccctgatccctgacctaatgttatcgcggaatgatgaggctgccagtgcccagcagtgagggacctgacctcaggggcagagacaagagaggcaccaaggaggatccaagagctgactatgcctgcattgctgagaacaaacccacctgagcaccccagacaccttcctcaacccaggcgggtggacagggtccccctgtggtccagccagtaaaaaccatggtccccccacttctgtgtctcagtcctctcagtccatctcgagcctccgttcaaaatgatcatcatcaaaacttatgtggctttttgacctttgaatagggaattttttaaattttttaaaaattaaaattaaaaaaacacatggctcacccttccaccca

SEQ ID NO: 148881 - DNA, 565 bp, Homo sapiens; identical to SEQ ID NO: 148794
  Payload ID: 9425
  Gene Symbol: LST1
  Gene Name: leukocyte specific transcript 1
  Uniprot ID: O00453
  ENST ID: ENST00000415781
  CDS Start-End: 200-241

SEQ ID NO: 148882 - DNA, 254 bp, Homo sapiens; identical to SEQ ID NO: 148845
  Payload ID: 9425
  Gene Symbol: LST1
  Gene Name: leukocyte specific transcript 1
  ENST ID: ENST00000450047
  CDS Start-End: 146-254

SEQ ID NO: 148883 - DNA, 254 bp, Homo sapiens; identical to SEQ ID NO: 148845
  Payload ID: 9425
  Gene Symbol: LST1
  Gene Name: leukocyte specific transcript 1
  ENST ID: ENST00000433520
  CDS Start-End: 146-254

SEQ ID NO: 148884 - DNA, 619 bp, Homo sapiens
  Payload ID: 9425
  Gene Symbol: LST1
  Gene Name: leukocyte specific transcript 1
  ENST ID: ENST00000430818
  CDS Start-End: 209-295
cctttctgggatgggtgacctagtaaagtccaggcttgaatctcgggtctttacttgggcaacgggcaccatgataccctatgttctggggattagcagtgaggaatgatgaggaacttgaggcaagtcaccagcccctgatcatttcgcctaaaagagcaaggactagagttcctgacctccaggccagtccctgatccctgacctaatgttatcgcggaatgatggcccagggctcctcagagcaggaactccactatgcatctctgcagaggctgccagtgcccagcagtgagggacctgacctcaggggcagagacaagagaggcaccaaggaggatccaagagctgactatgcctgcattgctgagaacaaacccacctgagcaccccagacaccttcctcaacccaggcgggtggacagggtccccctgtggtccagccagtaaaaaccatggtccccccacttctgtgtctcagtcctctcagtccatctcgagcctccgttcaaaatgatcatcatcaaaacttatgtggctttttgacctttgaatagggaattttttaaattttttaaaaattaaaataaaaaaaacacatggctcacccttccaccca

SEQ ID NO: 148885 - DNA, 610 bp, Homo sapiens
  Payload ID: 9425
  Gene Symbol: LST1
  Gene Name: leukocyte specific transcript 1
  ENST ID: ENST00000453586
  CDS Start-End: 200-286
agaggaggggcaggaatgtctgaggtggcaacacttctcttcagccagacagcactggccagtttggagtctgtccatcctgcaggccacaagctctggatgaggaacttgaggcaagtcaccagcccctgatcatttcgcctaaaagagcaaggactagagttcctgacctccaggccagtccctgatccctgacctaatgttatcgcggaatgatggcccagggctcctcagagcaggaactccactatgcatctctgcagaggctgccagtgcccagcagtgagggacctgacctcaggggcagagacaagagaggcaccaaggaggatccaagagctgactatgcctgcattgctgagaacaaacccacctgagcaccccagacaccttcctcaacccaggcgggtggacagggtccccctgtggtccagccagtaaaaaccatggtccccccacttctgtgtctcagtcctctcagtccatctcgagcctccgttcaaaatgatcatcatcaaaacttatgtggctttttgacctttgaatagggaattttttaaattttttaaaaattaaaataaaaaaaacacatggctcacccttccaccca

SEQ ID NO: 148886 - DNA, 571 bp, Homo sapiens
  Payload ID: 9425
  Gene Symbol: LST1
  Gene Name: leukocyte specific transcript 1
  Uniprot ID: O00453
  ENST ID: ENST00000414266
  CDS Start-End: 138-338
tgataccctatgttctggggattagcagtgaggaatgatgaggaacttgaggcaagtcaccagcccctgatcatttcgcctaaaagagcaaggactagagttcctgacctccaggccagtccctgatccctgacctaatgttatcgcggaatgatgtaaagaggctggagaggagctgggcccagggctcctcagagcaggaactccactatgcatctctgcagaggctgccagtgcccagcagtgagggacctgacctcaggggcagagacaagagaggcaccaaggaggatccaagagctgactatgcctgcattgctgagaacaaacccacctgagcaccccagacaccttcctcaacccaggcgggtggacagggtccccctgtggtccagccagtaaaaaccatggtccccccacttctgtgtctcagtcctctcagtccatctcgagcctccgttcaaaatgatcatcatcaaaacttatgtggctttttgacctttgaatagggaattttttaaattttttaaaaattaaaattaaaaaaacacatggctcacccttccaccca

SEQ ID NO: 148887 - DNA, 585 bp, Homo sapiens; identical to SEQ ID NO: 148813
  Payload ID: 9425
  Gene Symbol: LST1
  Gene Name: leukocyte specific transcript 1
  Uniprot ID: O00453
  ENST ID: ENST00000446239
  CDS Start-End: 197-352

SEQ ID NO: 148888 - DNA, 603 bp, Homo sapiens
  Payload ID: 9425
  Gene Symbol: LST1
  Gene Name: leukocyte specific transcript 1
  ENST ID: ENST00000419521
  CDS Start-End: 193-279
cacccacccaggcccaggctccttcccctccatcatccccttaccagcacctagaaccatccagggctgaaaagtcccctccaaaccacgtgatgaggaacttgaggcaagtcaccagcccctgatcatttcgcctaaaagagcaaggactagagttcctgacctccaggccagtccctgatccctgacctaatgttatcgcggaatgatggcccagggctcctcagagcaggaactccactatgcatctctgcagaggctgccagtgcccagcagtgagggacctgacctcaggggcagagacaagagaggcaccaaggaggatccaagagctgactatgcctgcattgctgagaacaaacccacctgagcaccccagacaccttcctcaacccaggcgggtggacagggtccccctgtggtccagccagtaaaaaccatggtccccccacttctgtgtctcagtcctctcagtccatctcgagcctccgttcaaaatgatcatcatcaaaacttatgtggctttttgacctttgaatagggaattttttaaattttttaaaaattaaaataaaaaaaacacatggctcacccttccaccca

SEQ ID NO: 148889 - DNA, 648 bp, Homo sapiens; identical to SEQ ID NO: 148793
  Payload ID: 9425
  Gene Symbol: LST1
  Gene Name: leukocyte specific transcript 1
  Uniprot ID: O00453
  ENST ID: ENST00000438335
  CDS Start-End: 101-415

SEQ ID NO: 148890 - DNA, 665 bp, Homo sapiens; identical to SEQ ID NO: 148809
  Payload ID: 9425
  Gene Symbol: LST1
  Gene Name: leukocyte specific transcript 1
  ENST ID: ENST00000421781
  CDS Start-End: 184-432

SEQ ID NO: 148891 - DNA, 712 bp, Homo sapiens
  Payload ID: 9425
  Gene Symbol: LST1
  Gene Name: leukocyte specific transcript 1
  Uniprot ID: O00453
  ENST ID: ENST00000426938
  CDS Start-End: 186-479
taaagtccaggcttgaatctcgggtctttacttgggcaacgggcaccatgataccctatgttctggggattagcagtgaggaatgatgaggaacttgaggcaagtcaccagcccctgatcatttcgcctaaaagagcaaggactagagttcctgacctccaggccagtccctgatccctgacctaatgttatcgcggaatgatgatatatgtatctacgggggcctggggctgggcgggctcctgcttctggcagtggtccttctgtccgcctgcctgtgttggctgcatcgaagagtaaagaggctggagaggagctgggcccagggctcctcagagcaggaactccactatgcatctctgcagaggctgccagtgcccagcagtgagggacctgacctcaggggcagagacaagagaggcaccaaggaggatccaagagctgactatgcctgcattgctgagaacaaacccacctgagcaccccagacaccttcctcaacccaggcgggtggacagggtccccctgtggtccagccagtaaaaaccatggtccccccacttctgtgtctcagtcctctcagtccatctcgagcctccgttcaaaatgatcatcatcaaaacttatgtggctttttgacctttgaatagggaattttttaaattttttaaaaattaaaataaaaaaaacacatggctcacccttccaccca

SEQ ID NO: 148892 - DNA, 555 bp, Homo sapiens; identical to SEQ ID NO: 148797
  Payload ID: 9425
  Gene Symbol: LST1
  Gene Name: leukocyte specific transcript 1
  Uniprot ID: O00453
  ENST ID: ENST00000450291
  CDS Start-End: 101-322

SEQ ID NO: 148893 - DNA, 610 bp, Homo sapiens
  Payload ID: 9425
  Gene Symbol: LST1
  Gene Name: leukocyte specific transcript 1
  ENST ID: ENST00000443051
  CDS Start-End: 200-286
agaggaggggcaggaatgtctgaggtggcaacacttctcttcagccagacagcactggccagtttggagtctgtccatcctgcaggccacaagctctggatgaggaacttgaggcaagtcaccagcccctgatcatttcgcctaaaagagcaaggactagagttcctgacctccaggccagtccctgatccctgacctaatgttatcgcggaatgatggcccagggctcctcagagcaggaactccactatgcatctctgcagaggctgccagtgcccagcagtgagggacctgacctcaggggcagagacaagagaggcaccaaggaggatccaagagctgactatgcctgcattgctgagaacaaacccacctgagcaccccagacaccttcctcaacccaggcgggtggacagggtccccctgtggtccagccagtaaaaaccatggtccccccacttctgtgtctcagtcctctcagtccatctcgagcctccgttcaaaatgatcatcatcaaaacttatgtggctttttgacctttgaatagggaattttttaaattttttaaaaattaaaattaaaaaaacacatggctcacccttccaccca

SEQ ID NO: 148894 - DNA, 610 bp, Homo sapiens; identical to SEQ ID NO: 148795
  Payload ID: 9425
  Gene Symbol: LST1
  Gene Name: leukocyte specific transcript 1
  ENST ID: ENST00000449388
  CDS Start-End: 200-286

SEQ ID NO: 148895 - DNA, 259 bp, Homo sapiens; identical to SEQ ID NO: 148820
  Payload ID: 9425
  Gene Symbol: LST1
  Gene Name: leukocyte specific transcript 1
  ENST ID: ENST00000441278
  CDS Start-End: 122-259

SEQ ID NO: 148896 - DNA, 726 bp, Homo sapiens; identical to SEQ ID NO: 148861
  Payload ID: 9425
  Gene Symbol: LST1
  Gene Name: leukocyte specific transcript 1
  Uniprot ID: O00453
  ENST ID: ENST00000418507
  CDS Start-End: 293-493

SEQ ID NO: 148897 - DNA, 565 bp, Homo sapiens
  Payload ID: 9425
  Gene Symbol: LST1
  Gene Name: leukocyte specific transcript 1
  Uniprot ID: O00453
  ENST ID: ENST00000458456
  CDS Start-End: 200-241
agaggaggggcaggaatgtctgaggtggcaacacttctcttcagccagacagcactggccagtttggagtctgtccatcctgcaggccacaagctctggatgaggaacttgaggcaagtcaccagcccctgatcatttcgcctaaaagagcaaggactagagttcctgacctccaggccagtccctgatccctgacctaatgttatcgcggaatgatgaggctgccagtgcccagcagtgagggacctgacctcaggggcagagacaagagaggcaccaaggaggatccaagagctgactatgcctgcattgctgagaacaaacccacctgagcaccccagacaccttcctcaacccaggcgggtggacagggtccccctgtggtccagccagtaaaaaccatggtccccccacttctgtgtctcagtcctctcagtccatctcgagcctccgttcaaaatgatcatcatcaaaacttatgtggctttttgacctttgaatagggaattttttaaattttttaaaaattaaaataaaaaaaacacatggctcacccttccaccca

SEQ ID NO: 148898 - DNA, 726 bp, Homo sapiens
  Payload ID: 9425
  Gene Symbol: LST1
  Gene Name: leukocyte specific transcript 1
  Uniprot ID: O00453
  ENST ID: ENST00000423107
  CDS Start-End: 293-493
gaaaagaaagatgttgtaaccctaaccctggagccgaacttcctctcctaacaatgctggggaggaacccaggctgggggagaagttaaagccagaggaggggcaggaatgtctgaggtggcaacacttctcttcagccagacagcactggccagtttggagtctgtccatcctgcaggccacaagctctggatgaggaacttgaggcaagtcaccagcccctgatcatttcgcctaaaagagcaaggactagagttcctgacctccaggccagtccctgatccctgacctaatgttatcgcggaatgatgtaaagaggctggagaggagctgggcccagggctcctcagagcaggaactccactatgcatctctgcagaggctgccagtgcccagcagtgagggacctgacctcaggggcagagacaagagaggcaccaaggaggatccaagagctgactatgcctgcattgctgagaacaaacccacctgagcaccccagacaccttcctcaacccaggcgggtggacagggtccccctgtggtccagccagtaaaaaccatggtccccccacttctgtgtctcagtcctctcagtccatctcgagcctccgttcaaaatgatcatcatcaaaacttatgtggctttttgacctttgaatagggaattttttaaattttttaaaaattaaaataaaaaaaacacatggctcacccttccaccca

SEQ ID NO: 148899 - DNA, 648 bp, Homo sapiens; identical to SEQ ID NO: 148793
  Payload ID: 9425
  Gene Symbol: LST1
  Gene Name: leukocyte specific transcript 1
  Uniprot ID: O00453
  ENST ID: ENST00000448236
  CDS Start-End: 101-415

SEQ ID NO: 148900 - DNA, 734 bp, Homo sapiens
  Payload ID: 9425
  Gene Symbol: LST1
  Gene Name: leukocyte specific transcript 1
  Uniprot ID: O00453
  ENST ID: ENST00000451641
  CDS Start-End: 210-410
acttcagccctagcagcatctgcctgtgggaagcagctctccacaccagccaagggggcccccacactcccgcgctgctctgcggctcagggagcagcccacctgctggatgaggaacttgaggcaagtcaccagcccctgatcatttcgcctaaaagagcaaggactagagttcctgacctccaggccagtccctgatccctgacctaatgttatcgcggaatgatgatatatgtatctacgggggcctggggctgggcgggctcctgcttctggcagtggtccttctgtccgcctgcctgtgttggctgcatcgaagagcaccttctgtcctggtcccaggcccagggctcctcagagcaggaactccactatgcatctctgcagaggctgccagtgcccagcagtgagggacctgacctcaggggcagagacaagagaggcaccaaggaggatccaagagctgactatgcctgcattgctgagaacaaacccacctgagcaccccagacaccttcctcaacccaggcgggtggacagggtccccctgtggtccagccagtaaaaaccatggtccccccacttctgtgtctcagtcctctcagtccatctcgagcctccgttcaaaatgatcatcatcaaaacttatgtggctttttgacctttgaatagggaattttttaaattttttaaaaattaaaattaaaaaaacacatggctcacccttccaccca

SEQ ID NO: 148901 - DNA, 259 bp, Homo sapiens; identical to SEQ ID NO: 148820
  Payload ID: 9425
  Gene Symbol: LST1
  Gene Name: leukocyte specific transcript 1
  ENST ID: ENST00000442915
  CDS Start-End: 122-259

SEQ ID NO: 148902 - DNA, 254 bp, Homo sapiens; identical to SEQ ID NO: 148845
  Payload ID: 9425
  Gene Symbol: LST1
  Gene Name: leukocyte specific transcript 1
  ENST ID: ENST00000412283
  CDS Start-End: 146-254

SEQ ID NO: 148903 - DNA, 532 bp, Homo sapiens; identical to SEQ ID NO: 148798
  Payload ID: 9425
  Gene Symbol: LST1
  Gene Name: leukocyte specific transcript 1
  Uniprot ID: O00453
  ENST ID: ENST00000433305
  CDS Start-End: 101-208

SEQ ID NO: 148904 - DNA, 254 bp, Homo sapiens; identical to SEQ ID NO: 148845
  Payload ID: 9425
  Gene Symbol: LST1
  Gene Name: leukocyte specific transcript 1
  ENST ID: ENST00000439436
  CDS Start-End: 146-254

SEQ ID NO: 148905 - DNA, 665 bp, Homo sapiens
  Payload ID: 9425
  Gene Symbol: LST1
  Gene Name: leukocyte specific transcript 1
  ENST ID: ENST00000448749
  CDS Start-End: 184-432
gaaagtgcccagctcagggttggcacataagggaggctccccagcctgggaacgattataacagagggcccctcacttcacagatgaggaacttgaggcaagtcaccagcccctgatcatttcgcctaaaagagcaaggactagagttcctgacctccaggccagtccctgatccctgacctaatgttatcgcggaatgatgatatatgtatctacgggggcctggggctgggcgggctcctgcttctggcagtggtccttctgtccgcctgcctgtgttggctgcatcgaagagtaaagaggctggagaggagctggaggctgccagtgcccagcagtgagggacctgacctcaggggcagagacaagagaggcaccaaggaggatccaagagctgactatgcctgcattgctgagaacaaacccacctgagcaccccagacaccttcctcaacccaggcgggtggacagggtccccctgtggtccagccagtaaaaaccatggtccccccacttctgtgtctcagtcctctcagtccatctcgagcctccgttcaaaatgatcatcatcaaaacttatgtggctttttgacctttgaatagggaattttttaaattttttaaaaattaaaattaaaaaaacacatggctcacccttccaccca

SEQ ID NO: 148906 - DNA, 665 bp, Homo sapiens; identical to SEQ ID NO: 148809
  Payload ID: 9425
  Gene Symbol: LST1
  Gene Name: leukocyte specific transcript 1
  ENST ID: ENST00000448381
  CDS Start-End: 184-432

SEQ ID NO: 148907 - DNA, 665 bp, Homo sapiens; identical to SEQ ID NO: 148809
  Payload ID: 9425
  Gene Symbol: LST1
  Gene Name: leukocyte specific transcript 1
  ENST ID: ENST00000425260
  CDS Start-End: 184-432

SEQ ID NO: 148908 - DNA, 565 bp, Homo sapiens; identical to SEQ ID NO: 148794
  Payload ID: 9425
  Gene Symbol: LST1
  Gene Name: leukocyte specific transcript 1
  Uniprot ID: O00453
  ENST ID: ENST00000413426
  CDS Start-End: 200-241

SEQ ID NO: 148909 - DNA, 726 bp, Homo sapiens; identical to SEQ ID NO: 148861
  Payload ID: 9425
  Gene Symbol: LST1
  Gene Name: leukocyte specific transcript 1
  Uniprot ID: O00453
  ENST ID: ENST00000448441
  CDS Start-End: 293-493

SEQ ID NO: 148910 - DNA, 764 bp, Homo sapiens; identical to SEQ ID NO: 148819
  Payload ID: 9425
  Gene Symbol: LST1
  Gene Name: leukocyte specific transcript 1
  Uniprot ID: O00453
  ENST ID: ENST00000453995
  CDS Start-End: 238-531

SEQ ID NO: 148911 - DNA, 648 bp, Homo sapiens; identical to SEQ ID NO: 148793
  Payload ID: 9425
  Gene Symbol: LST1
  Gene Name: leukocyte specific transcript 1
  Uniprot ID: O00453
  ENST ID: ENST00000412623
  CDS Start-End: 101-415

SEQ ID NO: 148912 - DNA, 726 bp, Homo sapiens; identical to SEQ ID NO: 148861
  Payload ID: 9425
  Gene Symbol: LST1
  Gene Name: leukocyte specific transcript 1
  Uniprot ID: O00453
  ENST ID: ENST00000432009
  CDS Start-End: 293-493

SEQ ID NO: 148913 - DNA, 532 bp, Homo sapiens; identical to SEQ ID NO: 148798
  Payload ID: 9425
  Gene Symbol: LST1
  Gene Name: leukocyte specific transcript 1
  Uniprot ID: O00453
  ENST ID: ENST00000425760
  CDS Start-End: 101-208

SEQ ID NO: 148914 - DNA, 254 bp, Homo sapiens; identical to SEQ ID NO: 148845
  Payload ID: 9425
  Gene Symbol: LST1
  Gene Name: leukocyte specific transcript 1
  ENST ID: ENST00000444783
  CDS Start-End: 146-254

SEQ ID NO: 148915 - DNA, 668 bp, Homo sapiens; identical to SEQ ID NO: 148811
  Payload ID: 9425
  Gene Symbol: LST1
  Gene Name: leukocyte specific transcript 1
  Uniprot ID: O00453
  ENST ID: ENST00000447391
  CDS Start-End: 235-435

SEQ ID NO: 148916 - DNA, 254 bp, Homo sapiens; identical to SEQ ID NO: 148845
  Payload ID: 9425
  Gene Symbol: LST1
  Gene Name: leukocyte specific transcript 1
  ENST ID: ENST00000436969
  CDS Start-End: 146-254

SEQ ID NO: 148917 - DNA, 603 bp, Homo sapiens
  Payload ID: 9425
  Gene Symbol: LST1
  Gene Name: leukocyte specific transcript 1
  ENST ID: ENST00000455346
  CDS Start-End: 193-279
cacccacccaggcccaggctccttcccctccatcatccccttaccagcacctagaaccatccagggctgaaaagtcccctccaaaccacgtgatgaggaacttgaggcaagtcaccagcccctgatcatttcgcctaaaagagcaaggactagagttcctgacctccaggccagtccctgatccctgacctaatgttatcgcggaatgatggcccagggctcctcagagcaggaactccactatgcatctctgcagaggctgccagtgcccagcagtgagggacctgacctcaggggcagagacaagagaggcaccaaggaggatccaagagctgactatgcctgcattgctgagaacaaacccacctgagcaccccagacaccttcctcaacccaggcgggtggacagggtccccctgtggtccagccagtaaaaaccatggtccccccacttctgtgtctcagtcctctcagtccatctcgagcctccgttcaaaatgatcatcatcaaaacttatgtggctttttgacctttgaatagggaattttttaaattttttaaaaattaaaattaaaaaaacacatggctcacccttccaccca

SEQ ID NO: 148918 - DNA, 624 bp, Homo sapiens; identical to SEQ ID NO: 148803
  Payload ID: 9425
  Gene Symbol: LST1
  Gene Name: leukocyte specific transcript 1
  Uniprot ID: O00453
  ENST ID: ENST00000420333
  CDS Start-End: 121-300

SEQ ID NO: 148919 - DNA, 726 bp, Homo sapiens; identical to SEQ ID NO: 148861
  Payload ID: 9425
  Gene Symbol: LST1
  Gene Name: leukocyte specific transcript 1
  Uniprot ID: O00453
  ENST ID: ENST00000433676
  CDS Start-End: 293-493

SEQ ID NO: 148920 - DNA, 624 bp, Homo sapiens; identical to SEQ ID NO: 148803
  Payload ID: 9425
  Gene Symbol: LST1
  Gene Name: leukocyte specific transcript 1
  Uniprot ID: O00453
  ENST ID: ENST00000443655
  CDS Start-End: 121-300

SEQ ID NO: 148921 - DNA, 689 bp, Homo sapiens; identical to SEQ ID NO: 148791
  Payload ID: 9425
  Gene Symbol: LST1
  Gene Name: leukocyte specific transcript 1
  ENST ID: ENST00000451371
  CDS Start-End: 279-365

SEQ ID NO: 148922 - DNA, 764 bp, Homo sapiens; identical to SEQ ID NO: 148819
  Payload ID: 9425
  Gene Symbol: LST1
  Gene Name: leukocyte specific transcript 1
  Uniprot ID: O00453
  ENST ID: ENST00000437137
  CDS Start-End: 238-531

SEQ ID NO: 148923 - DNA, 624 bp, Homo sapiens; identical to SEQ ID NO: 148803
  Payload ID: 9425
  Gene Symbol: LST1
  Gene Name: leukocyte specific transcript 1
  Uniprot ID: O00453
  ENST ID: ENST00000422533
  CDS Start-End: 121-300

SEQ ID NO: 148924 - DNA, 610 bp, Homo sapiens; identical to SEQ ID NO: 148795
  Payload ID: 9425
  Gene Symbol: LST1
  Gene Name: leukocyte specific transcript 1
  ENST ID: ENST00000441216
  CDS Start-End: 200-286

SEQ ID NO: 148925 - DNA, 689 bp, Homo sapiens; identical to SEQ ID NO: 148791
  Payload ID: 9425
  Gene Symbol: LST1
  Gene Name: leukocyte specific transcript 1
  ENST ID: ENST00000427164
  CDS Start-End: 279-365

SEQ ID NO: 148926 - DNA, 571 bp, Homo sapiens
  Payload ID: 9425
  Gene Symbol: LST1
  Gene Name: leukocyte specific transcript 1
  Uniprot ID: O00453
  ENST ID: ENST00000428227
  CDS Start-End: 138-338
tgataccctatgttctggggattagcagtgaggaatgatgaggaacttgaggcaagtcaccagcccctgatcatttcgcctaaaagagcaaggactagagttcctgacctccaggccagtccctgatccctgacctaatgttatcgcggaatgatgtaaagaggctggagaggagctgggcccagggctcctcagagcaggaactccactatgcatctctgcagaggctgccagtgcccagcagtgagggacctgacctcaggggcagagacaagagaggcaccaaggaggatccaagagctgactatgcctgcattgctgagaacaaacccacctgagcaccccagacaccttcctcaacccaggcgggtggacagggtccccctgtggtccagccagtaaaaaccatggtccccccacttctgtgtctcagtcctctcagtccatctcgagcctccgttcaaaatgatcatcatcaaaacttatgtggctttttgacctttgaatagggaattttttaaattttttaaaaattaaaataaaaaaaacacatggctcacccttccaccca

SEQ ID NO: 148927 - DNA, 764 bp, Homo sapiens; identical to SEQ ID NO: 148819
  Payload ID: 9425
  Gene Symbol: LST1
  Gene Name: leukocyte specific transcript 1
  Uniprot ID: O00453
  ENST ID: ENST00000434314
  CDS Start-End: 238-531

SEQ ID NO: 148928 - DNA, 555 bp, Homo sapiens; identical to SEQ ID NO: 148797
  Payload ID: 9425
  Gene Symbol: LST1
  Gene Name: leukocyte specific transcript 1
  Uniprot ID: O00453
  ENST ID: ENST00000420676
  CDS Start-End: 101-322

SEQ ID NO: 148929 - DNA, 665 bp, Homo sapiens
  Payload ID: 9425
  Gene Symbol: LST1
  Gene Name: leukocyte specific transcript 1
  ENST ID: ENST00000449799
  CDS Start-End: 184-432
gaaagtgcccagctcagggttggcacataagggaggctccccagcctgggaacgattataacagagggcccctcacttcacagatgaggaacttgaggcaagtcaccagcccctgatcatttcgcctaaaagagcaaggactagagttcctgacctccaggccagtccctgatccctgacctaatgttatcgcggaatgatgatatatgtatctacgggggcctggggctgggcgggctcctgcttctggcagtggtccttctgtccgcctgcctgtgttggctgcatcgaagagtaaagaggctggagaggagctggaggctgccagtgcccagcagtgagggacctgacctcaggggcagagacaagagaggcaccaaggaggatccaagagctgactatgcctgcattgctgagaacaaacccacctgagcaccccagacaccttcctcaacccaggcgggtggacagggtccccctgtggtccagccagtaaaaaccatggtccccccacttctgtgtctcagtcctctcagtccatctcgagcctccgttcaaaatgatcatcatcaaaacttatgtggctttttgacctttgaatagggaattttttaaattttttaaaaattaaaataaaaaaaacacatggctcacccttccaccca

SEQ ID NO: 148930 - DNA, 455 bp, Homo sapiens; identical to SEQ ID NO: 148830
  Payload ID: 9425
  Gene Symbol: LST1
  Gene Name: leukocyte specific transcript 1
  ENST ID: ENST00000448633
  CDS Start-End: 1-131

SEQ ID NO: 148931 - DNA, 689 bp, Homo sapiens
  Payload ID: 9425
  Gene Symbol: LST1
  Gene Name: leukocyte specific transcript 1
  ENST ID: ENST00000453830
  CDS Start-End: 279-365
ggtgacctagtaaagtccaggcttgaatctcgggtctttacttgggcaacgggcaccatgataccctatgttctggggattagcagtgaggaatggaaagtgcccagctcagggttggcacataagggaggctccccagcctgggaacgattataacagagggcccctcacttcacagatgaggaacttgaggcaagtcaccagcccctgatcatttcgcctaaaagagcaaggactagagttcctgacctccaggccagtccctgatccctgacctaatgttatcgcggaatgatggcccagggctcctcagagcaggaactccactatgcatctctgcagaggctgccagtgcccagcagtgagggacctgacctcaggggcagagacaagagaggcaccaaggaggatccaagagctgactatgcctgcattgctgagaacaaacccacctgagcaccccagacaccttcctcaacccaggcgggtggacagggtccccctgtggtccagccagtaaaaaccatggtccccccacttctgtgtctcagtcctctcagtccatctcgagcctccgttcaaaatgatcatcatcaaaacttatgtggctttttgacctttgaatagggaattttttaaattttttaaaaattaaaataaaaaaaacacatggctcacccttccaccca

SEQ ID NO: 148932 - DNA, 619 bp, Homo sapiens; identical to SEQ ID NO: 148805
  Payload ID: 9425
  Gene Symbol: LST1
  Gene Name: leukocyte specific transcript 1
  ENST ID: ENST00000429639
  CDS Start-End: 209-295

SEQ ID NO: 148933 - DNA, 668 bp, Homo sapiens; identical to SEQ ID NO: 148811
  Payload ID: 9425
  Gene Symbol: LST1
  Gene Name: leukocyte specific transcript 1
  Uniprot ID: O00453
  ENST ID: ENST00000440323
  CDS Start-End: 235-435

SEQ ID NO: 148934 - DNA, 585 bp, Homo sapiens; identical to SEQ ID NO: 148813
  Payload ID: 9425
  Gene Symbol: LST1
  Gene Name: leukocyte specific transcript 1
  Uniprot ID: O00453
  ENST ID: ENST00000415419
  CDS Start-End: 197-352

SEQ ID NO: 148935 - DNA, 726 bp, Homo sapiens
  Payload ID: 9425
  Gene Symbol: LST1
  Gene Name: leukocyte specific transcript 1
  Uniprot ID: O00453
  ENST ID: ENST00000450425
  CDS Start-End: 293-493
gaaaagaaagatgttgtaaccctaaccctggagccgaacttcctctcctaacaatgctggggaggaacccaggctgggggagaagttaaagccagaggaggggcaggaatgtctgaggtggcaacacttctcttcagccagacagcactggccagtttggagtctgtccatcctgcaggccacaagctctggatgaggaacttgaggcaagtcaccagcccctgatcatttcgcctaaaagagcaaggactagagttcctgacctccaggccagtccctgatccctgacctaatgttatcgcggaatgatgtaaagaggctggagaggagctgggcccagggctcctcagagcaggaactccactatgcatctctgcagaggctgccagtgcccagcagtgagggacctgacctcaggggcagagacaagagaggcaccaaggaggatccaagagctgactatgcctgcattgctgagaacaaacccacctgagcaccccagacaccttcctcaacccaggcgggtggacagggtccccctgtggtccagccagtaaaaaccatggtccccccacttctgtgtctcagtcctctcagtccatctcgagcctccgttcaaaatgatcatcatcaaaacttatgtggctttttgacctttgaatagggaattttttaaattttttaaaaattaaaattaaaaaaacacatggctcacccttccaccca

SEQ ID NO: 148936 - DNA, 689 bp, Homo sapiens
  Payload ID: 9425
  Gene Symbol: LST1
  Gene Name: leukocyte specific transcript 1
  ENST ID: ENST00000426298
  CDS Start-End: 279-365
ggtgacctagtaaagtccaggcttgaatctcgggtctttacttgggcaacgggcaccatgataccctatgttctggggattagcagtgaggaatggaaagtgcccagctcagggttggcacataagggaggctccccagcctgggaacgattataacagagggcccctcacttcacagatgaggaacttgaggcaagtcaccagcccctgatcatttcgcctaaaagagcaaggactagagttcctgacctccaggccagtccctgatccctgacctaatgttatcgcggaatgatggcccagggctcctcagagcaggaactccactatgcatctctgcagaggctgccagtgcccagcagtgagggacctgacctcaggggcagagacaagagaggcaccaaggaggatccaagagctgactatgcctgcattgctgagaacaaacccacctgagcaccccagacaccttcctcaacccaggcgggtggacagggtccccctgtggtccagccagtaaaaaccatggtccccccacttctgtgtctcagtcctctcagtccatctcgagcctccgttcaaaatgatcatcatcaaaacttatgtggctttttgacctttgaatagggaattttttaaattttttaaaaattaaaattaaaaaaacacatggctcacccttccaccca

SEQ ID NO: 148937 - DNA, 726 bp, Homo sapiens; identical to SEQ ID NO: 148861
  Payload ID: 9425
  Gene Symbol: LST1
  Gene Name: leukocyte specific transcript 1
  Uniprot ID: O00453
  ENST ID: ENST00000455655
  CDS Start-End: 293-493

SEQ ID NO: 148938 - DNA, 624 bp, Homo sapiens
  Payload ID: 9425
  Gene Symbol: LST1
  Gene Name: leukocyte specific transcript 1
  Uniprot ID: O00453
  ENST ID: ENST00000449273
  CDS Start-End: 121-300
gggattagcagtgaggaatgatgaggaacttgaggcaagtcaccagcccctgatcatttcgcctaaaagagcaaggactagagttcctgacctccaggccagtccctgatccctgacctaatgttatcgcggaatgatgatatatgtatctacgggggcctggggctgggcgggctcctgcttctggcagtggtccttctgtccgcctgcctgtgttggctgcatcgaagaggcccagggctcctcagagcaggaactccactatgcatctctgcagaggctgccagtgcccagcagtgagggacctgacctcaggggcagagacaagagaggcaccaaggaggatccaagagctgactatgcctgcattgctgagaacaaacccacctgagcaccccagacaccttcctcaacccaggcgggtggacagggtccccctgtggtccagccagtaaaaaccatggtccccccacttctgtgtctcagtcctctcagtccatctcgagcctccgttcaaaatgatcatcatcaaaacttatgtggctttttgacctttgaatagggaattttttaaattttttaaaaattaaaataaaaaaaacacatggctcacccttccaccca

SEQ ID NO: 148939 - DNA, 610 bp, Homo sapiens; identical to SEQ ID NO: 148795
  Payload ID: 9425
  Gene Symbol: LST1
  Gene Name: leukocyte specific transcript 1
  ENST ID: ENST00000414821
  CDS Start-End: 200-286

SEQ ID NO: 148940 - DNA, 764 bp, Homo sapiens
  Payload ID: 9425
  Gene Symbol: LST1
  Gene Name: leukocyte specific transcript 1
  Uniprot ID: O00453
  ENST ID: ENST00000427507
  CDS Start-End: 238-531
gctggggaggaacccaggctgggggagaagttaaagccagaggaggggcaggaatgtctgaggtggcaacacttctcttcagccagacagcactggccagtttggagtctgtccatcctgcaggccacaagctctggatgaggaacttgaggcaagtcaccagcccctgatcatttcgcctaaaagagcaaggactagagttcctgacctccaggccagtccctgatccctgacctaatgttatcgcggaatgatgatatatgtatctacgggggcctggggctgggcgggctcctgcttctggcagtggtccttctgtccgcctgcctgtgttggctgcatcgaagagtaaagaggctggagaggagctgggcccagggctcctcagagcaggaactccactatgcatctctgcagaggctgccagtgcccagcagtgagggacctgacctcaggggcagagacaagagaggcaccaaggaggatccaagagctgactatgcctgcattgctgagaacaaacccacctgagcaccccagacaccttcctcaacccaggcgggtggacagggtccccctgtggtccagccagtaaaaaccatggtccccccacttctgtgtctcagtcctctcagtccatctcgagcctccgttcaaaatgatcatcatcaaaacttatgtggctttttgacctttgaatagggaattttttaaattttttaaaaattaaaattaaaaaaacacatggctcacccttccaccca

SEQ ID NO: 148941 - DNA, 734 bp, Homo sapiens; identical to SEQ ID NO: 148799
  Payload ID: 9425
  Gene Symbol: LST1
  Gene Name: leukocyte specific transcript 1
  Uniprot ID: O00453
  ENST ID: ENST00000452169
  CDS Start-End: 210-410

SEQ ID NO: 148942 - DNA, 278 bp, Homo sapiens
  Payload ID: 9425
  Gene Symbol: LST1
  Gene Name: leukocyte specific transcript 1
  ENST ID: ENST00000464044
  CDS Start-End: 1-106
gggcgggctcctgcttctggcagtggtccttctgtccgcctgcctgtgttggctgcatcgaagagaggctggagaggagctggaggctgccagtgcccagcagtgagggacctgacctcaggggcagagacaagagaggcaccaaggaggatccaagagctgactatgcctgcattgctgagaacaaacccacctgagcaccccagacaccttcctcaacccaggcgggtggacagggtccccctgtggtccagccagtaaaaaccatggtcccccca

SEQ ID NO: 148943 - DNA, 273 bp, Homo sapiens
  Payload ID: 9425
  Gene Symbol: LST1
  Gene Name: leukocyte specific transcript 1
  ENST ID: ENST00000490742
  CDS Start-End: 1-182
atgatatatgtatctacgggggcctggggctgggcgggctcctgcttctggcagtggtccttctgtccgcctgcctgtgttggctgcatcgaagagaggctggagaggagctgggcccagggctcctcagagcaggaactccactatgcatctctgcagaggctgccagtgcccagcagtgagggacctgacctcaggggcagagacaagagaggcaccaaggaggatccaagagctgactatgcctgcattgctgagaacaaacccacctga

SEQ ID NO: 148944 - DNA, 1467 bp, Homo sapiens
  Payload ID: 9426
  Gene Symbol: LAIR1
  Gene Name: leukocyte-associated immunoglobulin-like receptor 1
  Uniprot ID: Q6GTX8
  ENST ID: ENST00000348231
  CDS Start-End: 62-874
gcagagttctgtccttgcattggtgcgcctcaggccaggctgcactgctgggacctgggccatgtctccccaccccaccgccctcctgggcctagtgctctgcctggcccagaccatccacacgcaggaggaagatctgcccagaccctccatctcggctgagccaggcaccgtgatccccctggggagccatgtgactttcgtgtgccggggcccggttggggttcaaacattccgcctggagagggacagtagatccacatacaatgatactgaagatgtgtctcaagctagtccatctgagtcagaggccagattccgcattgactcagtaagagaaggaaatgccgggctttatcgctgcatctattataagccccctaaatggtctgagcagagtgactacctggagctgctggtgaaaggacccacgcagaggccgtcggacaacagtcacaatgagcatgcacctgcttcccaaggcctgaaagctgagcatctgtatattctcatcggggtctcagtggtcttcctcttctgtctcctcctcctggtcctcttctgcctccatcgccagaatcagataaagcaggggccccccagaagcaaggacgaggagcagaagccacagcagaggcctgacctggctgttgatgttctagagaggacagcagacaaggccacagtcaatggacttcctgagaaggacagagagacggacacctcggccctggctgcagggagttcccaggaggtgacgtatgctcagctggaccactgggccctcacacagaggacagcccgggctgtgtccccacagtccacaaagcccatggccgagtccatcacgtatgcagccgttgccagacactgaccccatacccacctggcctctgcacctgagggtagaaagtcactctaggaaaagcctgaagcagccatttggaaggcttcctgttggattcctcttcatctagaaagccagccaggcagctgtcctggagacaagagctggagactggaggtttctaaccagcatccagaaggttcgttagccaggtggtcccttctacaatcgagcagctccttggacagactgtttctcagttatttccagagacccagctacagttccctggctgtttctagagacccagctttattcacctgactgtttccagagacccagctaaagtcacctgcctgttctaaaggcccagctacagccaatcagccgatttcctgagcagtgatgccacctccaagcttgtcctaggtgtctgctgtgaacctccagtgaccccagagactttgctgtaattatctgccctgctgaccctaaagaccttcctagaagtcaagagctagccttgagactgtgctatacacacacagctgagagccaagcccagttctctgggttgtgctttactccacgcatcaataaataattttgaaggcctcaca

SEQ ID NO: 148945 - DNA, 1511 bp, Homo sapiens
  Payload ID: 9426
  Gene Symbol: LAIR1
  Gene Name: leukocyte-associated immunoglobulin-like receptor 1
  ENST ID: ENST00000313038
  CDS Start-End: 175-1017
ccacagcgcaggctggaggtggcagcccgtggaaagccaagttcatccaccatcggagcccaggccaggctgccaaggctaatattcaggacaaagccaggcacaggtcgggaatcctatgaagatgatcatcgtcctgaggtcttccttccagggttgcatccgcgacagaagatggaaagagaaatggtgctctgcctggcccagaccatccacacgcaggaggatctgcccagaccctccatctcggctgagccaggcaccgtgatccccctggggagccatgtgactttcgtgtgccggggcccggttggggttcaaacattccgcctggagagggagagtagatccacatacaatgatactgaagatgtgtctcaagctagtccatctgagtcagaggccagattccgcattgactcagtaagtgaaggaaatgccgggccttatcgctgcatctattataagccccctaaatggtctgagcagagtgactacctggagctgctggtgaaagaaacctctggaggcccggactccccggacacagagcccggctcctcagctggacccacgcagaggccgtcggacaacagtcacaatgagcatgcacctgcttcccaaggcctgaaagctgagcatctgtatattctcatcggggtctcagtggtcttcctcttctgtctcctcctcctggtcctcttctgcctccatcgccagaatcagataaagcaggggccccccagaagcaaggacgaggagcagaagccacagcagaggcctgacctggctgttgatgttctagagaggacagcagacaaggccacagtcaatggacttcctgagaaggacagagagacggacacctcggccctggctgcagggagttcccaggaggtgacgtatgctcagctggaccactgggccctcacacagaggacagcccgggctgtgtccccacagtccacaaagcccatggccgagtccatcacgtatgcagccgttgccagacactgaccccatacccacctggcctctgcacctgagggtagaaagtcactctaggaaaagcctgaagcagccatttggaaggcttcctgttggattcctcttcatctagaaagccagccaggcagctgtcctggagacaagagctggagactggaggtttctaaccagcatccagaaggttcgttagccaggtggtcccttctacaatcgagcagctccttggacagactgtttctcagttatttccagagacccagctacagttccctggctgtttctagagacccagctttattcacctgactgtttccagagacccagctaaagtcacctgcctgttctaaaggcccagctacagccaatcagccgatttcctgagcagtgatgccacctccaagcttgtcctaggtgtctgctgtgaacctccagtgaccccagagactttgctgtaattatctgccctgctgaccctaaagaccttcctagaagtcaagagctag

SEQ ID NO: 148946 - DNA, 846 bp, Homo sapiens
  Payload ID: 9426
  Gene Symbol: LAIR1
  Gene Name: leukocyte-associated immunoglobulin-like receptor 1
  ENST ID: ENST00000391741
  CDS Start-End: 67-450
ctgctgcagagttctgtccttgcattggtgcgcctcaggccaggctgcactgctgggacctgggccatgtctccccaccccaccgccctcctgggcctagtgctctgcctggcccagaccatccacacgcaggaggaagatctgcccagaccctccatctcggctgagccaggcaccgtgatccccctggggagccatgtgactttcgtgtgccggggcccggttggggttcaaacattccgcctggagagggacagtagatccacatacaatgatactgaagatgtgtctcaagctagtccatctgagtcagaggccagattccgcattgactcaaaagctctggaggcccggactccccggacacagagcccggctcctcagctggacccacgcagaggccgtcggacaacagtcacaatgagcatgcacctgcttcccaaggcctgaaagctgagcatctgtatattctcatcggggtctcagtggtcttcctcttctgtctcctcctcctggtcctcttctgcctccatcgccagaatcagataaagcaggggccccccagaagcaaggacgaggagcagaagccacagcagaggcctgacctggctgttgatgttctagagaggacagcagacaaggccacagtcaatggacttcctgagaaggacagagagacggacacctcggccctggctgcagggagttcccaggaggtgacgtatgctcagctggaccactgggccctcacacagaggacagcccgggctgtgtccccacagtccacaaagcccatggccgagtccatcacgtatgcagccgttgccagacactgaccccataccc

SEQ ID NO: 148947 - DNA, 4901 bp, Homo sapiens
  Payload ID: 9426
  Gene Symbol: LAIR1
  Gene Name: leukocyte-associated immunoglobulin-like receptor 1
  Uniprot ID: Q6GTX8
  ENST ID: ENST00000391742
  CDS Start-End: 154-1017
agaaagctcttcctcttgtgtgaggcagttgctgtggaagccccataggcaggaggcccccgggcagcacatcctgtctgcttgtgtctgctgcagagttctgtccttgcattggtgcgcctcaggccaggctgcactgctgggacctgggccatgtctccccaccccaccgccctcctgggcctagtgctctgcctggcccagaccatccacacgcaggaggaagatctgcccagaccctccatctcggctgagccaggcaccgtgatccccctggggagccatgtgactttcgtgtgccggggcccggttggggttcaaacattccgcctggagagggacagtagatccacatacaatgatactgaagatgtgtctcaagctagtccatctgagtcagaggccagattccgcattgactcagtaagagaaggaaatgccgggctttatcgctgcatctattataagccccctaaatggtctgagcagagtgactacctggagctgctggtgaaagaaagctctggaggcccggactccccggacacagagcccggctcctcagctggacccacgcagaggccgtcggacaacagtcacaatgagcatgcacctgcttcccaaggcctgaaagctgagcatctgtatattctcatcggggtctcagtggtcttcctcttctgtctcctcctcctggtcctcttctgcctccatcgccagaatcagataaagcaggggccccccagaagcaaggacgaggagcagaagccacagcagaggcctgacctggctgttgatgttctagagaggacagcagacaaggccacagtcaatggacttcctgagaaggacagagagacggacacctcggccctggctgcagggagttcccaggaggtgacgtatgctcagctggaccactgggccctcacacagaggacagcccgggctgtgtccccacagtccacaaagcccatggccgagtccatcacgtatgcagccgttgccagacactgaccccatacccacctggcctctgcacctgagggtagaaagtcactctaggaaaagcctgaagcagccatttggaaggcttcctgttggattcctcttcatctagaaagccagccaggcagctgtcctggagacaagagctggagactggaggtttctaaccagcatccagaaggttcgttagccaggtggtcccttctacaatcgagcagctccttggacagactgtttctcagttatttccagagacccagctacagttccctggctgtttctagagacccagctttattcacctgactgtttccagagacccagctaaagtcacctgcctgttctaaaggcccagctacagccaatcagccgatttcctgagcagtgatgccacctccaagcttgtcctaggtgtctgctgtgaacctccagtgaccccagagactttgctgtaattatctgccctgctgaccctaaagaccttcctagaagtcaagagctagccttgagactgtgctatacacacacagctgagagccaagcccagttctctgggttgtgctttactccacgcatcaataaataattttgaaggcctcacatctggcagccccaggcctggtcctgggtgcataggtctctcggacccactctctgccttcacagttgttcaaagctgagtgagggaaacaggacttacgaaaacgtgtcagcgttttctttttaaaatttaattgatcaggattgtacgtattcaaggtgtaaaatgtgataatttgtcgtacacgtacattgtgcaatgacagtcacaatcaattcctcagcgcacccatcgccacagatacgatacattagatattctgaacttgctcatcttaggacttcacattggtgtcagtgttttctgacaaatcacgtgtatcaggaatgaatgagggaggtgtggctgggtgaaggcagagagccgaccctacaggtccacatctgcacatacatgcacaggaatgcatgctctcacacacatgcatacacacacgcacacacacagacatgcacatacactcacacgccccaggaaatccaaggaatcactgagcctgctgttggttgaggcatttctgagtatccaccctacctgtagggtcagatgtactgattgacacagaaaattaccctatgtaccactaggaggcggcagaatctcatttgggttaatctgtgtttgtctttaaaaaacaaaaacaggccgggcatggaggctcacgcctgtaatcccagcactttgggaggctgaggtgggcggatcacgaggtcaggagatcgagaccatcctggctaacacggtgaaaccccatctctactaaaaatacaaaaaaattagccgggtgtggtggtgggtgcctgtagtcccagctactcgggaggctgagggaggagaatggcgtgaacccgggaggcggagtttgcagtgagccgaggtggtgccactgcactccagcctgggcgacagagcgagactccgtcaaaaaagaaaagaaaagaaaagaaagatttttaagaattcagcaaaaactcagccagctctttctatggggcagttgctaatttagttctaggcaaacgtggacacattaaattctcctacaaaccctccacagcgtgctctattattttcctcatttataaaaacagaaactatggaccgagacatgaagtaacctgtccaaggtcggccaagtctcagagacaggggcttcagacccacctgaggctcctgactccacattatgaaccccgggatgggctgcagctcggtctgctgggaggtttctgtgctggttcaaagagggtggtacctgactggcctacccaattttaatttgtactgagctttaattttctatttgtgctcaggtttaatttcctcctgggatctgcttcccagtgctgtactctgtatctttgctttcttgtgtgaacattgtgaccgattttccctgttcttcacgtgggacacattctccctgctctgtctgtctctgtccctgtctctctttctgtctttctctctcactgtgtgtctctctgtctctctctctctttttttttttttttgagatggagtttcgctcttgttgcccaggctggagtgcaatggcacaatcttggctcactgcaacctctgcctcccgggttcaagcgattctcctgcctcagcctcctgagcagctgggattacaggcatgcaccaccacacacggctaattttttgtatttttgttagagacggggggctctccatgttgctcaggctggtcttgaactcccgacctcaggtgatctgcccacctcagcctcccaaagtcctgggattacaggcatgagccactgcgtccagccgtctttgtctctttttctacatctctgtctttcttctctggttgtttttcaaccatcagctgggtgttttctcccataacgtcttgtttgtttgactatgaggttgacaggtgggtacatgaactctatagcagaaggtggacagtctgcacatagcagaggatgggtgaatttttctaccccttgcagagcacaggagagctgagcagatgccagtgtctgctccagtgtaaggaagtccaggaagttcaggtggtgaggtcacagtggaaagcaggacagatagagtttaggggaaattaagcaaaaataccacactgttatttcttgacatattagtggaaagaggaagggcccagagagaagacagaaaattagatgcaggggcttgttttttctcttgacttgccaacccgcccaacgcaggggccagaactcagggtggtgagatctgggaacattgctgtgcggagaagatgtccctcctgctgcacgggcccccaagcaccacctgggggaagagccatgtttaattcacctggcagtgcagtgtggccaggcagagagggagggcctaccctgtgcttatgatcccaccccagttcccctggggtgtgccctggcggtgaacaccaggaggctgcagtggggcccaacgtgaaagggaggagcagcctcaccggggccagatggggcagcagcagatattcacagatgtccctgtgagtaaccagggcagaggccaggggtctggccttccctttcttggagccctgggccagctgggcaaggcgttgagagaaagattacccggtgacctttatcaaagcagagtaaggagggctttattcagaaccatcactgtaggtaccaggaccccagcggtgggattttgtagtaggggaaagaaaatgggctcgacgttgaatacagcatgaacaagtgagaatgtttgttatacaaactatagggtggactttttttttcttttttttaacttttttttaccttttagtgtaaaactgaacatagaaaataaattcatgaagaagggatattttctgagggtgtccagggctgcccaacacctcgtctaccttctctgtcatagccccatttaaaacactctctctggatgaatacaccaaacctcacagtctttgctctcttgctaggaagaggagcaagagcgtgtttcactcttggctcctgcttacacacctgctgtccaatggaaactactacttaagacatttaaaaatagttgtggtgatagcatgttgtgttttggttggtgatgccagttagtctctgaaaactttctgtgatgagtgtaaaattctacaccttaatctcctttcttgtaggatctgggaagcagtatgcacttgattgcaccaaagattttacgttcatagaaaatttctggcatctgtgtgaagaaagtaaactatatcttccatttagacaaataaaatatctttttgataaaa

SEQ ID NO: 148948 - DNA, 2735 bp, Homo sapiens
  Payload ID: 9426
  Gene Symbol: LAIR1
  Gene Name: leukocyte-associated immunoglobulin-like receptor 1
  ENST ID: ENST00000391743
  CDS Start-End: 282-1091
tggtatagcagaagctttttcacatctatgacacccgctatgtcttggtaaaccctggaagggaaaggaggacaaggttaaaatactgttccgaggacctggtctctccacagcgcaggctggaggtggcagcccgtggaaagccaagttcatccaccatcggagcccaggccaggctgccaaggctaatattcaggacaaagccaggcacaggtcgggaatcctatgaagatgatcatcgtcctgaggtcttccttccagggttgcatccgcgacagaagatggaaagagaaatggaagatctgcccagaccctccatctcggctgagccaggcaccgtgatccccctggggagccatgtgactttcgtgtgccggggcccggttggggttcaaacattccgcctggagagggacagtagatccacatacaatgatactgaagatgtgtctcaagctagtccatctgagtcagaggccagattccgcattgactcagtaagagaaggaaatgccgggctttatcgctgcatctattataagccccctaaatggtctgagcagagtgactacctggagctgctggtgaaagaaagctctggaggcccggactccccggacacagagcccggctcctcagctggacccacgcagaggccgtcggacaacagtcacaatgagcatgcacctgcttcccaaggcctgaaagctgagcatctgtatattctcatcggggtctcagtggtcttcctcttctgtctcctcctcctggtcctcttctgcctccatcgccagaatcagataaagcaggggccccccagaagcaaggacgaggagcagaagccacagcagaggcctgacctggctgttgatgttctagagaggacagcagacaaggccacagtcaatggacttcctgagaaggacagagagacggacacctcggccctggctgcagggagttcccaggaggtgacgtatgctcagctggaccactgggccctcacacagaggacagcccgggctgtgtccccacagtccacaaagcccatggccgagtccatcacgtatgcagccgttgccagacactgaccccatacccacctggcctctgcacctgagggtagaaagtcactctaggaaaagcctgaagcagccatttggaaggcttcctgttggattcctcttcatctagaaagccagccaggcagctgtcctggagacaagagctggagactggaggtttctaaccagcatccagaaggttcgttagccaggtggtcccttctacaatcgagcagctccttggacagactgtttctcagttatttccagagacccagctacagttccctggctgtttctagagacccagctttattcacctgactgtttccagagacccagctaaagtcacctgcctgttctaaaggcccagctacagccaatcagccgatttcctgagcagtgatgccacctccaagcttgtcctaggtgtctgctgtgaacctccagtgaccccagagactttgctgtaattatctgccctgctgaccctaaagaccttcctagaagtcaagagctagccttgagactgtgctatacacacacagctgagagccaagcccagttctctgggttgtgctttactccacgcatcaataaataattttgaaggcctcacatctggcagccccaggcctggtcctgggtgcataggtctctcggacccactctctgccttcacagttgttcaaagctgagtgagggaaacaggacttacgaaaacgtgtcagcgttttctttttaaaatttaattgatcaggattgtacgtattcaaggtgtaaaatgtgataatttgtcgtacacgtacattgtgcaatgacagtcacaatcaattcctcagcgcacccatcgccacagatacgatacattagatattctgaacttgctcatcttaggacttcacattggtgtcagtgttttctgacaaatcacgtgtatcaggaatgaatgagggaggtgtggctgggtgaaggcagagagccgaccctacaggtccacatctgcacatacatgcacaggaatgcatgctctcacacacatgcatacacacacgcacacacacagacatgcacatacactcacacgccccaggaaatccaaggaatcactgagcctgctgttggttgaggcatttctgagtatccaccctacctgtagggtcagatgtactgattgacacagaaaattaccctatgtaccactaggaggcggcagaatctcatttgggttaatctgtgtttgtctttaaaaaacaaaaacaggccgggcatggaggctcacgcctgtaatcccagcactttgggaggctgaggtgggcggatcacgaggtcaggagatcgagaccatcctggctaacacggtgaaaccccatctctactaaaaatacaaaaaaattagccgggtgtggtggtgggtgcctgtagtcccagctactcgggaggctgagggaggagaatggcgtgaacccgggaggcggagtttgcagtgagccgaggtggtgccactgcactccagcctgggcgacagagcgagactccgtcaaaaaagaaaagaaaagaaaagaaagatttttaagaattcagcaaaaactcagccagctctttctatggggcagttgctaatttagttctaggcaaacgtggacacattaaattctcctacaaaccctc

SEQ ID NO: 148949 - DNA, 1645 bp, Homo sapiens
  Payload ID: 9426
  Gene Symbol: LAIR1
  Gene Name: leukocyte-associated immunoglobulin-like receptor 1
  ENST ID: ENST00000434277
  CDS Start-End: 192-1052
tctcgtctcactagtgggaagggtggaaagaacaggacagaaagctcttcctcttgtgtgaggcagttgctgtggaagccccataggcaggaggcccccgggcagcacatcctgtctgcttgtgtctgctgcagagttctgtccttgcattggtgcgcctcaggccaggctgcactgctgggacctgggccatgtctccccaccccaccgccctcctgggcctagtgctctgcctggcccagaccatccacacgcaggaggatctgcccagaccctccatctcggctgagccaggcaccgtgatccccctggggagccatgtgactttcgtgtgccggggcccggttggggttcaaacattccgcctggagagggacagtagatccacatacaatgatactgaagatgtgtctcaagctagtccatctgagtcagaggccagattccgcattgactcagtaagagaaggaaatgccgggctttatcgctgcatctattataagccccctaaatggtctgagcagagtgactacctggagctgctggtgaaagaaagctctggaggcccggactccccggacacagagcccggctcctcagctggacccacgcagaggccgtcggacaacagtcacaatgagcatgcacctgcttcccaaggcctgaaagctgagcatctgtatattctcatcggggtctcagtggtcttcctcttctgtctcctcctcctggtcctcttctgcctccatcgccagaatcagataaagcaggggccccccagaagcaaggacgaggagcagaagccacagcagaggcctgacctggctgttgatgttctagagaggacagcagacaaggccacagtcaatggacttcctgagaaggacagagagacggacacctcggccctggctgcagggagttcccaggaggtgacgtatgctcagctggaccactgggccctcacacagaggacagcccgggctgtgtccccacagtccacaaagcccatggccgagtccatcacgtatgcagccgttgccagacactgaccccatacccacctggcctctgcacctgagggtagaaagtcactctaggaaaagcctgaagcagccatttggaaggcttcctgttggattcctcttcatctagaaagccagccaggcagctgtcctggagacaagagctggagactggaggtttctaaccagcatccagaaggttcgttagccaggtggtcccttctacaatcgagcagctccttggacagactgtttctcagttatttccagagacccagctacagttccctggctgtttctagagacccagctttattcacctgactgtttccagagacccagctaaagtcacctgcctgttctaaaggcccagctacagccaatcagccgatttcctgagcagtgatgccacctccaagcttgtcctaggtgtctgctgtgaacctccagtgaccccagagactttgctgtaattatctgccctgctgaccctaaagaccttcctagaagtcaagagctagccttgagactgtgctatacacacacagctgagagccaagcccagttctctgggttgtgctttactccacgcatcaataaataattttgaaggcctcaca

SEQ ID NO: 148950 - DNA, 494 bp, Homo sapiens
  Payload ID: 9426
  Gene Symbol: LAIR1
  Gene Name: leukocyte-associated immunoglobulin-like receptor 1
  ENST ID: ENST00000438193
  CDS Start-End: 215-494
gaggacaaggttaaaatactgttccgaggacctggtctctccacagcgcaggctggaggtggcagcccgtggaaagccaagttcatccaccatcggagcccaggccaggctgccaaggctaatattcaggacaaagccaggcacaggtcgggaatcctatgaagatgatcatcgtcctgaggtcttccttccagggttgcatccgcgacagaagatggaaagagaaatggtgctctgcctggcccagaccatccacacgcaggaggaagatctgcccagaccctccatctcggctgagccaggcaccgtgatccccctggggagccatgtgactttcgtgtgccggggcccggttggggttcaaacattccgcctggagagggacagtagatccacatacaatgatactgaagatgtgtctcaagctagtccatctgagtcagaggccagattccgcattgactcagtaagagaaggaaatgccgggctttatc

SEQ ID NO: 148951 - DNA, 533 bp, Homo sapiens
  Payload ID: 9426
  Gene Symbol: LAIR1
  Gene Name: leukocyte-associated immunoglobulin-like receptor 1
  ENST ID: ENST00000420483
  CDS Start-End: 128-262
agttgctgtggaagccccataggcaggaggcccccgggcagcacatcctgtctgcttgtgtctgctgcagagttctgtccttgcattggtgcgcctcaggccaggctgcactgctgggacctgggccatgtctccccaccccaccgccctcctgggcctagtgctctgcctggcccagaccatccacacgcaggaggtggacgctgagatcctgctctgcttccctcctagaagatctgcccagaccctccatctcggctgagccaggcaccgtgatccccctggggagccatgtgactttcgtgtgccggggcccggttggggttcaaacattccgcctggagagggacagtagatccacatacaatgatactgaagatgtgtctcaagctagtccatctgagtcagaggccagattccgcattgactcaaaagctctggaggcccggactccccggacacagagcccggctcctcagctggacccacgcagaggccgtcggacaacagtcacaatgagcatgcacctgctt

SEQ ID NO: 148952 - DNA, 650 bp, Homo sapiens
  Payload ID: 9426
  Gene Symbol: LAIR1
  Gene Name: leukocyte-associated immunoglobulin-like receptor 1
  ENST ID: ENST00000436513
  CDS Start-End: 128-262
agttgctgtggaagccccataggcaggaggcccccgggcagcacatcctgtctgcttgtgtctgctgcagagttctgtccttgcattggtgcgcctcaggccaggctgcactgctgggacctgggccatgtctccccaccccaccgccctcctgggcctagtgctctgcctggcccagaccatccacacgcaggaggtggacgctgagatcctgctctgcttccctcctagaagatctgcccagaccctccatctcggctgagccaggcaccgtgatccccctggggagccatgtgactttcgtgtgccggggcccggttggggttcaaacattccgcctggagagggacagtagatccacatacaatgatactgaagatgtgtctcaagctagtccatctgagtcagaggccagattccgcattgactcagtaagagaaggaaatgccgggctttatcgctgcatctattataagccccctaaatggtctgagcagagtgactacctggagctgctggtgaaagaaagctctggaggcccggactccccggacacagagcccggctcctcagctggacccacgcagaggccgtcggacaacagtcacaatgagcatgcacctgcttcccaaggcctgaaagctgagcat

SEQ ID NO: 148953 - DNA, 936 bp, Homo sapiens
  Payload ID: 9426
  Gene Symbol: LAIR1
  Gene Name: leukocyte-associated immunoglobulin-like receptor 1
  ENST ID: ENST00000418556
  CDS Start-End: 64-525
ctgcagagttctgtccttgcattggtgcgcctcaggccaggctgcactgctgggacctgggccatgtctccccaccccaccgccctcctgggcctagtgctctgcctggcccagaccatccacacgcaggaggaagatctgcccagaccctccatctcggctgagccaggcaccgtgatccccctggggagccatgtgactttcgtgtgccggggcccggttggggttcaaacattccgcctggagagggacagtagatccacatacaatgatactgaagatgtgtctcaagctagtccatctgagtcagaggccagattccgcattgactcagtaagagaaggaaatgccgggctttatcgctgcatctattataagccccctaaatggtctgagcagagtgactacctggagctgctggtgaaagaaagctctggaggcccggactccccggacacagagcccggctcctcagctggacccacgcagaggccgtcggacaacagtcacaatgagcgtgagtgatgggggccgtggagcatgaagctggtgtgtgcctcttggggaaggagaaagaggtcaggctttggggttgatcagattcctgctctgccaatggcagtctgtgtccctgtgcagaggactccagcactcaggaccccggtggtggaagaaggggataacgatccctgtactgcaggactattatttacctaagatattttatatattaatgcacctgcttcccaaggcctgaaagctgagcatctgtatattctcatcggggtctcagtggtcttcctcttctgtctcctcctcctggtcctcttctgcctccatcgccagaatcagataaagcaggggccccccagaagcaaggacgaggagcagaagccacagcagaggcctgacctggctgttgatgttctagagagg

SEQ ID NO: 148954 - DNA, 814 bp, Homo sapiens
  Payload ID: 9426
  Gene Symbol: LAIR1
  Gene Name: leukocyte-associated immunoglobulin-like receptor 1
  Uniprot ID: Q6GTX8
  ENST ID: ENST00000474878
  CDS Start-End: 4-813
gccatgtctccccaccccaccgccctcctgggcctagtgctctgcctggcccagaccatccacacgcaggaggatctgcccagaccctccatctcggctgagccaggcaccgtgatccccctggggagccatgtgactttcgtgtgccggggcccggttggggttcaaacattccgcctggagagggacagtagatccacatacaatgatactgaagatgtgtctcaagctagtccatctgagtcagaggccagattccgcattgactcagtaagagaaggaaatgccgggctttatcgctgcatctattataagccccctaaatggtctgagcagagtgactacctggagctgctggtgaaaggacccacgcagaggccgtcggacaacagtcacaatgagcatgcacctgcttcccaaggcctgaaagctgagcatctgtatattctcatcggggtctcagtggtcttcctcttctgtctcctcctcctggtcctcttctgcctccatcgccagaatcagataaagcaggggccccccagaagcaaggacgaggagcagaagccacagcagaggcctgacctggctgttgatgttctagagaggacagcagacaaggccacagtcaatggacttcctgagaaggacagagagacggacacctcggccctggctgcagggagttcccaggaggtgacgtatgctcagctggaccactgggccctcacacagaggacagcccgggctgtgtccccacagtccacaaagcccatggccgagtccatcacgtatgcagccgttgccagacactgac

SEQ ID NO: 148955 - DNA, 1823 bp, Homo sapiens
  Payload ID: 9426
  Gene Symbol: LAIR1
  Gene Name: leukocyte-associated immunoglobulin-like receptor 1
  ENST ID: ENST00000616413
  CDS Start-End: 216-1079
tttttcagaaaccaaggccctccctctcgtctcactagtgggaagggtggaaagaacaggacagaaagctcttcctcttgtgtgaggcagttgctgtggaagccccataggcaggaggcccccgggcagcacatcctgtctgcttgtgtctgctgcagagttctgtccttgcattggtgcgcctcaggccaggctgcactgctgggacctgggccatgtctccccaccccaccgccctcctgggcctagtgctctgcctggcccagaccatccacacgcaggaggaagatctgcccagaccctccatctcggctgagccaggcaccgtgatccccctggggagccatgtgactttcgtgtgccggggcccggttggggttcaaacattccgcctggagagggagagtagatccacatacaatgatactgaagatgtgtctcaagctagtccatctgagtcagaggccagattccgcattgactcagtaagtgaaggaaatgccgggccttatcgctgcatctattataagccccctaaatggtctgagcagagtgactacctggagctgctggtgaaagaaacctctggaggccgggactccccggacacagagcccggctcctcagctggacccacgcagaggccgtcggacaacagtcacaatgagcatgcacctgcttcccaaggcctgaaagctgagcatctgtatattctcatcggggtctcagtggtcttcctcttctgtctcctcctcctggtcctcttctgcctccatcgccagaatcagataaagcaggggccccccagaagcaaggacgaggagcagaagccacagcagaggcctgacctggctgttgatgttctagagaggacagcagacaaggccacagtcaatggacttcctgagaaggacagagagacagacacctcggccctggctgcagggagttcccaggaggtgacgtatgctcagctggaccactgggccctcacacagaggacagcccgggctgtgtccccacagtccacaaagcccatggccgagtccatcacgtatgcagccgttgccagacactgaccccatacccacctggcctctgcacctgagggtagaaagtcactctaggaaaagcctgaagcagccatttggaaggcttcctgttggattcctcttcatctagaaagccagccaggcagctgtcctggagacaagagctggagactggaggtttctaaccagcatccagaaggttcgttagccaggtggtcccttctacaatcgagcagctccttggacagactgtttctcagttatttccagagacccagctacagttccctggctgtttctagagacccagctttattcacctgactgtttccagagacccagctaaagtcacctgcctgttctaaaggcccagctacagccaatcagccgatttcctgagcagtgatgccacctccaagcttgtcctaggtgtctgctgtgaacctccagtgaccccagagactttgctgtaattatctgccctgctgaccctaaagaccttcctagaagtcaagagctagccttgagactgtgctatacacacacagctgagagccaagcccagttctctgggttgtgctttactccacgcatcaataaataattttgaaggcctcacatctggcagccccaggcctggtcctgggtgcataggtctctcggacccactctctgccttcacagttgttcaaagctgagtgagggaaacaggacctacgaaaacgtgtcagcgttttctttttaaaatttaattgatcaggattgtacgta

SEQ ID NO: 148956 - DNA, 482 bp, Homo sapiens
  Payload ID: 9426
  Gene Symbol: LAIR1
  Gene Name: leukocyte-associated immunoglobulin-like receptor 1
  ENST ID: ENST00000614880
  CDS Start-End: 128-262
agttgctgtggaagccccataggcaggaggcccccgggcagcacatcctgtctgcttgtgtctgctgcagagttctgtccttgcattggtgcgcctcaggccaggctgcactgctgggacctgggccatgtctccccaccccaccgccctcctgggcctagtgctctgcctggcccagaccatccacacgcaggaggtggacgctgagatcctgctctgcttccctcctagaagatctgcccagaccctccatctcggctgagccaggcaccgtgatccccctggggagccatgtgactttcgtgtgccggggcccggttggggttcaaacattccgcctggagagggagagtagatccacatacaatgatactgaagatgtgtctcaagctagtccatctgagtcagaggccagattccgcattgactcagacccacgcagaggccgtcggacaacagtcacaatgagcatgcacctgctt

SEQ ID NO: 148957 - DNA, 814 bp, Homo sapiens
  Payload ID: 9426
  Gene Symbol: LAIR1
  Gene Name: leukocyte-associated immunoglobulin-like receptor 1
  Uniprot ID: Q6GTX8
  ENST ID: ENST00000620726
  CDS Start-End: 4-813
gccatgtctccccaccccaccgccctcctgggcctagtgctctgcctggcccagaccatccacacgcaggaggatctgcccagaccctccatctcggctgagccaggcaccgtgatccccctggggagccatgtgactttcgtgtgccggggcccggttggggttcaaacattccgcctggagagggagagtagatccacatacaatgatactgaagatgtgtctcaagctagtccatctgagtcagaggccagattccgcattgactcagtaagtgaaggaaatgccgggccttatcgctgcatctattataagccccctaaatggtctgagcagagtgactacctggagctgctggtgaaaggacccacgcagaggccgtcggacaacagtcacaatgagcatgcacctgcttcccaaggcctgaaagctgagcatctgtatattctcatcggggtctcagtggtcttcctcttctgtctcctcctcctggtcctcttctgcctccatcgccagaatcagataaagcaggggccccccagaagcaaggacgaggagcagaagccacagcagaggcctgacctggctgttgatgttctagagaggacagcagacaaggccacagtcaatggacttcctgagaaggacagagagacagacacctcggccctggctgcagggagttcccaggaggtgacgtatgctcagctggaccactgggccctcacacagaggacagcccgggctgtgtccccacagtccacaaagcccatggccgagtccatcacgtatgcagccgttgccagacactgac

SEQ ID NO: 148958 - DNA, 885 bp, Homo sapiens
  Payload ID: 9426
  Gene Symbol: LAIR1
  Gene Name: leukocyte-associated immunoglobulin-like receptor 1
  ENST ID: ENST00000618524
  CDS Start-End: 64-474
ctgcagagttctgtccttgcattggtgcgcctcaggccaggctgcactgctgggacctgggccatgtctccccaccccaccgccctcctgggcctagtgctctgcctggcccagaccatccacacgcaggaggaagatctgcccagaccctccatctcggctgagccaggcaccgtgatccccctggggagccatgtgactttcgtgtgccggggcccggttggggttcaaacattccgcctggagagggagagtagatccacatacaatgatactgaagatgtgtctcaagctagtccatctgagtcagaggccagattccgcattgactcagtaagtgaaggaaatgccgggccttatcgctgcatctattataagccccctaaatggtctgagcagagtgactacctggagctgctggtgaaaggacccacgcagaggccgtcggacaacagtcacaatgagcgtgagtgatgggggccgtggagcatgaagctggtgtgtgcctcttggggaaggagaaagaggtcaggctttggggttgatcagattcctgctctgccaatggcagtctgtgtccctgtgcagaggactccagcactcaggaccccggtggtggaagaaggggataacgatccctgtactgcaggactattatttacctaagatattttatatattaatgcacctgcttcccaaggcctgaaagctgagcatctgtatattctcatcggggtctcagtggtcttcctcttctgtctcctcctcctggtcctcttctgcctccatcgccagaatcagataaagcaggggccccccagaagcaaggacgaggagcagaagccacagcagaggcctgacctggctgttgatgttctagagagg

SEQ ID NO: 148959 - DNA, 814 bp, Homo sapiens
  Payload ID: 9426
  Gene Symbol: LAIR1
  Gene Name: leukocyte-associated immunoglobulin-like receptor 1
  Uniprot ID: Q6GTX8
  ENST ID: ENST00000614946
  CDS Start-End: 4-813
gccatgtctccccaccccaccgccctcctgggcctagtgctctgcctggcccagaccatccacacgcaggaggatctgcccagaccctccatctcggctgagccaggcaccgtgatccccctggggagccatgtgactttcgtgtgccggggcccggttggggttcaaacattccgcctggagagggagagtagatccacatacaatgatactgaagatgtgtctcaagctagtccatctgagtcagaggccagattccgcattgactcagtaagtgaaggaaatgccgggccttatcgctgcatctattataagccccctaaatggtctgagcagagtgactacctggagctgctggtgaaaggacccacgcagaggccgtcggacaacagtcacaatgagcatgcacctgcttcccaaggcctgaaagctgagcatctgtatattctcatcggggtctcagtggtcttcctcttctgtctcctcctcctggtcctcttctgcctccatcgccagaatcagataaagcaggggccccccagaagcaaggacgaggagcagaagccacagcagaggcctgacctggctgttgatgttctagagaggacagcagacaaggccacagtcaatggacttcctgagaaggacagagagacggacacctcggccctggctgcagggagttcccaggaggtgacgtatgctcagctggaccactgggccctcacacagaggacagcccgggctgtgtccccacagtccacaaagcccatggccgagtccatcacgtatgcagccgttgccagacactgac

SEQ ID NO: 148960 - DNA, 795 bp, Homo sapiens
  Payload ID: 9426
  Gene Symbol: LAIR1
  Gene Name: leukocyte-associated immunoglobulin-like receptor 1
  ENST ID: ENST00000612909
  CDS Start-End: 67-399
ctgctgcagagttctgtccttgcattggtgcgcctcaggccaggctgcactgctgggacctgggccatgtctccccaccccaccgccctcctgggcctagtgctctgcctggcccagaccatccacacgcaggaggaagatctgcccagaccctccatctcggctgagccaggcaccgtgatccccctggggagccatgtgactttcgtgtgccggggcccggttggggttcaaacattccgcctggagagggagagtagatccacatacaatgatactgaagatgtgtctcaagctagtccatctgagtcagaggccagattccgcattgactcagacccacgcagaggccgtcggacaacagtcacaatgagcatgcacctgcttcccaaggcctgaaagctgagcatctgtatattctcatcggggtctcagtggtcttcctcttctgtctcctcctcctggtcctcttctgcctccatcgccagaatcagataaagcaggggccccccagaagcaaggacgaggagcagaagccacagcagaggcctgacctggctgttgatgttctagagaggacagcagacaaggccacagtcaatggacttcctgagaaggacagagagacggacacctcggccctggctgcagggagttcccaggaggtgacgtatgctcagctggaccactgggccctcacacagaggacagcccgggctgtgtccccacagtccacaaagcccatggccgagtccatcacgtatgcagccgttgccagacactgaccccataccc

SEQ ID NO: 148961 - DNA, 814 bp, Homo sapiens; identical to SEQ ID NO: 148957
  Payload ID: 9426
  Gene Symbol: LAIR1
  Gene Name: leukocyte-associated immunoglobulin-like receptor 1
  Uniprot ID: Q6GTX8
  ENST ID: ENST00000614937
  CDS Start-End: 4-813

SEQ ID NO: 148962 - DNA, 1726 bp, Homo sapiens
  Payload ID: 9426
  Gene Symbol: LAIR1
  Gene Name: leukocyte-associated immunoglobulin-like receptor 1
  Uniprot ID: Q6GTX8
  ENST ID: ENST00000618434
  CDS Start-End: 119-982
ggaagccccataggcaggaggcccccgggcagcacatcctgtctgcttgtgtctgctgcagagttctgtccttgcattggtgcgcctcaggccaggctgcactgctgggacctgggccatgtctccccaccccaccgccctcctgggcctagtgctctgcctggcccagaccatccacacgcaggaggaagatctgcccagaccctccatctcggctgagccaggcaccgtgatccccctggggagccatgtgactttcgtgtgccggggcccggttggggttcaaacattccgcctggagagggagagtagatccacatacaatgatactgaagatgtgtctcaagctagtccatctgagtcagaggccagattccgcattgactcagtaagtgaaggaaatgccgggccttatcgctgcatctattataagccccctaaatggtctgagcagagtgactacctggagctgctggtgaaagaaacctctggaggcccggactccccggacacagagcccggctcctcagctggacccacgcagaggccgtcggacaacagtcacaatgagcatgcacctgcttcccaaggcctgaaagctgagcatctgtatattctcatcggggtctcagtggtcttcctcttctgtctcctcctcctggtcctcttctgcctccatcgccagaatcagataaagcaggggccccccagaagcaaggacgaggagcagaagccacagcagaggcctgacctggctgttgatgttctagagaggacagcagacaaggccacagtcaatggacttcctgagaaggacagagagacggacacctcggccctggctgcagggagttcccaggaggtgacgtatgctcagctggaccactgggccctcacacagaggacagcccgggctgtgtccccacagtccacaaagcccatggccgagtccatcacgtatgcagccgttgccagacactgaccccatacccacctggcctctgcacctgagggtagaaagtcactctaggaaaagcctgaagcagccatttggaaggcttcctgttggattcctcttcatctagaaagccagccaggcagctgtcctggagacaagagctggagactggaggtttctaaccagcatccagaaggttcgttagccaggtggtcccttctacaatcgagcagctccttggacagactgtttctcagttatttccagagacccagctacagttccctggctgtttctagagacccagctttattcacctgactgtttccagagacccagctaaagtcacctgcctgttctaaaggcccagctacagccaatcagccgatttcctgagcagtgatgccacctccaagcttgtcctaggtgtctgctgtgaacctccagtgaccccagagactttgctgtaattatctgccctgctgaccctaaagaccttcctagaagtcaagagctagccttgagactgtgctatacacacacagctgagagccaagcccagttctctgggttgtgctttactccacgcatcaataaataattttgaaggcctcacatctggcagccccaggcctggtcctgggtgcataggtctctcggacccactctctgccttcacagttgttcaaagctgagtgagggaaacaggacctacgaaaacgtgtcagcgttttctttttaaaatttaattgatcaggattgtacgta

SEQ ID NO: 148963 - DNA, 2735 bp, Homo sapiens
  Payload ID: 9426
  Gene Symbol: LAIR1
  Gene Name: leukocyte-associated immunoglobulin-like receptor 1
  ENST ID: ENST00000618291
  CDS Start-End: 282-1091
tggtatagcagaagctttttcacatctatgacacccgctatgtcttggtaaaccctggaagggaaaggaggacaaggttaaaatactgttccgaggatctggtctctccacagcgcaggctggaggtggcagcccgtggaaagccaagttcatccaccatcggagcccaggccaggctgccaaggctaatattcaggacaaagccaggcacaggtcgggaatcctatgaagatgatcatcgtcctgaggtcttccttccagggttgcatccgcgacagaagatggaaagagaaatggaagatctgcccagaccctccatctcggctgagccaggcaccgtgatccccctggggagccatgtgactttcgtgtgccggggcccggttggggttcaaacattccgcctggagagggagagtagatccacatacaatgatactgaagatgtgtctcaagctagtccatctgagtcagaggccagattccgcattgactcagtaagtgaaggaaatgccgggccttatcgctgcatctattataagccccctaaatggtctgagcagagtgactacctggagctgctggtgaaagaaacctctggaggcccggactccccggacacagagcccggctcctcagctggacccacgcagaggccgtcggacaacagtcacaatgagcatgcacctgcttcccaaggcctgaaagctgagcatctgtatattctcatcggggtctcagtggtcttcctcttctgtctcctcctcctggtcctcttctgcctccatcgccagaatcagataaagcaggggccccccagaagcaaggacgaggagcagaagccacagcagaggcctgacctggctgttgatgttctagagaggacagcagacaaggccacagtcaatggacttcctgagaaggacagagagacggacacctcggccctggctgcagggagttcccaggaggtgacgtatgctcagctggaccactgggccctcacacagaggacagcccgggctgtgtccccacagtccacaaagcccatggccgagtccatcacgtatgcagccgttgccagacactgaccccatacccacctggcctctgcacctgagggtagaaagtcactctaggaaaagcctgaagcagccatttggaaggcttcctgttggattcctcttcatctagaaagccagccaggcagctgtcctggagacaagagctggagactggaggtttctaaccagcatccagaaggttcgttagccaggtggtcccttctacaatcgagcagctccttggacagactgtttctcagttatttccagagacccagctacagttccctggctgtttctagagacccagctttattcacctgactgtttccagagacccagctaaagtcacctgcctgttctaaaggcccagctacagccaatcagccgatttcctgagcagtgatgccacctccaagcttgtcctaggtgtctgctgtgaacctccagtgaccccagagactttgctgtaattatctgccctgctgaccctaaagaccttcctagaagtcaagagctagccttgagactgtgctatacacacacagctgagagccaagcccagttctctgggttgtgctttactccacgcatcaataaataattttgaaggcctcacatctggcagccccaggcctggtcctgggtgcataggtctctcggacccactctctgccttcacagttgttcaaagctgagtgagggaaacaggacctacgaaaacgtgtcagcgttttctttttaaaatttaattgatcaggattgtacgtattcaaggtgtaaaatgtgataatttgtcgtacacgtacattgtgcaatgacagtcacaatcaattcctcagcgcacccatcaccacgaatacgatacattagatattctgaacttgctcatcttaggacttcacattggtgtcagtgttttctgacaaatcacgtgtatcaggaatgaatgagggaggtgtggctgggtgaaggcagagagccgaccctacaggtccacatctgcacatacatgcacaggaatgcatgctctcacacacatgcatacacacacgcacacacacagacatgcacatacactcacacgccccaggaaatccaaggaatcactgagcctgctgttggttgaggcatttctgagtatccaccctacctgtagggtcagatgtactgattgacacagaaaattaccctatgtaccactaggaggcggcagaatctcatttgggttaatctgtgtttgtctttaaaaaacaaaaacaggccgggcgcggtggctcacgcctgtaatcccagcactttgggaggctgaggtgggcggatcacgaggtcaggagatcgagaccatcctggctaacacggtgaaaccccatctctactaaaaatacaaaaaaattagctgggcgtggtggcgggcacctgtagtcccagctactcgggaggctgaggcaggagaatggcgtgaacccgggaggcggagcttgcagtgagccgaggtggtgccactgcactccagcctgggcgacagagcgagactccgtcaaaaaaaaaaagaaaagaaaagaaagatttttaagaattcagcaaaaactcagccagctctttctatggggcagttgctaatttagttctaggcaaacgtggacacattaaattctcctacaaaccctc

SEQ ID NO: 148964 - DNA, 1522 bp, Homo sapiens
  Payload ID: 9426
  Gene Symbol: LAIR1
  Gene Name: leukocyte-associated immunoglobulin-like receptor 1
  Uniprot ID: Q6GTX8
  ENST ID: ENST00000620357
  CDS Start-End: 119-931
ggaagccccataggcaggaggcccccgggcagcacatcctgtctgcttgtgtctgctgcagagttctgtccttgcattggtgcgcctcaggccaggctgcactgctgggacctgggccatgtctccccaccccaccgccctcctgggcctagtgctctgcctggcccagaccatccacacgcaggaggaagatctgcccagaccctccatctcggctgagccaggcaccgtgatccccctggggagccatgtgactttcgtgtgccggggcccggttggggttcaaacattccgcctggagagggagagtagatccacatacaatgatactgaagatgtgtctcaagctagtccatctgagtcagaggccagattccgcattgactcagtaagtgaaggaaatgccgggccttatcgctgcatctattataagccccctaaatggtctgagcagagtgactacctggagctgctggtgaaaggacccacgcagaggccgtcggacaacagtcacaatgagcatgcacctgcttcccaaggcctgaaagctgagcatctgtatattctcatcggggtctcagtggtcttcctcttctgtctcctcctcctggtcctcttctgcctccatcgccagaatcagataaagcaggggccccccagaagcaaggacgaggagcagaagccacagcagaggcctgacctggctgttgatgttctagagaggacagcagacaaggccacagtcaatggacttcctgagaaggacagagagacagacacctcggccctggctgcagggagttcccaggaggtgacgtatgctcagctggaccactgggccctcacacagaggacagcccgggctgtgtccccacagtccacaaagcccatggccgagtccatcacgtatgcagccgttgccagacactgaccccatacccacctggcctctgcacctgagggtagaaagtcactctaggaaaagcctgaagcagccatttggaaggcttcctgttggattcctcttcatctagaaagccagccaggcagctgtcctggagacaagagctggagactggaggtttctaaccagcatccagaaggttcgttagccaggtggtcccttctacaatcgagcagctccttggacagactgtttctcagttatttccagagacccagctacagttccctggctgtttctagagacccagctttattcacctgactgtttccagagacccagctaaagtcacctgcctgttctaaaggcccagctacagccaatcagccgatttcctgagcagtgatgccacctccaagcttgtcctaggtgtctgctgtgaacctccagtgaccccagagactttgctgtaattatctgccctgctgaccctaaagaccttcctagaagtcaagagctagccttgagactgtgctatacacacacagctgagagccaagcccagttctctgggttgtgctttactccacgcatcaataaataattttgaaggcctca

SEQ ID NO: 148965 - DNA, 1515 bp, Homo sapiens
  Payload ID: 9426
  Gene Symbol: LAIR1
  Gene Name: leukocyte-associated immunoglobulin-like receptor 1
  Uniprot ID: Q6GTX8
  ENST ID: ENST00000616612
  CDS Start-End: 61-924
cagagttctgtccttgcattggtgcgcctcaggccaggctgcactgctgggacctgggccatgtctccccaccccaccgccctcctgggcctagtgctctgcctggcccagaccatccacacgcaggaggaagatctgcccagaccctccatctcggctgagccaggcaccgtgatccccctggggagccatgtgactttcgtgtgccggggcccggttggggttcaaacattccgcctggagagggagagtagatccacatacaatgatactgaagatgtgtctcaagctagtccatctgagtcagaggccagattccgcattgactcagtaagtgaaggaaatgccgggccttatcgctgcatctattataagccccctaaatggtctgagcagagtgactacctggagctgctggtgaaagaaacctctggaggcccggactccccggacacagagcccggctcctcagctggacccacgcagaggccgtcggacaacagtcacaatgagcatgcacctgcttcccaaggcctgaaagctgagcatctgtatattctcatcggggtctcagtggtcttcctcttctgtctcctcctcctggtcctcttctgcctccatcgccagaatcagataaagcaggggccccccagaagcaaggacgaggagcagaagccacagcagaggcctgacctggctgttgatgttctagagaggacagcagacaaggccacagtcaatggacttcctgagaaggacagagagacagacacctcggccctggctgcagggagttcccaggaggtgacgtatgctcagctggaccactgggccctcacacagaggacagcccgggctgtgtccccacagtccacaaagcccatggccgagtccatcacgtatgcagccgttgccagacactgaccccatacccacctggcctctgcacctgagggtagaaagtcactctaggaaaagcctgaagcagccatttggaaggcttcctgttggattcctcttcatctagaaagccagccaggcagctgtcctggagacaagagctggagactggaggtttctaaccagcatccagaaggttcgttagccaggtggtcccttctacaatcgagcagctccttggacagactgtttctcagttatttccagagacccagctacagttccctggctgtttctagagacccagctttattcacctgactgtttccagagacccagctaaagtcacctgcctgttctaaaggcccagctacagccaatcagccgatttcctgagcagtgatgccacctccaagcttgtcctaggtgtctgctgtgaacctccagtgaccccagagactttgctgtaattatctgccctgctgaccctaaagaccttcctagaagtcaagagctagccttgagactgtgctatacacacacagctgagagccaagcccagttctctgggttgtgctttactccacgcatcaataaataattttgaaggcctca

SEQ ID NO: 148966 - DNA, 4903 bp, Homo sapiens
  Payload ID: 9426
  Gene Symbol: LAIR1
  Gene Name: leukocyte-associated immunoglobulin-like receptor 1
  Uniprot ID: Q6GTX8
  ENST ID: ENST00000619717
  CDS Start-End: 154-1017
agaaagctcttcctcttgtgtgaggcagttgctgtggaagccccataggcaggaggcccccgggcagcacatcctgtctgcttgtgtctgctgcagagttctgtccttgcattggtgcgcctcaggccaggctgcactgctgggacctgggccatgtctccccaccccaccgccctcctgggcctagtgctctgcctggcccagaccatccacacgcaggaggaagatctgcccagaccctccatctcggctgagccaggcaccgtgatccccctggggagccatgtgactttcgtgtgccggggcccggttggggttcaaacattccgcctggagagggagagtagatccacatacaatgatactgaagatgtgtctcaagctagtccatctgagtcagaggccagattccgcattgactcagtaagtgaaggaaatgccgggccttatcgctgcatctattataagccccctaaatggtctgagcagagtgactacctggagctgctggtgaaagaaacctctggaggcccggactccccggacacagagcccggctcctcagctggacccacgcagaggccgtcggacaacagtcacaatgagcatgcacctgcttcccaaggcctgaaagctgagcatctgtatattctcatcggggtctcagtggtcttcctcttctgtctcctcctcctggtcctcttctgcctccatcgccagaatcagataaagcaggggccccccagaagcaaggacgaggagcagaagccacagcagaggcctgacctggctgttgatgttctagagaggacagcagacaaggccacagtcaatggacttcctgagaaggacagagagacggacacctcggccctggctgcagggagttcccaggaggtgacgtatgctcagctggaccactgggccctcacacagaggacagcccgggctgtgtccccacagtccacaaagcccatggccgagtccatcacgtatgcagccgttgccagacactgaccccatacccacctggcctctgcacctgagggtagaaagtcactctaggaaaagcctgaagcagccatttggaaggcttcctgttggattcctcttcatctagaaagccagccaggcagctgtcctggagacaagagctggagactggaggtttctaaccagcatccagaaggttcgttagccaggtggtcccttctacaatcgagcagctccttggacagactgtttctcagttatttccagagacccagctacagttccctggctgtttctagagacccagctttattcacctgactgtttccagagacccagctaaagtcacctgcctgttctaaaggcccagctacagccaatcagccgatttcctgagcagtgatgccacctccaagcttgtcctaggtgtctgctgtgaacctccagtgaccccagagactttgctgtaattatctgccctgctgaccctaaagaccttcctagaagtcaagagctagccttgagactgtgctatacacacacagctgagagccaagcccagttctctgggttgtgctttactccacgcatcaataaataattttgaaggcctcacatctggcagccccaggcctggtcctgggtgcataggtctctcggacccactctctgccttcacagttgttcaaagctgagtgagggaaacaggacctacgaaaacgtgtcagcgttttctttttaaaatttaattgatcaggattgtacgtattcaaggtgtaaaatgtgataatttgtcgtacacgtacattgtgcaatgacagtcacaatcaattcctcagcgcacccatcaccacgaatacgatacattagatattctgaacttgctcatcttaggacttcacattggtgtcagtgttttctgacaaatcacgtgtatcaggaatgaatgagggaggtgtggctgggtgaaggcagagagccgaccctacaggtccacatctgcacatacatgcacaggaatgcatgctctcacacacatgcatacacacacgcacacacacagacatgcacatacactcacacgccccaggaaatccaaggaatcactgagcctgctgttggttgaggcatttctgagtatccaccctacctgtagggtcagatgtactgattgacacagaaaattaccctatgtaccactaggaggcggcagaatctcatttgggttaatctgtgtttgtctttaaaaaacaaaaacaggccgggcgcggtggctcacgcctgtaatcccagcactttgggaggctgaggtgggcggatcacgaggtcaggagatcgagaccatcctggctaacacggtgaaaccccatctctactaaaaatacaaaaaaattagctgggcgtggtggcgggcacctgtagtcccagctactcgggaggctgaggcaggagaatggcgtgaacccgggaggcggagcttgcagtgagccgaggtggtgccactgcactccagcctgggcgacagagcgagactccgtcaaaaaaaaaaagaaaagaaaagaaagatttttaagaattcagcaaaaactcagccagctctttctatggggcagttgctaatttagttctaggcaaacgtggacacattaaattctcctacaaaccctccacagcgtgctctattattttcctcatttataaaaacagaaactatggaccgagacatgaagtaacctgtccaaggtcggccaagtctcagagacaggggcttcagacccacctgaggctcctgactccacattatgaaccccgggatgggctgcagctcggtctgctgggaggtttctgtgctggttcaaagagggtggtacctgactggcctacccaattttaatttgtactgagctttaattttctatttgtgctcaggtttaatttcctcctgggatctgcttcccagtgctgtactctgtatctttgctttcttgtgtgaacattgtgaccgattttccctgttcttcacgtgggacacattctccctgctctgtctgtctctgtccctgtctctctttctgtctttctctctcactgtgtgtctctctgtctctctctctcttttttttttctttgagatggagtttcgctcttgttgcccaggctggagtgcaatggcgcaatcttggctcactgcaacctctgcctcccgggttcaagcgattctcctgcctcagcctcctgagcagctgggattacaggcatgcaccaccacacacggctaattttttgtatttttgttagagacggggggctctccatgttgcttaggctggttttgaactcccgacctcaggtgatctgcccacctcagcctcccaaagtcctgggattacaggcgtgagccactgcgtccagccgtctttgtctctttttctacatctctgtctttcttctctggttgtttttcaaccatcagccgggtgttttcccccataacgtcttgtttgtttgactatgaggttgacaggtgggtacatgaactctatagcagaaggtggacagtctgcacatagcagaggatgggtgaatttttctaccccttgcagagcacaggagagctgagcagatgccagtgtctgctccagtgtaaggaagtccaggaagttcaggtggtgaggtcacagtggaaagcaggacagatagagtttaggggaaattaagcaaaaataccacactgttgtttcttgacatattagtggaaagaggaagggcccagagagaagacagaaaattagatgcaggggcttgttttttctcttgacttgccaacccgcccaacgcaggggccagaactcagggtggtgagatctgggaacattgctgtgcggagaagatgtccctcctgctgcacgggcccccaagcaccacctgggggaagagccatgtttaattcacctggcagtgcagtgtggccaggcagagagggagggcctaccctgtgcttatgatcccaccccagttcccctggggtgtgccctggcggtgaacaccaggaggctgcagtggggcccaacgtgaaagggaggagcagcctcaccggggccagatggggcagcagcagatattcacagatgtccctgtgagtaaccagggcagaggccaggggtctggccttccctttcttggagccctgggccagctgggcaaggcgttgagagaaagattacccggtgacctttatcaaagcagagtaaggagggctttattcagaaccatcactgtaggtaccaggaccccagcggtgggattttgtagtaggggaaagaaaatgggctcgacgttgaatacagcatgaacaagtgagaatgtttgttatacaaactatagggtggactttttttttcttttttttaactttttttttaccttttagtgtaaaactgaacatagaaaataaattcatgaagaagggatattttctgagggtgtccagggctgcccaacacctcttgtctaccttctctgtcatagccccatttaaaacactctctctggatgaatacaccaaacctcacagtctttgctctcttgctaggaagaggagcaagagcgtgtttcactcttggctcctgcttacacacctgccgtccaatggaaactactacttaagacatttaaaaatagttgtggtgatagcatgttgtgttttggttggtgatgccagttagtctctgaaaactttctgtgatgagtgtaaaattctacaccttaatctcctttcttgtaggatctgggaagcagtatgcacttgattgcaccaaagattttacgttcatagaaaatttctggcatctgtgtgaagaaagtaaactatatcttccatttaaacaaataaaatatctttttgataaaa

SEQ ID NO: 148967 - DNA, 2570 bp, Homo sapiens
  Payload ID: 9426
  Gene Symbol: LAIR1
  Gene Name: leukocyte-associated immunoglobulin-like receptor 1
  ENST ID: ENST00000621291
  CDS Start-End: 246-1055
gctatgtcttggtaaaccctggaagggaaaggaggacaaggttaaaatactgttccgaggacctggtctctccacagcgcaggctggaggtggcagcccgtggaaagccaagttcatccaccatcggagcccaggccaggctgccaaggctaatattcaggacaaagccaggcacaggtcgggaatcctatgaagatgatcatcgtcctgaggtcttccttccagggttgcatccgcgacagaagatggaaagagaaatggaagatctgcccagaccctccatctcggctgagccaggcaccgtgatccccctggggagccatgtgactttcgtgtgccggggcccggttggggttcaaacattccgcctggagagggagagtagatccacatacaatgatactgaagatgtgtctcaagctagtccatctgagtcagaggccagattccgcattgactcagtaagtgaaggaaatgccgggccttatcgctgcatctattataagccccctaaatggtctgagcagagtgactacctggagctgctggtgaaagaaacctctggaggcccggactccccggacacagagcccggctcctcagctggacccacgcagaggccgtcggacaacagtcacaatgagcatgcacctgcttcccaaggcctgaaagctgagcatctgtatattctcatcggggtctcagtggtcttcctcttctgtctcctcctcctggtcctcttctgcctccatcgccagaatcagataaagcaggggccccccagaagcaaggacgaggagcagaagccacagcagaggcctgacctggctgttgatgttctagagaggacagcagacaaggccacagtcaatggacttcctgagaaggacagagagacagacacctcggccctggctgcagggagttcccaggaggtgacgtatgctcagctggaccactgggccctcacacagaggacagcccgggctgtgtccccacagtccacaaagcccatggccgagtccatcacgtatgcagccgttgccagacactgaccccatacccacctggcctctgcacctgagggtagaaagtcactctaggaaaagcctgaagcagccatttggaaggcttcctgttggattcctcttcatctagaaagccagccaggcagctgtcctggagacaagagctggagactggaggtttctaaccagcatccagaaggttcgttagccaggtggtcccttctacaatcgagcagctccttggacagactgtttctcagttatttccagagacccagctacagttccctggctgtttctagagacccagctttattcacctgactgtttccagagacccagctaaagtcacctgcctgttctaaaggcccagctacagccaatcagccgatttcctgagcagtgatgccacctccaagcttgtcctaggtgtctgctgtgaacctccagtgaccccagagactttgctgtaattatctgccctgctgaccctaaagaccttcctagaagtcaagagctagccttgagactgtgctatacacacacagctgagagccaagcccagttctctgggttgtgctttactccacgcatcaataaataattttgaaggcctcacatctggcagccccaggcctggtcctgggtgcataggtctctcggacccactctctgccttcacagttgttcaaagctgagtgagggaaacaggacctacgaaaacgtgtcagcgttttctttttaaaatttaattgatcaggattgtacgtattcaaggtgtaaaatgtgataatttgtcgtacacgtacattgtgcaatgacagtcacaatcaattcctcagcgcacccatcaccacgaatacgatacattagatattctgaacttgctcatcttaggacttcacattggtgtcagtgttttctgacaaatcacgtgtatcaggaatgaatgagggaggtgtggctgggtgaaggcagagagccgaccctacaggtccacatctgcacatacatgcacaggaatgcatgctctcacacacatgcatacacacacgcacacacacagacatgcacatacactcacacgccccaggaaatccaaggaatcactgagcctgctgttggttgaggcatttctgagtatccaccctacctgtagggtcagatgtactgattgacacagaaaattaccctatgtaccactaggaggcggcagaatctcatttgggttaatctgtgtttgtctttaaaaaacaaaaacaggccgggcgcggtggctcacgcctgtaatcccagcactttgggaggctgaggtgggcggatcacgaggtcaggagatcgagaccatcctggctaacacggtgaaaccccatctctactaaaaatacaaaaaaattagctgggcgtggtggcgggcacctgtagtcccagctactcgggaggctgaggcaggagaatggcgtgaacccgggaggcggagcttgcagtgagccgaggtggtgccactgcactccagcctgggcgacagagcgagactccgtc

SEQ ID NO: 148968 - DNA, 1465 bp, Homo sapiens
  Payload ID: 9426
  Gene Symbol: LAIR1
  Gene Name: leukocyte-associated immunoglobulin-like receptor 1
  Uniprot ID: Q6GTX8
  ENST ID: ENST00000619817
  CDS Start-End: 62-874
gcagagttctgtccttgcattggtgcgcctcaggccaggctgcactgctgggacctgggccatgtctccccaccccaccgccctcctgggcctagtgctctgcctggcccagaccatccacacgcaggaggaagatctgcccagaccctccatctcggctgagccaggcaccgtgatccccctggggagccatgtgactttcgtgtgccggggcccggttggggttcaaacattccgcctggagagggagagtagatccacatacaatgatactgaagatgtgtctcaagctagtccatctgagtcagaggccagattccgcattgactcagtaagtgaaggaaatgccgggccttatcgctgcatctattataagccccctaaatggtctgagcagagtgactacctggagctgctggtgaaaggacccacgcagaggccgtcggacaacagtcacaatgagcatgcacctgcttcccaaggcctgaaagctgagcatctgtatattctcatcggggtctcagtggtcttcctcttctgtctcctcctcctggtcctcttctgcctccatcgccagaatcagataaagcaggggccccccagaagcaaggacgaggagcagaagccacagcagaggcctgacctggctgttgatgttctagagaggacagcagacaaggccacagtcaatggacttcctgagaaggacagagagacagacacctcggccctggctgcagggagttcccaggaggtgacgtatgctcagctggaccactgggccctcacacagaggacagcccgggctgtgtccccacagtccacaaagcccatggccgagtccatcacgtatgcagccgttgccagacactgaccccatacccacctggcctctgcacctgagggtagaaagtcactctaggaaaagcctgaagcagccatttggaaggcttcctgttggattcctcttcatctagaaagccagccaggcagctgtcctggagacaagagctggagactggaggtttctaaccagcatccagaaggttcgttagccaggtggtcccttctacaatcgagcagctccttggacagactgtttctcagttatttccagagacccagctacagttccctggctgtttctagagacccagctttattcacctgactgtttccagagacccagctaaagtcacctgcctgttctaaaggcccagctacagccaatcagccgatttcctgagcagtgatgccacctccaagcttgtcctaggtgtctgctgtgaacctccagtgaccccagagactttgctgtaattatctgccctgctgaccctaaagaccttcctagaagtcaagagctagccttgagactgtgctatacacacacagctgagagccaagcccagttctctgggttgtgctttactccacgcatcaataaataattttgaaggcctca

SEQ ID NO: 148969 - DNA, 1465 bp, Homo sapiens
  Payload ID: 9426
  Gene Symbol: LAIR1
  Gene Name: leukocyte-associated immunoglobulin-like receptor 1
  Uniprot ID: Q6GTX8
  ENST ID: ENST00000622097
  CDS Start-End: 62-874
gcagagttctgtccttgcattggtgcgcctcaggccaggctgcactgctgggacctgggccatgtctccccaccccaccgccctcctgggcctagtgctctgcctggcccagaccatccacacgcaggaggaagatctgcccagaccctccatctcggctgagccaggcaccgtgatccccctggggagccatgtgactttcgtgtgccggggcccggttggggttcaaacattccgcctggagagggagagtagatccacatacaatgatactgaagatgtgtctcaagctagtccatctgagtcagaggccagattccgcattgactcagtaagtgaaggaaatgccgggccttatcgctgcatctattataagccccctaaatggtctgagcagagtgactacctggagctgctggtgaaaggacccacgcagaggccgtcggacaacagtcacaatgagcatgcacctgcttcccaaggcctgaaagctgagcatctgtatattctcatcggggtctcagtggtcttcctcttctgtctcctcctcctggtcctcttctgcctccatcgccagaatcagataaagcaggggccccccagaagcaaggacgaggagcagaagccacagcagaggcctgacctggctgttgatgttctagagaggacagcagacaaggccacagtcaatggacttcctgagaaggacagagagacggacacctcggccctggctgcagggagttcccaggaggtgacgtatgctcagctggaccactgggccctcacacagaggacagcccgggctgtgtccccacagtccacaaagcccatggccgagtccatcacgtatgcagccgttgccagacactgaccccatacccacctggcctctgcacctgagggtagaaagtcactctaggaaaagcctgaagcagccatttggaaggcttcctgttggattcctcttcatctagaaagccagccaggcagctgtcctggagacaagagctggagactggaggtttctaaccagcatccagaaggttcgttagccaggtggtcccttctacaatcgagcagctccttggacagactgtttctcagttatttccagagacccagctacagttccctggctgtttctagagacccagctttattcacctgactgtttccagagacccagctaaagtcacctgcctgttctaaaggcccagctacagccaatcagccgatttcctgagcagtgatgccacctccaagcttgtcctaggtgtctgctgtgaacctccagtgaccccagagactttgctgtaattatctgccctgctgaccctaaagaccttcctagaagtcaagagctagccttgagactgtgctatacacacacagctgagagccaagcccagttctctgggttgtgctttactccacgcatcaataaataattttgaaggcctca

SEQ ID NO: 148970 - DNA, 1594 bp, Homo sapiens
  Payload ID: 9426
  Gene Symbol: LAIR1
  Gene Name: leukocyte-associated immunoglobulin-like receptor 1
  Uniprot ID: Q6GTX8
  ENST ID: ENST00000610549
  CDS Start-End: 192-1001
tctcgtctcactagtgggaagggtggaaagaacaggacagaaagctcttcctcttgtgtgaggcagttgctgtggaagccccataggcaggaggcccccgggcagcacatcctgtctgcttgtgtctgctgcagagttctgtccttgcattggtgcgcctcaggccaggctgcactgctgggacctgggccatgtctccccaccccaccgccctcctgggcctagtgctctgcctggcccagaccatccacacgcaggaggatctgcccagaccctccatctcggctgagccaggcaccgtgatccccctggggagccatgtgactttcgtgtgccggggcccggttggggttcaaacattccgcctggagagggagagtagatccacatacaatgatactgaagatgtgtctcaagctagtccatctgagtcagaggccagattccgcattgactcagtaagtgaaggaaatgccgggccttatcgctgcatctattataagccccctaaatggtctgagcagagtgactacctggagctgctggtgaaaggacccacgcagaggccgtcggacaacagtcacaatgagcatgcacctgcttcccaaggcctgaaagctgagcatctgtatattctcatcggggtctcagtggtcttcctcttctgtctcctcctcctggtcctcttctgcctccatcgccagaatcagataaagcaggggccccccagaagcaaggacgaggagcagaagccacagcagaggcctgacctggctgttgatgttctagagaggacagcagacaaggccacagtcaatggacttcctgagaaggacagagagacggacacctcggccctggctgcagggagttcccaggaggtgacgtatgctcagctggaccactgggccctcacacagaggacagcccgggctgtgtccccacagtccacaaagcccatggccgagtccatcacgtatgcagccgttgccagacactgaccccatacccacctggcctctgcacctgagggtagaaagtcactctaggaaaagcctgaagcagccatttggaaggcttcctgttggattcctcttcatctagaaagccagccaggcagctgtcctggagacaagagctggagactggaggtttctaaccagcatccagaaggttcgttagccaggtggtcccttctacaatcgagcagctccttggacagactgtttctcagttatttccagagacccagctacagttccctggctgtttctagagacccagctttattcacctgactgtttccagagacccagctaaagtcacctgcctgttctaaaggcccagctacagccaatcagccgatttcctgagcagtgatgccacctccaagcttgtcctaggtgtctgctgtgaacctccagtgaccccagagactttgctgtaattatctgccctgctgaccctaaagaccttcctagaagtcaagagctagccttgagactgtgctatacacacacagctgagagccaagcccagttctctgggttgtgctttactccacgcatcaataaataattttgaaggcctcaca

SEQ ID NO: 148971 - DNA, 2606 bp, Homo sapiens
  Payload ID: 9426
  Gene Symbol: LAIR1
  Gene Name: leukocyte-associated immunoglobulin-like receptor 1
  ENST ID: ENST00000616724
  CDS Start-End: 282-1091
tggtatagcagaagctttttcacatctatgacacccgctatgtcttggtaaaccctggaagggaaaggaggacaaggttaaaatactgttccgaggatctggtctctccacagcgcaggctggaggtggcagcccgtggaaagccaagttcatccaccatcggagcccaggccaggctgccaaggctaatattcaggacaaagccaggcacaggtcgggaatcctatgaagatgatcatcgtcctgaggtcttccttccagggttgcatccgcgacagaagatggaaagagaaatggaagatctgcccagaccctccatctcggctgagccaggcaccgtgatccccctggggagccatgtgactttcgtgtgccggggcccggttggggttcaaacattccgcctggagagggagagtagatccacatacaatgatactgaagatgtgtctcaagctagtccatctgagtcagaggccagattccgcattgactcagtaagtgaaggaaatgccgggccttatcgctgcatctattataagccccctaaatggtctgagcagagtgactacctggagctgctggtgaaagaaacctctggaggccgggactccccggacacagagcccggctcctcagctggacccacgcagaggccgtcggacaacagtcacaatgagcatgcacctgcttcccaaggcctgaaagctgagcatctgtatattctcatcggggtctcagtggtcttcctcttctgtctcctcctcctggtcctcttctgcctccatcgccagaatcagataaagcaggggccccccagaagcaaggacgaggagcagaagccacagcagaggcctgacctggctgttgatgttctagagaggacagcagacaaggccacagtcaatggacttcctgagaaggacagagagacagacacctcggccctggctgcagggagttcccaggaggtgacgtatgctcagctggaccactgggccctcacacagaggacagcccgggctgtgtccccacagtccacaaagcccatggccgagtccatcacgtatgcagccgttgccagacactgaccccatacccacctggcctctgcacctgagggtagaaagtcactctaggaaaagcctgaagcagccatttggaaggcttcctgttggattcctcttcatctagaaagccagccaggcagctgtcctggagacaagagctggagactggaggtttctaaccagcatccagaaggttcgttagccaggtggtcccttctacaatcgagcagctccttggacagactgtttctcagttatttccagagacccagctacagttccctggctgtttctagagacccagctttattcacctgactgtttccagagacccagctaaagtcacctgcctgttctaaaggcccagctacagccaatcagccgatttcctgagcagtgatgccacctccaagcttgtcctaggtgtctgctgtgaacctccagtgaccccagagactttgctgtaattatctgccctgctgaccctaaagaccttcctagaagtcaagagctagccttgagactgtgctatacacacacagctgagagccaagcccagttctctgggttgtgctttactccacgcatcaataaataattttgaaggcctcacatctggcagccccaggcctggtcctgggtgcataggtctctcggacccactctctgccttcacagttgttcaaagctgagtgagggaaacaggacctacgaaaacgtgtcagcgttttctttttaaaatttaattgatcaggattgtacgtattcaaggtgtaaaatgtgataatttgtcgtacacgtacattgtgcaatgacagtcacaatcaattcctcagcgcacccatcaccacgaatacgatacattagatattctgaacttgctcatcttaggacttcacattggtgtcagtgttttctgacaaatcacgtgtatcaggaatgaatgagggaggtgtggctgggtgaaggcagagagccgaccctacaggtccacatctgcacatacatgcacaggaatgcatgctctcacacacatgcatacacacacgcacacacacagacatgcacatacactcacacgccccaggaaatccaaggaatcactgagcctgctgttggttgaggcatttctgagtatccaccctacctgtagggtcagatgtactgattgacacagaaaattaccctatgtaccactaggaggcggcagaatctcatttgggttaatctgtgtttgtctttaaaaaacaaaaacaggccgggcgcggtggctcacgcctgtaatcccagcactttgggaggctgaggtgggcggatcacgaggtcaggagatcgagaccatcctggctaacacggtgaaaccccatctctactaaaaatacaaaaaaattagctgggcgtggtggcgggcacctgtagtcccagctactcgggaggctgaggcaggagaatggcgtgaacccgggaggcggagcttgcagtgagccgaggtggtgccactgcactccagcctgggcgacagagcgagactccgtc

SEQ ID NO: 148972 - DNA, 2762 bp, Homo sapiens
  Payload ID: 9426
  Gene Symbol: LAIR1
  Gene Name: leukocyte-associated immunoglobulin-like receptor 1
  ENST ID: ENST00000611304
  CDS Start-End: 289-1119
tagcagaagctttttcacatctatgacacccgctatgtcttggtaaaccctggaagggaaaggaggacaaggttaaaatactgttccgaggacctggtctctccacagcgcaggctggaggtggcagcccgtggaaagccaagttcatccaccatcggagcccaggccaggctgccaaggctaatattcaggacaaagccaggcacaggtcgggaatcctatgaagatgatcatcgtcctgaggtcttccttccagggttgcatccgcgacagaagatggaaagagaaatggtgctctgcctggcccagaccatccacacgcaggaggatctgcccagaccctccatctcggctgagccaggcaccgtgatccccctggggagccatgtgactttcgtgtgccggggcccggttggggttcaaacattccgcctggagagggagagtagatccacatacaatgatactgaagatgtgtctcaagctagtccatctgagtcagaggccagattccgcattgactcagtaagtgaaggaaatgccgggccttatcgctgcatctattataagccccctaaatggtctgagcagagtgactacctggagctgctggtgaaagaaacctctggaggcccggactccccggacacagagcccggctcctcagctggacccacgcagaggccgtcggacaacagtcacaatgagcatgcacctgcttcccaaggcctgaaagctgagcatctgtatattctcatcggggtctcagtggtcttcctcttctgtctcctcctcctggtcctcttctgcctccatcgccagaatcagataaagcaggggccccccagaagcaaggacgaggagcagaagccacagcagaggcctgacctggctgttgatgttctagagaggacagcagacaaggccacagtcaatggacttcctgagaaggacagagagacagacacctcggccctggctgcagggagttcccaggaggtgacgtatgctcagctggaccactgggccctcacacagaggacagcccgggctgtgtccccacagtccacaaagcccatggccgagtccatcacgtatgcagccgttgccagacactgaccccatacccacctggcctctgcacctgagggtagaaagtcactctaggaaaagcctgaagcagccatttggaaggcttcctgttggattcctcttcatctagaaagccagccaggcagctgtcctggagacaagagctggagactggaggtttctaaccagcatccagaaggttcgttagccaggtggtcccttctacaatcgagcagctccttggacagactgtttctcagttatttccagagacccagctacagttccctggctgtttctagagacccagctttattcacctgactgtttccagagacccagctaaagtcacctgcctgttctaaaggcccagctacagccaatcagccgatttcctgagcagtgatgccacctccaagcttgtcctaggtgtctgctgtgaacctccagtgaccccagagactttgctgtaattatctgccctgctgaccctaaagaccttcctagaagtcaagagctagccttgagactgtgctatacacacacagctgagagccaagcccagttctctgggttgtgctttactccacgcatcaataaataattttgaaggcctcacatctggcagccccaggcctggtcctgggtgcataggtctctcggacccactctctgccttcacagttgttcaaagctgagtgagggaaacaggacctacgaaaacgtgtcagcgttttctttttaaaatttaattgatcaggattgtacgtattcaaggtgtaaaatgtgataatttgtcgtacacgtacattgtgcaatgacagtcacaatcaattcctcagcgcacccatcaccacgaatacgatacattagatattctgaacttgctcatcttaggacttcacattggtgtcagtgttttctgacaaatcacgtgtatcaggaatgaatgagggaggtgtggctgggtgaaggcagagagccgaccctacaggtccacatctgcacatacatgcacaggaatgcatgctctcacacacatgcatacacacacgcacacacacagacatgcacatacactcacacgccccaggaaatccaaggaatcactgagcctgctgttggttgaggcatttctgagtatccaccctacctgtagggtcagatgtactgattgacacagaaaattaccctatgtaccactaggaggcggcagaatctcatttgggttaatctgtgtttgtctttaaaaaacaaaaacaggccgggcgcggtggctcacgcctgtaatcccagcactttgggaggctgaggtgggcggatcacgaggtcaggagatcgagaccatcctggctaacacggtgaaaccccatctctactaaaaatacaaaaaaattagctgggcgtggtggcgggcacctgtagtcccagctactcgggaggctgaggcaggagaatggcgtgaacccgggaggcggagcttgcagtgagccgaggtggtgccactgcactccagcctgggcgacagagcgagactccgtcaaaaaaaaaaagaaaagaaaagaaagatttttaagaattcagcaaaaactcagccagctctttctatggggcagttgctaatttagttctaggcaaacgtggacacattaaattctcctacaaaccct

SEQ ID NO: 148973 - DNA, 707 bp, Homo sapiens
  Payload ID: 9426
  Gene Symbol: LAIR1
  Gene Name: leukocyte-associated immunoglobulin-like receptor 1
  ENST ID: ENST00000617370
  CDS Start-End: 1-240
gagcagagtgactacctggagctgctggtgaaagaaacctctggaggcccggactccccggacacagagcccggctcctcagctgggactgtgccaggcactgaagcctccggatttgatgcaccaagaatgaggagaaatggcctcccgtcttgtgaacttcaatggggagaaatagttagaatgagcaatagaaatgcactgattcccatacatgcatatacagataaaaatatatgatttgcaatgtagaatttcagacctataatttaaattatattatatatgtttacatcataatatatatatattatatatatattatatatataaggaagataattatataataaaacatgttagtgtatcactacatatgactatagtgtatattatatattatatgaaagatatatttacaatatatagtataataaatttcaagtgttatagttaataaataaatataggtattaatgtaaatatattatctattatgtatacattatgtataactataatagaaaaaatattttatatttaatcataggtttatatcaaatataaattatacattatatattatagtgaatatatgtaacatatattataagttataaatcatatacaattaacattatatacattaaattatatgtatatgtcaagattacataattaaaaatatatttgttatatattataca

SEQ ID NO: 148974 - DNA, 1609 bp, Homo sapiens
  Payload ID: 9426
  Gene Symbol: LAIR1
  Gene Name: leukocyte-associated immunoglobulin-like receptor 1
  ENST ID: ENST00000617386
  CDS Start-End: 192-1052
tctcgtctcactagtgggaagggtggaaagaacaggacagaaagctcttcctcttgtgtgaggcagttgctgtggaagccccataggcaggaggcccccgggcagcacatcctgtctgcttgtgtctgctgcagagttctgtccttgcattggtgcgcctcaggccaggctgcactgctgggacctgggccatgtctccccaccccaccgccctcctgggcctagtgctctgcctggcccagaccatccacacgcaggaggatctgcccagaccctccatctcggctgagccaggcaccgtgatccccctggggagccatgtgactttcgtgtgccggggcccggttggggttcaaacattccgcctggagagggagagtagatccacatacaatgatactgaagatgtgtctcaagctagtccatctgagtcagaggccagattccgcattgactcagtaagtgaaggaaatgccgggccttatcgctgcatctattataagccccctaaatggtctgagcagagtgactacctggagctgctggtgaaagaaacctctggaggcccggactccccggacacagagcccggctcctcagctggacccacgcagaggccgtcggacaacagtcacaatgagcatgcacctgcttcccaaggcctgaaagctgagcatctgtatattctcatcggggtctcagtggtcttcctcttctgtctcctcctcctggtcctcttctgcctccatcgccagaatcagataaagcaggggccccccagaagcaaggacgaggagcagaagccacagcagaggcctgacctggctgttgatgttctagagaggacagcagacaaggccacagtcaatggacttcctgagaaggacagagagacggacacctcggccctggctgcagggagttcccaggaggtgacgtatgctcagctggaccactgggccctcacacagaggacagcccgggctgtgtccccacagtccacaaagcccatggccgagtccatcacgtatgcagccgttgccagacactgaccccatacccacctggcctctgcacctgagggtagaaagtcactctaggaaaagcctgaagcagccatttggaaggcttcctgttggattcctcttcatctagaaagccagccaggcagctgtcctggagacaagagctggagactggaggtttctaaccagcatccagaaggttcgttagccaggtggtcccttctacaatcgagcagctccttggacagactgtttctcagttatttccagagacccagctacagttccctggctgtttctagagacccagctttattcacctgactgtttccagagacccagctaaagtcacctgcctgttctaaaggcccagctacagccaatcagccgatttcctgagcagtgatgccacctccaagcttgtcctaggtgtctgctgtgaacctccagtgaccccagagactttgctgtaattatctgccctgctgaccctaaagaccttcctagaagtcaagagctagccttgagactgtgctatacacacacagctgagagccaagcccagttctctgggttgtgcttta

SEQ ID NO: 148975 - DNA, 1467 bp, Homo sapiens
  Payload ID: 9426
  Gene Symbol: LAIR1
  Gene Name: leukocyte-associated immunoglobulin-like receptor 1
  Uniprot ID: Q6GTX8
  ENST ID: ENST00000620077
  CDS Start-End: 62-874
gcagagttctgtccttgcattggtgcgcctcaggccaggctgcactgctgggacctgggccatgtctccccaccccaccgccctcctgggcctagtgctctgcctggcccagaccatccacacgcaggaggaagatctgcccagaccctccatctcggctgagccaggcaccgtgatccccctggggagccatgtgactttcgtgtgccggggcccggttggggttcaaacattccgcctggagagggagagtagatccacatacaatgatactgaagatgtgtctcaagctagtccatctgagtcagaggccagattccgcattgactcagtaagtgaaggaaatgccgggccttatcgctgcatctattataagccccctaaatggtctgagcagagtgactacctggagctgctggtgaaaggacccacgcagaggccgtcggacaacagtcacaatgagcatgcacctgcttcccaaggcctgaaagctgagcatctgtatattctcatcggggtctcagtggtcttcctcttctgtctcctcctcctggtcctcttctgcctccatcgccagaatcagataaagcaggggccccccagaagcaaggacgaggagcagaagccacagcagaggcctgacctggctgttgatgttctagagaggacagcagacaaggccacagtcaatggacttcctgagaaggacagagagacggacacctcggccctggctgcagggagttcccaggaggtgacgtatgctcagctggaccactgggccctcacacagaggacagcccgggctgtgtccccacagtccacaaagcccatggccgagtccatcacgtatgcagccgttgccagacactgaccccatacccacctggcctctgcacctgagggtagaaagtcactctaggaaaagcctgaagcagccatttggaaggcttcctgttggattcctcttcatctagaaagccagccaggcagctgtcctggagacaagagctggagactggaggtttctaaccagcatccagaaggttcgttagccaggtggtcccttctacaatcgagcagctccttggacagactgtttctcagttatttccagagacccagctacagttccctggctgtttctagagacccagctttattcacctgactgtttccagagacccagctaaagtcacctgcctgttctaaaggcccagctacagccaatcagccgatttcctgagcagtgatgccacctccaagcttgtcctaggtgtctgctgtgaacctccagtgaccccagagactttgctgtaattatctgccctgctgaccctaaagaccttcctagaagtcaagagctagccttgagactgtgctatacacacacagctgagagccaagcccagttctctgggttgtgctttactccacgcatcaataaataattttgaaggcctcaca

SEQ ID NO: 148976 - DNA, 599 bp, Homo sapiens
  Payload ID: 9426
  Gene Symbol: LAIR1
  Gene Name: leukocyte-associated immunoglobulin-like receptor 1
  ENST ID: ENST00000617129
  CDS Start-End: 128-262
agttgctgtggaagccccataggcaggaggcccccgggcagcacatcctgtctgcttgtgtctgctgcagagttctgtccttgcattggtgcgcctcaggccaggctgcactgctgggacctgggccatgtctccccaccccaccgccctcctgggcctagtgctctgcctggcccagaccatccacacgcaggaggtggacgctgagatcctgctctgcttccctcctagaagatctgcccagaccctccatctcggctgagccaggcaccgtgatccccctggggagccatgtgactttcgtgtgccggggcccggttggggttcaaacattccgcctggagagggagagtagatccacatacaatgatactgaagatgtgtctcaagctagtccatctgagtcagaggccagattccgcattgactcagtaagtgaaggaaatgccgggccttatcgctgcatctattataagccccctaaatggtctgagcagagtgactacctggagctgctggtgaaaggacccacgcagaggccgtcggacaacagtcacaatgagcatgcacctgcttcccaaggcctgaaagctgagcat

SEQ ID NO: 148977 - DNA, 2606 bp, Homo sapiens
  Payload ID: 9426
  Gene Symbol: LAIR1
  Gene Name: leukocyte-associated immunoglobulin-like receptor 1
  ENST ID: ENST00000621769
  CDS Start-End: 282-1091
tggtatagcagaagctttttcacatctatgacacccgctatgtcttggtaaaccctggaagggaaaggaggacaaggttaaaatactgttccgaggatctggtctctccacagcgcaggctggaggtggcagcccgtggaaagccaagttcatccaccatcggagcccaggccaggctgccaaggctaatattcaggacaaagccaggcacaggtcgggaatcctatgaagatgatcatcgtcctgaggtcttccttccagggttgcatccgcgacagaagatggaaagagaaatggaagatctgcccagaccctccatctcggctgagccaggcaccgtgatccccctggggagccatgtgactttcgtgtgccggggcccggttggggttcaaacattccgcctggagagggagagtagatccacatacaatgatactgaagatgtgtctcaagctagtccatctgagtcagaggccagattccgcattgactcagtaagtgaaggaaatgccgggccttatcgctgcatctattataagccccctaaatggtctgagcagagtgactacctggagctgctggtgaaagaaacctctggaggcccggactccccggacacagagcccggctcctcagctggacccacgcagaggccgtcggacaacagtcacaatgagcatgcacctgcttcccaaggcctgaaagctgagcatctgtatattctcatcggggtctcagtggtcttcctcttctgtctcctcctcctggtcctcttctgcctccatcgccagaatcagataaagcaggggccccccagaagcaaggacgaggagcagaagccacagcagaggcctgacctggctgttgatgttctagagaggacagcagacaaggccacagtcaatggacttcctgagaaggacagagagacggacacctcggccctggctgcagggagttcccaggaggtgacgtatgctcagctggaccactgggccctcacacagaggacagcccgggctgtgtccccacagtccacaaagcccatggccgagtccatcacgtatgcagccgttgccagacactgaccccatacccacctggcctctgcacctgagggtagaaagtcactctaggaaaagcctgaagcagccatttggaaggcttcctgttggattcctcttcatctagaaagccagccaggcagctgtcctggagacaagagctggagactggaggtttctaaccagcatccagaaggttcgttagccaggtggtcccttctacaatcgagcagctccttggacagactgtttctcagttatttccagagacccagctacagttccctggctgtttctagagacccagctttattcacctgactgtttccagagacccagctaaagtcacctgcctgttctaaaggcccagctacagccaatcagccgatttcctgagcagtgatgccacctccaagcttgtcctaggtgtctgctgtgaacctccagtgaccccagagactttgctgtaattatctgccctgctgaccctaaagaccttcctagaagtcaagagctagccttgagactgtgctatacacacacagctgagagccaagcccagttctctgggttgtgctttactccacgcatcaataaataattttgaaggcctcacatctggcagccccaggcctggtcctgggtgcataggtctctcggacccactctctgccttcacagttgttcaaagctgagtgagggaaacaggacctacgaaaacgtgtcagcgttttctttttaaaatttaattgatcaggattgtacgtattcaaggtgtaaaatgtgataatttgtcgtacacgtacattgtgcaatgacagtcacaatcaattcctcagcgcacccatcgccacggatacgatacattagatattctgaacttgctcatcttaggacttcacattggtgtcagtgttttctgacaaatcacgtgtatcaggaatgaatgagggaggtgtggctgggtgaaggcagagagccgaccctacaggtccacatctgcacatacatgcacaggaatgcatgctctcacacacatgcatacacacacgcacacacacagacatgcacatacactcacacgccccaggaaatccaaggaatcactgagcctgctgttggttgaggcatttctgagtatccaccctacctgtagggtcagatgtactgattgacacagaaaattaccctatgtaccactaggaggcggcagaatctcatttgggttaatctgtgtttgtctttaaaaaacaaaaacaggccgggcatggaggctcacgcctgtaatcccagcactttgggaggctgaggtgggcggatcacgaggtcaggagatcgagaccatcctggctaacacggtgaaaccccatctctactaaaaatacaaaaaaattagccgggtgtggtggtgggtgcctgtagtcccagctactcgggaggctgagggaggagaatggcgtgaacccgggaggcggagtttgcagtgagccgaggtggtgccactgcactccagcctgggcgacagagcgagactccgtc

SEQ ID NO: 148978 - DNA, 705 bp, Homo sapiens
  Payload ID: 9426
  Gene Symbol: LAIR1
  Gene Name: leukocyte-associated immunoglobulin-like receptor 1
  ENST ID: ENST00000622064
  CDS Start-End: 1-240
gagcagagtgactacctggagctgctggtgaaagaaagctctggaggcccggactccccggacacagagcccggctcctcagctgggactgtgccaggcactgaagcctccggatttgatgcaccaagaatgaggagaaatggcctcccgtcttgtgaacttcaatggggagaaatagttagaatgagcaatagaaatgcactgattcccatacatgcatatacagataaaaatatatgatttgcaatgtagaatttcagacctataatttaaattatattatatatgtttacatcataatatatatatatattatatatatattatatatataaggaagataattatataataaaacatgttagtgtatcactacatatgactatagtgtatattatatattatatgaaagatatatttacaatatatagtataataaatttcaagtgttatagttaataaataaatataggtattaatgtaaatatattatctattatgtatacattatgtataactataatagaaaaaatattttatatttaatcataggtttatatcaaatataaattatacattatatattatagtgaatatatgtaacatatattataagttataaatcatatacaattaacattatatacattaaattatatgtatatgtcaagattacataattaaaaatatatttgttatatatta

SEQ ID NO: 148979 - DNA, 1609 bp, Homo sapiens
  Payload ID: 9426
  Gene Symbol: LAIR1
  Gene Name: leukocyte-associated immunoglobulin-like receptor 1
  ENST ID: ENST00000617029
  CDS Start-End: 192-1052
tctcgtctcactagtgggaagggtggaaagaacaggacagaaagctcttcctcttgtgtgaggcagttgctgtggaagccccataggcaggaggcccccgggcagcacatcctgtctgcttgtgtctgctgcagagttctgtccttgcattggtgcgcctcaggccaggctgcactgctgggacctgggccatgtctccccaccccaccgccctcctgggcctagtgctctgcctggcccagaccatccacacgcaggaggatctgcccagaccctccatctcggctgagccaggcaccgtgatccccctggggagccatgtgactttcgtgtgccggggcccggttggggttcaaacattccgcctggagagggagagtagatccacatacaatgatactgaagatgtgtctcaagctagtccatctgagtcagaggccagattccgcattgactcagtaagtgaaggaaatgccgggccttatcgctgcatctattataagccccctaaatggtctgagcagagtgactacctggagctgctggtgaaagaaacctctggaggcccggactccccggacacagagcccggctcctcagctggacccacgcagaggccgtcggacaacagtcacaatgagcatgcacctgcttcccaaggcctgaaagctgagcatctgtatattctcatcggggtctcagtggtcttcctcttctgtctcctcctcctggtcctcttctgcctccatcgccagaatcagataaagcaggggccccccagaagcaaggacgaggagcagaagccacagcagaggcctgacctggctgttgatgttctagagaggacagcagacaaggccacagtcaatggacttcctgagaaggacagagagacagacacctcggccctggctgcagggagttcccaggaggtgacgtatgctcagctggaccactgggccctcacacagaggacagcccgggctgtgtccccacagtccacaaagcccatggccgagtccatcacgtatgcagccgttgccagacactgaccccatacccacctggcctctgcacctgagggtagaaagtcactctaggaaaagcctgaagcagccatttggaaggcttcctgttggattcctcttcatctagaaagccagccaggcagctgtcctggagacaagagctggagactggaggtttctaaccagcatccagaaggttcgttagccaggtggtcccttctacaatcgagcagctccttggacagactgtttctcagttatttccagagacccagctacagttccctggctgtttctagagacccagctttattcacctgactgtttccagagacccagctaaagtcacctgcctgttctaaaggcccagctacagccaatcagccgatttcctgagcagtgatgccacctccaagcttgtcctaggtgtctgctgtgaacctccagtgaccccagagactttgctgtaattatctgccctgctgaccctaaagaccttcctagaagtcaagagctagccttgagactgtgctatacacacacagctgagagccaagcccagttctctgggttgtgcttta

SEQ ID NO: 148980 - DNA, 1633 bp, Homo sapiens
  Payload ID: 9426
  Gene Symbol: LAIR1
  Gene Name: leukocyte-associated immunoglobulin-like receptor 1
  ENST ID: ENST00000613311
  CDS Start-End: 216-1076
tttttcagaaaccaaggccctccctctcgtctcactagtgggaagggtggaaagaacaggacagaaagctcttcctcttgtgtgaggcagttgctgtggaagccccataggcaggaggcccccgggcagcacatcctgtctgcttgtgtctgctgcagagttctgtccttgcattggtgcgcctcaggccaggctgcactgctgggacctgggccatgtctccccaccccaccgccctcctgggcctagtgctctgcctggcccagaccatccacacgcaggaggatctgcccagaccctccatctcggctgagccaggcaccgtgatccccctggggagccatgtgactttcgtgtgccggggcccggttggggttcaaacattccgcctggagagggagagtagatccacatacaatgatactgaagatgtgtctcaagctagtccatctgagtcagaggccagattccgcattgactcagtaagtgaaggaaatgccgggccttatcgctgcatctattataagccccctaaatggtctgagcagagtgactacctggagctgctggtgaaagaaacctctggaggccgggactccccggacacagagcccggctcctcagctggacccacgcagaggccgtcggacaacagtcacaatgagcatgcacctgcttcccaaggcctgaaagctgagcatctgtatattctcatcggggtctcagtggtcttcctcttctgtctcctcctcctggtcctcttctgcctccatcgccagaatcagataaagcaggggccccccagaagcaaggacgaggagcagaagccacagcagaggcctgacctggctgttgatgttctagagaggacagcagacaaggccacagtcaatggacttcctgagaaggacagagagacagacacctcggccctggctgcagggagttcccaggaggtgacgtatgctcagctggaccactgggccctcacacagaggacagcccgggctgtgtccccacagtccacaaagcccatggccgagtccatcacgtatgcagccgttgccagacactgaccccatacccacctggcctctgcacctgagggtagaaagtcactctaggaaaagcctgaagcagccatttggaaggcttcctgttggattcctcttcatctagaaagccagccaggcagctgtcctggagacaagagctggagactggaggtttctaaccagcatccagaaggttcgttagccaggtggtcccttctacaatcgagcagctccttggacagactgtttctcagttatttccagagacccagctacagttccctggctgtttctagagacccagctttattcacctgactgtttccagagacccagctaaagtcacctgcctgttctaaaggcccagctacagccaatcagccgatttcctgagcagtgatgccacctccaagcttgtcctaggtgtctgctgtgaacctccagtgaccccagagactttgctgtaattatctgccctgctgaccctaaagaccttcctagaagtcaagagctagccttgagactgtgctatacacacacagctgagagccaagcccagttctctgggttgtgcttta

SEQ ID NO: 148981 - DNA, 699 bp, Homo sapiens
  Payload ID: 9427
  Gene Symbol: LAIR2
  Gene Name: leukocyte-associated immunoglobulin-like receptor 2
  Uniprot ID: Q6ISS4
  ENST ID: ENST00000301202
  CDS Start-End: 123-581
aacagaacagaaagctctccctcttgtgtgaggcagttgctgtggaagccccacgggcaggaggcccccggccagcacatcctgtctgcttgtgtctgctgcagagttctgggaccggggccatgtctccacacctcactgctctcctgggcctagtgctctgcctggcccagaccatccacacgcaggagggggcccttcccagaccctccatctcggctgagccaggcactgtgatctccccggggagccatgtgactttcatgtgccggggcccggttggggttcaaacattccgcctggagagggaggatagagccaagtacaaagatagttataatgtgtttcgacttggtccatctgagtcagaggccagattccacattgactcagtaagtgaaggaaatgccgggctttatcgctgcctctattataagccccctggatggtctgagcacagtgacttcctggagctgctggtgaaagaaagctctggaggcccggactccccggacacagagcccggctcctcagctgggactgtgccaggcactgaagcctccggatttgatgcaccatgaatgaggagaaatggcctcccgtcttgtgaacttcaatggggagaaataattagaatgagcaatagaaatgcacagatgcctatacatacatatacaaataaaaagatacgattcgcaa

SEQ ID NO: 148982 - DNA, 538 bp, Homo sapiens
  Payload ID: 9427
  Gene Symbol: LAIR2
  Gene Name: leukocyte-associated immunoglobulin-like receptor 2
  Uniprot ID: Q6ISS4
  ENST ID: ENST00000351841
  CDS Start-End: 13-420
gggaccggggccatgtctccacacctcactgctctcctgggcctagtgctctgcctggcccagaccatccacacgcaggagggggcccttcccagaccctccatctcggctgagccaggcactgtgatctccccggggagccatgtgactttcatgtgccggggcccggttggggttcaaacattccgcctggagagggaggatagagccaagtacaaagatagttataatgtgtttcgacttggtccatctgagtcagaggccagattccacattgactcagtaagtgaaggaaatgccgggctttatcgctgcctctattataagccccctggatggtctgagcacagtgacttcctggagctgctggtgaaagggactgtgccaggcactgaagcctccggatttgatgcaccatgaatgaggagaaatggcctcccgtcttgtgaacttcaatggggagaaataattagaatgagcaatagaaatgcacagatgcctatacatacatatacaaataaaaagatacgattcgcaa

SEQ ID NO: 148983 - DNA, 631 bp, Homo sapiens
  Payload ID: 9427
  Gene Symbol: LAIR2
  Gene Name: leukocyte-associated immunoglobulin-like receptor 2
  ENST ID: ENST00000412608
  CDS Start-End: 364-631
cttcttaaggatttgagctgtgatgctggcacctggcagaccacatcctgtgcggttttcagttttgctctgttcctgaccctggtatagcagaagctttttcacatctatgacacccgctatgtcttggtaaaccctggaagggaaaggaggacaaggttaaaatactgttccgaggacctggtctctccacagcgcaggctggaggtggcagcccgtggaaagccaagttcatccaccatcggagcccaggccaggctgccaaggctaatattcaggacaaagccaggcacaggtcgggaatcctatgaagatgatcatcgtcctgaggtcttccttccagggttgcatccgggccagaagatggaaagagaaatggtgctctgcctggcccagaccatccacacgcaggagggggcccttcccagaccctccatctcggctgagccaggcactgtgatctccccggggagccatgtgactttcatgtgccggggcccggttggggttcaaacattccgcctggagagggaggatagagccaagtacaaagatagttataatgtgtttcgacttggtccatctgagtcagaggccagattccacattgactcagtaagtgaaggaaatg

SEQ ID NO: 148984 - DNA, 699 bp, Homo sapiens
  Payload ID: 9427
  Gene Symbol: LAIR2
  Gene Name: leukocyte-associated immunoglobulin-like receptor 2
  Uniprot ID: Q6ISS4
  ENST ID: ENST00000622556
  CDS Start-End: 123-581
aacagaacagaaagctctccctcttgtgtgaggcagttgctgtggaaaccccacgggcaggaggcccccggccagcacatcctgtctgcttgtgtctgctgcagagttctgggaccggggccatgtctccacacctcactgctctcctgggcctagtgctctgcctggcccagaccatccacacgcaggagggggcccttcccagaccctccatctcggctgagccaggcactgtgatctccccggggagccatgtgactttcatgtgccggggcccggttggggttcaaacattccgcctggagagggaggatagagccaagtacaaagatagttataatgtgtttcgacttggtccatctgagtcagaggccagattccacattgactcagtaagtgaaggaaatgccgggctttatcgctgcctctattataagccccctggatggtctgagcacagtgacttcctggagctgctggtgaaagaaagctctggaggcccggactccccggacacagagcccggctcctcagctgggactgtgccaggcactgaagcctccggatttgatgcaccatgaatgaggagaaatggcctcccgtcttgtgaacttcaatggggagaaataattagaatgagcaatagaaatgcacagatgcctatacatacatatacaaataaaaagatacgattcgcaa

SEQ ID NO: 148985 - DNA, 663 bp, Homo sapiens
  Payload ID: 9427
  Gene Symbol: LAIR2
  Gene Name: leukocyte-associated immunoglobulin-like receptor 2
  ENST ID: ENST00000611580
  CDS Start-End: 364-663
cttcttaaggatttgagctgtgatgctggcacctggcagaccacatcctgtgcggttttcagttttgctctgttcctgaccctggtatagcagaagctttttcacatctatgacacccgctatgtcttggtaaaccctggaagggaaaggaggacaaggttaaaatactgttccgaggacctggtctctccacagcgcaggctggaggtggcagcccatggaaagccaagttcatccaccatcggagcccaggccaggctgccaaggctaatattcaggacaaagccaggcacaggtcgggaatcctatgaagatgatcatcgtcctgaggtcttccttccagggttgcatccgggccagaagatggaaagagaaatggtgctctgcctggcccagaccatccacacgcaggagggggcccttcccagaccctccatctcggctgagccaggcactgtgatctccccggggagccatgtgactttcatgtgccggggcccggttggggttcaaacattccgcctggagagggaggatagagccaagtacaaagatagttataatgtgtttcgacttggtccatctgagtcagaggccagattccacattgactcagtaagtgaaggaaatgccgggctttatcgctgcctctattataagccc

SEQ ID NO: 148986 - DNA, 543 bp, Homo sapiens
  Payload ID: 9427
  Gene Symbol: LAIR2
  Gene Name: leukocyte-associated immunoglobulin-like receptor 2
  Uniprot ID: Q6ISS4
  ENST ID: ENST00000620256
  CDS Start-End: 18-425
gttctgggaccggggccatgtctccacacctcactgctctcctgggcctagtgctctgcctggcccagaccatccacacgcaggagggggcccttcccagaccctccatctcggctgagccaggcactgtgatctccccggggagccatgtgactttcatgtgccggggcccggttggggttcaaacattccgcctggagagggaggatagagccaagtacaaagatagttataatgtgtttcgacttggtccatctgagtcagaggccagattccacattgactcagtaagtgaaggaaatgccgggctttatcgctgcctctattataagccccctggatggtctgagcacagtgacttcctggagctgctggtgaaagggactgtgccaggcactgaagcctccggatttgatgcaccatgaatgaggagaaatggcctcccgtcttgtgaacttcaatggggagaaataattagaatgagcaatagaaatgcacagatgcctatacatacatatacaaataaaaagatacgattcgcaa

SEQ ID NO: 148987 - DNA, 1259 bp, Homo sapiens
  Payload ID: 9427
  Gene Symbol: LAIR2
  Gene Name: leukocyte-associated immunoglobulin-like receptor 2
  Uniprot ID: Q6ISS4
  ENST ID: ENST00000612901
  CDS Start-End: 262-720
attctgtcttgtcccatagatttagaaagaggctgacacatcgggtaactagtttaaggtcatctgatcatgcgggtaagcgacatttttcagaaaccaaggccctccctctcatctcactagtgggaagggtggaaagaacagaacagaaagctctccctcttgtgtgaggcagttgctgtggaaaccccacgggcaggaggcccccggccagcacatcctgtctgcttgtgtctgctgcagagttctgggaccggggccatgtctccacacctcactgctctcctgggcctagtgctctgcctggcccagaccatccacacgcaggagggggcccttcccagaccctccatctcggctgagccaggcactgtgatctccccggggagccatgtgactttcatgtgccggggcccggttggggttcaaacattccgcctggagagggaggatagagccaagtacaaagatagttataatgtgtttcgacttggtccatctgagtcagaggccagattccacattgactcagtaagtgaaggaaatgccgggctttatcgctgcctctattataagccccctggatggtctgagcacagtgacttcctggagctgctggtgaaagaaagctctggaggcccggactccccggacacagagcccggctcctcagctgggactgtgccaggcactgaagcctccggatttgatgcaccatgaatgaggagaaatggcctcccgtcttgtgaacttcaatggggagaaataattagaatgagcaatagaaatgcacagatgcctatacatacatatacaaataaaaagatacgattcgcaatggagaatttcagacctatcatttcaattatattaaatatgttcacgtaatgtattacatatataaggaacataattatataataaaaatatgttaacatatcaccacatatcactataattatattatatgaaagatttatttacaatatatagtacaataaatttcaggtgttattataattaataaacaggtacaaacataaatatatattatctattatttatagattataattataatagaaaaattttatatttaattatatgtttatatgtaatatacattatacattatatattatagtgaatatatgcaacatatattataagtataaatcatatacaattaacattatatacattaaattatgatgtatatgtcaagattacataatttaatatatatttgttatatatta

SEQ ID NO: 148988 - DNA, 543 bp, Homo sapiens
  Payload ID: 9427
  Gene Symbol: LAIR2
  Gene Name: leukocyte-associated immunoglobulin-like receptor 2
  ENST ID: ENST00000621509
  CDS Start-End: 18-543
gttctgggaccggggccatgtctccacacctcactgctctcctgggcctagtgctctgcctggcccagaccatccacacgcaggagggggcccttcccagaccctccatctcggctgagccaggcactgtgatctccccggggagccatgtgactttcatgtgccggggcccggttggggttcaaacattccgcctggagagggaggatagagccaagtacaaagatagttataatgtgtttcgacttggtccatctgagtcagaggccagattccacattgactcagtaagtgaaggaaatgccgggctttatcgctgcctctattataagccccctggatggtctgagcacagtgacttcctggagctgctggtgaaagggactgtgccaggcactgaagcctccggatttgatgcaccaagaatgaggagaaatggcctcccgtcttgtgaacttcaatggggagaaataattagaatgagcaatagaaatgcacagatgcctatacatacatatacaaataaaaagatacgattcgcaa

SEQ ID NO: 148989 - DNA, 595 bp, Homo sapiens
  Payload ID: 9427
  Gene Symbol: LAIR2
  Gene Name: leukocyte-associated immunoglobulin-like receptor 2
  ENST ID: ENST00000622782
  CDS Start-End: 364-595
cttcttaaggatttgagctgtgatgctggcacctggcagaccacatcctgtgcggttttcagttttgctctgttcctgaccctggtatagcagaagctttttcacatctatgacacccgctatgtcttggtaaaccctggaagggaaaggaggacaaggttaaaatactgttccgaggacctggtctctccacagcgcaggctggaggtggcagcccatggaaagccaagttcatccaccatcggagcccaggccaggctgccaaggctaatattcaggacaaagccaggcacaggtcgggaatcctatgaagatgatcatcgtcctgaggtcttccttccagggttgcatccgggccagaagatggaaagagaaatgggggcccttcccagaccctccatctcggctgagccaggcactgtgatctccccggggagccatgtgactttcatgtgccggggcccggttggggttcaaacattccgcctggagagggaggatagagccaagtacaaagatagttataatgtgtttcgacttggtccatctgagtcagaggccagattccacattgactcagtaagtgaaggaaatg

SEQ ID NO: 148990 - DNA, 709 bp, Homo sapiens
  Payload ID: 9427
  Gene Symbol: LAIR2
  Gene Name: leukocyte-associated immunoglobulin-like receptor 2
  ENST ID: ENST00000621365
  CDS Start-End: 364-709
cttcttaaggatttgagctgtgatgctggcacctggcagaccacatcctgtgcggttttcagttttgctctgttcctgaccctggtatagcagaagctttttcacatctatgacacccgctatgtcttggtaaaccctggaagggaaaggaggacaaggttaaaatactgttccgaggacctggtctctccacagcgcaggctggaggtggcagcccgtggaaagccaagttcatccaccatcggagcccaggccaggctgccaaggctaatattcaggacaaagccaggcacaggtcgggaatcctatgaagatgatcatcgtcctgaggtcttccttccagggttgcatccgggccagaagatggaaagagaaatggtgctctgcctggcccagaccatccacacgcaggagggggcccttcccagaccctccatctcggctgagccaggcactgtgatctccccggggagccatgtgactttcatgtgccggggcccggttggggttcaaacattccgcctggagagggaggatagagccaagtacaaagatagttataatgtgtttcgacttggtccatctgagtcagaggccagattccacattgactcagtaagtgaaggaaatgccgggctttatcgctgcctctattataagccccctggatggtctgagcacagtgacttcctggagctgctggtgaaag

SEQ ID NO: 148991 - DNA, 595 bp, Homo sapiens
  Payload ID: 9427
  Gene Symbol: LAIR2
  Gene Name: leukocyte-associated immunoglobulin-like receptor 2
  ENST ID: ENST00000622161
  CDS Start-End: 364-595
cttcttaaggatttgagctgtgatgctggcacctggcagaccacatcctgtgcggttttcagttttgctctgttcctgaccctggtatagcagaagctttttcacatctatgacacccgctatgtcttggtaaaccctggaagggaaaggaggacaaggttaaaatactgttccgaggacctggtctctccacagcgcaggctggaggtggcagcccgtggaaagccaagttcatccaccatcggagcccaggccaggctgccaaggctaatattcaggacaaagccaggcacaggtcgggaatcctatgaagatgatcatcgtcctgaggtcttccttccagggttgcatccgggccagaagatggaaagagaaatgggggcccttcccagaccctccatctcggctgagccaggcactgtgatctccccggggagccatgtgactttcatgtgccggggcccggttggggttcaaacattccgcctggagagggaggatagagccaagtacaaagatagttataatgtgtttcgacttggtccatctgagtcagaggccagattccacattgactcagtaagtgaaggaaatg

SEQ ID NO: 148992 - DNA, 595 bp, Homo sapiens; identical to SEQ ID NO: 148991
  Payload ID: 9427
  Gene Symbol: LAIR2
  Gene Name: leukocyte-associated immunoglobulin-like receptor 2
  ENST ID: ENST00000613846
  CDS Start-End: 364-595

SEQ ID NO: 148993 - DNA, 631 bp, Homo sapiens; identical to SEQ ID NO: 148983
  Payload ID: 9427
  Gene Symbol: LAIR2
  Gene Name: leukocyte-associated immunoglobulin-like receptor 2
  ENST ID: ENST00000613910
  CDS Start-End: 364-631

SEQ ID NO: 148994 - DNA, 538 bp, Homo sapiens; identical to SEQ ID NO: 148982
  Payload ID: 9427
  Gene Symbol: LAIR2
  Gene Name: leukocyte-associated immunoglobulin-like receptor 2
  Uniprot ID: Q6ISS4
  ENST ID: ENST00000621280
  CDS Start-End: 13-420

SEQ ID NO: 148995 - DNA, 1259 bp, Homo sapiens
  Payload ID: 9427
  Gene Symbol: LAIR2
  Gene Name: leukocyte-associated immunoglobulin-like receptor 2
  ENST ID: ENST00000618103
  CDS Start-End: 262-888
attctgtcttgtcccatagatttagaaagaggctgacacatcgggtaactagtttaaggtcatctgatcatgcgggtaagcgacatttttcagaaaccaaggccctccctctcatctcactagtgggaagggtggaaagaacagaacagaaagctctccctcttgtgtgaggcagttgctgtggaaaccccacgggcaggaggcccccggccagcacatcctgtctgcttgtgtctgctgcagagttctgggaccggggccatgtctccacacctcactgctctcctgggcctagtgctctgcctggcccagaccatccacacgcaggagggggcccttcccagaccctccatctcggctgagccaggcactgtgatctccccggggagccatgtgactttcatgtgccggggcccggttggggttcaaacattccgcctggagagggaggatagagccaagtacaaagatagttataatgtgtttcgacttggtccatctgagtcagaggccagattccacattgactcagtaagtgaaggaaatgccgggctttatcgctgcctctattataagccccctggatggtctgagcacagtgacttcctggagctgctggtgaaagaaagctctggaggcccggactccccggacacagagcccggctcctcagctgggactgtgccaggcactgaagcctccggatttgatgcaccaagaatgaggagaaatggcctcccgtcttgtgaacttcaatggggagaaataattagaatgagcaatagaaatgcacagatgcctatacatacatatacaaataaaaagatacgattcgcaatggagaatttcagacctatcatttcaattatattaaatatgttcacgtaatgtattacatatataaggaacataattatataataaaaatatgttaacatatcaccacatatcactataattatattatatgaaagatttatttacaatatatagtacaataaatttcaggtgttattataattaataaacaggtacaaacataaatatatattatctattatttatagattataattataatagaaaaattttatatttaattatatgtttatatgtaatatacattatacattatatattatagtgaatatatgcaacatatattataagtataaatcatatacaattaacattatatacattaaattatgatgtatatgtcaagattacataatttaatatatatttgttatatatta

SEQ ID NO: 148996 - DNA, 595 bp, Homo sapiens; identical to SEQ ID NO: 148991
  Payload ID: 9427
  Gene Symbol: LAIR2
  Gene Name: leukocyte-associated immunoglobulin-like receptor 2
  ENST ID: ENST00000610651
  CDS Start-End: 364-595

SEQ ID NO: 148997 - DNA, 2139 bp, Homo sapiens
  Payload ID: 9428
  Gene Symbol: LTA4H
  Gene Name: leukotriene A4 hydrolase
  Uniprot ID: P09960
  ENST ID: ENST00000228740
  CDS Start-End: 143-1978
aagaaacttcctttcccggcgtgcaccgcgaatccctcctcctcttctttacctctctccctcctcctcaggttctctatcgacgagtctggtagctgagcgttgggctgtaggtcgctgtgctgtgtgatcccccagagccatgcccgagatagtggatacctgttcgttggcctctccggcttccgtctgccggaccaagcacctgcacctgcgctgcagcgtcgactttactcgccggacgctgaccgggactgctgctctcacggtccagtctcaggaggacaatctgcgcagcctggttttggatacaaaggaccttacaatagaaaaagtagtgatcaatggacaagaagtcaaatatgctcttggagaaagacaaagttacaagggatcgccaatggaaatctctcttcctatcgctttgagcaaaaatcaagaaattgttatagaaatttcttttgagacctctccaaaatcttctgctctccagtggctcactcctgaacagacttctgggaaggaacacccatatctctttagtcagtgccaggccatccactgcagagcaatccttccttgtcaggacactccttctgtgaaattaacctatactgcagaggtgtctgtccctaaagaactggtggcacttatgagtgctattcgtgatggagaaacacctgacccagaagacccaagcaggaaaatatacaaattcatccaaaaagttccaataccctgctacctgattgctttagttgttggagctttagaaagcaggcaaattggcccaagaactttggtgtggtctgagaaagagcaggtggaaaagtctgcttatgagttttctgagactgaatctatgcttaaaatagcagaagatctgggaggaccgtatgtatggggacagtatgacctattggtcctgccaccatccttcccttatggtggcatggagaatccttgccttacttttgtaactcctactctactggcaggcgacaagtcactctccaatgtcattgcacatgaaatatctcatagctggacagggaatctagtgaccaacaaaacttgggatcacttttggttaaatgagggacatactgtgtacttggaacgccacatttgcggacgattgtttggtgaaaagttcagacattttaatgctctgggaggatggggagaactacagaattcggtaaagacatttggggagacacatcctttcaccaaacttgtggttgatctgacagatatagaccctgatgtagcttattcttcagttccctatgagaagggctttgctttacttttttaccttgaacaactgcttggaggaccagagattttcctaggattcttaaaagcttatgttgagaagttttcctataagagcataactactgatgactggaaggatttcctgtattcctattttaaagataaggttgatgttctcaatcaagttgattggaatgcctggctctactctcctggactgcctcccataaagcccaattatgatatgactctgacaaatgcttgtattgccttaagtcaaagatggattactgccaaagaagatgatttaaattcattcaatgccacagacctgaaggatctctcttctcatcaattgaatgagtttttagcacagacgctccagagggcacctcttccattggggcacataaagcgaatgcaagaggtgtacaacttcaatgccattaacaattctgaaatacgattcagatggctgcggctctgcattcaatccaagtgggaggacgcaattcctttggcgctaaagatggcaactgaacaaggaagaatgaagtttacccggcccttattcaaggatcttgctgcctttgacaaatcccatgatcaagctgtccgaacctaccaagagcacaaagcaagcatgcatcccgtgactgcaatgctggtggggaaagacttaaaagtggattaaagacctgcgtattgatgattttagagatttctcttttttaaatggaattcgtaaagaaatataaaacttcagctcacaattaaaactgtctttttagttttggctttttattgttttgttggtgattttactgaaataaagttgagctacttcttcttata

SEQ ID NO: 148998 - DNA, 1908 bp, Homo sapiens
  Payload ID: 9428
  Gene Symbol: LTA4H
  Gene Name: leukotriene A4 hydrolase
  Uniprot ID: P09960
  ENST ID: ENST00000413268
  CDS Start-End: 146-1672
attctcctgcctcagcctcccgagtagctgggactacaggcgcatgtttgtcttttaaagcaacaagggaagagggcaagaggatgcatgggcttgggagtttattttctctcctcctgtctacacctcctctaatctgtctcccatgctgccacagagaaatctttctaaaagacaagtaccgaccatgcatatcccagttaagactcgtcgacttcttgcagccttaaaggttttggatacaaaggaccttacaatagaaaaagtagtgatcaatggacaagaagtcaaatatgctcttggagaaagacaaagttacaagggatcgccaatggaaatctctcttcctatcgctttgagcaaaaatcaagaaattgttatagaaatttcttttgagacctctccaaaatcttctgctctccagtggctcactcctgaacagacttctgggaaggaacacccatatctctttagtcagtgccaggccatccactgcagagcaatccttccttgtcaggacactccttctgtgaaattaacctatactgcagaggtgtctgtccctaaagaactggtggcacttatgagtgctattcgtgatggagaaacacctgacccagaagacccaagcaggaaaatatacaaattcatccaaaaagttccaataccctgctacctgattgctttagttgttggagctttagaaagcaggcaaattggcccaagaactttggtgtggtctgagaaagagcaggtggaaaagtctgcttatgagttttctgagactgaatctatgcttaaaatagcagaagatctgggaggaccgtatgtatggggacagtatgacctattggtcctgccaccatccttcccttatggtggcatggagaatccttgccttacttttgtaactcctactctactggcaggcgacaagtcactctccaatgtcattgcacatgaaatatctcatagctggacagggaatctagtgaccaacaaaacttgggatcacttttggttaaatgagggacatactgtgtacttggaacgccacatttgcggacgattgtttggtgaaaagttcagacattttaatgctctgggaggatggggagaactacagaattcggtaaagacatttggggagacacatcctttcaccaaacttgtggttgatctgacagatatagaccctgatgtagcttattcttcagttccctatgagaagggctttgctttacttttttaccttgaacaactgcttggaggaccagagattttcctaggattcttaaaagcttatgttgagaagttttcctataagagcataactactgatgactggaaggatttcctgtattcctattttaaagataaggttgatgttctcaatcaagttgattggaatgcctggctctactctcctggactgcctcccataaagcccaattatgatatgactctgacaaatgcttgtattgccttaagtcaaagatggattactgccaaagaagatgatttaaattcattcaatgccacagacctgaaggatctctcttctcatcaattgaatgagtttttagcacagacgctccagaggatggctgcggctctgcattcaatccaagtgggaggacgcaattcctttggcgctaaagatggcaactgaacaaggaagaatgaagtttacccggcccttattcaaggatcttgctgcctttgacaaatcccatgatcaagctgtccgaacctaccaagagcacaaagcaagcatgcatcccgtgactgcaatgctggtggggaaagacttaaaagtggattaaagacctgcgtattgatgattttagagatttctcttttttaaatggaattcgtaaagaaatataaaacttcagctcacaatta

SEQ ID NO: 148999 - DNA, 1810 bp, Homo sapiens
  Payload ID: 9428
  Gene Symbol: LTA4H
  Gene Name: leukotriene A4 hydrolase
  ENST ID: ENST00000548852
  CDS Start-End: 123-521
gtgcaccgcgaatccctcctcctcttctttacctctctccctcctcctcaggttctctatcgacgagtctggtagctgagcgttgggctgtaggtcgctgtgctgtgtgatcccccagagccatgcccgagatagtggatacctgttcgttggcctctccggcttccgtctgccggaccaagcacctgcacctgcgctgcagcgtcgactttactcgccggacgctgaccgggactgctgctctcacggtccagtctcaggaggacaatctgcgcagcctggttttggatacaaaggaccttacaatagaaaaagtagtgatcaatggacaagaagtcaaatatgctcttggagaaagacaaagttacaagggatcgccaatggaaatctctcttcctatcgctttgagcaatggctcactcctgaacagacttctgggaaggaacacccatatctctttagtcagtgccaggccatccactgcagagcaatccttccttgtcaggacactccttctgtgaaattaacctatactgcagaggtgtctgtccctaaagaactggtggcacttatgagtgctattcgtgatggagaaacacctgacccagaagacccaagcaggaaaatatacaaattcatccaaaaagttccaataccctgctacctgattgctttagttgttggagctttagaaagcaggcaaattggcccaagaactttggtgtggtctgagaaagagcaggtggaaaagtctgcttatgagttttctgagactgaatctatgcttaaaatagcagaagatctgggaggaccgtatgtatggggacagtatgacctattggtcctgccaccatccttcccttatggtggcatggagaatccttgccttacttttgtaactcctactctactggcaggcgacaagtcactctccaatgtcattgcacatgaaatatctcatagctggacagggaatctagtgaccaacaaaacttgggatcacttttggttaaatgagggacatactgtgtacttggaacgccacatttgcggacgattgtttggtgaaaagttcagacattttaatgctctgggaggatggggagaactacagaattcggtaaagacatttggggagacacatcctttcaccaaacttgtggttgatctgacagatatagaccctgatgtagcttattcttcagttccctatgagaagggctttgctttacttttttaccttgaacaactgcttggaggaccagagattttcctaggattcttaaaagcttatgttgagaagttttcctataagagcataactactgatgactggaaggatttcctgtattcctattttaaagataaggttgatgttctcaatcaagttgattggaatgcctggctctactctcctggactgcctcccataaagcccaattatgatatgactctgacaaatgcttgtattgccttaagtcaaagatggattactgccaaagaagatgatttaaattcattcaatgccacagacctgaaggatctctcttctcatcaattgaatgagtttttagcacagacgctccagaggctcctttcttccaaggaatcctgttgaaatgatacggtatacttctttattttgctcttaggcacctcttccattggggcacataaagcgaatgcaagaggtgtacaacttcaatgccattaacaattctgaaatacgattcagatggctgcggctctgcattcaatccaagtgggaggacgcaattcctttggcgctaaagatggcaactgaacaagg

SEQ ID NO: 149000 - DNA, 2025 bp, Homo sapiens
  Payload ID: 9428
  Gene Symbol: LTA4H
  Gene Name: leukotriene A4 hydrolase
  Uniprot ID: P09960
  ENST ID: ENST00000552789
  CDS Start-End: 103-1866
atgtttgtcttttaaagcaacaagggaagagggcaagaggatgcatgggcttgggagtttattttctctcctcctgtctacacctcctctaatctgtctcccatgctgccacagagaaatctttctaaaagacaagtaccgaccatgcatatcccagttaagactcgtcgacttcttgcagccttaaaggttttggatacaaaggaccttacaatagaaaaagtagtgatcaatggacaagaagtcaaatatgctcttggagaaagacaaagttacaagggatcgccaatggaaatctctcttcctatcgctttgagcaaaaatcaagaaattgttatagaaatttcttttgagacctctccaaaatcttctgctctccagtggctcactcctgaacagacttctgggaaggaacacccatatctctttagtcagtgccaggccatccactgcagagcaatccttccttgtcaggacactccttctgtgaaattaacctatactgcagaggtgtctgtccctaaagaactggtggcacttatgagtgctattcgtgatggagaaacacctgacccagaagacccaagcaggaaaatatacaaattcatccaaaaagttccaataccctgctacctgattgctttagttgttggagctttagaaagcaggcaaattggcccaagaactttggtgtggtctgagaaagagcaggtggaaaagtctgcttatgagttttctgagactgaatctatgcttaaaatagcagaagatctgggaggaccgtatgtatggggacagtatgacctattggtcctgccaccatccttcccttatggtggcatggagaatccttgccttacttttgtaactcctactctactggcaggcgacaagtcactctccaatgtcattgcacatgaaatatctcatagctggacagggaatctagtgaccaacaaaacttgggatcacttttggttaaatgagggacatactgtgtacttggaacgccacatttgcggacgattgtttggtgaaaagttcagacattttaatgctctgggaggatggggagaactacagaattcggtaaagacatttggggagacacatcctttcaccaaacttgtggttgatctgacagatatagaccctgatgtagcttattcttcagttccctatgagaagggctttgctttacttttttaccttgaacaactgcttggaggaccagagattttcctaggattcttaaaagcttatgttgagaagttttcctataagagcataactactgatgactggaaggatttcctgtattcctattttaaagataaggttgatgttctcaatcaagttgattggaatgcctggctctactctcctggactgcctcccataaagcccaattatgatatgactctgacaaatgcttgtattgccttaagtcaaagatggattactgccaaagaagatgatttaaattcattcaatgccacagacctgaaggatctctcttctcatcaattgaatgagtttttagcacagacgctccagagggcacctcttccattggggcacataaagcgaatgcaagaggtgtacaacttcaatgccattaacaattctgaaatacgattcagatggctgcggctctgcattcaatccaagtgggaggacgcaattcctttggcgctaaagatggcaactgaacaaggaagaatgaagtttacccggcccttattcaaggatcttgctgcctttgacaaatcccatgatcaagctgtccgaacctaccaagagcacaaagcaagcatgcatcccgtgactgcaatgctggtggggaaagacttaaaagtggattaaagacctgcgtattgatgattttagagatttctcttttttaaatggaattcgtaaagaaatataaaacttcagctcacaattaaaactgtctttttagttttggctttttattgttttgttggtgattttactgaaataaagttgagctacttcttctta

SEQ ID NO: 149001 - DNA, 1616 bp, Homo sapiens
  Payload ID: 9429
  Gene Symbol: LTB4R
  Gene Name: leukotriene B4 receptor
  Uniprot ID: Q15722
  ENST ID: ENST00000345363
  CDS Start-End: 322-1380
ttcagttctagcgtcaacccggtgctctacgtcttcaccgctggagatctgctgccccgggcaggtccccgtttcctcacgcggctcttcgaaggctctggggaggcccgagggggcggccgctctagggaagggaccatggagctccgaactacccctcagctgaaagtggtggggcagggccgcggcaatggagacccggggggtgggatggagaaggacggtccggaatgggacctttgacagcagaccctacaacctgctgcccttccctgtccctttccaccccccacccaccctccagaggtcctcccgacggccatgaacactacatcttctgcagcacccccctcactaggtgtagagttcatctctctgctggctatcatcctgctgtcagtggcgctggctgtggggcttcccggcaacagctttgtggtgtggagtatcctgaaaaggatgcagaagcgctctgtcactgccctgatggtgctgaacctggccctggccgacctggccgtattgctcactgctccctttttccttcacttcctggcccaaggcacctggagttttggactggctggttgccgcctgtgtcactatgtctgcggagtcagcatgtacgccagcgtcctgcttatcacggccatgagtctagaccgctcactggcggtggcccgcccctttgtgtcccagaagctacgcaccaaggcgatggcccggcgggtgctggcaggcatctgggtgttgtcctttctgctggccacacccgtcctcgcgtaccgcacagtagtgccctggaaaacgaacatgagcctgtgcttcccgcggtaccccagcgaagggcaccgggccttccatctaatcttcgaggctgtcacgggcttcctgctgcccttcctggctgtggtggccagctactcggacatagggcgtcggctacaggcccggcgcttccgccgcagccgccgcaccggccgcctggtggtgctcatcatcctgaccttcgccgccttctggctgccctaccacgtggtgaacctggctgaggcgggccgcgcgctggccggccaggccgccgggttagggctcgtggggaagcggctgagcctggcccgcaacgtgctcatcgcactcgccttcctgagcagcagcgtgaaccccgtgctgtacgcgtgcgccggcggcggcctgctgcgctcggcgggcgtgggcttcgtcgccaagctgctggagggcacgggctccgaggcgtccagcacgcgccgcgggggcagcctgggccagaccgctaggagcggccccgccgctctggagcccggcccttccgagagcctcactgcctccagccctctcaagttaaacgaactgaactaggcctggtggaaggaggcgcactttcctcctggcagaatgctagctctgagccagttcagtacctggaggaggagcaggggcgtggagggcgtggagggcgtgggagcgtgggaggcgggagtggagtggaagaagagggagaggtggagcaaagtgagggccgagtgagagcgtgctccagcctggctcccacaggcagctttaaccattaaaactgaagtctgaaatttggtcaa

SEQ ID NO: 149002 - DNA, 1627 bp, Homo sapiens
  Payload ID: 9429
  Gene Symbol: LTB4R
  Gene Name: leukotriene B4 receptor
  Uniprot ID: Q15722
  ENST ID: ENST00000396782
  CDS Start-End: 333-1391
ctctctcactgctccttcctggtctcttctcatctggccccacctctaaggagtcctcctgccttctgggttgccctggaaaacagactatcccccctcctagtgaagggagtgggtaggggtttcagccccaccctcaggaagatgcgtcttccctgtcctctgctctgtggtacttcctctctggctgatttagcaaacagcacctagacctggggccaggcctttggcagtgggacagatccagggataggctacaccaccctgccctgaccctgggattggcatcagcttccaaccagttcctgccaaagcttgtcctcccgacggccatgaacactacatcttctgcagcacccccctcactaggtgtagagttcatctctctgctggctatcatcctgctgtcagtggcgctggctgtggggcttcccggcaacagctttgtggtgtggagtatcctgaaaaggatgcagaagcgctctgtcactgccctgatggtgctgaacctggccctggccgacctggccgtattgctcactgctccctttttccttcacttcctggcccaaggcacctggagttttggactggctggttgccgcctgtgtcactatgtctgcggagtcagcatgtacgccagcgtcctgcttatcacggccatgagtctagaccgctcactggcggtggcccgcccctttgtgtcccagaagctacgcaccaaggcgatggcccggcgggtgctggcaggcatctgggtgttgtcctttctgctggccacacccgtcctcgcgtaccgcacagtagtgccctggaaaacgaacatgagcctgtgcttcccgcggtaccccagcgaagggcaccgggccttccatctaatcttcgaggctgtcacgggcttcctgctgcccttcctggctgtggtggccagctactcggacatagggcgtcggctacaggcccggcgcttccgccgcagccgccgcaccggccgcctggtggtgctcatcatcctgaccttcgccgccttctggctgccctaccacgtggtgaacctggctgaggcgggccgcgcgctggccggccaggccgccgggttagggctcgtggggaagcggctgagcctggcccgcaacgtgctcatcgcactcgccttcctgagcagcagcgtgaaccccgtgctgtacgcgtgcgccggcggcggcctgctgcgctcggcgggcgtgggcttcgtcgccaagctgctggagggcacgggctccgaggcgtccagcacgcgccgcgggggcagcctgggccagaccgctaggagcggccccgccgctctggagcccggcccttccgagagcctcactgcctccagccctctcaagttaaacgaactgaactaggcctggtggaaggaggcgcactttcctcctggcagaatgctagctctgagccagttcagtacctggaggaggagcaggggcgtggagggcgtggagggcgtgggagcgtgggaggcgggagtggagtggaagaagagggagaggtggagcaaagtgagggccgagtgagagcgtgctccagcctggctcccacaggcagctttaaccattaaaactgaagtctgaaatttggtcaa

SEQ ID NO: 149003 - DNA, 4110 bp, Homo sapiens
  Payload ID: 9429
  Gene Symbol: LTB4R
  Gene Name: leukotriene B4 receptor
  Uniprot ID: Q15722
  ENST ID: ENST00000396789
  CDS Start-End: 1726-2784
gccattctctcacatcccgtgcggtcaggaagcccttcctgaactctgacttcagttcttgctgcggtttctgcccatttttttcatatcctctgacagctgcgaggtcatctctgctctggcttttctccaagcagaacaagtgggggctctggaaaggttaagggacctcagtggccaccattatactttgcatctttcctgagaagtgagagttgaaagggaagcaggaaggcccatggtcagattgaaggaaggactttttagtttcttttttttttttttttttttttgagatggagtctcgctctgtcattcaggctggagtgcagtggtgcgatctcagctcactgcagcctccacttcctgggttcacatgattctcctgcctcagcctcccaagtagctgagactacaggcacatgccactacacccagctatcttttgtatttttagtagagacggggtttcaccatgttggccaggctggtctcaaactgctaacatcaagtgatctgctcccctcagcctcccaaagtgctgggattaccggtatgaaccaccacaacctgccaggaatttttagtttttagcttttgcaggagacttcaaggaaaggagacattcctctgtccaggaaacgggtaaggggaccatttctgcattgctggtttcccctcttggcagggtgggcatgaggcatcactgttcctgctccctcactcctgctcctcatgctcagcctgccagctcggcctcaactttgtgtgtctaaagtggaactgaatagtaggctgtgagaagataggaaagaggtagtgccaatctccttgcccagatcataaatccagactcagcagggtaaccacatgggcaagcacaaggtaggtgcttggggaaaggggaagtaattggcattctgtgtgataccaaggagaccatttggattttggcttctaccaaagagaatggagaattggttgacctaaatggaaccagtccctttaagtaaggggaggaaagggggtgctggaagatggccctcttcccaccacctagatcatagcttgaactgaagccaaggacagagtgctgcccccttcggcatttactgatgtgccctctttaaatcatgatgttatctaacccaaacccagacccaggacctagtcacagctccaacctacacttcctattaatcttaaaacaaagcaaaacaaaacaaaaagatatcagcattgtagcctccaatctgagcccatttcccttctctggctaccatacctccttctcctatatgataccattcactactttgttcaattatccagtctagacctgcatcttgaggccacacccagccttctcactccccacacccctctttcctctctcactgctccttcctggtctcttctcatctggccccacctctaaggagtcctcctgccttctgggttgccctggaaaacagactatcccccctcctagtgaagggagtgggtaggggtttcagccccaccctcaggaagatgcgtcttccctgtcctctgctctgtggtacttcctctctggctgatttagcaaacagcacctagacctggggccaggcctttggcagtgggacagatccagggataggctacaccaccctgccctgaccctgggattggcatcagcttccaaccagttcctgccaaagcttgtaagtcctcccgacggccatgaacactacatcttctgcagcacccccctcactaggtgtagagttcatctctctgctggctatcatcctgctgtcagtggcgctggctgtggggcttcccggcaacagctttgtggtgtggagtatcctgaaaaggatgcagaagcgctctgtcactgccctgatggtgctgaacctggccctggccgacctggccgtattgctcactgctccctttttccttcacttcctggcccaaggcacctggagttttggactggctggttgccgcctgtgtcactatgtctgcggagtcagcatgtacgccagcgtcctgcttatcacggccatgagtctagaccgctcactggcggtggcccgcccctttgtgtcccagaagctacgcaccaaggcgatggcccggcgggtgctggcaggcatctgggtgttgtcctttctgctggccacacccgtcctcgcgtaccgcacagtagtgccctggaaaacgaacatgagcctgtgcttcccgcggtaccccagcgaagggcaccgggccttccatctaatcttcgaggctgtcacgggcttcctgctgcccttcctggctgtggtggccagctactcggacatagggcgtcggctacaggcccggcgcttccgccgcagccgccgcaccggccgcctggtggtgctcatcatcctgaccttcgccgccttctggctgccctaccacgtggtgaacctggctgaggcgggccgcgcgctggccggccaggccgccgggttagggctcgtggggaagcggctgagcctggcccgcaacgtgctcatcgcactcgccttcctgagcagcagcgtgaaccccgtgctgtacgcgtgcgccggcggcggcctgctgcgctcggcgggcgtgggcttcgtcgccaagctgctggagggcacgggctccgaggcgtccagcacgcgccgcgggggcagcctgggccagaccgctaggagcggccccgccgctctggagcccggcccttccgagagcctcactgcctccagccctctcaagttaaacgaactgaactaggcctggtggaaggaggcgcactttcctcctggcagaatgctagctctgagccagttcagtacctggaggaggagcaggggcgtggagggcgtggagggcgtgggagcgtgggaggcgggagtggagtggaagaagagggagaggtggagcaaagtgagggccgagtgagagcgtgctccagcctggctcccacaggcagctttaaccattaaaactgaagtctgaaatttggtcaaccttgtgagtggggtacatgtgctgtgggtatcggggtgctcgtgggcgccctggtggggcccctctcggtagttgagagtcacgtcctttagttccccatgatttacaattttggaagggacacaaagaaacatagacttcccccatcccagatgattccgagtacatagtctgcagataatacttagcaaaacgcagtctacagactcctaaagcagcttgtctaggaagaccacccatgtgggcttatcactccaggttctgtgacccgggaccttctgagaaaacagcactgctgtgaaatatcttccttgaagcctgtgataagtctccttgttagaatgactccaacttcctgccaataatctttgtcctctccataggagatgttctaggggatgccttccttccctccatttcacaaagaggccagacttgaggactaagtcattagatcttatcccttagaattttgcatatcagcatctgctaacctccacaacacaccctggcacagggtggggctgagggccccaggaaacaaagattcccaaaagtgagagggatgagtcattatttcctagagatgactgttgttttagagaaccttggtccaactctgttctgacaaggttttaggaagatggcaacaacagtggcagcagtgtactttttggatctttctcataaaaaaacaaaagagcaagtaagagagggaaaccaaatatccacatgcaacatccgcaacaaatctagtatgtcaaggtttgacatactcccatggaccccaaagtatgagccagtgagaatgagtcatcaatatctcaagacccatataccagcatctgtgcagaaggatgcagaaggaagcaaagggatgttggatggacctaagaagaggagatccccaagctgtctacagatccttactggaaggtatggtgcaccaatttgagaacagcagctgaaactgggagggacctaacggagtatttcccagtcctctcgcccattctgtatggtgagcacataataggtacttatttagtgtttgtcgaattaataaagttcaaatgacatttccctgga

SEQ ID NO: 149004 - DNA, 431 bp, Homo sapiens
  Payload ID: 9429
  Gene Symbol: LTB4R
  Gene Name: leukotriene B4 receptor
  ENST ID: ENST00000553481
  CDS Start-End: 125-431
gggcggagccggccaggcggcgcgagcgggaactacggccttggccttcttcagttctagcgtcaacccggtgctctacgtcttcaccgctggagatctgctgccccgggtcctcccgacggccatgaacactacatcttctgcagcacccccctcactaggtgtagagttcatctctctgctggctatcatcctgctgtcagtggcgctggctgtggggcttcccggcaacagctttgtggtgtggagtatcctgaaaaggatgcagaagcgctctgtcactgccctgatggtgctgaacctggccctggccgacctggccgtattgctcactgctccctttttccttcacttcctggcccaaggcacctggagttttggactggctggttgccgcctgtgtcactatgtctgcggagtcagcatgtacg

SEQ ID NO: 149005 - DNA, 797 bp, Homo sapiens
  Payload ID: 9429
  Gene Symbol: LTB4R
  Gene Name: leukotriene B4 receptor
  ENST ID: ENST00000556141
  CDS Start-End: 102-797
gagacttcaaggaaaggagacattcctctgtccaggaaacgggcacctggagttttggactggctggttgccgcctgtgtcactatgtctgcggagtcagcatgtacgccagcgtcctgcttatcacggccatgagtctagaccgctcactggcggtggcccgcccctttgtgtcccagaagctacgcaccaaggcgatggcccggcgggtgctggcaggcatctgggtgttgtcctttctgctggccacacccgtcctcgcgtaccgcacagtagtgccctggaaaacgaacatgagcctgtgcttcccgcggtaccccagcgaagggcaccgggccttccatctaatcttcgaggctgtcacgggcttcctgctgcccttcctggctgtggtggccagctactcggacatagggcgtcggctacaggcccggcgcttccgccgcagccgccgcaccggccgcctggtggtgctcatcatcctgaccttcgccgccttctggctgccctaccacgtggtgaacctggctgaggcgggccgcgcgctggccggccaggccgccgggttagggctcgtggggaagcggctgagcctggcccgcaacgtgctcatcgcactcgccttcctgagcagcagcgtgaaccccgtgctgtacgcgtgcgccggcggcggcctgctgcgctcggcgggcgtgggcttcgtcgccaagctgctggagggcacgggctccgaggcgtccagcacgcgccgcgggggcagcctgggccagaccgctaggagcggccccgccgctctg

SEQ ID NO: 149006 - DNA, 3092 bp, Homo sapiens
  Payload ID: 9430
  Gene Symbol: LTB4R2
  Gene Name: leukotriene B4 receptor 2
  Uniprot ID: Q9NPC1
  ENST ID: ENST00000528054
  CDS Start-End: 1618-2787
aaactggccctggccctgaaccaaataccttgaaccctcgtaaactccataccctgacccccttgttttggatatacccaggtagaacaactctctctcactgtctgttgtgaggatacgctgtagcccactcattaagtacattctcctaataaatgctttggactgatcaccctgccagtcttttgtcttgggcaatctatacttttctcagaggttcccaaggcctactgaagggacttaacatactcttaatggctttcctctctcttgttttaccttatgccctcacttcctgagttaacctcccaaatacaggatcacctgtacccaagcccttagctcaagaatacaggatcacctgtacccaagcccttagctcaagctctgctttggaagaacccaaactaagacagtgctcctggtgccctccccaagcaacctcaagttctggctgttacttgagcagaggcctttcttttcccttcccccagctctatccatctgccaggcccccctcaaatctcttcatttccaagttttgcttgacttttccaagaggagagggctgcttcttagtatgtccctactcatcctttcctttcttgtcttgtatcctggtgcagcctggtaatggggcctcttcatggttgtgtgtcatgactccctaaccattatgcctccatgcatcccctgttcctcctggaacctagcaccatgccttacatggaaaagctgtcattgacagcccggtgagagccctgagggtggagtgactggggcagggcctgaggcaagaggtgggaggaggtaggaggccaggggctcagccggaccaggagactggaaacaggcaaggataaggcaggtgggggactgagttgtttgggtcacctctgcaggccagagagaccaggcaacatacacactgcagaaggtgggctgggaggattggggccagagctgggggagggatgagaacagaagcaggaccaggattcagcagagtcctcctatttccttccaccaccagggaatcttactgccccacttcagcttgtgctgtttcctggcaaggcaggctctcacatgcctggacgcctgggtgcgttggtgatgggaaggagcagggtgagggaggggccccaggagaggcccaggatgagcctcatcttgtccctccccattcttgtcttaccctctgcaaatgtgataggcacaggacaggagtaggcacctcgcctactgctgcttaacctttcagcttctccaggcccccaatcctgcttgctcccagcttggtaagtagatctgtgcacgtccctttacaccccaccatccagttttgcccagatgtgctagaatggggctggacaaagaaggaggggccagactagaggagtggtggtagagatagtgacagcctggggtgatgactttatgcctgtttaccactgagctctgggaaggaggccaggagtggggcaggtcaactgactgggagcaggggatctgggttccaagaaggagttgtgtttgaggtggggtctgggtcctcgtggaagtcaggactcccaggcagaaaagaggcaggctgcagggaagtaaggaggaggcatggcaccttctcatcgggcatcacaggtggggttttgccccacccctgaacgccctctgtggcgccttccacccacctgtaggcccagaaggatgtcggtctgctaccgtcccccagggaacgagacactgctgagctggaagacttcgcgggccacaggcacagccttcctgctgctggcggcgctgctggggctgcctggcaacggcttcgtggtgtggagcttggcgggctggcggcctgcacgggggcgaccgctggcggccacgcttgtgctgcacctggcgctggccgacggcgcggtgctgctgctcacgccgctctttgtggccttcctgacccggcaggcctggccgctgggccaggcgggctgcaaggcggtgtactacgtgtgcgcgctcagcatgtacgccagcgtgctgctcaccggcctgctcagcctgcagcgctgcctcgcagtcacccgccccttcctggcgcctcggctgcgcagcccggccctggcccgccgcctgctgctggcggtctggctggccgccctgttgctcgccgtcccggccgccgtctaccgccacctgtggagggaccgcgtatgccagctgtgccacccgtcgccggtccacgccgccgcccacctgagcctggagactctgaccgctttcgtgcttcctttcgggctgatgctcggctgctacagcgtgacgctggcacggctgcggggcgcccgctggggctccgggcggcacggggcgcgggtgggccggctggtgagcgccatcgtgcttgccttcggcttgctctgggccccctaccacgcagtcaaccttctgcaggcggtcgcagcgctggctccaccggaaggggccttggcgaagctgggcggagccggccaggcggcgcgagcgggaactacggccttggccttcttcagttctagcgtcaacccggtgctctacgtcttcaccgctggagatctgctgccccgggcaggtccccgtttcctcacgcggctcttcgaaggctctggggaggcccgagggggcggccgctctagggaagggaccatggagctccgaactacccctcagctgaaagtggtggggcagggccgcggcaatggagacccggggggtgggatggagaaggacggtccggaatgggacctttgacagcagaccctacaacctgctgcccttccctgtccctttccaccccccacccaccctccagaggtcagtgttctgggacatttggggacccttctttgactagagtttggatctggctgggtaggattactatacacttggggcaggcccaggctcctccaaactgagggattatgagggtggtgatggtccctgttaaggactattgtgtgcttgcaagttggcatgtacccatgtgccagcattgcttacttgttgccaatagctgttattgtgaaatacactgggaagccattagatgatga

SEQ ID NO: 149007 - DNA, 1515 bp, Homo sapiens
  Payload ID: 9430
  Gene Symbol: LTB4R2
  Gene Name: leukotriene B4 receptor 2
  Uniprot ID: Q9NPC1
  ENST ID: ENST00000533293
  CDS Start-End: 127-1203
attcttgtcttaccctctgcaaatgtgataggcacaggacaggagtaggcacctcgcctactgctgcttaacctttcagcttctccaggcccccaatcctgcttgctcccagcttggcccagaaggatgtcggtctgctaccgtcccccagggaacgagacactgctgagctggaagacttcgcgggccacaggcacagccttcctgctgctggcggcgctgctggggctgcctggcaacggcttcgtggtgtggagcttggcgggctggcggcctgcacgggggcgaccgctggcggccacgcttgtgctgcacctggcgctggccgacggcgcggtgctgctgctcacgccgctctttgtggccttcctgacccggcaggcctggccgctgggccaggcgggctgcaaggcggtgtactacgtgtgcgcgctcagcatgtacgccagcgtgctgctcaccggcctgctcagcctgcagcgctgcctcgcagtcacccgccccttcctggcgcctcggctgcgcagcccggccctggcccgccgcctgctgctggcggtctggctggccgccctgttgctcgccgtcccggccgccgtctaccgccacctgtggagggaccgcgtatgccagctgtgccacccgtcgccggtccacgccgccgcccacctgagcctggagactctgaccgctttcgtgcttcctttcgggctgatgctcggctgctacagcgtgacgctggcacggctgcggggcgcccgctggggctccgggcggcacggggcgcgggtgggccggctggtgagcgccatcgtgcttgccttcggcttgctctgggccccctaccacgcagtcaaccttctgcaggcggtcgcagcgctggctccaccggaaggggccttggcgaagctgggcggagccggccaggcggcgcgagcgggaactacggccttggccttcttcagttctagcgtcaacccggtgctctacgtcttcaccgctggagatctgctgccccgggcaggtccccgtttcctcacgcggctcttcgaaggctctggggaggcccgagggggcggccgctctagggaagggaccatggagctccgaactacccctcagctgaaagtggtggggcagggccgcggcaatggagacccggggggtgggatggagaaggacggtccggaatgggacctttgacagcagaccctacaacctgctgcccttccctgtccctttccaccccccacccaccctccagaggtcagtgttctgggacatttggggacccttctttgactagagtttggatctggctgggtaggattactatacacttggggcaggcccaggctcctccaaactgagggattatgagggtggtgatggtccctgttaaggactattgtgtgcttgcaagttggcatgtacccatgtgccagcattgcttacttgttgccaatagctgttattgtgaaatacactgggaagccattagatgatgacttaagt

SEQ ID NO: 149008 - DNA, 1108 bp, Homo sapiens
  Payload ID: 9430
  Gene Symbol: LTB4R2
  Gene Name: leukotriene B4 receptor 2
  ENST ID: ENST00000530080
  CDS Start-End: 152-1108
gcacaggacaggagtaggcacctcgcctactgctgcttaacctttcagcttctccaggcccccaatcctgcttgctcccagcttggtggggttttgccccacccctgaacgccctctgtggcgccttccacccacctgtaggcccagaaggatgtcggtctgctaccgtcccccagggaacgagacactgctgagctggaagacttcgcgggccacaggcacagccttcctgctgctggcggcgctgctggggctgcctggcaacggcttcgtggtgtggagcttggcgggctggcggcctgcacgggggcgaccgctggcggccacgcttgtgctgcacctggcgctggccgacggcgcggtgctgctgctcacgccgctctttgtggccttcctgacccggcaggcctggccgctgggccaggcgggctgcaaggcggtgtactacgtgtgcgcgctcagcatgtacgccagcgtgctgctcaccggcctgctcagcctgcagcgctgcctcgcagtcacccgccccttcctggcgcctcggctgcgcagcccggccctggcccgccgcctgctgctggcggtctggctggccgccctgttgctcgccgtcccggccgccgtctaccgccacctgtggagggaccgcgtatgccagctgtgccacccgtcgccggtccacgccgccgcccacctgagcctggagactctgaccgctttcgtgcttcctttcgggctgatgctcggctgctacagcgtgacgctggcacggctgcggggcgcccgctggggctccgggcggcacggggcgcgggtgggccggctggtgagcgccatcgtgcttgccttcggcttgctctgggccccctaccacgcagtcaaccttctgcaggcggtcgcagcgctggctccaccggaaggggccttggcgaagctgggcggagccggccaggcggcgcgagcgggaactacggccttggccttcttcagttctagcgtcaacccggtgctctacgtcttcaccgctggagatctgctgccccgggcaggtccccgtttcctcacgcggctcttcgaaggctctggggaggcccgagggggcggccgc

SEQ ID NO: 149009 - DNA, 710 bp, Homo sapiens
  Payload ID: 9430
  Gene Symbol: LTB4R2
  Gene Name: leukotriene B4 receptor 2
  ENST ID: ENST00000527924
  CDS Start-End: 230-710
gcagcagtgtggaggtccaacgaaggagctccctgaatggcagagacaagaggaaatcagatgatttggaaaacttgggaggaagccatcaagctgggagatgaggactttccacaagcaagagctaactaggggcacaggacaggagtaggcacctcgcctactgctgcttaacctttcagcttctccaggcccccaatcctgcttgctcccagcttggcccagaaggatgtcggtctgctaccgtcccccagggaacgagacactgctgagctggaagacttcgcgggccacaggcacagccttcctgctgctggcggcgctgctggggctgcctggcaacggcttcgtggtgtggagcttggcgggctggcggcctgcacgggggcgaccgctggcggccacgcttgtgctgcacctggcgctggccgacggcgcggtgctgctgctcacgccgctctttgtggccttcctgacccggcaggcctggccgctgggccaggcgggctgcaaggcggtgtactacgtgtgcgcgctcagcatgtacgccagcgtgctgctcaccggcctgctcagcctgcagcgctgcctcgcagtcacccgccccttcctggcgcctcggctgcgcagcccggccctggcccgccgcctgctgctggcggtctggctggccgccctgttgctcgccgtcccggccgccgtctaccgcc

SEQ ID NO: 149010 - DNA, 1560 bp, Homo sapiens
  Payload ID: 9430
  Gene Symbol: LTB4R2
  Gene Name: leukotriene B4 receptor 2
  Uniprot ID: Q9NPC1
  ENST ID: ENST00000543919
  CDS Start-End: 172-1248
accctctgcaaatgtgataggcacaggacaggagtaggcacctcgcctactgctgcttaacctttcagcttctccaggcccccaatcctgcttgctcccagcttggtggggttttgccccacccctgaacgccctctgtggcgccttccacccacctgtaggcccagaaggatgtcggtctgctaccgtcccccagggaacgagacactgctgagctggaagacttcgcgggccacaggcacagccttcctgctgctggcggcgctgctggggctgcctggcaacggcttcgtggtgtggagcttggcgggctggcggcctgcacgggggcgaccgctggcggccacgcttgtgctgcacctggcgctggccgacggcgcggtgctgctgctcacgccgctctttgtggccttcctgacccggcaggcctggccgctgggccaggcgggctgcaaggcggtgtactacgtgtgcgcgctcagcatgtacgccagcgtgctgctcaccggcctgctcagcctgcagcgctgcctcgcagtcacccgccccttcctggcgcctcggctgcgcagcccggccctggcccgccgcctgctgctggcggtctggctggccgccctgttgctcgccgtcccggccgccgtctaccgccacctgtggagggaccgcgtatgccagctgtgccacccgtcgccggtccacgccgccgcccacctgagcctggagactctgaccgctttcgtgcttcctttcgggctgatgctcggctgctacagcgtgacgctggcacggctgcggggcgcccgctggggctccgggcggcacggggcgcgggtgggccggctggtgagcgccatcgtgcttgccttcggcttgctctgggccccctaccacgcagtcaaccttctgcaggcggtcgcagcgctggctccaccggaaggggccttggcgaagctgggcggagccggccaggcggcgcgagcgggaactacggccttggccttcttcagttctagcgtcaacccggtgctctacgtcttcaccgctggagatctgctgccccgggcaggtccccgtttcctcacgcggctcttcgaaggctctggggaggcccgagggggcggccgctctagggaagggaccatggagctccgaactacccctcagctgaaagtggtggggcagggccgcggcaatggagacccggggggtgggatggagaaggacggtccggaatgggacctttgacagcagaccctacaacctgctgcccttccctgtccctttccaccccccacccaccctccagaggtcagtgttctgggacatttggggacccttctttgactagagtttggatctggctgggtaggattactatacacttggggcaggcccaggctcctccaaactgagggattatgagggtggtgatggtccctgttaaggactattgtgtgcttgcaagttggcatgtacccatgtgccagcattgcttacttgttgccaatagctgttattgtgaaatacactgggaagccattagatgatgacttaagt

SEQ ID NO: 149011 - DNA, 666 bp, Homo sapiens
  Payload ID: 9431
  Gene Symbol: LTC4S
  Gene Name: leukotriene C4 synthase
  Uniprot ID: Q16873
  ENST ID: ENST00000292596
  CDS Start-End: 96-548
cttcctctcctgggccgtcctctgagcagcagacggggctaagcgttccccagctcgccttcacacacagcccgtgccaccacaccgacggtaccatgaaggacgaggtagctctactggctgctgtcaccctcctgggagtcctgctgcaagcctacttctccctgcaggtgatctcggcgcgcagggccttccgcgtgtcgccgccgctcaccaccggcccacccgagttcgagcgcgtctaccgagcccaggtgaactgcagcgagtacttcccgctgttcctcgccacgctctgggtcgccggcatcttctttcatgaaggggcggcggccctgtgcggcctggtctacctgttcgcgcgcctccgctacttccagggctacgcgcgctccgcgcagctcaggctggcaccgctgtacgcgagcgcgcgcgccctctggctgctggtggcgctggctgcgctcggcctgctcgcccacttcctcccggccgcgctgcgcgccgcgctcctcggacggctccggacgctgctgccgtgggcctgagaccaaggcccccgggccgacggagccgggaaagaagagccggagcctccagctgccccggggaggggcgctcgcttccgcatcctagtctctatcattaaagttctagtgaccgaga

SEQ ID NO: 149012 - DNA, 486 bp, Homo sapiens
  Payload ID: 9431
  Gene Symbol: LTC4S
  Gene Name: leukotriene C4 synthase
  ENST ID: ENST00000401985
  CDS Start-End: 89-370
tcctgggccgtcctctgagcagcagacggggctaagcgttccccagctcgccttcacacacagcccgtgccaccacaccgacggtaccatgaaggacgaggtagctctactggctgctgtcaccctcctgggagtcctgctgcaaggggcggcggccctgtgcggcctggtctacctgttcgcgcgcctccgctacttccagggctacgcgcgctccgcgcagctcaggctggcaccgctgtacgcgagcgcgcgcgccctctggctgctggtggcgctggctgcgctcggcctgctcgcccacttcctcccggccgcgctgcgcgccgcgctcctcggacggctccggacgctgctgccgtgggcctgagaccaaggcccccgggccgacggagccgggaaagaagagccggagcctccagctgccccggggaggggcgctcgcttccgcatcctagtctctatcattaaagttctagtgaccga

SEQ ID NO: 149013 - DNA, 582 bp, Homo sapiens
  Payload ID: 9431
  Gene Symbol: LTC4S
  Gene Name: leukotriene C4 synthase
  ENST ID: ENST00000505170
  CDS Start-End: 97-306
tcttcctctcctgggccgtcctctgagcagcagacggggctaagcgttccccagctcgccttcacacacagcccgtgccaccacaccgacggtaccatgaaggacgaggtagctctactggctgctgtcaccctcctgggagtcctgctgcaaggtgatctcggcgcgcagggccttccgcgtgtcgccgccgctcaccaccggcccacccgagttcgagcgcgtctaccgagcccaggtgaactgcagcgagtacttcccgctgttcctcgccacgctctgggtcgccggcatcttctttcatgaaggggcggcggccctgtgcggcctggtctacctgttcgcgcgcctccgctacttccagggctacgcgcgctccgcgcagctcaggctggcaccgctgtacgcgagcgcgcgcgccctctggctgctggtggcgctggctgcgctcggcctgctcgcccacttcctcccggccgcgctgcgcgccgcgctcctcggacggctccggacgctgctgccgtgggcctgagaccaaggcccccgggccgacggagccgggaaagaagagccggagcctcc

SEQ ID NO: 149014 - DNA, 1833 bp, Homo sapiens
  Payload ID: 9432
  Gene Symbol: LPXN
  Gene Name: leupaxin
  Uniprot ID: O60711
  ENST ID: ENST00000395074
  CDS Start-End: 90-1250
catccagttcctttgcggtcctcttcttcagcacatgccaaagctgttcctcacggcctgtgagacaagagcatcttggatgtaggacaatggaagagttagatgccttattggaggaactggaacgctccacccttcaggacagtgatgaatattccaacccagctcctcttcccctggatcagcattccagaaaggagactaaccttgatgagacttcggagatcctttctattcaggataacacaagtcccttgccggcgcagctcgtgtatactaccaatatccaggagctcaatgtctacagtgaagcccaagagccaaaggaatcaccaccaccttctaaaacgtcagcagctgctcagttggatgagctcatggctcacctgactgagatgcaggccaaggttgcagtgagagcagatgctggcaagaagcacttaccagacaagcaggatcacaaggcctccctggactcaatgcttgggggtctggagcaggaattgcaggaccttggcattgccacagtgcccaagggccattgtgcatcctgccagaaaccgattgctgggaaggtgatccatgctctagggcaatcatggcatcctgagcattttgtctgtactcattgcaaagaagagattggctccagtcccttctttgagcggagtggcttggcctactgccccaacgactaccaccaacttttttctccacgctgtgcttactgcgctgctcccatcctggataaagtgctgacagcaatgaaccagacctggcacccagagcacttcttctgctctcactgcggagaggtgtttggtgcagaaggctttcatgagaaggacaagaagccatattgccgaaaggatttcttagccatgttctcacccaagtgtggtggctgcaatcgcccagtgttggaaaactacctttcagccatggacactgtctggcacccagagtgctttgtttgtggggactgcttcaccagtttttctactggctccttctttgaactggatggacgtccattctgtgagctccattaccatcaccgccggggaacgctctgccatgggtgtgggcagcccatcactggccgttgtatcagtgccatggggtacaagttccatcctgagcactttgtgtgtgctttctgcctgacacagttgtcgaagggcattttcagggagcagaatgacaagacctattgtcaaccttgcttcaataagctcttcccactgtaatgccaactgatccatagcctcttcagattccttataaaatttaaaccaagagaggagaggaaagggtaaattttctgttactgaccttctgcttaatagtcttatagaaaaaggaaaggtgatgagcaaataaaggaacttctagactttacatgactaggctgataatcttattttttaggcttctatacagttaattctataaattctctttctccctctcttctccaatcaagcacttggagttagatctaggtccttctatctcgtccctctacagatgtattttccacttgcataattcatgccaacactggttttcttaggtttctccattttcacctctagtgatggccctactcatatcttctctaatttggtcctgatacttgtttcttttcacgttttcccatttccctgtggctcactgtcttacaatcactgctgtggaatcatgataccacttttagctctttgcatcttccttcagtgtatttttgtttttcaagaggaagtagattttaactggacaactttgagtactgacatcattgataaataaactggcttgtggtttcaataa

SEQ ID NO: 149015 - DNA, 1879 bp, Homo sapiens
  Payload ID: 9432
  Gene Symbol: LPXN
  Gene Name: leupaxin
  Uniprot ID: O60711
  ENST ID: ENST00000528954
  CDS Start-End: 121-1296
actttttcttactttttatctgggcgttggcgtacctttctcggggtgtctgcgtaactgcccagacttgccttggtttggtcagatgacacctcctctgggactggctagccagcgttcatgtctacattattgatctcgtcttccgatgccttattggaggaactggaacgctccacccttcaggacagtgatgaatattccaacccagctcctcttcccctggatcagcattccagaaaggagactaaccttgatgagacttcggagatcctttctattcaggataacacaagtcccttgccggcgcagctcgtgtatactaccaatatccaggagctcaatgtctacagtgaagcccaagagccaaaggaatcaccaccaccttctaaaacgtcagcagctgctcagttggatgagctcatggctcacctgactgagatgcaggccaaggttgcagtgagagcagatgctggcaagaagcacttaccagacaagcaggatcacaaggcctccctggactcaatgcttgggggtctggagcaggaattgcaggaccttggcattgccacagtgcccaagggccattgtgcatcctgccagaaaccgattgctgggaaggtgatccatgctctagggcaatcatggcatcctgagcattttgtctgtactcattgcaaagaagagattggctccagtcccttctttgagcggagtggcttggcctactgccccaacgactaccaccaacttttttctccacgctgtgcttactgcgctgctcccatcctggataaagtgctgacagcaatgaaccagacctggcacccagagcacttcttctgctctcactgcggagaggtgtttggtgcagaaggctttcatgagaaggacaagaagccatattgccgaaaggatttcttagccatgttctcacccaagtgtggtggctgcaatcgcccagtgttggaaaactacctttcagccatggacactgtctggcacccagagtgctttgtttgtggggactgcttcaccagtttttctactggctccttctttgaactggatggacgtccattctgtgagctccattaccatcaccgccggggaacgctctgccatgggtgtgggcagcccatcactggccgttgtatcagtgccatggggtacaagttccatcctgagcactttgtgtgtgctttctgcctgacacagttgtcgaagggcattttcagggagcagaatgacaagacctattgtcaaccttgcttcaataagctcttcccactgtaatgccaactgatccatagcctcttcagattccttataaaatttaaaccaagagaggagaggaaagggtaaattttctgttactgaccttctgcttaatagtcttatagaaaaaggaaaggtgatgagcaaataaaggaacttctagactttacatgactaggctgataatcttattttttaggcttctatacagttaattctataaattctctttctccctctcttctccaatcaagcacttggagttagatctaggtccttctatctcgtccctctacagatgtattttccacttgcataattcatgccaacactggttttcttaggtttctccattttcacctctagtgatggccctactcatatcttctctaatttggtcctgatacttgtttcttttcacgttttcccatttccctgtggctcactgtcttacaatcactgctgtggaatcatgataccacttttagctctttgcatcttccttcagtgtatttttgtttttcaagaggaagtagattttaactggacaactttgagtactgacatcattgataaataaactggcttgtggtttcaataa

SEQ ID NO: 149016 - DNA, 2099 bp, Homo sapiens
  Payload ID: 9432
  Gene Symbol: LPXN
  Gene Name: leupaxin
  ENST ID: ENST00000530561
  CDS Start-End: 65-385
cttcagcacatgccaaagctgttcctcacggcctgtgagacaagagcatcttggatgtaggacaatggaagagttagatgccttattggaggaactggaacgctccacccttcaggacagtgatgaatattccaacccagctcctcttcccctggatcagcattccagaaaggagactaaccttgatgagacttcggagatcctttctattcaggataacacaagtcccttgccggcgcagctcgtgtatactaccaatatccaggagctcaatgtctacagtgaagcccaagagccaaaggaatcaccaccaccttctaaaacgtcagcagctgctcagttggatgagctcatggctcacctgactgagatgcaggccaagtagagacggagtttcaccatcttggccaggctggtctcgaactcctgacttcgtgatccacctgcctcggcctcccaaagtgctgggattacaggcgtgagccactgcgcccggccaaaaggactgttaaagagacctgactaagcaggacagaggagaccagtgagcaagctgagacacagcaagggagatcaaagtatggctctgacagtaggaaggatgagaagtcccaagcccatattgagataaaatctgcctctttgttctagcctctagaacacctctaaagtggttgcagtgagagcagatgctggcaagaagcacttaccagacaagcaggatcacaaggcctccctggactcaatgcttgggggtctggagcaggaattgcaggaccttggcattgccacagtgcccaagggccattgtgcatcctgccagaaaccgattgctgggaaggtgatccatgctctagggcaatcatggcatcctgagcattttgtctgtactcattgcaaagaagagattggctccagtcccttctttgagcggagtggcttggcctactgccccaacgactaccaccaacttttttctccacgctgtgcttactgcgctgctcccatcctggataaagtgctgacagcaatgaaccagacctggcacccagagcacttcttctgctctcactgcggagaggtgtttggtgcagaaggctttcatgagaaggacaagaagccatattgccgaaaggatttcttagccatgttctcacccaagtgtggtggctgcaatcgcccagtgttggaaaactacctttcagccatggacactgtctggcacccagagtgctttgtttgtggggactgcttcaccagtttttctactggctccttctttgaactggatggacgtccattctgtgagctccattaccatcaccgccggggaacgctctgccatgggtgtgggcagcccatcactggccgttgtatcagtgccatggggtacaagttccatcctgagcactttgtgtgtgctttctgcctgacacagttgtcgaagggcattttcagggagcagaatgacaagacctattgtcaaccttgcttcaataagctcttcccactgtaatgccaactgatccatagcctcttcagattccttataaaatttaaaccaagagaggagaggaaagggtaaattttctgttactgaccttctgcttaatagtcttatagaaaaaggaaaggtgatgagcaaataaaggaacttctagactttacatgactaggctgataatcttattttttaggcttctatacagttaattctataaattctctttctccctctcttctccaatcaagcacttggagttagatctaggtccttctatctcgtccctctacagatgtattttccacttgcataattcatgccaacactggttttcttaggtttctccattttcacctctagtgatggccctactcatatcttctctaatttggtcctgatacttgtttcttttcacgttttcccatttccctgtggctcactgtcttacaatcactgctgtggaatcatgataccacttttagctctttgcatcttccttcagtgtatttttgtttttcaagaggaagtagattttaactggacaactttgagtactgacatcattgataaataaactggcttgtggtttcaataa

SEQ ID NO: 149017 - DNA, 1751 bp, Homo sapiens
  Payload ID: 9432
  Gene Symbol: LPXN
  Gene Name: leupaxin
  ENST ID: ENST00000528489
  CDS Start-End: 236-1336
acatccgggctcaagcgtcgagccaattgctggtctgatgggagggtttttcctactttttcttactttttatctgggcgttggcgtacctttctcggggtgtctgcgtaactgcccagacttgccttggtttggtcagatgacacctcctctgggactggctagccagcgttcatgtctacattattgatctcgtcttccggtgtgtgagtcactcacctgtgagctcctagagatgccttattggaggaactggaacgctccacccttcaggacagtgatgaatattccaacccagctcctcttcccctggatcagcattccagaaaggagactaaccttgatgagacttcggagatcctttctattcaggataacacaagtcccttgccgtgaagcccaagagccaaaggaatcaccaccaccttctaaaacgtcagcagctgctcagttggatgagctcatggctcacctgactgagatgcaggccaaggttgcagtgagagcagatgctggcaagaagcacttaccagacaagcaggatcacaaggcctccctggactcaatgcttgggggtctggagcaggaattgcaggaccttggcattgccacagtgcccaagggccattgtgcatcctgccagaaaccgattgctgggaaggtgatccatgctctagggcaatcatggcatcctgagcattttgtctgtactcattgcaaagaagagattggctccagtcccttctttgagcggagtggcttggcctactgccccaacgactaccaccaacttttttctccacgctgtgcttactgcgctgctcccatcctggataaagtgctgacagcaatgaaccagacctggcacccagagcacttcttctgctctcactgcggagaggtgtttggtgcagaaggctttcatgagaaggacaagaagccatattgccgaaaggatttcttagccatgttctcacccaagtgtggtggctgcaatcgcccagtgttggaaaactacctttcagccatggacactgtctggcacccagagtgctttgtttgtggggactgcttcaccagtttttctactggctccttctttgaactggatggacgtccattctgtgagctccattaccatcaccgccggggaacgctctgccatgggtgtgggcagcccatcactggccgttgtatcagtgccatggggtacaagttccatcctgagcactttgtgtgtgctttctgcctgacacagttgtcgaagggcattttcagggagcagaatgacaagacctattgtcaaccttgcttcaataagctcttcccactgtaatgccaactgatccatagcctcttcagattccttataaaatttaaaccaagagaggagaggaaagggtaaattttctgttactgaccttctgcttaatagtcttatagaaaaaggaaaggtgatgagcaaataaaggaacttctagactttacatgactaggctgataatcttattttttaggcttctatacagttaattctataaattctctttctccctctcttctccaatcaagcacttggagttagatctaggtccttctatctcgtccctctacagatgtattttccacttgcataattcatgccaacactggttttcttaggtttctccattttcacctctagtgatggccctactcatatcttctctaatttggtcctgatacttgtttcttttcacgttttcccattt

SEQ ID NO: 149018 - DNA, 2377 bp, Homo sapiens
  Payload ID: 9433
  Gene Symbol: LFNG
  Gene Name: LFNG O-fucosylpeptide 3-beta-N-acetylglucosaminyltransferase
  Uniprot ID: Q8NES3
  ENST ID: ENST00000222725
  CDS Start-End: 21-1160
cgcgcggccgccaccccaccatgctcaagcgctgcggccggcgcctgctgctggcgctggcgggcgcgctgctcgcctgcctgctggtgctcaccgccgacccgccgccgcctccactgcccgccgagcgcggccggcgcgcgctgcgcagcctggcgggccccgcgggggctgccccggcgcccgggctgggggcggcggcggcggcgcccggggcgctggtccgcgacgtgcacagtctgtccgagtacttcagcctgctcacccgcgcgcgcagagatgcgggcccgccgcccggggctgccccccgccccgccgacggccacccgcgccccctggccgagccgctcgcgccccgagacgtcttcatcgctgtcaagaccaccaaaaagttccaccgcgcgcgcctcgacctgctgctggagacctggatctcgcgccacaaggagatgacgttcatcttcactgacggggaagatgaggccctggccaggcacacgggcaacgtggtcatcacaaactgctcggccgcccacagccgccaggcgctgtcctgcaagatggccgtggagtatgaccgcttcatcgagtccggcaggaagtggttctgccacgtggacgatgacaactacgtcaacctgcgggccctgctgcggctgctggccagctacccgcacacgcgggacgtctacgtcggcaagcccagcctggacaggcccatccaggccatggagcgggtcagcgagaacaaggtgcgtcctgtccacttctggtttgccacgggcggcgctggcttctgcatcagccgtgggctggctctgaagatgagcccgtgggccagcgggggtcacttcatgaatacggctgagcggatccggctgcctgatgactgcaccatcggctacatcgtggaggccctgctgggtgtgcccctcatccgcagcggcctcttccactcccacctggagaacctgcagcaggtgcccacctcggagctccacgagcaggtgacgctgagctacggtatgtttgaaaacaagcggaacgccgtccacgtgaaggggcccttctcggtggaggccgacccatccaggttccgctccatccactgccacctgtacccggacacaccctggtgtccccgcactgccatcttctagtggccatggctgagacccaatccctgggcgcccctggtatccaaagggcccagggaccctgttgcgctgccctggcctcggcattcgaggctcccctagggccgtgcctgtgcgtgtgcgtgtgcgtgtgtgtgtgtgtgtactgcatgcccacccgggtagcaggctgctgggcagttctgctctgtggaggggcgggcaccagcgccacttatgtgcctctgctccgagggccagtgggctgcagggcctgcttggaggaaggatttgtgtgtcggaggccactccgagggcaattctgttaggatttttggatctttctacagctacggggctccgggctactttgcagggatgcgatgcgtaggtgcctttctcttcctgctgaccacaagctctgtgctgggggtacctgtgccctgaagtcctggcccctgtgtcatagccccaagtacgactcactgagccatgctcattgcaggggaggctgggtctgggggtgcgtgacccaatccccttcctcctggcctggacgctgtggcttaagagtaacagcagccaccgcccagttccagtggccccacgaagcccccagtggctggctgtccagctgggcaaacagtggcacccctcccagctcttctgagtggggagtcttccaggcctcctcagaggtcttccctttgcctccccaggacagggtgagtcagagctcagcatttaatctcctctccaaagtagagagcaagtcgcccacagtgggcgtgtctgtaaatattgtgacagtatttttttactgtgctgttttttttgaaaggggatgggtaaaaagtagggtgttcttgttttttgcttgggagggtgggggtgggggagggtcttattttatcttatcttttctgtggatcagaaaaaacagaagccaaactcggggtcatctttgtttttaaagctgaagtgggactgtctggcactctgtgtatttatgcgttccagcatctggaacctcccatccctgccctcctcctgtgtagctgccacctccccgctgggcccagcatggctcacctgtcccgtgggctgtgtttcttgttgtttttctctttgcaaagacatagctaggaaagcgaatgataagggaaaagttctcagggaattgaagtgttgttgctatggtgacgtccttttgctgtgaataaaggtgctctttgcagcaa

SEQ ID NO: 149019 - DNA, 1968 bp, Homo sapiens
  Payload ID: 9433
  Gene Symbol: LFNG
  Gene Name: LFNG O-fucosylpeptide 3-beta-N-acetylglucosaminyltransferase
  Uniprot ID: Q8NES3
  ENST ID: ENST00000338732
  CDS Start-End: 1-753
atgacaccaggtcgctgctgtcttgcggctgacattcaggtagagacgttcatcttcactgacggggaagatgaggccctggccaggcacacgggcaacgtggtcatcacaaactgctcggccgcccacagccgccaggcgctgtcctgcaagatggccgtggagtatgaccgcttcatcgagtccggcaggaagtggttctgccacgtggacgatgacaactacgtcaacctgcgggccctgctgcggctgctggccagctacccgcacacgcgggacgtctacgtcggcaagcccagcctggacaggcccatccaggccatggagcgggtcagcgagaacaaggtgcgtcctgtccacttctggtttgccacgggcggcgctggcttctgcatcagccgtgggctggctctgaagatgagcccgtgggccagcgggggtcacttcatgaatacggctgagcggatccggctgcctgatgactgcaccatcggctacatcgtggaggccctgctgggtgtgcccctcatccgcagcggcctcttccactcccacctggagaacctgcagcaggtgcccacctcggagctccacgagcaggtgacgctgagctacggtatgtttgaaaacaagcggaacgccgtccacgtgaaggggcccttctcggtggaggccgacccatccaggttccgctccatccactgccacctgtacccggacacaccctggtgtccccgcactgccatcttctagtggccatggctgagacccaatccctgggcgcccctggtatccaaagggcccagggaccctgttgcgctgccctggcctcggcattcgaggctcccctagggccgtgcctgtgcgtgtgcgtgtgcgtgtgtgtgtgtgtgtactgcatgcccacccgggtagcaggctgctgggcagttctgctctgtggaggggcgggcaccagcgccacttatgtgcctctgctccgagggccagtgggctgcagggcctgcttggaggaaggatttgtgtgtcggaggccactccgagggcaattctgttaggatttttggatctttctacagctacggggctccgggctactttgcagggatgcgatgcgtaggtgcctttctcttcctgctgaccacaagctctgtgctgggggtacctgtgccctgaagtcctggcccctgtgtcatagccccaagtacgactcactgagccatgctcattgcaggggaggctgggtctgggggtgcgtgacccaatccccttcctcctggcctggacgctgtggcttaagagtaacagcagccaccgcccagttccagtggccccacgaagcccccagtggctggctgtccagctgggcaaacagtggcacccctcccagctcttctgagtggggagtcttccaggcctcctcagaggtcttccctttgcctccccaggacagggtgagtcagagctcagcatttaatctcctctccaaagtagagagcaagtcgcccacagtgggcgtgtctgtaaatattgtgacagtatttttttactgtgctgttttttttgaaaggggatgggtaaaaagtagggtgttcttgttttttgcttgggagggtgggggtgggggagggtcttattttatcttatcttttctgtggatcagaaaaaacagaagccaaactcggggtcatctttgtttttaaagctgaagtgggactgtctggcactctgtgtatttatgcgttccagcatctggaacctcccatccctgccctcctcctgtgtagctgccacctccccgctgggcccagcatggctcacctgtcccgtgggctgtgtttcttgttgtttttctctttgcaaagacatagctaggaaagcgaatgataagggaaaagttctcagggaattgaagtgttgttgctatggtgacgtccttttgctgtgaataaaggtgctctttgcagc

SEQ ID NO: 149020 - DNA, 1377 bp, Homo sapiens
  Payload ID: 9433
  Gene Symbol: LFNG
  Gene Name: LFNG O-fucosylpeptide 3-beta-N-acetylglucosaminyltransferase
  Uniprot ID: Q8NES3
  ENST ID: ENST00000359574
  CDS Start-End: 1-1086
atgctcaagcgctgcggccggcgcctgctgctggcgctggcgggcgcgctgctcgcctgcctgctggtgctcaccgccgacccgccgccgcctccactgcccgccgagcgcggccggcgcgcgctgcgcagcctggcgggccccgcgggggctgccccggcgcccgggctgggggcggcggcggcggcgcccggggcgctggtccgcgacgtgcacagtctgtccgagtacttcagcctgctcacccgcgcgcgcagagatgcgggcccgccgcccggggctgccccccgccccgccgacggccacccgcgccccctggccgagccgctcgcgccccgagacgtcttcatcgctgtcaagaccaccaaaaagttccaccgcgcgcgcctcgacctgctgctggagacctggatctcgcgccacaaggagatgacgttcatcttcactgacggggaagatgaggccctggccaggcacacgggcaacgtggtcatcacaaactgctcggccgcccacagccgccaggcgctgtcctgcaagatggccgtggagtatgaccgcttcatcgagtccggcaggaagtggttctgccacgtggacgatgacaactacgtcaacctgcgggccctgctgcggctgctggccagctacccgcacacgcgggacgtctacgtcggcaagcccagcctggacaggcccatccaggccatggagcgggtcagcgagaacaaggtgcgtcctgtccacttctggtttgccacgggcggcgctggcttctgcatcagccgtgggctggctctgaagatgagcccgtgggccagcgggggtcacttcatgaatacggctgagcggatccggctgcctgatgactgcaccatcggctacatcgtggaggccctgctgggtgtgcccctcatccgcagcggcctcttccactcccacctggagaacctgcagcaggtgcccacctcggagctccacgagcaggtgacgctgagctacggtatgtttgaaaacaagcggaacgccgtccacgtgaaggggcccttctcggtggaggccgacccatccaggtggggaaactgaggcacggagcagctgatgcccaaggtccagcagccatgctggtgggctggggaggcgctcagactccaagccaggcaggccgtgggtccggccgccccacagctggtaatgctgcacctccctctcctgtgatgtggccccaggccccgaccccgctcaggggtggtgggaagagtcctggagagcaggagcagtgccggagcccccactgcagctggtcccagcccctgcagagatccagacgcttgttttttaaatacagcagctctgcggtgcttttccttcctcaaa

SEQ ID NO: 149021 - DNA, 2058 bp, Homo sapiens
  Payload ID: 9433
  Gene Symbol: LFNG
  Gene Name: LFNG O-fucosylpeptide 3-beta-N-acetylglucosaminyltransferase
  Uniprot ID: Q8NES3
  ENST ID: ENST00000402045
  CDS Start-End: 89-841
ggagggttttgctctttgtgtgggtgtgtgagtggctatgatcctagttgtccagctgctgcgtggagaataagtaaagcaggtctgaatgacaccaggtcgctgctgtcttgcggctgacattcaggtagagacgttcatcttcactgacggggaagatgaggccctggccaggcacacgggcaacgtggtcatcacaaactgctcggccgcccacagccgccaggcgctgtcctgcaagatggccgtggagtatgaccgcttcatcgagtccggcaggaagtggttctgccacgtggacgatgacaactacgtcaacctgcgggccctgctgcggctgctggccagctacccgcacacgcgggacgtctacgtcggcaagcccagcctggacaggcccatccaggccatggagcgggtcagcgagaacaaggtgcgtcctgtccacttctggtttgccacgggcggcgctggcttctgcatcagccgtgggctggctctgaagatgagcccgtgggccagcgggggtcacttcatgaatacggctgagcggatccggctgcctgatgactgcaccatcggctacatcgtggaggccctgctgggtgtgcccctcatccgcagcggcctcttccactcccacctggagaacctgcagcaggtgcccacctcggagctccacgagcaggtgacgctgagctacggtatgtttgaaaacaagcggaacgccgtccacgtgaaggggcccttctcggtggaggccgacccatccaggttccgctccatccactgccacctgtacccggacacaccctggtgtccccgcactgccatcttctagtggccatggctgagacccaatccctgggcgcccctggtatccaaagggcccagggaccctgttgcgctgccctggcctcggcattcgaggctcccctagggccgtgcctgtgcgtgtgcgtgtgcgtgtgtgtgtgtgtgtactgcatgcccacccgggtagcaggctgctgggcagttctgctctgtggaggggcgggcaccagcgccacttatgtgcctctgctccgagggccagtgggctgcagggcctgcttggaggaaggatttgtgtgtcggaggccactccgagggcaattctgttaggatttttggatctttctacagctacggggctccgggctactttgcagggatgcgatgcgtaggtgcctttctcttcctgctgaccacaagctctgtgctgggggtacctgtgccctgaagtcctggcccctgtgtcatagccccaagtacgactcactgagccatgctcattgcaggggaggctgggtctgggggtgcgtgacccaatccccttcctcctggcctggacgctgtggcttaagagtaacagcagccaccgcccagttccagtggccccacgaagcccccagtggctggctgtccagctgggcaaacagtggcacccctcccagctcttctgagtggggagtcttccaggcctcctcagaggtcttccctttgcctccccaggacagggtgagtcagagctcagcatttaatctcctctccaaagtagagagcaagtcgcccacagtgggcgtgtctgtaaatattgtgacagtatttttttactgtgctgttttttttgaaaggggatgggtaaaaagtagggtgttcttgttttttgcttgggagggtgggggtgggggagggtcttattttatcttatcttttctgtggatcagaaaaaacagaagccaaactcggggtcatctttgtttttaaagctgaagtgggactgtctggcactctgtgtatttatgcgttccagcatctggaacctcccatccctgccctcctcctgtgtagctgccacctccccgctgggcccagcatggctcacctgtcccgtgggctgtgtttcttgttgtttttctctttgcaaagacatagctaggaaagcgaatgataagggaaaagttctcagggaattgaagtgttgttgctatggtgacgtccttttgctgtgaataaaggtgctctttgcagcaa

SEQ ID NO: 149022 - DNA, 2268 bp, Homo sapiens
  Payload ID: 9433
  Gene Symbol: LFNG
  Gene Name: LFNG O-fucosylpeptide 3-beta-N-acetylglucosaminyltransferase
  Uniprot ID: Q8NES3
  ENST ID: ENST00000402506
  CDS Start-End: 127-1053
agactaagctgcaacactggcagagcctcccaaggaagggaggagggaggacagaggccaaggcggctcctggccaccctcgcagcttcctccctccctggccacaaggacccaaagctcagagggatggatgaacagacaggaaggctcaggctggacacgtattgtatgagtgccaagcagatctgggcatggagcaaatgctcaggaaggctgtgggatgagcacatgaaatggatggaaggatggacggacagatggacagatggatggatggatggatggatggatgagtggagcccaacaccagctctcaggtcctacggaggtggcctctctcagcagacgttcatcttcactgacggggaagatgaggccctggccaggcacacgggcaacgtggtcatcacaaactgctcggccgcccacagccgccaggcgctgtcctgcaagatggccgtggagtatgaccgcttcatcgagtccggcaggaagtggttctgccacgtggacgatgacaactacgtcaacctgcgggccctgctgcggctgctggccagctacccgcacacgcgggacgtctacgtcggcaagcccagcctggacaggcccatccaggccatggagcgggtcagcgagaacaaggtgcgtcctgtccacttctggtttgccacgggcggcgctggcttctgcatcagccgtgggctggctctgaagatgagcccgtgggccagcgggggtcacttcatgaatacggctgagcggatccggctgcctgatgactgcaccatcggctacatcgtggaggccctgctgggtgtgcccctcatccgcagcggcctcttccactcccacctggagaacctgcagcaggtgcccacctcggagctccacgagcaggtgacgctgagctacggtatgtttgaaaacaagcggaacgccgtccacgtgaaggggcccttctcggtggaggccgacccatccaggttccgctccatccactgccacctgtacccggacacaccctggtgtccccgcactgccatcttctagtggccatggctgagacccaatccctgggcgcccctggtatccaaagggcccagggaccctgttgcgctgccctggcctcggcattcgaggctcccctagggccgtgcctgtgcgtgtgcgtgtgcgtgtgtgtgtgtgtgtactgcatgcccacccgggtagcaggctgctgggcagttctgctctgtggaggggcgggcaccagcgccacttatgtgcctctgctccgagggccagtgggctgcagggcctgcttggaggaaggatttgtgtgtcggaggccactccgagggcaattctgttaggatttttggatctttctacagctacggggctccgggctactttgcagggatgcgatgcgtaggtgcctttctcttcctgctgaccacaagctctgtgctgggggtacctgtgccctgaagtcctggcccctgtgtcatagccccaagtacgactcactgagccatgctcattgcaggggaggctgggtctgggggtgcgtgacccaatccccttcctcctggcctggacgctgtggcttaagagtaacagcagccaccgcccagttccagtggccccacgaagcccccagtggctggctgtccagctgggcaaacagtggcacccctcccagctcttctgagtggggagtcttccaggcctcctcagaggtcttccctttgcctccccaggacagggtgagtcagagctcagcatttaatctcctctccaaagtagagagcaagtcgcccacagtgggcgtgtctgtaaatattgtgacagtatttttttactgtgctgttttttttgaaaggggatgggtaaaaagtagggtgttcttgttttttgcttgggagggtgggggtgggggagggtcttattttatcttatcttttctgtggatcagaaaaaacagaagccaaactcggggtcatctttgtttttaaagctgaagtgggactgtctggcactctgtgtatttatgcgttccagcatctggaacctcccatccctgccctcctcctgtgtagctgccacctccccgctgggcccagcatggctcacctgtcccgtgggctgtgtttcttgttgtttttctctttgcaaagacatagctaggaaagcgaatgataagggaaaagttctcagggaattgaagtgttgttgctatggtgacgtccttttgctgtgaataaaggtgctctttgcagc

SEQ ID NO: 149023 - DNA, 1969 bp, Homo sapiens
  Payload ID: 9433
  Gene Symbol: LFNG
  Gene Name: LFNG O-fucosylpeptide 3-beta-N-acetylglucosaminyltransferase
  ENST ID: ENST00000614382
  CDS Start-End: 8-754
ggtggggatgaagggctgcctgctgaaggccgattttctccttcagacgttcatcttcactgacggggaagatgaggccctggccaggcacacgggcaacgtggtcatcacaaactgctcggccgcccacagccgccaggcgctgtcctgcaagatggccgtggagtatgaccgcttcatcgagtccggcaggaagtggttctgccacgtggacgatgacaactacgtcaacctgcgggccctgctgcggctgctggccagctacccgcacacgcgggacgtctacgtcggcaagcccagcctggacaggcccatccaggccatggagcgggtcagcgagaacaaggtgcgtcctgtccacttctggtttgccacgggcggcgctggcttctgcatcagccgtgggctggctctgaagatgagcccgtgggccagcgggggtcacttcatgaatacggctgagcggatccggctgcctgatgactgcaccatcggctacatcgtggaggccctgctgggtgtgcccctcatccgcagcggcctcttccactcccacctggagaacctgcagcaggtgcccacctcggagctccacgagcaggtgacgctgagctacggtatgtttgaaaacaagcggaacgccgtccacgtgaaggggcccttctcggtggaggccgacccatccaggttccgctccatccactgccacctgtacccggacacaccctggtgtccccgcactgccatcttctagtggccatggctgagacccaatccctgggcgcccctggtatccaaagggcccagggaccctgttgcgctgccctggcctcggcattcgaggctcccctagggccgtgcctgtgcgtgtgcgtgtgcgtgtgtgtgtgtgtgtactgcatgcccacccgggtagcaggctgctgggcagttctgctctgtggaggggcgggcaccagcgccacttatgtgcctctgctccgagggccagtgggctgcagggcctgcttggaggaaggatttgtgtgtcggaggccactccgagggcaattctgttaggatttttggatctttctacagctacggggctccgggctactttgcagggatgcgatgcgtaggtgcctttctcttcctgctgaccacaagctctgtgctgggggtacctgtgccctgaagtcctggcccctgtgtcatagccccaagtacgactcactgagccatgctcattgcaggggaggctgggtctgggggtgcgtgacccaatccccttcctcctggcctggacgctgtggcttaagagtaacagcagccaccgcccagttccagtggccccacgaagcccccagtggctggctgtccagctgggcaaacagtggcacccctcccagctcttctgagtggggagtcttccaggcctcctcagaggtcttccctttgcctccccaggacagggtgagtcagagctcagcatttaatctcctctccaaagtagagagcaagtcgcccacagtgggcgtgtctgtaaatattgtgacagtatttttttactgtgctgttttttttgaaaggggatgggtaaaaagtagggtgttcttgttttttgcttgggagggtgggggtgggggagggtcttattttatcttatcttttctgtggatcagaaaaaacagaagccaaactcggggtcatctttgtttttaaagctgaagtgggactgtctggcactctgtgtatttatgcgttccagcatctggaacctcccatccctgccctcctcctgtgtagctgccacctccccgctgggcccagcatggctcacctgtcccgtgggctgtgtttcttgttgtttttctctttgcaaagacatagctaggaaagcgaatgataagggaaaagttctcagggaattgaagtgttgttgctatggtgacgtccttttgctgtgaataaaggtgctctttgcagc

SEQ ID NO: 149024 - DNA, 4834 bp, Homo sapiens
  Payload ID: 9434
  Gene Symbol: LCOR
  Gene Name: ligand dependent nuclear receptor corepressor
  Uniprot ID: Q96JN0
  ENST ID: ENST00000356016
  CDS Start-End: 564-1865
gtgcgaagcgtgaggtggagatgggggcggagggagctggagctgtcacagtccccgggtgcgcctgaccgagccaagtggggtgtcatggccgcggggggcagcggctgcacttcctcagcgggcggcggtggccggggagttaatcctcgacgcacgggtcccgtttccctctgtgcggcggccggcgggaccataagggcttaactcatatatttaacccccctccaaaaaggtttgaaagtattcttgaagggctgtttggacctgcattattaaaagatctcagtttatttaaagactgtgaacctgaaagcatttctgattggacttttgatgaaaactgtttattctgttgcttgagaagagataaagtaaagggacacttagtcggtctggatgaaccagcttcgggagctgggcaagaagctctgcttaaacaagagcaagcaaaaatcattcgattcgagagacaagcagaagaattcctcaatgcagtcttttatagaaaagacagtccctgggtctccgaccccaatattcccctagtggcccgtgagatcatgcagcgaatgatccaacaatttgctgctgaatatacctcaaaaaatagctctactcaggaccccagccagcccaatagcacaaagaaccaaagcctgccgaaagcatctccagtcaccacctctcccacggctgcaactactcagaaccctgtgctcagcaaacttctcatggctgaccaagactcacctctggaccttactgtcagaaagtctcagtcagaacctagcgaacaagacggtgtacttgatctgtccactaagaaaagtccatgtgctggcagcacttccctgagccactctccaggctgctccagtactcaagggaacgggcgacctgggagacccagccagtaccgcccagacggacttcggagtggtgatggggtacctccaagaagcttacaggatggaaccagggaaggttttggacactccacatcactcaaagttccactggctcgatccctgcagattagtgaagaactactgagcagaaaccaattgtccacagctgccagccttgggccatctggattacagaatcatggacaacacttaatattatccagggaagcctcttgggcaaaaccacattacgagttcaacctcagccgtatgaagttcaggggaaatggtgcactcagcaacatcagtgaccttccttttcttgcagaaaactctgcctttccaaaaatggcacttcaagcaaaacaagatggaaaaaaggatgtgagccattcatctcctgtagatttaaagataccacaagttcgaggaatggatctttcttgggagtctcgcactggtgatcagtacagctatagctctttggtaatgggttcacaaacggagagcgcgcttagtaaaaaattaagggctattcttccaaaacaaagtagaaaaagcatgttagatgctggacccgattcttggggctcagatgctgagcagtctacctctggacagccatatcccacatcggatcaagaaggagaccctggctccaagcagcctcggaagaaaagagggcgttacagacagtacaacagtgagatactggaggaagcaatctcagtggttatgagtggaaaaatgagtgtttccaaagctcagagtatttatgggattccccacagtacactggagtacaaagtaaaggagaggctgggcactttgaaaaaccctccaaagaaaaagatgaaattaatgaggtcggaggggccagatgtttctgtaaagattgaattagatccccagggagaggcagcacaaagtgcaaatgaatcaaaaaacgagtaggaatactgtagagtgccaattactgtacaaactgggtgagcactactgcatcattgttcagctatcattgcttgcacgtaatttcatttactgtgacacttgcttctttgcagattttgcattgacttgtgtgtacagagatgaaatgtgcattctgaatgttgcatattttaaatttttcatgtgcagtatggctcggaatatgtttggccttttgcatgtttctctacaaaagagaattgagttacctcacagagaacagatacatggaagtggactccttgcctgtagagcctgcatgcttttttgtttttttttgttgttgttgttttttcttaagttatatttgtttttactttttaaaaaagaagaggaaacaaagcccccttttagaaactacgtctgtcatactgggagctttatcactgcaaattggaaagccatcttatacaaaattattcacatttttcatctacgattcaactaatcgaaggattaaactaaagaaaaaactaagaagaacaatgaacctttgactttgagaaatttggttattcactgacataattattgggtcatttatagttacattttataattttcttctcactattaaatttatttaaattagcaagctattagtgctcacccagaggggaaggtggtggaaaatgtgcacacactaccttcagaaatgcttcagttaattactttgaacactacctttgctgtaatttcatttgagattttctaagggtagaatttggtctcaccaacaagtgaggatatagccttatctcatggaggacgagctccgtatttactcaggagcagtcagggtacattacataaaacaatggaggatgcctcattttagcaaactaggtttctttgtattcttcagtccttttacagaattgatgtgctaactgaatatcattgcagcaactagactaagatattcaagatctctttattggggatgggagaaatagggaaagaaatgtgtataagtaattatgatattgcaaaagtgatacttagattttacagcctcagtagtctgcccagtgtccacattaatgaaggatccatgtttgtagtgagagaaaaaaaccccaaggtaacccgatatgatttaggatgcatatcagttctaacaattcaatcagaagtcaagctcattggaattccttttttaactgatccaaatactagtagaagggggagggagaggtgttgggttttttttttaagtttttatttaattttgttggttagaatttttttctgtttttggcatcctacataataccccccttcttgactttttctgataattagctgatattcatggttgtttagcacacagttcaggacctttgagatcatgtttgtataagcactccttgaagaatatctaagctttttctgagatgggcttttaaaattataataagggaagtttattttctgcggtttttgcaagaataagcaaagcccatggaatttaatttttcattgtgatcagattaaaattactatttgtgcaaaacaaattccacaccacatgtactgtatattctaatctgctgagaaaggtggtcaggcccttctaaatgcttaaccaaaaacaaacattattggagtttcagtgtaaaataaaattaaaattggagggttggttagattgatttcagatggatactaacagtttgaggggaggtccagatatttccaaggcataaattcttgcctggaaactttggagcaattaattaaattaggttaagttttccctcagcaacctgtgtgttcaaaggttaggcacaccattgctgttactaaaatacatgcactgctcattcttgacatagcttgggtgtgggttcctcttgttttggttattttgtgtagcagtttaatcagtggataactgagcctgtttcctcttagctttctagacttcttaacagaaaaaacagtttgggttcaatagcattttatgattctacaatattttgtcacctagctggaagttgcaataaaaattccttatgaaatatatggttttcatctgtaattgaaggaaatcatagaaagtttgctgaaagcaaagggctaagcttatgaaggaatgcctcctttgttacacactcaagaatttgtcagcacacaattaattgcagccatagtacctttttgcgtaatgtttgggatattcagtagcccaggattgctacaaaaaggtcctttgagaaaattaatttgtgcttgcttttatcccctctcagaaagacatcactaaaggcccattaaaaatctggccctaaaagttcaacttttgtagagtttattgttcagagaggtttaatcctatgtggtagtctatataagtgatgtatgagttgagttatgtaaattttgtcattgtagtgtacatggagtgatcattttactaacataaatattttctatgtgtgtttcagtggatgacaatcgagcagcagaagaatggtgtgcctaccctttaatgctgcagtttaagagaacttgtattgtgtcatttcagattgtaggctgagagttgtaaatagtgaaaatttgagtacttctattatttgttttggttagaaagtgaatttaaaaaacaaaccaaactctaaactttctcagattaaaagtcctgagacctgaagattgtaatattcatgtctgtgaagcttttaaacattacacttgagatcagtcatgacttgatattcaggtaaattttcttttccaagaagcttttgaataagcatatttcctccaaaggtctctctctttctctctctttttttgagtgtagattattttaaagcactaattgcattacattggtaactgcaatataaaatagccattattgttttgtgaagcatggttgaaattagctagtggtcccttttgaatttcatgagcctctc

SEQ ID NO: 149025 - DNA, 4852 bp, Homo sapiens
  Payload ID: 9434
  Gene Symbol: LCOR
  Gene Name: ligand dependent nuclear receptor corepressor
  Uniprot ID: Q96JN0
  ENST ID: ENST00000371097
  CDS Start-End: 547-1848
ggcggagggagctggagctgtcacagtccccgggtgcgcctgaccgagccaagtggggtgtcatggccgcggggggcagcggctgcacttcctcagcgggcggcggtggccggggagttaatcctcgacgcacgggtcggtgtgtcccgtttccctctgtgcggcggccggcgggaccataagggcttaactcatatatttaacccccctccaaaaaggtttgaaagtattcttgaagggctgtttggacctgcattattaaaagatctcagtttatttaaagactgtgaacctgaaagcatttctgattggacttttgatgaaaactgtttattctgttgcttgagaagagataaagtaaagggacacttagtcggtctggatgaaccagcttcgggagctgggcaagaagctctgcttaaacaagagcaagcaaaaatcattcgattcgagagacaagcagaagaattcctcaatgcagtcttttatagaaaagacagtccctgggtctccgaccccaatattcccctagtggcccgtgagatcatgcagcgaatgatccaacaatttgctgctgaatatacctcaaaaaatagctctactcaggaccccagccagcccaatagcacaaagaaccaaagcctgccgaaagcatctccagtcaccacctctcccacggctgcaactactcagaaccctgtgctcagcaaacttctcatggctgaccaagactcacctctggaccttactgtcagaaagtctcagtcagaacctagcgaacaagacggtgtacttgatctgtccactaagaaaagtccatgtgctggcagcacttccctgagccactctccaggctgctccagtactcaagggaacgggcgacctgggagacccagccagtaccgcccagacggacttcggagtggtgatggggtacctccaagaagcttacaggatggaaccagggaaggttttggacactccacatcactcaaagttccactggctcgatccctgcagattagtgaagaactactgagcagaaaccaattgtccacagctgccagccttgggccatctggattacagaatcatggacaacacttaatattatccagggaagcctcttgggcaaaaccacattacgagttcaacctcagccgtatgaagttcaggggaaatggtgcactcagcaacatcagtgaccttccttttcttgcagaaaactctgcctttccaaaaatggcacttcaagcaaaacaagatggaaaaaaggatgtgagccattcatctcctgtagatttaaagataccacaagttcgaggaatggatctttcttgggagtctcgcactggtgatcagtacagctatagctctttggtaatgggttcacaaacggagagcgcgcttagtaaaaaattaagggctattcttccaaaacaaagtagaaaaagcatgttagatgctggacccgattcttggggctcagatgctgagcagtctacctctggacagccatatcccacatcggatcaagaaggagaccctggctccaagcagcctcggaagaaaagagggcgttacagacagtacaacagtgagatactggaggaagcaatctcagtggttatgagtggaaaaatgagtgtttccaaagctcagagtatttatgggattccccacagtacactggagtacaaagtaaaggagaggctgggcactttgaaaaaccctccaaagaaaaagatgaaattaatgaggtcggaggggccagatgtttctgtaaagattgaattagatccccagggagaggcagcacaaagtgcaaatgaatcaaaaaacgagtaggaatactgtagagtgccaattactgtacaaactgggtgagcactactgcatcattgttcagctatcattgcttgcacgtaatttcatttactgtgacacttgcttctttgcagattttgcattgacttgtgtgtacagagatgaaatgtgcattctgaatgttgcatattttaaatttttcatgtgcagtatggctcggaatatgtttggccttttgcatgtttctctacaaaagagaattgagttacctcacagagaacagatacatggaagtggactccttgcctgtagagcctgcatgcttttttgtttttttttgttgttgttgttttttcttaagttatatttgtttttactttttaaaaaagaagaggaaacaaagcccccttttagaaactacgtctgtcatactgggagctttatcactgcaaattggaaagccatcttatacaaaattattcacatttttcatctacgattcaactaatcgaaggattaaactaaagaaaaaactaagaagaacaatgaacctttgactttgagaaatttggttattcactgacataattattgggtcatttatagttacattttataattttcttctcactattaaatttatttaaattagcaagctattagtgctcacccagaggggaaggtggtggaaaatgtgcacacactaccttcagaaatgcttcagttaattactttgaacactacctttgctgtaatttcatttgagattttctaagggtagaatttggtctcaccaacaagtgaggatatagccttatctcatggaggacgagctccgtatttactcaggagcagtcagggtacattacataaaacaatggaggatgcctcattttagcaaactaggtttctttgtattcttcagtccttttacagaattgatgtgctaactgaatatcattgcagcaactagactaagatattcaagatctctttattggggatgggagaaatagggaaagaaatgtgtataagtaattatgatattgcaaaagtgatacttagattttacagcctcagtagtctgcccagtgtccacattaatgaaggatccatgtttgtagtgagagaaaaaaaccccaaggtaacccgatatgatttaggatgcatatcagttctaacaattcaatcagaagtcaagctcattggaattccttttttaactgatccaaatactagtagaagggggagggagaggtgttgggttttttttttaagtttttatttaattttgttggttagaatttttttctgtttttggcatcctacataataccccccttcttgactttttctgataattagctgatattcatggttgtttagcacacagttcaggacctttgagatcatgtttgtataagcactccttgaagaatatctaagctttttctgagatgggcttttaaaattataataagggaagtttattttctgcggtttttgcaagaataagcaaagcccatggaatttaatttttcattgtgatcagattaaaattactatttgtgcaaaacaaattccacaccacatgtactgtatattctaatctgctgagaaaggtggtcaggcccttctaaatgcttaaccaaaaacaaacattattggagtttcagtgtaaaataaaattaaaattggagggttggttagattgatttcagatggatactaacagtttgaggggaggtccagatatttccaaggcataaattcttgcctggaaactttggagcaattaattaaattaggttaagttttccctcagcaacctgtgtgttcaaaggttaggcacaccattgctgttactaaaatacatgcactgctcattcttgacatagcttgggtgtgggttcctcttgttttggttattttgtgtagcagtttaatcagtggataactgagcctgtttcctcttagctttctagacttcttaacagaaaaaacagtttgggttcaatagcattttatgattctacaatattttgtcacctagctggaagttgcaataaaaattccttatgaaatatatggttttcatctgtaattgaaggaaatcatagaaagtttgctgaaagcaaagggctaagcttatgaaggaatgcctcctttgttacacactcaagaatttgtcagcacacaattaattgcagccatagtacctttttgcgtaatgtttgggatattcagtagcccaggattgctacaaaaaggtcctttgagaaaattaatttgtgcttgcttttatcccctctcagaaagacatcactaaaggcccattaaaaatctggccctaaaagttcaacttttgtagagtttattgttcagagaggtttaatcctatgtggtagtctatataagtgatgtatgagttgagttatgtaaattttgtcattgtagtgtacatggagtgatcattttactaacataaatattttctatgtgtgtttcagtggatgacaatcgagcagcagaagaatggtgtgcctaccctttaatgctgcagtttaagagaacttgtattgtgtcatttcagattgtaggctgagagttgtaaatagtgaaaatttgagtacttctattatttgttttggttagaaagtgaatttaaaaaacaaaccaaactctaaactttctcagattaaaagtcctgagacctgaagattgtaatattcatgtctgtgaagcttttaaacattacacttgagatcagtcatgacttgatattcaggtaaattttcttttccaagaagcttttgaataagcatatttcctccaaaggtctctctctttctctctctttttttgagtgtagattattttaaagcactaattgcattacattggtaactgcaatataaaatagccattattgttttgtgaagcatggttgaaattagctagtggtcccttttgaatttcatgagcctctcaaaaaagaaaaacttaaaaaaaaaaaaaaaaaaaa

SEQ ID NO: 149026 - DNA, 4834 bp, Homo sapiens
  Payload ID: 9434
  Gene Symbol: LCOR
  Gene Name: ligand dependent nuclear receptor corepressor
  Uniprot ID: Q96JN0
  ENST ID: ENST00000371103
  CDS Start-End: 522-1823
gggccgggcgggcggcagaagatggcgagggtgtgtaggcggcagcaatgctccgttgagagacgcggctttcggcaagaactggattcgtggcgccacaagctcattcactgtgtaggtcccgtttccctctgtgcggcggccggcgggaccataagggcttaactcatatatttaacccccctccaaaaaggtttgaaagtattcttgaagggctgtttggacctgcattattaaaagatctcagtttatttaaagactgtgaacctgaaagcatttctgattggacttttgatgaaaactgtttattctgttgcttgagaagagataaagtaaagggacacttagtcggtctggatgaaccagcttcgggagctgggcaagaagctctgcttaaacaagagcaagcaaaaatcattcgattcgagagacaagcagaagaattcctcaatgcagtcttttatagaaaagacagtccctgggtctccgaccccaatattcccctagtggcccgtgagatcatgcagcgaatgatccaacaatttgctgctgaatatacctcaaaaaatagctctactcaggaccccagccagcccaatagcacaaagaaccaaagcctgccgaaagcatctccagtcaccacctctcccacggctgcaactactcagaaccctgtgctcagcaaacttctcatggctgaccaagactcacctctggaccttactgtcagaaagtctcagtcagaacctagcgaacaagacggtgtacttgatctgtccactaagaaaagtccatgtgctggcagcacttccctgagccactctccaggctgctccagtactcaagggaacgggcgacctgggagacccagccagtaccgcccagacggacttcggagtggtgatggggtacctccaagaagcttacaggatggaaccagggaaggttttggacactccacatcactcaaagttccactggctcgatccctgcagattagtgaagaactactgagcagaaaccaattgtccacagctgccagccttgggccatctggattacagaatcatggacaacacttaatattatccagggaagcctcttgggcaaaaccacattacgagttcaacctcagccgtatgaagttcaggggaaatggtgcactcagcaacatcagtgaccttccttttcttgcagaaaactctgcctttccaaaaatggcacttcaagcaaaacaagatggaaaaaaggatgtgagccattcatctcctgtagatttaaagataccacaagttcgaggaatggatctttcttgggagtctcgcactggtgatcagtacagctatagctctttggtaatgggttcacaaacggagagcgcgcttagtaaaaaattaagggctattcttccaaaacaaagtagaaaaagcatgttagatgctggacccgattcttggggctcagatgctgagcagtctacctctggacagccatatcccacatcggatcaagaaggagaccctggctccaagcagcctcggaagaaaagagggcgttacagacagtacaacagtgagatactggaggaagcaatctcagtggttatgagtggaaaaatgagtgtttccaaagctcagagtatttatgggattccccacagtacactggagtacaaagtaaaggagaggctgggcactttgaaaaaccctccaaagaaaaagatgaaattaatgaggtcggaggggccagatgtttctgtaaagattgaattagatccccagggagaggcagcacaaagtgcaaatgaatcaaaaaacgagtaggaatactgtagagtgccaattactgtacaaactgggtgagcactactgcatcattgttcagctatcattgcttgcacgtaatttcatttactgtgacacttgcttctttgcagattttgcattgacttgtgtgtacagagatgaaatgtgcattctgaatgttgcatattttaaatttttcatgtgcagtatggctcggaatatgtttggccttttgcatgtttctctacaaaagagaattgagttacctcacagagaacagatacatggaagtggactccttgcctgtagagcctgcatgcttttttgtttttttttgttgttgttgttttttcttaagttatatttgtttttactttttaaaaaagaagaggaaacaaagcccccttttagaaactacgtctgtcatactgggagctttatcactgcaaattggaaagccatcttatacaaaattattcacatttttcatctacgattcaactaatcgaaggattaaactaaagaaaaaactaagaagaacaatgaacctttgactttgagaaatttggttattcactgacataattattgggtcatttatagttacattttataattttcttctcactattaaatttatttaaattagcaagctattagtgctcacccagaggggaaggtggtggaaaatgtgcacacactaccttcagaaatgcttcagttaattactttgaacactacctttgctgtaatttcatttgagattttctaagggtagaatttggtctcaccaacaagtgaggatatagccttatctcatggaggacgagctccgtatttactcaggagcagtcagggtacattacataaaacaatggaggatgcctcattttagcaaactaggtttctttgtattcttcagtccttttacagaattgatgtgctaactgaatatcattgcagcaactagactaagatattcaagatctctttattggggatgggagaaatagggaaagaaatgtgtataagtaattatgatattgcaaaagtgatacttagattttacagcctcagtagtctgcccagtgtccacattaatgaaggatccatgtttgtagtgagagaaaaaaaccccaaggtaacccgatatgatttaggatgcatatcagttctaacaattcaatcagaagtcaagctcattggaattccttttttaactgatccaaatactagtagaagggggagggagaggtgttgggttttttttttaagtttttatttaattttgttggttagaatttttttctgtttttggcatcctacataataccccccttcttgactttttctgataattagctgatattcatggttgtttagcacacagttcaggacctttgagatcatgtttgtataagcactccttgaagaatatctaagctttttctgagatgggcttttaaaattataataagggaagtttattttctgcggtttttgcaagaataagcaaagcccatggaatttaatttttcattgtgatcagattaaaattactatttgtgcaaaacaaattccacaccacatgtactgtatattctaatctgctgagaaaggtggtcaggcccttctaaatgcttaaccaaaaacaaacattattggagtttcagtgtaaaataaaattaaaattggagggttggttagattgatttcagatggatactaacagtttgaggggaggtccagatatttccaaggcataaattcttgcctggaaactttggagcaattaattaaattaggttaagttttccctcagcaacctgtgtgttcaaaggttaggcacaccattgctgttactaaaatacatgcactgctcattcttgacatagcttgggtgtgggttcctcttgttttggttattttgtgtagcagtttaatcagtggataactgagcctgtttcctcttagctttctagacttcttaacagaaaaaacagtttgggttcaatagcattttatgattctacaatattttgtcacctagctggaagttgcaataaaaattccttatgaaatatatggttttcatctgtaattgaaggaaatcatagaaagtttgctgaaagcaaagggctaagcttatgaaggaatgcctcctttgttacacactcaagaatttgtcagcacacaattaattgcagccatagtacctttttgcgtaatgtttgggatattcagtagcccaggattgctacaaaaaggtcctttgagaaaattaatttgtgcttgcttttatcccctctcagaaagacatcactaaaggcccattaaaaatctggccctaaaagttcaacttttgtagagtttattgttcagagaggtttaatcctatgtggtagtctatataagtgatgtatgagttgagttatgtaaattttgtcattgtagtgtacatggagtgatcattttactaacataaatattttctatgtgtgtttcagtggatgacaatcgagcagcagaagaatggtgtgcctaccctttaatgctgcagtttaagagaacttgtattgtgtcatttcagattgtaggctgagagttgtaaatagtgaaaatttgagtacttctattatttgttttggttagaaagtgaatttaaaaaacaaaccaaactctaaactttctcagattaaaagtcctgagacctgaagattgtaatattcatgtctgtgaagcttttaaacattacacttgagatcagtcatgacttgatattcaggtaaattttcttttccaagaagcttttgaataagcatatttcctccaaaggtctctctctttctctctctttttttgagtgtagattattttaaagcactaattgcattacattggtaactgcaatataaaatagccattattgttttgtgaagcatggttgaaattagctagtggtcccttttgaatttcatgagcctctcaaaaaagaaaaacttaaaaaaaaaaaaaaaaaaaaacaaaaa

SEQ ID NO: 149027 - DNA, 7777 bp, Homo sapiens
  Payload ID: 9434
  Gene Symbol: LCOR
  Gene Name: ligand dependent nuclear receptor corepressor
  Uniprot ID: Q96JN0
  ENST ID: ENST00000540664
  CDS Start-End: 544-1764
gcgcggggccgcggcggaggctgggccgggcgggcggcagaagatggcgagggtgtgtaggcggcagcaatgctccgttgagagacgcggctttcggcaagaactggattcgtggcgccacaagctcattcactgtgtaggtcccgtttccctctgtgcggcggccggcgggaccataagggcttaactcatatatttaacccccctccaaaaaggtttgaaagtattcttgaagggctgtttggacctgcattattaaaagatctcagtttatttaaagactgtgaacctgaaagcatttctgattggacttttgatgaaaactgtttattctgttgcttgagaagagataaagtaaagggacacttagtcggtctggatgaaccagcttcgggagctgggcaagaagctctgcttaaacaagagcaagcaaaaatcattcgattcgagagacaagcagaagaattcctcaatgcagtcttttatagaaaagacagtccctgggtctccgaccccaatattcccctagtggcccgtgagatcatgcagcgaatgatccaacaatttgctgctgaatatacctcaaaaaatagctctactcaggaccccagccagcccaatagcacaaagaaccaaagcctgccgaaagcatctccagtcaccacctctcccacggctgcaactactcagaaccctgtgctcagcaaacttctcatggctgaccaagactcacctctggaccttactgtcagaaagtctcagtcagaacctagcgaacaagacggtgtacttgatctgtccactaagaaaagtccatgtgctggcagcacttccctgagccactctccaggctgctccagtactcaagggaacgggcgacctgggagacccagccagtaccgcccagacggacttcggagtggtgatggggtacctccaagaagcttacaggatggaaccagggaaggttttggacactccacatcactcaaagttccactggctcgatccctgcagattagtgaagaactactgagcagaaaccaattgtccacagctgccagccttgggccatctggattacagaatcatggacaacacttaatattatccagggaagcctcttgggcaaaaccacattacgagttcaacctcagccgtatgaagttcaggggaaatggtgcactcagcaacatcagtgaccttccttttcttgcagaaaactctgcctttccaaaaatggcacttcaagcaaaacaagatggaaaaaaggatgtgagccattcatctcctgtagatttaaagataccacaagttcgaggaatggatctttcttgggagtctcgcactggtgatcagtacagctatagctctttggtaatgggttcacaaacggagagcgcgcttagtaaaaaattaagggctattcttccaaaacaaagtagaaaaagcatgttagatgctggacccgattcttggggctcagatgctgagcagtctacctctggacagccatatcccacatcggatcaagaaggagaccctggctccaagcagcctcggaagaaaagagggcgttacagacagtacaacagtgagatactggaggaagcaatctcagtggttatgagtggaaaaatgagtgtttccaaagctcagagtatttatgggattccccacagtacactggagtacaaagtaaaggagaggctgggcactttgaaaaaccctccaaagaaaaagatgaaattaatgagtggatgacaatcgagcagcagaagaatggtgtgcctaccctttaatgctgcagtttaagagaacttgtattgtgtcatttcagattgtaggctgagagttgtaaatagtgaaaatttgagtacttctattatttgttttggttagaaagtgaatttaaaaaacaaaccaaactctaaactttctcagattaaaagtcctgagacctgaagattgtaatattcatgtctgtgaagcttttaaacattacacttgagatcagtcatgacttgatattcaggtaaattttcttttccaagaagcttttgaataagcatatttcctccaaaggtctctctctttctctctctttttttgagtgtagattattttaaagcactaattgcattacattggtaactgcaatataaaatagccattattgttttgtgaagcatggttgaaattagctagtggtcccttttgaatttcatgagcctctcaaaaaagaaaaacttaaaaaaaaaaaaaaaaaaaaacaaaaagctgctggaatatttcaaaagatatatattttaccttattataggttttgtaaagttagtttgtaatattcaggtgcacttttaatgttaaattttgtgttcagagttccattataccatgtatttctcggaggtggctcatcacacggctggtggcagtcttggtgccgcagtgattccttaatatttgatttctctcttgatttgccactattctgtattggcactttcagtgtagatattctagtttggggatgtcctcacaatgtgtaatagagattggtctattagcatgcttaatttctgctaatcagagttttgcatggcccaaacaacagttgaccatttttatggtatgggaaagtgtagttcacaactgtctttgtcacgaaagccgtttttcctcacattttccagtaggcagataacattacttaaattattaatatataacactcttggaactattgataggaaataatgtatttaaaataattttttgcattttcagagaccttgatgttatagggtagataagctatggcactataaaatcaaaaacactaattctgtggaaggatatctagttggtatttttatctttagctttctcatttctgagacagcatagtcatccagcttgatggtaatgtagtatattactttgttcagtgggcttataagtgactctgaattatgtttgtgatgagctatacactttttttctgttccccaaataccatgaaggacaaggtcactctttcaggaaaaataatttatatttgtgtataatactttttaatattaagtttgttgttctgaagtttagatgttgcttgataaacctttgctgcagcagatcatgaatatgagtaaggctttgtgtgataataggggtccttatgtgaagttaattactgttcagttctggtgagcaagctcaacaagtgtgaagtgtgtattagctttatttggtacacttttactttacaatatcgaagtgcttttagaactctggttatcttatataaaccattacctcaaccaattggcatttcttttccccaacatttaccttagctataatatgagctatgtgggatcagatggtaaaactataaaaggcacaatgagaagtttagttcccaagttttggagagaactctaaattagactaaaaacaactacctgttaacaccaatatcataactaccttctgtcgttaggcagtacatagcaacctttgagctgctagtgagctatctgttctccccctacccccaagtaagcacacagtgccaggcctggttctaagcctttgtgattctcttacatctcattgacccataatagtgaagcatggattcatttattttcataagacaaattgagtcagctcgatgtcagaagttgaaaatattttgagtagtttaacagttatatgagagattggcatcattttctttaacagcttttatctttgtagatttccttttgagacatgtatttttgcttttataatcctttcattaaatgccagaggttgttttcatattaatcactcttttctgtatattcaggttgctgtcattggtgatagaatatggcaatagacagaattgtgctccactttatgttttttaggagatattgaaagttataggttaaattttggccttcttgaagatatcaaagattgttttccttgttacctttaattagaatttggtcttcattaatgctttggtcaggctagcattactaaaaacttgatggcttcagcagaacagcccgtttaggagactattaagctatctagggattttttttcaaattaattgctttcaaaatctgaaaaggaaaaaagtataattgtggtacaaagaagacagatctccaggctctttcttctcagtttattttggtttaattctgtactggagacttgaataggatttgtgaacatggtgatggaaagaaaaatagaggacattatttgtgtaccctcattcctgaataatcttgcagtcaccttttaaagaagcagacattagccctgtaacacaacactgtagctataaactctaagtgttaggaaggagattggggtggggagggtggagtaggatggaaaaagcatgtagacttctgagaagaggctaaaaattctgccctataatactaaaaatgagtcacaagataatgtggtgaagttaggccatcttgatttgatagaaaaatcttttacattgtttaaaaatgagaatcgaggctaattaatgttgatttgacaatagaacatgagctaattctgcaaccgtttggggggtaattttatggtttccagttcatttagagctgtatcaagaaaagctaaaaagcaagcacttttagttaatcatagatttattggatatagcaaatattattataatatttaatctctattatttgaatgtggaaatgaactcttttaccccatcttgaactgtcattgaacatgctcaagatgatcaacactggaaatgaccctacacacataccaaaaaaatctaaagcagtaagacatatttgaagatccatacctcttaaactttttagatttgtcttgggaaagaatttatgaacctgtaaccagtattagtgcagtcttgggttccttgttctgcataattgcaccctttctcaggtatgtcctgacaacataaattttaaaataatctcattagagattagattctcagtggatagtgtgtaaggggactaggggtggggggttgggggtagttggacacaggacactgacacagtagagcagggatttttaacagtcaatagccaaatagaatttcaatctagaatatttttaccccctcagaatgagtgaaacaacttctattatttggtgtacccggtgctacactcctaaaagtcttttttttttttcatccaggtgacgttttttatttttcctgcttggtggtggaaggttatatagtaaacttcactgtcattaagaaagcgcttgtccaaaatgtttaaagtactagaaaagggataattcagcactttttctgttacaacactaaagtcttaatttatcttcagagtcttaggtactgtaagtttttggatgattatttaaaaatataaaacatactacataatatggggtcagatcacatttatataaataattcttattttaaaaaagacaataacattttgtacctttctagcaattccaagtgattgcctcattttctcttgttaagcatttcaagcttaagaatttggaatttgagagaaggtgagggggaaaattccctaaaataaaaatttgtttcaaaccattttagaaaaataaatcactaggaaaataggtagggattctctccccctttaagtcttcagggaatgagcagtatttagaatctttggctgaaattcaagcctttttactttgtaaatttttaatattaattcactgacatgctttttacaccagaggactgaaaatggatcttaatgtttttaagttgtggaagggtatatttctaaaatgaggggggatgattaactaggttagtattaccagcattagtaagtttaaggaattttagtatgtaatagcaaagtgtttgattaaaagtctaatcctatattactagtcaaaattagttacattctgatctaggaaagataatagtcattggatattgatatgctgtgctgtcagaaaaccagactaagatagaaacctttatctgactcccacatgttgcttgttgtgatgggatgtatactttacagcagcttattgctgctttgaaaaaaaatgtataaactatacatttggagtgtttgcatataattctttataacctccacttaaagctgtcagacattggtattttatcagtccacattgttgaataaaactaatgttcttaggaatccagcttgtacacactgtttaaaaaccctcagggacagtttacacactcttctcactcaattcaggtactttgatgctattcttaaacctaacagtgacttgtatttttctgttttgcttttatttcaacgtgctggtagcacatctgatgaatgtcaacttaaaaaactcagttcaggtatccaggtataactcagccaaacagattttaaagctgcatataactctccagcacatggtgcctcacactcttatagtggcattctatatattcagttattactactgagcagataatatgggggttcctgttaacagtgtattttttaaaaaaagcgcataaatgtatagccagcacactacacacacacacacaaacatgcacagttaaactatatatttttaaatgccactaatagccagcacaactaaaacaaaagacattcctaactgctctgtaagctgttaacagatgcagttccttcttgatgtggctcttgcttcttcacgataactactactaaattcaagcactggtccttgggtgtctgacctctacattctagtttatgcaatgtctttagagaattttgtgcactggccactgtgatggaaccattgggccaggagtgctttgagtttatcagtagtgattctgccaaagttggtgttgtaacatgagtatgtaaaatgtcaaaaaaattagcagaggtctaggtctgcatatcagcagacagttttgtccgtgtattttgtagccttgaagttctcagtgacaagttttttctgatgcgaagttctaattccagtgttttagtcctttgcatctttaatgttaagacttgcctctttaaaattgcttttgttttctgcagtactatctgtggttaacaaaatagattatttctctgctttaatatttgatatcttacatctaaaataaattctctccacatataaaacccatagcctttggagatatggaaaatggtatctttcagatttctagaagttcaagtgtcatacaacaaaacaggaaccccctttactcttatggacctcatttcaatatactgtttacagtttgatggaattgtataatttaatatttctcttgtactgtagtttatatttatttacagatttttttgtactgtgtgatttgaactttttgttccttgctatgatcaatgtttatgtagtagagcacttatgatcacaaattaagttttttggtttgattgcactacattaaattttttaatgcagttctgatttttgactggactaaaactgtgtcttaatgtatgtgatgagtacttaaaattttaatccatgtggtccccccccttttttttttttttgcattgtatgtcaaaagcgcttgttctttcgtgcatgtgtaagatttaatggttccattgtattatttgaccatgacattttggagaaacattcccagctgtaatgttgtgtatggtagttctcactggatgctagagttttcaaaaccactattcttctaataaattttgttgtg

SEQ ID NO: 149028 - DNA, 5604 bp, Homo sapiens
  Payload ID: 9435
  Gene Symbol: LCORL
  Gene Name: ligand dependent nuclear receptor corepressor-like
  Uniprot ID: Q8N3X6
  ENST ID: ENST00000326877
  CDS Start-End: 126-1082
gtgacacgtgtcaatcaacccccctccggggggcgcgcgctccggggctcgcgccgagggctcgcgcccctgcctcgtgcctgcgctgctcgtatgtaaatgagggcgcgtgacgcgggacgcagatggacaagggaagagagagaatggccgctgccgccgccgctgctgccgccgccgccgccgccgctcagtgccggagccctcggtgcgcggcggagagaagaggattccggcgggaactcgactcttggcgccaccgcctcatgcactgtgtaggttttgagagtattttagaagggctttatggaccacggctacgaagagacctcagtttatttgaagactgtgaaccagaagagctgactgactggtctatggatgaaaaatgttcattttgtaacctacagagagaagcagtcagtgattgtataccatctcttgattcttcacagtcaacaccaacagaggagctatcatctcagggccagtccaacactgataagattgaatgccaagcagaaaattacctaaatgcactctttcgaaagaaagatcttcctcagaactgtgatcctaacattcccctagttgctcaggaattaatgaaaaagatgatacgtcaatttgcgattgagtacatttcaaaaagtggtaaaactcaagagaatagaaatggttcaattggaccaagtatagtatgtaaaagtatccaaatgaatcaagcagaaaactcccttcaggaagagcaggaaggccccttagacctcactgtgaatcgaatgcaagaacaaaatactcagcaaggggatggagtgttagatctctctacaaagaaaaccagcataaaatctgaagagtcatccatatgtgatccttcttctgaaaattcagtggctggcatgctacaagtgaaaactgatgagaaactgaatgtgtctgatgagaatacagcaagttgccctttgagccccattaagatgtgccttaatcgtcccattgaatggaatctgaatttgacaacagcatctctaacgagctgtacagttcataaccaaaatctcaaaagcgaagagaaatagattgcagttcttcttgcactatctttattttgtatgtcagtattccttctgaacaataagcatttatcaattgatcttgaagtatttctagtcctgtgatttgtctttatattaaatcattagcattaatcattttgattatattctttatatgttttttttacatgttttacatcagatcattgtggaattttgtaaacggattttgatgtttctcttttagtggtattatgtgaattttttatgccctaagtttaaatacgtaattgtccctagttttatttctgtgcacaaagttttaatatataacacattgtgatttataaagctagtattgtaaagatttgtgatgataacctgacccatgagcagttgtaaaacaggtggataccaactacctcgaagcaaattggtgaaagaaaaggcaaaggtatctcttagaagtaaatctccttcaacgttatatatgtacagaagaaaaaaagttgatcatagctttttgtcaagtagcatgtttcccattcacaggaaaatgtgagcttatcagttctttctctgtattttaaatctaagtctgtgggctttaagagcaatggcacaattgcatgtttactgttcagcaaatctgtgcctcttgatagagaaaaatactatgtggtttctgtaagttaccagttttgaatgaaaaatggtaaatggatttacatctgttttattgtaccttagccttttattttaaagttaaagggatgacttttaaaagcaggacattccctacctttaatagtgcaaagcacagtttcagcaatggctacatgactatgtctaaaaactgaatactcagaatactaaaggtttggtgcttaaatttatttttcccatgccagagaaagcaagctttggtatggtaaaccacatgagaacatggctcctttctttttggatagcctggccatgtgtgaatgggattttagcttattatgtttctaagacttttccttacagcacacttaatgtaccttttcagtccttctcccaaccccctgcaaattgtctttaaaacaacaacacataaggaatctgaagcacaggagaacacagagccaacaaacagaatgaagaacaatcatctatttttaactgactttctatcattaccatttttccttttgcttaataactatcttgctttgaaactttgactccttttataagttctatgaggcacatatgtatagcaatttggttctaaaaaccagtgatcttactttagctccatcttaaaatttcaccttaagtaaatggcctctagtagatgataagcctaaaaaaagcacaattattaaaacaaacagatccatgttaggacatttctgaataataaagagaaaaggtgtttcgttgggtattgcagaaaagaggaccaatttcatatagtacaagtttcgtaagtcaggccaagtgtcaatttcaaaagacaagaaatgaaattgacagtgaatagtgctcataaattggtagcgtatataaagagaagttcctgtcacattatattcccactagaattattatccacagtaaataaatattattttgttatgccaaaaatatagcgagcagcttcatggttaataatacatttatgttgacacctccctaatccaggaaacattcacaaacaaggactcccatatacaaatactttaggaagagagatttcccaggcagatatcaccaaaaatgttttcactgtaggaatcacaaaataagtttttgtcaaaataactgttgttgaacgttatactggtcttcctcactggtgattgataagctcctttctagccagtttgtggtacttccttcattttccctagaaatgttacttgttaaatgtgtcctcaggcggtttcatctttgttgattctgcccatctaagtcataagcttctcaaatgcaagctactagctagttacacttgtaagttttccataatgacatgattttaaacataaagagttcataagaatcacttggagagactatttaaaaatgagattcctaggcccacctcagattgtgataaatctgtgtgactgactgatgcacactttttctggactataataactgatgctgctctactgctttaatacaggccaaagtaacgtggaagcgcacagcagaaaatcttcagaaagacatcaggtttgttctgattttgacaagggtaacttcttctttattaaagcaaataactggacataatcttaaaggattccacctccatcgtctttcctaacttagatcttcattgagaaattgggcaaggttaagtttacttttttctagtgctgcggttttggctcgtcttggtagtctcatcttcatttctgattctggttctggaacttcatgatcactaaatagatgttgaaaatacacgaatttagatacaagctttaaaaccagtttatttataaataaaacttttttgtttctgactcacattctatcagtgtttaattgatagcctgattccattgacttagcttaaaactaaaatctcaatgtcaaaaaaacactgacttggctatctagcaaagtgaatcagggaaaatctagctaatgattttatatactataacagaacctggtgttatacaggaaaaaaagccacaaacttgtaatgaagcttgtaattaaacgaggaccataactgtccaaaagagatttctttgaaactcaagaagtgacaaaaaaattaagttctctctcttgatttaagcaataaattccaaaaacatagtaaaaaacaagtttccccccaaaaaagacaaatttaatcaacagtgtaaaactatgtactgaaaatacacacaatacaattttgcaaatgaatacaagacagctaccaactttcagctctaacagtggcttgactgacagaagccaaaaataaaacactctaccacacaatatacccaaattatagacagaattattctatcagtatgtaagtgtagagaacccaaatattatcaaaatcaagagtttgctaactgaagatcaaagaggagtcacatcatgtaattaaaaattgaaacaacatattaaagatagtactaaagaccatgccagctaataggcaaaagcaaacacgccgtaagaagtcaaatgctcttgatgatggaattttagactatatacctaagacagctatttatagttttcactatcttgttatatattctctctcattcgcaagaaaattagtttttttctacttgtagaaataaaaagtgaagataggcctccatatattctagacatgcatgacatacctttcagagtcggcttcagcagtctgacacctcctgttcgtcctagctgaaactgtcacttttctctgtccttgaagatagtataattcattatcaggatttattatcagttgctttttgtttttaatctagtttctaggctaactaaatcctttgtcttcaacacaacaatcctttcaacacatgtatctcctacttgttctagccatcttggtaccagttatcactgccacagaaaaaggaacccaagcaagattaaaacttaatttattttgtaagcactaataatgagtaagggaaaataaggaaatttcaagcaagttaaaagaaggcaaattttagttcaatgtatttgaggacagtatatgaaaaatgtgttataatgaagtacctctattattgctatagcacaaagtctgtggagactcatgaaaattaagggttagaaaggtaggttaggtgcataaacaggtgctaaagaaacaacttttttttttcttggaaggtgataaaacatagtaaggtaataatggcttcttgtaaaataacatacatgaccaattcaaatgtgttctaaaatatatttcaatgtaaaaactagaacctttatatactggggattataagattctacttactagaaatttacaaggttaaggagtaagacaaagtttggcttgtgatgtttctcatttataaggaataaaacaatatgaatatatgaagtttggtctattaaaaaggatggtgttctcatggtgtgatataccacaaaaaaaatctgatcaaaaccaaactgttcaatgtgacagtctgaaaattatatactctacttcattcatgttacacttttttctactccttacctgcttttactaatgcatttatccccaagaaaacatccaacaatatgggactaatttggaacaatatccagcaattggtatttaaataatttactggttacaaaacaatattatgaccagactccattttagaaaaaattaaatctgcatcgaaaagggccttaaaaaatagatttctaaaatcaaaatcatggttggctcatgggtgggattattagtgttccttatagtagtttgtctggatgtactttctgattcttctgtaataagcatgcattgcttttgtaatgaggaaataataaaacaataaaaaga

SEQ ID NO: 149029 - DNA, 4984 bp, Homo sapiens
  Payload ID: 9435
  Gene Symbol: LCORL
  Gene Name: ligand dependent nuclear receptor corepressor-like
  ENST ID: ENST00000382224
  CDS Start-End: 303-1859
tccccacctcccatccccattcaactgcaattccctctttttggttggatctgaatcgttttgcctcaaacttctgggcttggggctctcaccctgtggattgtttagggtgacaggaatggtgggactcccgaccttgctgcagtcgcttttttttttttctttttttgcctaagacgaatgcatagagctgttatccagcaggttttgagagtattttagaagggctttatggaccacggctacgaagagacctcagtttatttgaagactgtgaaccagaagagctgactgactggtctatggatgaaaaatgttcattttgtaacctacagagagaagcagtcagtgattgtataccatctcttgattcttcacagtcaacaccaacagaggagctatcatctcagggccagtccaacactgataagattgaatgccaagcagaaaattacctaaatgcactctttcgaaagaaagatcttcctcagaactgtgatcctaacattcccctagttgctcaggaattaatgaaaaagatgatacgtcaatttgcgattgagtacatttcaaaaagtggtaaaactcaagagaatagaaatggttcaattggaccaagtatagtatgtaaaagtatccaaatgaatcaagcagaaaactcccttcaggaagagcaggaaggccccttagacctcactgtgaatcgaatgcaagaacaaaatactcagcaaggggatggagtgttagatctctctacaaagaaaaccagcataaaatctgaagagtcatccatatgtgatccttcttctgaaaattcagtggctgggagactacacagaaacagagaggactatgtggaaagaagtgctgagtttgcagatggtttgctctcaaaagctttgaaagacattcagtctggagcactggacataaataaagcaggcatactttatggcatacctcaaaaaactttacttcttcacttagaagccttaccagcagggaagcctgcatcttttaaaaacaaaactcgagatttccatgatagttattcatataaggacagtaaagaaacttgtgcagtgctgcaaaaagtagccttgtgggcaagagctcaagcagagcgcacagaaaaaagtaaactcaatctacttgaaacctcagaaataaaattcccaacagcttccacttacctccatcagctaactctacagaaaatggtcactcagtttaaagaaaaaaatgaaagcctccaatatgaaacttcaaatcctactgtacagttaaaaattcctcagctacgagtaagttctgtctcaaaatcacaacctgatggttctggtctgttggatgttatgtatcaagtttccaaaacctcttcagtcctagaaggatcagctctccaaaaactgaaaaatatactccctaaacagaacaaaatagaatgttctgggcctgtaactcactcaagtgttgactcttactttctacatggggacctctctcctttgtgtcttaattctaaaaatggaacagttgatggaacctctgaaaatactgaagatggattagatcgaaaagacagtaagcagcccaggaaaaaacgtggccgctatcggcaatatgatcatgaaataatggaagaagctattgcaatggtaatgagcggaaaaatgagtgtttccaaagcacaaggaatttatggggtacctcacagcactttagaatacaaggtaaaagaaagatctggaacactgaagactcctccgaagaagaaactacgattaccagacactgggttatataatatgacagattcagggactggcagctgcaaaaacagcagcaagcctgtgtagattacttgttaggaaaatgtttgtgagtgtgtgtgtgtgtgtgtgtttgcgtgtgtgtgtatgtgcacaggtgtgtatttgtgtgtctatatacacacgtgggaattacaaatgctcactctgacaggagacatgaaattttacagttcaaaaaccacttacatgccttttgaaaaaaagttttattcagggttttcactgtggacagaattatatagttgcttacttaattctgatagtttgtatttaatccttgtataaataggtgaaaaagattcaggttttctttagtagtcaatagcataaagcgttgtgggaaaacgagtaattgtcaagtgaaacatttttattggtgaaagaccattccagccattcagttgaaccatcttataatggaaatatgatattcatagtttataaacattctatacaacagacttaacacttgttgtatgtatgtcaagcaaccaatcaaagtttaaatagctatctccatactaagaaaaattaatatatacagtattagtacacgacagtgcattctatgaaatacaaaatgcactcaagtgcatccaccaggaatagaaaagaaaaccttaaaggatatgtataatgaaatttaatatttatcatttaatagttgatttagcaagaagttggggtttataaggtatatactttaaaaaaactgacacatagttaaccccagcagctatagaaccctttaatataataagatggagtactaagaacaaaaaataatttaaatttaattattaaaataatttagttttgtttttcatttgaaaaataagctaatgtgtaaggttagaaaagaaagttggaatgcaacttagagcatgtttataatgtgcacagaaaaagcttgagaatgataattttggtttaaatgtgctggttagttgatgttatgactactttaaattttaaggattgtgacacactcctactattgaaaaacctcagtgtaactttaatatatttgctgctgtgacatttcaaaacattttcagtttatcaaaatgaattgcagatttcattttggtgggcgatacattatcattttgctaataaccaaatttgcagtttgttcagggtcttgaatagatttacaaatatttaacactgaagctgttttgaactttcagtaatgtaaactctctactaattgggtagttagaagctgggcagtgcattttaacttttactagactcataagagagactggtcatttttacctagcagttttaaaatatgggtcaaagtatccttgttggatttatggagtatgcaactgtagtggtaaaatgttataaagcatatgccttcatataaagaatagggatttgctttatgtattcaaaattctctgagtgccccctttctctgttaaaattcaggttctgatcatttttctaagccagttttcctaagtccaaaaggaatacttttagctgaatttaaaaaataagtgcaccttgtcaaatgcttgtgtttttacacttgtgtttgtgtgtatttaataatcatatatacgtgtaatactaaagagattttcagctattaaattttaaaactgcttacatgtttaaagaaactgaagagtgagaaactacacaaccaagcagttatttggtctctgagatctatacttaaccctcttcagctattaatgttacctgcacactagggtatgaatcctcttttttttttttttcaccccaagaaaatatacataatagattacagaacagcagatgtcagggtcatctttctttttaaagaattaagccatattttgtgagggccagaacttgcattatttagtatatttcccccttcccccaatggaaagcaaagttaaaggtaaagtacatatttcaaaacaattttattgacctctttatacagaattttacttggaaaactttgggggctttgaatgcattacataatatttatattgtattgagcttttttattcctcacactatatttacattaataaattgattgagaagtttatagtaaagggaaacttacagaacacttttgtatcatttaaaagatgacctgaccaaaaactttacaggattcataaatcagggatcattttgctattgacttcacagtaatcagtagttttataggtaatattatagttaatttgcagcattttagtacttgtattatttatttttggtcagaaatagtaaattaaaatattttttgatagtttataggtaataatcaacccataacttttaaaagaaacaaaacatttctattattgagttaacatttgattatacaaactaggaaaggcagggaaattccccttctccccagtgattctattaagatgacctttatgttaaactttcaaagtactttatgaatttagttaccagttactatttattaattgacaattttctgaaaaatcccgtttcagcagacttaatgaaggtgaaagcaacccttatgtgctttctacttatttgaatgttcctcaagtattttatattaaaaaaaaaaagaaggaaaagagaaaacagtgcctctgtttttagaaaactactgctcagtaaagttgtttaaaccatttctggtagctaatgacaattttatattaaattgtatactaactttagtgagactgatttttttagttgtttacagtacaaatacttgtatttgttttttaattgcagtatttccaatgtcgcagtaatttagtaaaactctgtggctgccttgattttgacagattttgttaatataaactgattgttaggcaattagttatatttatgcataaatcaattgcactataattcatgaattatttattacaatattttctaatgaattcatgtatctgtcttgtgttgtaaatgtactgtaattctgttcctactttgtgttgttatatatctaaatctgattgtatgaattttaattgttcagttaacgtgtttctaggttgtaatttgtagtaaagcacttcaatgcttttgcacttaaatttacaacactgttggtgtgtgattgatttactcattcagtaaaagaaaaaaagaaaagaaaagaaaaaaactga

SEQ ID NO: 149030 - DNA, 5009 bp, Homo sapiens
  Payload ID: 9435
  Gene Symbol: LCORL
  Gene Name: ligand dependent nuclear receptor corepressor-like
  Uniprot ID: Q8N3X6
  ENST ID: ENST00000382226
  CDS Start-End: 110-1918
aacccccctccggggggcgcgcgctccggggctcgcgccgagggctcgcgcccctgcctcgtgcctgcgctgctcgtatgtaaatgagggcgcgtgacgcgggacgcagatggacaagggaagagagagaatggccgctgccgccgccgctgctgccgccgccgccgccgccgctcagtgccggagccctcggtgcgcggcggagagaagaggattccggcgggaactcgactcttggcgccaccgcctcatgcactgtgtaggttttgagagtattttagaagggctttatggaccacggctacgaagagacctcagtttatttgaagactgtgaaccagaagagctgactgactggtctatggatgaaaaatgttcattttgtaacctacagagagaagcagtcagtgattgtataccatctcttgattcttcacagtcaacaccaacagaggagctatcatctcagggccagtccaacactgataagattgaatgccaagcagaaaattacctaaatgcactctttcgaaagaaagatcttcctcagaactgtgatcctaacattcccctagttgctcaggaattaatgaaaaagatgatacgtcaatttgcgattgagtacatttcaaaaagtggtaaaactcaagagaatagaaatggttcaattggaccaagtatagtatgtaaaagtatccaaatgaatcaagcagaaaactcccttcaggaagagcaggaaggccccttagacctcactgtgaatcgaatgcaagaacaaaatactcagcaaggggatggagtgttagatctctctacaaagaaaaccagcataaaatctgaagagtcatccatatgtgatccttcttctgaaaattcagtggctgggagactacacagaaacagagaggactatgtggaaagaagtgctgagtttgcagatggtttgctctcaaaagctttgaaagacattcagtctggagcactggacataaataaagcaggcatactttatggcatacctcaaaaaactttacttcttcacttagaagccttaccagcagggaagcctgcatcttttaaaaacaaaactcgagatttccatgatagttattcatataaggacagtaaagaaacttgtgcagtgctgcaaaaagtagccttgtgggcaagagctcaagcagagcgcacagaaaaaagtaaactcaatctacttgaaacctcagaaataaaattcccaacagcttccacttacctccatcagctaactctacagaaaatggtcactcagtttaaagaaaaaaatgaaagcctccaatatgaaacttcaaatcctactgtacagttaaaaattcctcagctacgagtaagttctgtctcaaaatcacaacctgatggttctggtctgttggatgttatgtatcaagtttccaaaacctcttcagtcctagaaggatcagctctccaaaaactgaaaaatatactccctaaacagaacaaaatagaatgttctgggcctgtaactcactcaagtgttgactcttactttctacatggggacctctctcctttgtgtcttaattctaaaaatggaacagttgatggaacctctgaaaatactgaagatggattagatcgaaaagacagtaagcagcccaggaaaaaacgtggccgctatcggcaatatgatcatgaaataatggaagaagctattgcaatggtaatgagcggaaaaatgagtgtttccaaagcacaaggaatttatggggtacctcacagcactttagaatacaaggtaaaagaaagatctggaacactgaagactcctccgaagaagaaactacgattaccagacactgggttatataatatgacagattcagggactggcagctgcaaaaacagcagcaagcctgtgtagattacttgttaggaaaatgtttgtgagtgtgtgtgtgtgtgtgtgtttgcgtgtgtgtgtatgtgcacaggtgtgtatttgtgtgtctatatacacacgtgggaattacaaatgctcactctgacaggagacatgaaattttacagttcaaaaaccacttacatgccttttgaaaaaaagttttattcagggttttcactgtggacagaattatatagttgcttacttaattctgatagtttgtatttaatccttgtataaataggtgaaaaagattcaggttttctttagtagtcaatagcataaagcgttgtgggaaaacgagtaattgtcaagtgaaacatttttattggtgaaagaccattccagccattcagttgaaccatcttataatggaaatatgatattcatagtttataaacattctatacaacagacttaacacttgttgtatgtatgtcaagcaaccaatcaaagtttaaatagctatctccatactaagaaaaattaatatatacagtattagtacacgacagtgcattctatgaaatacaaaatgcactcaagtgcatccaccaggaatagaaaagaaaaccttaaaggatatgtataatgaaatttaatatttatcatttaatagttgatttagcaagaagttggggtttataaggtatatactttaaaaaaactgacacatagttaaccccagcagctatagaaccctttaatataataagatggagtactaagaacaaaaaataatttaaatttaattattaaaataatttagttttgtttttcatttgaaaaataagctaatgtgtaaggttagaaaagaaagttggaatgcaacttagagcatgtttataatgtgcacagaaaaagcttgagaatgataattttggtttaaatgtgctggttagttgatgttatgactactttaaattttaaggattgtgacacactcctactattgaaaaacctcagtgtaactttaatatatttgctgctgtgacatttcaaaacattttcagtttatcaaaatgaattgcagatttcattttggtgggcgatacattatcattttgctaataaccaaatttgcagtttgttcagggtcttgaatagatttacaaatatttaacactgaagctgttttgaactttcagtaatgtaaactctctactaattgggtagttagaagctgggcagtgcattttaacttttactagactcataagagagactggtcatttttacctagcagttttaaaatatgggtcaaagtatccttgttggatttatggagtatgcaactgtagtggtaaaatgttataaagcatatgccttcatataaagaatagggatttgctttatgtattcaaaattctctgagtgccccctttctctgttaaaattcaggttctgatcatttttctaagccagttttcctaagtccaaaaggaatacttttagctgaatttaaaaaataagtgcaccttgtcaaatgcttgtgtttttacacttgtgtttgtgtgtatttaataatcatatatacgtgtaatactaaagagattttcagctattaaattttaaaactgcttacatgtttaaagaaactgaagagtgagaaactacacaaccaagcagttatttggtctctgagatctatacttaaccctcttcagctattaatgttacctgcacactagggtatgaatcctcttttttttttttttcaccccaagaaaatatacataatagattacagaacagcagatgtcagggtcatctttctttttaaagaattaagccatattttgtgagggccagaacttgcattatttagtatatttcccccttcccccaatggaaagcaaagttaaaggtaaagtacatatttcaaaacaattttattgacctctttatacagaattttacttggaaaactttgggggctttgaatgcattacataatatttatattgtattgagcttttttattcctcacactatatttacattaataaattgattgagaagtttatagtaaagggaaacttacagaacacttttgtatcatttaaaagatgacctgaccaaaaactttacaggattcataaatcagggatcattttgctattgacttcacagtaatcagtagttttataggtaatattatagttaatttgcagcattttagtacttgtattatttatttttggtcagaaatagtaaattaaaatattttttgatagtttataggtaataatcaacccataacttttaaaagaaacaaaacatttctattattgagttaacatttgattatacaaactaggaaaggcagggaaattccccttctccccagtgattctattaagatgacctttatgttaaactttcaaagtactttatgaatttagttaccagttactatttattaattgacaattttctgaaaaatcccgtttcagcagacttaatgaaggtgaaagcaacccttatgtgctttctacttatttgaatgttcctcaagtattttatattaaaaaaaaaaagaaggaaaagagaaaacagtgcctctgtttttagaaaactactgctcagtaaagttgtttaaaccatttctggtagctaatgacaattttatattaaattgtatactaactttagtgagactgatttttttagttgtttacagtacaaatacttgtatttgttttttaattgcagtatttccaatgtcgcagtaatttagtaaaactctgtggctgccttgattttgacagattttgttaatataaactgattgttaggcaattagttatatttatgcataaatcaattgcactataattcatgaattatttattacaatattttctaatgaattcatgtatctgtcttgtgttgtaaatgtactgtaattctgttcctactttgtgttgttatatatctaaatctgattgtatgaattttaattgttcagttaacgtgtttctaggttgtaatttgtagtaaagcacttcaatgcttttgcacttaaatttacaacactgttggtgtgtgattgatttactcattcagt

SEQ ID NO: 149031 - DNA, 1013 bp, Homo sapiens
  Payload ID: 9435
  Gene Symbol: LCORL
  Gene Name: ligand dependent nuclear receptor corepressor-like
  ENST ID: ENST00000510451
  CDS Start-End: 7-246
acgcagatggacaagggaagagagagaatggccgctgccgccgccgctgctgccgccgccgccgccgccgctcagtgccggagccctcggtgcgcggcggagagaagaggattccggcgggaactcgactcttggcgccaccgcctcatgcactgtgtaggttttgagagtattttagaagggctttatggaccacggctacgaagagacctcagtttatttgaaggattgtataccatctcttgattcttcacagtcaacaccaacagaggagctatcatctcagggccagtccaacactgataagattgaatgccaagcagaaaattacctaaatgcactctttcgaaagaaagatcttcctcagaactgtgatcctaacattcccctagttgctcaggaattaatgaaaaagatgatacgtcaatttgcgattgagtacatttcaaaaagtggtaaaactcaagagaatagaaatggttcaattggaccaagtatagtatgtaaaagtatccaaatgaatcaagcagaaaactcccttcaggaagagcaggaaggccccttagacctcactgtgaatcgaatgcaagaacaaaatactcagcaagcatgctacaagtgaaaactgatgagaaactgaatgtgtctgatgagaatacagcaagttgccctttgagccccattaagatgtgccttaatcgtcccattgaatggaatctgaatttgacaacagcatctctaacgagctgtacagttcataaccaaaatctcaaaagcgaagagaaatagattgcagttcttcttgcactatctttattttgtatgtcagtattccttctgaacaataagcatttatcaattgatcttgaagtatttctagtcctgtgatttgtctttatattaaatcattagcattaatcattttgattatattctttatatgttttttttacatgttttacatcagatcattgtggaattttgtaaacggattttgatgtttctcttttagt

SEQ ID NO: 149032 - DNA, 3475 bp, Homo sapiens
  Payload ID: 9436
  Gene Symbol: LRIF1
  Gene Name: ligand dependent nuclear receptor interacting factor 1
  Uniprot ID: Q5T3J3
  ENST ID: ENST00000369763
  CDS Start-End: 392-2701
agactgacgcagtcttcagcactgaccaggctctgttgggggtggtgccaccaaggccacgccccctgcgcctgctccggcggagtctggagagttgtcgtaggctctgagggcggagactcacgccgattctctctcagcgtagggctgtgagggcgcagtccaccgccaggagccttccggtttctgcgcggtgcgcgacctcgtcccgaagcctggggatacaccctctcgagagcccgctgtcgccctccgttaaggtcgaacccctcacagttgctgtgggcaactccagcccaacattccctcgctctggttctcgccccattgggaaactcggccccacgcttcccacttttctggatgaggtgtcccctttctccccactaaaatgtcaaataacctacggagggtcttcctgaaacccgcagaggaaaattcaggcaacgcctcgcgttgtgtttcaggctgcatgtaccaagtagttcagacgattggctcggatggaaaaaatcttctgcaattacttccaattcctaagtcttctggaaatcttataccactagttcaatcttcagtcatgtctgatgctttgaaagggaatacaggaaaaccagttcaagttacttttcagactcagatttccagctcttccacaagtgcatcagttcaattgcccatttttcagccagccagttcttcaaactattttcttacaagaacagtagatacatcagaaaaaggtagagttacttctgtgggaactggaaatttttcttcatcagtttctaaagttcagagtcatggtgtgaaaattgatggactcaccatgcaaacatttgctgttcctccctcaacacaaaaagactcatcttttattgtagttaatacccagagtcttccagtgactgtgaagtctccagttttgccttctgggcatcatttacagattccagcccatgctgaagtgaaatctgtaccagcgtcatcattgcctccttcagtgcagcaaaagatacttgcaactgccaccaccagtacctcaggaatggttgaggcctcccaaatgccaaccgttatttatgtatctcctgtaaatacagtgaaaaatgtagttaccaagaactttcaaaacatttacccaaaacctgttacagaaatagcaaagccagtaatactaaataccacacaaattccaaagaatgttgctacagagacacaattgaaaggtggtcagcattctcaagctgctccagtgaaatggattttccaagataatctacagccttttacgccatctcttgttcctgttaagtcttcaaataatgtggcttcaaagattttaaaaacttttgtagataggaaaaatttgggagataatactataaatatgccaccattgagtaccatcgatcctagtgggacgcgatccaaaaatatgcctattaaagataatgctttggttatgtttaatgggaaagtctatctgttggctaaaaaggggacagatgttctgccatcacaaattgaccaacagaattctgtttctcctgatactccagtaagaaaagacacgttacagacagtgagttcaagtccagtcacagaaatatccagagaggttgtaaatattgttttggctaaaagtaaatcttcccagatggagacaaaatcactttccaatacccagcttgcttccatggccaatctaagggcagagaagaataaagtggagaaaccatctccttctaccacaaatccacatatgaaccaatccagtaactacttaaaacagagtaagactttattcacaaatccaatctttccagttggatttagtacaggacacaatgcccccagaaaagtaacagccgtcatttatgctagaaaaggaagtgtcctccagagcatagagaaaataagttcctctgttgatgcaacaactgttacttcacaacagtgtgttttcagagaccaagaaccaaagatccataatgagatggcatcaacatcagataaaggtgcccaaggaagaaatgacaagaaagattctcaaggaagaagtaataaggcattacatctgaagagtgatgctgaatttaaaaagatatttggccttactaaggatttgagagtgtgccttactcgaattcctgaccatttgacctctggagaaggtttcgattcctttagcagtttggtaaagagtggtacttacaaagagacagagtttatggtgaaggaaggagagagaaaacagcagaattttgataagaaaagaaaagcaaaaactaataagaagatggatcacataaagaagagaaaaacagagaatgcttataacgcaatcataaatggggaagctaatgtcaccggttcccaactcctaagcagtattttaccaacttcagatgtgtcacaacataacattctcacgagtcacagcaaaaccagacaagaaaagagaactgagatggaatactatacccatgagaagcaagagaaaggcactttgaattcaaatgcagcttatgaacaaagtcatttcttcaataaaaattataccgaagatattttcccagtgacaccaccggagttagaagaaaccattcgagatgaaaaaataagaagacttaagcaggtgctgagagagaaagaagcagctcttgaagaaatgcgtaagaagatgcaccaaaaataaaatctcctgtaaagacttcagtgaaatagctgttttttaaaatatacttcagcattaataagttaattgtaggtgtgttctgaaagtgtctttgaatatgaagcttgttttttcatcagtcgattgtacaactttaaggaatacagaaaaggttgattcacatatgacttgtgaataatttacatggggtatctatacctttgtcttagatacctttttttggaaggataaattttatatttttctattattttaactagaattctccaagtttgaatatttgggcagggtttttgttattgtttgtatctttacctaaattgctcaggcattattccagcagtagatagtgactgtgtattactgaaattttacaattcaagagaggaaatcagctccaaacttagcttttccagtggatttgtatatgtacttgctttatctctttacccttaaaatgatgataccttgtattcaccattgttttttttaatgtcgtgaaataatatgtattatggcaacattatttaaacattcaaacatttctcaagaatgagcaacatttgtaactttacaatgtaattttatataatccaaaggtattttagaattcaggccatttgatgttttgtttgcttatagtgatgtgttcccaggcaaatgctgctttttttttttttgggactatgtacatacgttactgagattgtgtaaaaagtagatcctgaacagttatcacatttaatatttcttaaactgtaaaagtgtattttc

SEQ ID NO: 149033 - DNA, 1796 bp, Homo sapiens
  Payload ID: 9436
  Gene Symbol: LRIF1
  Gene Name: ligand dependent nuclear receptor interacting factor 1
  Uniprot ID: Q5T3J3
  ENST ID: ENST00000485275
  CDS Start-End: 358-1059
ggagactcacgccgattctctctcagcgtagggctgtgagggcgcagtccaccgccaggagccttccggtttctgcgcggtgcgcgacctcgtcccgaagcctggggatacaccctctcgagagcccgctgtcgccctccgttaaggtcgaacccctcacagttgctgtgggcaactccagcccaacattccctcgctctggttctcgccccattgggaaactcggccccacgcttcccacttttctggatgaggtgtcccctttctccccactaaaatgtcaaataacctacggagggtcttcctgaaacccgcagaggaaaattcaggcaacgcctcgcgttgatccataatgagatggcatcaacatcagataaaggtgcccaaggaagaaatgacaagaaagattctcaaggaagaagtaataaggcattacatctgaagagtgatgctgaatttaaaaagatatttggccttactaaggatttgagagtgtgccttactcgaattcctgaccatttgacctctggagaaggtttcgattcctttagcagtttggtaaagagtggtacttacaaagagacagagtttatggtgaaggaaggagagagaaaacagcagaattttgataagaaaagaaaagcaaaaactaataagaagatggatcacataaagaagagaaaaacagagaatgcttataacgcaatcataaatggggaagctaatgtcaccggttcccaactcctaagcagtattttaccaacttcagatgtgtcacaacataacattctcacgagtcacagcaaaaccagacaagaaaagagaactgagatggaatactatacccatgagaagcaagagaaaggcactttgaattcaaatgcagcttatgaacaaagtcatttcttcaataaaaattataccgaagatattttcccagtgacaccaccggagttagaagaaaccattcgagatgaaaaaataagaagacttaagcaggtgctgagagagaaagaagcagctcttgaagaaatgcgtaagaagatgcaccaaaaataaaatctcctgtaaagacttcagtgaaatagctgttttttaaaatatacttcagcattaataagttaattgtaggtgtgttctgaaagtgtctttgaatatgaagcttgttttttcatcagtcgattgtacaactttaaggaatacagaaaaggttgattcacatatgacttgtgaataatttacatggggtatctatacctttgtcttagatacctttttttggaaggataaattttatatttttctattattttaactagaattctccaagtttgaatatttgggcagggtttttgttattgtttgtatctttacctaaattgctcaggcattattccagcagtagatagtgactgtgtattactgaaattttacaattcaagagaggaaatcagctccaaacttagcttttccagtggatttgtatatgtacttgctttatctctttacccttaaaatgatgataccttgtattcaccattgttttttttaatgtcgtgaaataatatgtattatggcaacattatttaaacattcaaacatttctcaagaatgagcaacatttgtaactttacaatgtaattttatataatccaaaggtattttagaattcaggccatttgatgttttgtttgcttatagtgatgtgttcccaggcaaatgctgctttttttttttttgggactatgtacatacgttactgagattgtgtaaaaagtagatcctgaacagttatc

SEQ ID NO: 149034 - DNA, 1912 bp, Homo sapiens
  Payload ID: 9436
  Gene Symbol: LRIF1
  Gene Name: ligand dependent nuclear receptor interacting factor 1
  Uniprot ID: Q5T3J3
  ENST ID: ENST00000494675
  CDS Start-End: 443-1144
gttttgcagtctttcactttaaaaactcaaaatggaaaattatatactttattttaatatttacaaatatttacaaatatttatttttaaataaaatgtatataccatgtagtatgttgtatttatttactcaatgttcttttaagtgtttcaggctgcatgtaccaagtagttcagacgattggctcggatggaaaaaatcttctgcaattacttccaattcctaagtcttctggaaatcttataccactagttcaatcttcagtcatgtctgatgctttgaaagggaatacaggaaaaccagttcaagttacttttcagactcagatttccagctcttccacaagtgcatcagttcaattgcccatttttcagccagccagttcttcaaactattttcttacaagaacagtagatacatcagaaaaagatccataatgagatggcatcaacatcagataaaggtgcccaaggaagaaatgacaagaaagattctcaaggaagaagtaataaggcattacatctgaagagtgatgctgaatttaaaaagatatttggccttactaaggatttgagagtgtgccttactcgaattcctgaccatttgacctctggagaaggtttcgattcctttagcagtttggtaaagagtggtacttacaaagagacagagtttatggtgaaggaaggagagagaaaacagcagaattttgataagaaaagaaaagcaaaaactaataagaagatggatcacataaagaagagaaaaacagagaatgcttataacgcaatcataaatggggaagctaatgtcaccggttcccaactcctaagcagtattttaccaacttcagatgtgtcacaacataacattctcacgagtcacagcaaaaccagacaagaaaagagaactgagatggaatactatacccatgagaagcaagagaaaggcactttgaattcaaatgcagcttatgaacaaagtcatttcttcaataaaaattataccgaagatattttcccagtgacaccaccggagttagaagaaaccattcgagatgaaaaaataagaagacttaagcaggtgctgagagagaaagaagcagctcttgaagaaatgcgtaagaagatgcaccaaaaataaaatctcctgtaaagacttcagtgaaatagctgttttttaaaatatacttcagcattaataagttaattgtaggtgtgttctgaaagtgtctttgaatatgaagcttgttttttcatcagtcgattgtacaactttaaggaatacagaaaaggttgattcacatatgacttgtgaataatttacatggggtatctatacctttgtcttagatacctttttttggaaggataaattttatatttttctattattttaactagaattctccaagtttgaatatttgggcagggtttttgttattgtttgtatctttacctaaattgctcaggcattattccagcagtagatagtgactgtgtattactgaaattttacaattcaagagaggaaatcagctccaaacttagcttttccagtggatttgtatatgtacttgctttatctctttacccttaaaatgatgataccttgtattcaccattgttttttttaatgtcgtgaaataatatgtattatggcaacattatttaaacattcaaacatttctcaagaatgagcaacatttgtaactttacaatgtaattttatataatccaaaggtattttagaattcaggccatttgatgttttgtttgcttatagtgatgtgttcccaggcaaatgctgctttttttttttttgggactatgtacatacgttactgagattgtgtaaaaagtagatcctgaacagttatcacatttaatatttcttaaactgtaaaagtgt

SEQ ID NO: 149035 - DNA, 2953 bp, Homo sapiens
  Payload ID: 9437
  Gene Symbol: LNX1
  Gene Name: ligand of numb-protein X 1, E3 ubiquitin protein ligase
  Uniprot ID: Q8TBB1
  ENST ID: ENST00000263925
  CDS Start-End: 316-2502
tttcaatccctaaggtctcagcaatgctttatctgtcggggcttccgtgatgtcacccatttcctggtctggagcgaccaatgccgtcctccttcctccaggcacctgttcaccgaagttgaggctggtcacaactccggcggcccaaggagctgctcggttcacccacaaggaatgagagctgcctgcctgctgctgcttggagagccccagacagtcgcttgaagaggtgtgtggatgtctcctagatcttgacttgctcctgaggaaatattgtgtgactgagtttcctgttatactgctctccaatccatcatgaaccagccagagtctgccaacgatcctgaacccctgtgtgcagtgtgtggccaagcccactccttggaggaaaaccacttctacagctatccagaggaagtggatgatgacctcatctgccacatctgcctgcaggctttgctggaccccctggacactccgtgtggacacacctactgcaccctctgcctcaccaacttcctggtggagaaggacttctgtcccatggaccgcaagcctctggttctgcagcactgcaagaagtccagcatcctggtcaacaaactcctcaacaagctactggtgacctgcccattcagggagcactgcacccaggtgttgcagcgctgtgacctcgagcatcactttcaaaccagctgtaaaggtgcctcccactacggcctgaccaaagataggaagaggcgctcacaagatggctgtccagacggctgtgcgagcctcacagccacggctccctccccagaggtttctgcagctgccaccatctccttaatgacagacgagcctggcctagacaaccctgcctacgtgtcctcggcagaggacgggcagccagcaatcagcccagtggactctggccggagcaaccgaactagggcacggccctttgagagatccactattagaagcagatcatttaaaaaaataaatcgagctttgagtgttcttcgaaggacaaagagcgggagtgcagttgccaaccatgccgaccagggcagggaaaattctgaaaacaccactgcccctgaagtctttccaaggttgtaccacctgattccagatggtgaaattaccagcatcaagatcaatcgagtagatcccagtgaaagcctctctattaggctggtgggaggtagcgaaaccccactggtccatatcattatccaacacatttatcgtgatggggtgatcgccagagacggccggctactgccaggagacatcattctaaaggtcaacgggatggacatcagcaatgtccctcacaactacgctgtgcgtctcctgcggcagccctgccaggtgctgtggctgactgtgatgcgtgaacagaagttccgcagcaggaacaatggacaggccccggatgcctacagaccccgagatgacagctttcatgtgattctcaacaaaagtagccccgaggagcagcttggaataaaactggtgcgcaaggtggatgagcctggggttttcatcttcaatgtgctggatggcggtgtggcatatcgacatggtcagcttgaggagaatgaccgtgtgttagccatcaatggacatgatcttcgatatggcagcccagaaagtgcggctcatctgattcaggccagtgaaagacgtgttcacctcgtcgtgtcccgccaggttcggcagcggagccctgacatctttcaggaagccggctggaacagcaatggcagctggtccccagggccaggggagaggagcaacactcccaagcccctccatcctacaattacttgtcatgagaaggtggtaaatatccaaaaagaccccggtgaatctctcggcatgaccgtcgcagggggagcatcacatagagaatgggatttgcctatctatgtcatcagtgttgagcccggaggagtcataagcagagatggaagaataaaaacaggtgacattttgttgaatgtggatggggtcgaactgacagaggtcagccggagtgaggcagtggcattattgaaaagaacatcatcctcgatagtactcaaagctttggaagtcaaagagtatgagccccaggaagactgcagcagcccagcagccctggactccaaccacaacatggccccacccagtgactggtccccatcctgggtcatgtggctggaattaccacggtgcttgtataactgtaaagatattgtattacgaagaaacacagctggaagtctgggcttctgcattgtaggaggttatgaagaatacaatggaaacaaaccttttttcatcaaatccattgttgaaggaacaccagcatacaatgatggaagaattagatgtggtgatattcttcttgctgtcaatggtagaagtacatcaggaatgatacatgcttgcttggcaagactgctgaaagaacttaaaggaagaattactctaactattgtttcttggcctggcacttttttatagaatcaatgatgggtcagaggaaaacagaaaaatcacaaataggctaagaagttgaaacactatatttatcttgtcagtttttatatttaaagaaagaatacattgtaaaaatgtcaggaaaagtatgatcatctaatgaaagccagttacacctcagaaaatatgattccaaaaaaattaaaactactagttttttttcagtgtggaggatttctcattactctacaacattgtttatattttttctattcaataaaaagccctaaaacaactaaaatgatttgtataccccactgaattcaagctgatttaaatttaaaatttggtatatgctgaagtctgccaagggtacattatggccatttttaatttacagctaaaatattttttaaaatgcattgctgagaaacgttgctttcatcaaacaagaataaatatttttcagaagtta

SEQ ID NO: 149036 - DNA, 3757 bp, Homo sapiens
  Payload ID: 9437
  Gene Symbol: LNX1
  Gene Name: ligand of numb-protein X 1, E3 ubiquitin protein ligase
  Uniprot ID: Q8TBB1
  ENST ID: ENST00000306888
  CDS Start-End: 253-2151
cagcctaagctctctcgccaaccgtggtggctccttgcgttcctacatcctctcatctgagaatcagagagcataatcttcttacgggcccgtgatttattaacgtggcttaatctgaaggttctcagtcaaattctttgtgatctactgattgtgggggcatggcaaggtttgcttaaaggagcttggctggtttgggcccttgtagctgacagaaggtggccagggagaaggcagcacactgctcggagaatgaaggcgcttctgttgctggtcttgccttggctcagtcctgctaactacattgacaatgtgggcaacctgcacttcctgtattcagaactctgtaaaggtgcctcccactacggcctgaccaaagataggaagaggcgctcacaagatggctgtccagacggctgtgcgagcctcacagccacggctccctccccagaggtttctgcagctgccaccatctccttaatgacagacgagcctggcctagacaaccctgcctacgtgtcctcggcagaggacgggcagccagcaatcagcccagtggactctggccggagcaaccgaactagggcacggccctttgagagatccactattagaagcagatcatttaaaaaaataaatcgagctttgagtgttcttcgaaggacaaagagcgggagtgcagttgccaaccatgccgaccagggcagggaaaattctgaaaacaccactgcccctgaagtctttccaaggttgtaccacctgattccagatggtgaaattaccagcatcaagatcaatcgagtagatcccagtgaaagcctctctattaggctggtgggaggtagcgaaaccccactggtccatatcattatccaacacatttatcgtgatggggtgatcgccagagacggccggctactgccaggagacatcattctaaaggtcaacgggatggacatcagcaatgtccctcacaactacgctgtgcgtctcctgcggcagccctgccaggtgctgtggctgactgtgatgcgtgaacagaagttccgcagcaggaacaatggacaggccccggatgcctacagaccccgagatgacagctttcatgtgattctcaacaaaagtagccccgaggagcagcttggaataaaactggtgcgcaaggtggatgagcctggggttttcatcttcaatgtgctggatggcggtgtggcatatcgacatggtcagcttgaggagaatgaccgtgtgttagccatcaatggacatgatcttcgatatggcagcccagaaagtgcggctcatctgattcaggccagtgaaagacgtgttcacctcgtcgtgtcccgccaggttcggcagcggagccctgacatctttcaggaagccggctggaacagcaatggcagctggtccccagggccaggggagaggagcaacactcccaagcccctccatcctacaattacttgtcatgagaaggtggtaaatatccaaaaagaccccggtgaatctctcggcatgaccgtcgcagggggagcatcacatagagaatgggatttgcctatctatgtcatcagtgttgagcccggaggagtcataagcagagatggaagaataaaaacaggtgacattttgttgaatgtggatggggtcgaactgacagaggtcagccggagtgaggcagtggcattattgaaaagaacatcatcctcgatagtactcaaagctttggaagtcaaagagtatgagccccaggaagactgcagcagcccagcagccctggactccaaccacaacatggccccacccagtgactggtccccatcctgggtcatgtggctggaattaccacggtgcttgtataactgtaaagatattgtattacgaagaaacacagctggaagtctgggcttctgcattgtaggaggttatgaagaatacaatggaaacaaaccttttttcatcaaatccattgttgaaggaacaccagcatacaatgatggaagaattagatgtggtgatattcttcttgctgtcaatggtagaagtacatcaggaatgatacatgcttgcttggcaagactgctgaaagaacttaaaggaagaattactctaactattgtttcttggcctggcacttttttatagaatcaatgatgggtcagaggaaaacagaaaaatcacaaataggctaagaagttgaaacactatatttatcttgtcagtttttatatttaaagaaagaatacattgtaaaaatgtcaggaaaagtatgatcatctaatgaaagccagttacacctcagaaaatatgattccaaaaaaattaaaactactagttttttttcagtgtggaggatttctcattactctacaacattgtttatattttttctattcaataaaaagccctaaaacaactaaaatgatttgtataccccactgaattcaagctgatttaaatttaaaatttggtatatgctgaagtctgccaagggtacattatggccatttttaatttacagctaaaatattttttaaaatgcattgctgagaaacgttgctttcatcaaacaagaataaatatttttcagaagttatagttgtcttttagtatgtgatactaattaagattacttttgtattatcactatttaaaagatcctagtaatttattctttcaaataccatgttatttgttaccatcaccgatgaatacctcctaggcttatccctaaaaatgctcgctcagagaattaattataaacttgttttgtttttagtaagaaatggctaaagctctttttttccacaatcgttagtaactgtataaaaactcatgctgctccaccagtgggccttggaaaatgcatcaagaaggccaaaccagcttgaccctggctcacagacatggtcatgaggcgatttaaatttgtgccacaatgaagagtgtgtgtacacatgcctcctagaaactacactatgggtaattaattaatttatttcatagaggccacccagatgccttataggttttattaatttggatatgaaagtgtaccccatttggtttcaccaggaacccaaatttagaatattgaaaagccatcaaaaagttgtgatatcaaaaatgtatgagtctcttaatatactaagcaagagtgtcacagcagtaatgataaagactagttttaatctcaagccttagaggggccctttgttgccttttgtgatgcagcctcttaagagagtggtgtttgattaacaaaaaaactgtggcccaagtggaacccttgaccttttctcagataatctgtgtatgtacacagctaacacagctctttagattccctgttaagtgactcattcacattcctttcttggatataaagtcattgctgtctttttatttttgaaatagtacaagacaaagatttttaacttaacatgaaaaattcactcttttattttggaaaaaaagttaacttttcatactaacaaacagaacaagatttaaggtaaatttcttaaacattatccagaaaaataacaagatttatagtatctacttctggtactaatatacacaaaaggccaaaaccatgcctattctgcaggtgtagcttcggtgctctcctgttcaggggcaggctcactgcccgcttcttttccttctttgcttcttttagattttttgtgtttgtgtctcctgtgactatctccttcttcactttcatggcgacgtctactattac

SEQ ID NO: 149037 - DNA, 731 bp, Homo sapiens
  Payload ID: 9437
  Gene Symbol: LNX1
  Gene Name: ligand of numb-protein X 1, E3 ubiquitin protein ligase
  ENST ID: ENST00000510143
  CDS Start-End: 433-731
aaggaagttcaggggcgtctcagccccatccaaaccagaagagatttgtcactgatgctaatgcatgctgctctgcaggggaccactctccctcgaagctccccatagctgctctcagttttatggatctgctctactcaaagccttgcagaaggggcaggggatgcccaggttaacccccgcacgtacaaaggtggagcagttttcatgcatagctgggacgaagaacactggaaagagaaagaaaaattttccgagctactgctaagccagaaaagctcagctctcaaacggactatctcctgagacgtcacacagctgggaactgatccgcaatacagcaaaggtgtgtggatgtctcctagatcttgacttgctcctgaggaaatattgtgtgactgagtttcctgttatactgctctccaatccatcatgaaccagccagagtctgccaacgatcctgaacccctgtgtgcagtgtgtggccaagcccactccttggaggaaaaccacttctacagctatccagaggaagtggatgatgacctcatctgccacatctgcctgcaggctttgctggaccccctggacactccgtgtggacacacctactgcaccctctgcctcaccaacttcctggtggagaaggacttctgtcccatggaccgcaagcctctggttctgcagcactgcaagaagtccagcatcctggtcaacaaactcctcaacaa

SEQ ID NO: 149038 - DNA, 556 bp, Homo sapiens
  Payload ID: 9437
  Gene Symbol: LNX1
  Gene Name: ligand of numb-protein X 1, E3 ubiquitin protein ligase
  ENST ID: ENST00000504299
  CDS Start-End: 538-556
gcacattcaagtgtttccccagctgtgtttacagctttgggtttctaagcctcttgagaagtaatcagttttgatcatcttaaatcccaaagtaaattttcttttctggatattatcctagttgctaacacaggttagtctggcctattgaaccatcttttactgctgtgaccttcaaaaatgaaagctgtggttttgccctgagaagaagaaaaggagatttgaaatatgactcagattcttccctgcaaaaggctgggacccttgaaaactatctacgtggaaaagtgagagaacaaggggacacaagcaaagctgcccaggcacctgttcaccgaagttgaggctggtcacaactccggcggcccaaggagctgctcggttcacccacaaggaatgagagctgcctgcctgctgctgcttggagagccccagacagtcgcttgaagaggtgtgtggatgtctcctagatcttgacttgctcctgaggaaatattgtgtgactgagtttcctgttatactgctctccaatccatcatgaaccagccagagtctg

SEQ ID NO: 149039 - DNA, 603 bp, Homo sapiens
  Payload ID: 9437
  Gene Symbol: LNX1
  Gene Name: ligand of numb-protein X 1, E3 ubiquitin protein ligase
  ENST ID: ENST00000512247
  CDS Start-End: 332-603
acacggggctggacacgtgctgtgctcaggaaagaaagtaaattccacctggcaaattgctctaactgatttatttgtccacaaagagacgccacctacctgcttgcaggtattcaggcacctgttcaccgaagttgaggctggtcacaactccggcggcccaaggagctgctcggttcacccacaaggaatgagagctgcctgcctgctgctgcttggagagccccagacagtcgcttgaagaggtgtgtggatgtctcctagatcttgacttgctcctgaggaaatattgtgtgactgagtttcctgttatactgctctccaatccatcatgaaccagccagagtctgccaacgatcctgaacccctgtgtgcagtgtgtggccaagcccactccttggaggaaaaccacttctacagctatccagaggaagtggatgatgacctcatctgccacatctgcctgcaggctttgctggaccccctggacactccgtgtggacacacctactgcaccctctgcctcaccaacttcctggtggagaaggacttctgtcccatggaccgcaagcctctggttctgcagcactgcaagaagtccag

SEQ ID NO: 149040 - DNA, 572 bp, Homo sapiens
  Payload ID: 9437
  Gene Symbol: LNX1
  Gene Name: ligand of numb-protein X 1, E3 ubiquitin protein ligase
  ENST ID: ENST00000507168
  CDS Start-End: 525-572
agaagagatttgtcactgatgctaatgcatgctgctctgcaggggaccactctccctcgaagctccccatagctgctctcagttttatggatctgctctactcaaagccttgcagaaggggcaggggatgcccaggttaacccccgcacgtacaaaggtggagcagttttcatgcatagctgggacgaagaacactggaaagagaaagaaaaattttccgagctactgctaagccagaaaagctcagctctcaaacggactatctcctgagacgtcacacagctgggaactgatccgcaatacagcaaaggcacctgttcaccgaagttgaggctggtcacaactccggcggcccaaggagctgctcggttcacccacaaggaatgagagctgcctgcctgctgctgcttggagagccccagacagtcgcttgaagaggtgtgtggatgtctcctagatcttgacttgctcctgaggaaatattgtgtgactgagtttcctgttatactgctctccaatccatcatgaaccagccagagtctgccaacgatcctgaacccctgtgtgcagtg

SEQ ID NO: 149041 - DNA, 1024 bp, Homo sapiens
  Payload ID: 9437
  Gene Symbol: LNX1
  Gene Name: ligand of numb-protein X 1, E3 ubiquitin protein ligase
  ENST ID: ENST00000513421
  CDS Start-End: 648-1024
cgccatgtttctgaggcctccccagccatgtggaactcaggacactggggaaatagccgagttttgaagaatgtcagcagggagccaccagggatcatcctccccggtaagaagagacctccagagaccttcaggaagctggaaagaagcttccaatgattcccagtggtagaagtgtgtggtgcaaaggcacttaggtggacaggtttggccctcaacatgaacttgatgttgctaacacaggttagtctggcctattgaaccatcttttactgctgtgaccttcaaaaatgaaagctgtggttttgccctgagaagaagaaaaggagatttgaaatatgactcagattcttccctgcaaaaggctgggacccttgaaaactatctacgtggaaaagtgagagaacaaggggacacaagcaaagctgcccaggcacctgttcaccgaagttgaggctggtcacaactccggcggcccaaggagctgctcggttcacccacaaggaatgagagctgcctgcctgctgctgcttggagagccccagacagtcgcttgaagaggtgtgtggatgtctcctagatcttgacttgctcctgaggaaatattgtgtgactgagtttcctgttatactgctctccaatccatcatgaaccagccagagtctgccaacgatcctgaacccctgtgtgcagtgtgtggccaagcccactccttggaggaaaaccacttctacagctatccagaggaagtggatgatgacctcatctgccacatctgcctgcaggctttgctggaccccctggacactccgtgtggacacacctactgcaccctctgcctcaccaacttcctggtggagaaggacttctgtcccatggaccgcaagcctctggttctgcagcactgcaagaagtccagcatcctggtcaacaaactcctcaacaagctactggtgacctgcccattcagggagcactgcacccaggtgttgcagcgctgtgacctcgagcatcactttcaaac

SEQ ID NO: 149042 - DNA, 4627 bp, Homo sapiens
  Payload ID: 9438
  Gene Symbol: LNX2
  Gene Name: ligand of numb-protein X 2
  Uniprot ID: Q8N448
  ENST ID: ENST00000316334
  CDS Start-End: 131-2203
gtgcgcggcccgggcagccgcgctttcccaaaaaacacaccttgactttagtcagatacatcactgtctgttaaaggaaaccaagcgtgaagtggaagtctaacacatgaggatacagaattgattcaaaatgggaacaacaagtgatgagatggtgtctgtggaacagacctcctcctcttctctaaaccccctgtgttttgaatgtggccaacagcactggacaagagaaaaccatttgtacaattaccagaatgaagtggatgatgacctagtctgccatatttgccttcaacctctgctgcagccactagacacaccctgtggacatacattctgctacaagtgcctcagaaactttttacaagagaaagatttctgtccgttggaccggaaaagacttcattttaagttgtgcaagaagtctagtattctagttcataaactcctagacaaattattagttttatgtccattttcttcagtgtgcaaagatgtaatgcaacgttgtgatctggaggcacatctcaaaaacagatgtcctggagcttctcatcggagagttgccctggagagaaggaaaactagtagaactcaagcagagattgagaatgaaaatgggcccactctactagatcctgcaggtaccttatctccagaagcagactgtttggggacaggcgcagtgcctgtggagcggcacttgacatcagcgtctctttccacatggagtgaggagcctggccttgacaaccctgcctttgaggagagcgctggagctgacaccacacaacagccacttagtttaccagaaggagaaatcaccacgattgaaattcatcggtccaatccttacattcagttaggaatcagcattgtgggtggcaacgaaacacctttgattaacattgtcatccaggaggtctatcgggatggggtcattgccagagacgggagacttcttgctggagaccagattcttcaggtcaacaactacaatatcagcaatgtgtcccataactatgcccgagctgtcctttcccagccctgcaacacactgcatcttactgtgcttcgagagaggcgctttggcaaccgagcacacaaccattctgatagtaactctccacgagaagagattttccaagtggctcttcataaacgggactctggtgaacagcttggcattaaattggtgcgaaggacagatgagccaggggtttttattcttgacctgttggaaggggggttggctgcccaggacggcaggctaagcagcaatgaccgagtgctggccatcaatgggcacgacctgaagtatggaactccggagcttgctgcccagattattcaggccagtggagagagagtgaatttaacaattgctagaccagggaaaccccagcctggtaacaccattagagaagcaggaaatcatagcagcagcagccagcaccacacaccaccaccgtattatagcagaccaagctcacataaggatcttactcagtgtgttacatgccaagaaaaacacattactgtaaagaaggaaccacatgaatcccttggcatgaccgttgctgggggcaggggaagtaagagtggtgagctgcccatctttgtgaccagtgtgccaccccatggctgccttgcacgagatggcagaataaagagaggtgatgtgttgctaaatatcaacggcattgatttgaccaatttaagtcacagtgaggcagttgcaatgctgaaagccagtgccgcgtcccctgctgttgcccttaaagcacttgaggtccagattgttgaggaggcgactcagaacgcggaggagcagccgagtactttcagcgaaaatgagtatgatgccagttggtccccatcatgggtcatgtggcttgggcttcccagcacacttcatagctgccacgatatagttttacgaagaagttacttgggaagttggggctttagtatcgttggtggatatgaagagaaccacaccaatcagccttttttcattaaaactattgtcttgggaactcctgcttattatgatggaagattaaagtgtggtgacatgattgtggccgtaaatgggctgtcaaccgtgggcatgagccactctgcactagttcccatgttgaaggagcagaggaacaaagtcactctgaccgttatttgttggcctggcagccttgtatagattttggaaattggtttcaaatcttgcatcttccttttttagatttttgaaagaaaaccctttggtttcattgtgtttgtggtttaggagctgctgacactgctggtatacacagggccaaaacccactaagattgtccgtttatgtttatttaaatggtttcctaagttagttacatttcttttagcttggaaacagtcttccactaacctttgtgagtttatattttcagaattcagacttagttgttaaaatgttacctatggtaatgagcaaagctcacccaaactgtgccccagatggagtaaagaccttctggtgggtctttgttttcagtaactgaatcatagaacgagttctgtatccctcaggcctgatgtcagcaaagccagtaacaacagcgtgtactgccactgtcataaccaataccatgaatgaatatactttaaattttggtgataactgttccccatttttttttgaaccacagtctcactctcacccaggctggagtgcagtggcacaatctcagctcactgcaagctccgcctcctgggttcacgccattctcccacctcagcctcccgagtagctgggactacaggcgtgtgccaccatgcccagctaattttttgtacttttagtagagacggggtttcaccgtgttagccaggatggtctcgatctcctgaccttgtgatctgcccgcctcagcctcccaaagtgctgggattacaggtgtgagctgccgcacccggccgttcccattttttattggtgccaacatttcaaaacttcatactgtttataaactgattttctggtttatttctactgtaatctctcaatattcatagaagatgaagaaataagtctgacaacactaaagaaatttcttaatatactattattagaatagtagaggataaaagataatgttatccagttacaaaggaatttggatgataattataacttaatgttagagatggtaaagctgcacttacttgaacagcccaaaagcattaaaaatctatttccagaggaatgttttgctatgtagggaaattttgaagtagtttttgctaaaaaattatttctagagttgtgttattcttagcagtaatcttggctagaaatgtttttgtgatttatgcgattaaacgaaatgataaagataaaaccatattattaaatacctatatatcacagctaagtaggagaaagggagacctttttattttgttcaggtaggagtatttcttgtgtattttagaaacaattatttttcccattatttcttatgagattagttgtttcaagtaggagacagaaaagttctgttttgttggaaatgtaggttttagatgtatctttcagtcagctctcagtcactagactatttcatattttttgaaatgtttttgaaaattatgactagcccattttttgtcctttattcaacatacttatcctctgaacacataaataagtgaataagataaaaatatctttaccttattaatattatacatacttgaaaaaaatttcatttagaaacctagttcagaatctgagcaaatttacaagtgacctctgtaataaatggtattgataatcagagaatgtatttcagaatactacagtacaatatattatgaagcatgaccactttattttgaaacttagcaattgtattgctggggtttattgtatctgtagcatgtcactgattatttcagttagttttataatgatttttaaaaaacatatctatttggaataagatacagcaacaatcattgctactgacttgttcaaccccttagttacactgtatgatcaacatataacaagatacagtggaatggcccatacagtatattactgttgtgtgatgattggctttggaagcagtttgattttgaaatgctttgatattctaattgacatggaacaagttttttccctgctccccaaatagaattttgtaaccaactttgctatttttttaaagtttgtaagaatgtgtcatttcttggggagtagccatccatcaacaaatatcctgactgctactttgttatatacaaaatacttacattgaacctggtggcataatgagtattttgaaagaagaaatttcttcactctcatttttatagaaatcttggaatcagcttaagctgtagcttttatgacaaaagacagtcatttttggtcagagtgatatttggtgacggaaacttgttcataatttattgttactatagaactatttggattttctcatttttagttctgatagttaaatattttggtttgttctgtgccttcagtttaaattatttcaggatttttcagatgtttaaataatggtgtgaatcattcaggatggaaataaaagtcatcctttctgtaata

SEQ ID NO: 149043 - DNA, 3384 bp, Homo sapiens
  Payload ID: 9439
  Gene Symbol: LIG1
  Gene Name: ligase I, DNA, ATP-dependent
  Uniprot ID: P18858
  ENST ID: ENST00000263274
  CDS Start-End: 421-3180
ctcgcgggggcgcttccaccgattcctcctctttccctgccagtcactcctcagaccctcagccacacccgctcatccagggcgagggaaagcgcgggcattttcccagtgtgctctgcgggagggctcgccccacttcaccccttttcccgccctcctcccattcgggagactacgactcccagtgtcctccgcgcgacggcggcggtgcggacggtgcccaggtcccgcccctaggctctgccccgcccccgcccgcagacgtctgcgcgcgaatgccgtggcgcgaacttgggactgcagaggcgcgcctggcggatctgagtgtgttgcccgggcagcggcgcgcgggaccaacgcaaggagcagctgacagacgaagaaaagtgctggacaggaagggagaattctgacgccaacatgcagcgaagtatcatgtcatttttccaccccaagaaagagggtaaagcaaagaagcctgagaaggaggcatccaatagcagcagagagacggagccccctccaaaggcggcactgaaggagtggaatggagtggtgtccgagagtgactctccggtgaagaggccagggaggaaggcggcccgggtcctgggcagcgaaggggaagaggaggatgaagcccttagccctgctaaaggccagaagcctgccctggactgctcacaggtctccccgccccgtcctgccacatctcctgagaacaatgcttccctctctgacacctctcccatggacagttccccatcagggattccgaagcgtcgcacagctcggaagcagctcccgaaacggaccattcaggaagtcctggaagagcagagtgaggacgaggacagagaagccaagaggaagaaggaggaggaagaagaggagaccccgaaagaaagcctcacagaggctgaagtggccacagagaaggaaggagaagacggggaccagcccaccacgcctcccaagcccctaaagacctccaaagcagagaccccgacggaaagcgtttcagagcctgaggtggccacgaagcaggaactgcaggaggaggaagagcagaccaagcctccccgcagagctcccaagacgctcagcagcttcttcaccccccggaagccagcagtcaaaaaagaagtgaaggaagaggagccaggggctccaggaaaggagggagctgctgagggacccctggatccatctggttacaatcctgccaagaacaactatcatcccgtggaagatgcctgctggaaaccgggccagaaggttccttacctggctgtggcccggacgtttgagaagatcgaggaggtgtctgctcggctccggatggtggagacgctgagcaacttgctgcgctccgtggtggccctgtcgcctccagacctcctccctgtcctctacctcagcctcaaccaccttgggccaccccagcagggcctggagcttggcgtgggtgatggtgtccttctcaaggcagtggcccaggccacaggtcggcagctggagtccgtccgggctgaggcagccgagaaaggcgacgtggggctggtggccgagaacagccgcagcacccagaggctcatgctgccaccacctccgctcactgcctccggggtcttcagcaagttccgcgacatcgccaggctcactggcagtgcttccacagccaagaagatagacatcatcaaaggcctctttgtggcctgccgccactcagaagcccggttcatcgctaggtccctgagcggacggctgcgccttgggctggcagagcagtcggtgctggctgccctctcccaggcagtgagcctcacgcccccgggccaagaattcccaccagccatggtggatgctgggaagggcaagacagcagaggccagaaagacgtggctggaggagcaaggcatgatcctgaagcagacgttctgcgaggttcccgacctggaccgaattatccccgtgctgctggagcacggcctggaacgtctcccggagcactgcaagctgagcccagggattcccctgaaaccaatgttggcccatcccacccggggcatcagcgaggtcctgaaacgctttgaggaggcagctttcacctgcgaatacaaatatgacgggcagagggcacagatccacgccctggaaggcggggaggtgaagatcttcagcaggaatcaggaagacaacactgggaagtacccggacatcatcagccgcatccccaagattaaactcccatcggtcacatccttcatcctggacaccgaagccgtggcttgggaccgggaaaagaagcagatccagccattccaagtgctcaccacccgcaaacgcaaggaggtggatgcgtctgagatccaggtgcaggtgtgtttgtacgccttcgacctcatctacctcaatggagagtccctggtacgtgagcccctttcccggcgccggcagctgctccgggagaactttgtggagacagagggcgagtttgtcttcgccacctccctggacaccaaggacatcgagcagatcgccgagttcctggagcagtcagtgaaagactcctgcgaggggctgatggtgaagaccctggatgttgatgccacctacgagatcgccaagagatcgcacaactggctcaagctgaagaaggactaccttgatggcgtgggtgacaccctggacctggtggtgatcggcgcctacctgggccgggggaagcgggccggccggtacgggggcttcctgctggcctcctacgacgaggacagtgaggagctgcaggccatatgcaagcttggaactggcttcagtgatgaggagctggaggagcatcaccagagcctcaaggcgctggtgctgcccagcccacgcccttacgtgcggatagatggcgctgtgattcccgaccactggctggaccccagcgctgtgtgggaggtgaagtgcgctgacctctccctctctcccatctaccctgctgcgcggggcctggtggatagtgacaagggcatctcccttcgcttccctcggtttattcgagtccgtgaagacaagcagccggagcaggccaccaccagtgctcaggtggcctgtttgtaccggaagcaaagtcagattcagaaccaacaaggcgaggactcaggctctgaccctgaagatacctactaagccctcgccctcctagggcctgggtacagggcatgagttggacggaccccagggttattattgcctttgctttttagcaaatctgctgtggcaggctgtggattttgagagtcaggggaggggtgtgtgtgtgagggggtggcttactccggagtctgggattcatcccgtcatttctttcaataaataattattggatagcta

SEQ ID NO: 149044 - DNA, 3179 bp, Homo sapiens
  Payload ID: 9439
  Gene Symbol: LIG1
  Gene Name: ligase I, DNA, ATP-dependent
  ENST ID: ENST00000536218
  CDS Start-End: 421-2976
ctcgcgggggcgcttccaccgattcctcctctttccctgccagtcactcctcagaccctcagccacacccgctcatccagggcgagggaaagcgcgggcattttcccagtgtgctctgcgggagggctcgccccacttcaccccttttcccgccctcctcccattcgggagactacgactcccagtgtcctccgcgcgacggcggcggtgcggacggtgcccaggtcccgcccctaggctctgccccgcccccgcccgcagacgtctgcgcgcgaatgccgtggcgcgaacttgggactgcagaggcgcgcctggcggatctgagtgtgttgcccgggcagcggcgcgcgggaccaacgcaaggagcagctgacagacgaagaaaagtgctggacaggaagggagaattctgacgccaacatgcagcgaagtatcatgtcatttttccaccccaagaaagagggtaaagcaaagaagcctgagaaggaggcatccaatagcagcagagagacggagccccctccaaaggcggcactgaaggagtggaatggagtggtgtccgagagtgactctccggtgaagaggccagggaggaaggcggcccgggtcctgggcagcgaaggggaagaggaggatgaagcccttagccctgctaaaggccagaagcctgccctggactgctcacaggtctccccgccccgtcctgccacatctcctgagaacaatgcttccctctctgacacctctcccatggacagttccccatcagggattccgaagcgtcgcacagaagcagagaccccgacggaaagcgtttcagagcctgaggtggccacgaagcaggaactgcaggaggaggaagagcagaccaagcctccccgcagagctcccaagacgctcagcagcttcttcaccccccggaagccagcagtcaaaaaagaagtgaaggaagaggagccaggggctccaggaaaggagggagctgctgagggacccctggatccatctggttacaatcctgccaagaacaactatcatcccgtggaagatgcctgctggaaaccgggccagaaggttccttacctggctgtggcccggacgtttgagaagatcgaggaggtgtctgctcggctccggatggtggagacgctgagcaacttgctgcgctccgtggtggccctgtcgcctccagacctcctccctgtcctctacctcagcctcaaccaccttgggccaccccagcagggcctggagcttggcgtgggtgatggtgtccttctcaaggcagtggcccaggccacaggtcggcagctggagtccgtccgggctgaggcagccgagaaaggcgacgtggggctggtggccgagaacagccgcagcacccagaggctcatgctgccaccacctccgctcactgcctccggggtcttcagcaagttccgcgacatcgccaggctcactggcagtgcttccacagccaagaagatagacatcatcaaaggcctctttgtggcctgccgccactcagaagcccggttcatcgctaggtccctgagcggacggctgcgccttgggctggcagagcagtcggtgctggctgccctctcccaggcagtgagcctcacgcccccgggccaagaattcccaccagccatggtggatgctgggaagggcaagacagcagaggccagaaagacgtggctggaggagcaaggcatgatcctgaagcagacgttctgcgaggttcccgacctggaccgaattatccccgtgctgctggagcacggcctggaacgtctcccggagcactgcaagctgagcccagggattcccctgaaaccaatgttggcccatcccacccggggcatcagcgaggtcctgaaacgctttgaggaggcagctttcacctgcgaatacaaatatgacgggcagagggcacagatccacgccctggaaggcggggaggtgaagatcttcagcaggaatcaggaagacaacactgggaagtacccggacatcatcagccgcatccccaagattaaactcccatcggtcacatccttcatcctggacaccgaagccgtggcttgggaccgggaaaagaagcagatccagccattccaagtgctcaccacccgcaaacgcaaggaggtggatgcgtctgagatccaggtgcaggtgtgtttgtacgccttcgacctcatctacctcaatggagagtccctggtacgtgagcccctttcccggcgccggcagctgctccgggagaactttgtggagacagagggcgagtttgtcttcgccacctccctggacaccaaggacatcgagcagatcgccgagttcctggagcagtcagtgaaagactcctgcgaggggctgatggtgaagaccctggatgttgatgccacctacgagatcgccaagagatcgcacaactggctcaagctgaagaaggactaccttgatggcgtgggtgacaccctggacctggtggtgatcggcgcctacctgggccgggggaagcgggccggccggtacgggggcttcctgctggcctcctacgacgaggacagtgaggagctgcaggccatatgcaagcttggaactggcttcagtgatgaggagctggaggagcatcaccagagcctcaaggcgctggtgctgcccagcccacgcccttacgtgcggatagatggcgctgtgattcccgaccactggctggaccccagcgctgtgtgggaggtgaagtgcgctgacctctccctctctcccatctaccctgctgcgcggggcctggtggatagtgacaagggcatctcccttcgcttccctcggtttattcgagtccgtgaagacaagcagccggagcaggccaccaccagtgctcaggtggcctgtttgtaccggaagcaaagtcagattcagaaccaacaaggcgaggactcaggctctgaccctgaagatacctactaagccctcgccctcctagggcctgggtacagggcatgagttggacggaccccagggttattattgcctttgctttttagcaaatctgctgtggcaggctgtggattttgagagtcaggggaggggtgtgtgtgtgagggggtggcttactccggagtctgggattcatcccgtcatttctttcaataaataattattggatagct

SEQ ID NO: 149045 - DNA, 3027 bp, Homo sapiens
  Payload ID: 9439
  Gene Symbol: LIG1
  Gene Name: ligase I, DNA, ATP-dependent
  Uniprot ID: P18858
  ENST ID: ENST00000427526
  CDS Start-End: 162-2828
agacgtctgcgcgcgaatgccgtggcgcgaacttgggactgcagaggcgcgcctggcggatctgagtgtgttgcccgggcagcggcgcgcgggaccaacgcaaggagcagctgacagacgaagaaaagtgctggacaggaagggagaattctgacgccaacatgcagcgaagtatcatggcggcactgaaggagtggaatggagtggtgtccgagagtgactctccggtgaagaggccagggaggaaggcggcccgggtcctgggcagcgaaggggaagaggaggatgaagcccttagccctgctaaaggccagaagcctgccctggactgctcacaggtctccccgccccgtcctgccacatctcctgagaacaatgcttccctctctgacacctctcccatggacagttccccatcagggattccgaagcgtcgcacagctcggaagcagctcccgaaacggaccattcaggaagtcctggaagagcagagtgaggacgaggacagagaagccaagaggaagaaggaggaggaagaggagaccccgaaagaaagcctcacagaggctgaagtggccacagagaaggaaggagaagacggggaccagcccaccacgcctcccaagcccctaaagacctccaaagcagagaccccgacggaaagcgtttcagagcctgaggtggccacgaagcaggaactgcaggaggaggaagagcagaccaagcctccccgcagagctcccaagacgctcagcagcttcttcaccccccggaagccagcagtcaaaaaagaagtgaaggaagaggagccaggggctccaggaaaggagggagctgctgagggacccctggatccatctggttacaatcctgccaagaacaactatcatcccgtggaagatgcctgctggaaaccgggccagaaggttccttacctggctgtggcccggacgtttgagaagatcgaggaggtgtctgctcggctccggatggtggagacgctgagcaacttgctgcgctccgtggtggccctgtcgcctccagacctcctccctgtcctctacctcagcctcaaccaccttgggccaccccagcagggcctggagcttggcgtgggtgatggtgtccttctcaaggcagtggcccaggccacaggtcggcagctggagtccgtccgggctgaggcagccgagaaaggcgacgtggggctggtggccgagaacagccgcagcacccagaggctcatgctgccaccacctccgctcactgcctccggggtcttcagcaagttccgcgacatcgccaggctcactggcagtgcttccacagccaagaagatagacatcatcaaaggcctctttgtggcctgccgccactcagaagcccggttcatcgctaggtccctgagcggacggctgcgccttgggctggcagagcagtcggtgctggctgccctctcccaggcagtgagcctcacgcccccgggccaagaattcccaccagccatggtggatgctgggaagggcaagacagcagaggccagaaagacgtggctggaggagcaaggcatgatcctgaagcagacgttctgcgaggttcccgacctggaccgaattatccccgtgctgctggagcacggcctggaacgtctcccggagcactgcaagctgagcccagggattcccctgaaaccaatgttggcccatcccacccggggcatcagcgaggtcctgaaacgctttgaggaggcagctttcacctgcgaatacaaatatgacgggcagagggcacagatccacgccctggaaggcggggaggtgaagatcttcagcaggaatcaggaagacaacactgggaagtacccggacatcatcagccgcatccccaagattaaactcccatcggtcacatccttcatcctggacaccgaagccgtggcttgggaccgggaaaagaagcagatccagccattccaagtgctcaccacccgcaaacgcaaggaggtggatgcgtctgagatccaggtgcaggtgtgtttgtacgccttcgacctcatctacctcaatggagagtccctggtacgtgagcccctttcccggcgccggcagctgctccgggagaactttgtggagacagagggcgagtttgtcttcgccacctccctggacaccaaggacatcgagcagatcgccgagttcctggagcagtcagtgaaagactcctgcgaggggctgatggtgaagaccctggatgttgatgccacctacgagatcgccaagagatcgcacaactggctcaagctgaagaaggactaccttgatggcgtgggtgacaccctggacctggtggtgatcggcgcctacctgggccgggggaagcgggccggccggtacgggggcttcctgctggcctcctacgacgaggacagtgaggagctgcaggccatatgcaagcttggaactggcttcagtgatgaggagctggaggagcatcaccagagcctcaaggcgctggtgctgcccagcccacgcccttacgtgcggatagatggcgctgtgattcccgaccactggctggaccccagcgctgtgtgggaggtgaagtgcgctgacctctccctctctcccatctaccctgctgcgcggggcctggtggatagtgacaagggcatctcccttcgcttccctcggtttattcgagtccgtgaagacaagcagccggagcaggccaccaccagtgctcaggtggcctgtttgtaccggaagcaaagtcagattcagaaccaacaaggcgaggactcaggctctgaccctgaagatacctactaagccctcgccctcctagggcctgggtacagggcatgagttggacggaccccagggttattattgcctttgctttttagcaaatctgctgtggcaggctgtggattttgagagtcaggggaggggtgtgtgtgtgagggggtggcttactccggagtctgggattcatcccgtcatttctttcaataaataattattggat

SEQ ID NO: 149046 - DNA, 1527 bp, Homo sapiens
  Payload ID: 9439
  Gene Symbol: LIG1
  Gene Name: ligase I, DNA, ATP-dependent
  ENST ID: ENST00000542460
  CDS Start-End: 140-1387
tggcgcgaacttgggactgcagaggcgcgcctggcggatctgagtgtgttgcccgggcagcggcgcgcgggaccaacgcaaggagcagctgacagacgaagaaaagtgctggacaggaagggagaattctgacgccaacatgcagcgaagtatcatgtcatttttccaccccaagaaagagggtaaagcaaagaagcctgagaaggaggcatccaatagcagcagagagacggagccccctccaaaggcggcactgaaggagtggaatggagtggtgtccgagagtgactctccggtgaagaggccagggaggaaggcggcccgggtcctgggcagcgaaggggaagaggaggatgaagcccttagccctgctaaaggccagaagcctgccctggactgctcacaggtctccccgccccgtcctgccacatctcctgagaacaatgcttccctctctgacacctctcccatggacagttccccatcagggattccgaagcgtcgcacagaagaggagaccccgaaagaaagcctcacagaggctgaagtggccacagagaaggaaggagaagacggggaccagcccaccacgcctcccaagcccctaaagacctccaaagcagagaccccgacggaaagcgtttcagagcctgaggtggccacgaagcaggaactgcaggaggaggaagagcagaccaagcctccccgcagagctcccaagacgctcagcagcttcttcaccccccggaagccagcagtcaaaaaagaagtgaaggaagaggagccaggggctccaggaaaggagggagctgctgagggacccctggatccatctggttacaatcctgccaagaacaactatcatcccgtggaagatgcctgctggaaaccgggccagaaggttccttacctggctgtggcccggacgtttgagaagatcgaggaggtgtctgctcggctccggatggtggagacgctgagcaacttgctgcgctccgtggtggccctgtcgcctccagacctcctccctgtcctctacctcagcctcaaccaccttgggccaccccagcagggcctggagcttggcgtgggtgatggtgtccttctcaaggcagtggcccaggccacaggccgcgagagaagggagacacgcagccacaactgtcaccctcgacacccccacccgcgctctcccctgaaggtcggcagctggagtccgtccgggctgaggcagccgagaaaggcgacgtggggctggtggccgagaacagccgcagcacccagaggctcatgctgccaccacctccgctcactgcctccggggtcttcagcaagttccgcgacatcgccaggctcactggcagtgcttccacagccaagaagatagacatcatcaaaggcctctttgtggcctgccgccactcagaagcccggttcatcgctaggtccctgagcggacggctgcgccttgggctggcagagcagtcggtgctggctgccctctcccaggcagtgagcctcacgccc

SEQ ID NO: 149047 - DNA, 575 bp, Homo sapiens
  Payload ID: 9439
  Gene Symbol: LIG1
  Gene Name: ligase I, DNA, ATP-dependent
  ENST ID: ENST00000593425
  CDS Start-End: 139-575
agaagaaggtaaatcgcgggcagcagcatcacctggaaggagtgggccctactggagggagatgggtggtgtcagggagaggagcagctgacagacgaagaaaagtgctggacaggaagggagaattctgacgccaacatgcagcgaagtatcatgtcatttttccaccccaagaaagagggtaaagcaaagaagcctgagaaggaggcatccaatagcagcagagagacggagccccctccaaaggcggcactgaaggagtggaatggagtggtgtccgagagtgactctccggtgaagaggccagggaggaaggcggcccgggtcctgggcagcgaaggggaagaggaggatgaagcccttagccctgctaaaggccagaagcctgccctggactgctcacaggtctccccgccccgtcctgccacatctcctgagaacaatgcttccctctctgacacctctcccatggacagttccccatcagggattccgaagcgtcgcacagctcggaagcagctcccgaaacggaccattcaggaagtcctggaagagcagagtgaggacgaggacag

SEQ ID NO: 149048 - DNA, 4102 bp, Homo sapiens
  Payload ID: 9439
  Gene Symbol: LIG1
  Gene Name: ligase I, DNA, ATP-dependent
  ENST ID: ENST00000594759
  CDS Start-End: 144-2546
gccgtggcgcgaacttgggactgcagaggcgcgcctggcggatctgagtgtgttgcccgggcagcggcgcgcgggaccaacgcaaggagcagctgacagacgaagaaaagtgctggacaggaagggagaattctgacgccaacatgcagcgaagtatcatgtcatttttccaccccaagaaagagggtaaagcaaagaagcctgagaaggaggcatccaatagcagcagagagacggagccccctccaaaggcggcactgaaggagtggaatggagtggtgtccgagagtgactctccggtgaagaggccagggaggaaggcggcccgggtcctgggcagcgaaggggaagaggaggatgaagcccttagccctgctaaaggccagaagcctgccctggactgctcacaggtctccccgccccgtcctgccacatctcctgagaacaatgcttccctctctgacacctctcccatggacagttccccatcagggattccgaagcgtcgcacagctcggaagcagctcccgaaacggaccattcaggaagtcctggaagagcagagtgaggacgaggacagagaagccaagaggaagaaggaggaggaagaggagaccccgaaagaaagcctcacagaggctgaagtggccacagagaaggaaggagaagacggggaccagcccaccacgcctcccaagcccctaaagacctccaaagcagagaccccgacggaaagcgtttcagagcctgaggtggccacgaagcaggaactgcaggaggaggaagagcagaccaagcctccccgcagagctcccaagacgctcagcagcttcttcaccccccggaagccagcagtcaaaaaagaagtgaaggaagaggagccaggggctccaggaaaggagggagctgctgagggacccctggatccatctggttacaatcctgccaagaacaactatcatcccgtggaagatgcctgctggaaaccgggccagaaggttccttacctggctgtggcccggacgtttgagaagatcgaggaggtgtctgctcggctccggatggtggagacgctgagcaacttgctgcgctccgtggtggccctgtcgcctccagacctcctccctgtcctctacctcagcctcaaccaccttgggccaccccagcagggcctggagcttggcgtgggtgatggtgtccttctcaaggcagtggcccaggccacaggtcggcagctggagtccgtccgggctgaggcagccgagaaaggcgacgtggggctggtggccgagaacagccgcagcacccagaggctcatgctgccaccacctccgctcactgcctccggggtcttcagcaagttccgcgacatcgccaggctcactggcagtgcttccacagccaagaagatagacatcatcaaaggcctctttgtggcctgccgccactcagaagcccggttcatcgctaggtccctgagcggacggctgcgccttgggctggcagagcagtcggtgctggctgccctctcccaggcagtgagcctcacgcccccgggccaagaattcccaccagccatggtggatgctgggaagggcaagacagcagaggccagaaagacgtggctggaggagcaaggcatgatcctgaagcagacgttctgcgaggttcccgacctggaccgaattatccccgtgctgctggagcacggcctggaacgtctcccggagcactgcaagctgagcccagggattcccctgaaaccaatgttggcccatcccacccggggcatcagcgaggtcctgaaacgctttgaggaggcagctttcacctgcgaatacaaatatgacgggcagagggcacagatccacgccctggaaggcggggaggtgaagatcttcagcaggaatcaggaagacaacactgggaagtacccggacatcatcagccgcatccccaagattaaactcccatcggtcacatccttcatcctggacaccgaagccgtggcttgggaccgggaaaagaagcagatccagccattccaagtgctcaccacccgcaaacgcaaggaggtggatgcgtctgagatccaggtgcaggtgtgtttgtacgccttcgacctcatctacctcaatggagagtccctggtacgtgagcccctttcccggcgccggcagctgctccgggagaactttgtggagacagagggcgagtttgtcttcgccacctccctggacaccaaggacatcgagcagatcgccgagttcctggagcagtcagtgaaagactcctgcgaggggctgatggtgaagaccctggatgttgatgccacctacgagatcgccaagagatcgcacaactggctcaagctgaagaaggactaccttgatggcgtgggtgacaccctggacctggtggtgatcggcgcctacctgggccgggggaagcgggccggccggtacgggggcttcctgctggcctcctacgacgaggacagtgaggagctgcaggccatatgcaaggtcctggggaactggggctgatggcagaagcaggagggaaggagattagactcccgggggtatttcctattgcacaacccagaccgaggggtgctcacatccccctgtgaaggatccgttctccccagtttttatttactttttctggttctatgagcaactcttgcttcatatagaaaaacaggctgggatagaaagatgtcaggaatgtgtgtcagtgagagattgagattagctacaaatagtggtggctcacataagaaaagaatttttttgttatgaaatgagaagtgtggagggggcagtctgatgccattagggattcaggttcctcctctccccacatttttttttgtccccacattttttttttctgccatgtgcctctggcctcatcatcacaatgtggctgcaggagttccagccctcatggccatgcctgctccacgcaccagggaagagcaaagggggttggaccctgagtcagcctcagccagtgaacaccttctgctcaagttctgttgctcatcactttgctccatggctcacccctagctgcaaggaattctgggaaatgtaaagtgatttactttttttcaagttaaagtttttcttaaagctgtgcacattttggactagattttcttacgtatttcctatattcccctctccaacaaatttgggtcttttgccacagaaacagaacaaaatatcacctagaatcgtaccacccagagacacgcagtagtgacatttgagggaatgttttatttacatttttgcaaagttgtgatccttctctatgagtaattttcttttctgcctttttaccctggaagtactttgttttcagtgttgtatatgcccttaagcaatatggcaacaggacctgaatgcccgcacaagagttttcaagtgctgtgccccatagcacatagtgctgtgtcctgaaccagctccccgtggctgtgtggggaagttgttgccggctttgttctgatggcttggaactggcttcagtgatgaggagctggaggagcatcaccagagcctcaaggcgctggtgctgcccagcccacgcccttacgtgcggatagatggcgctgtgattcccgaccactggctggaccccagcgctgtgtgggaggtgaagtgcgctgacctctccctctctcccatctaccctgctgcgcggggcctggtggatagtgacaagggcatctcccttcgcttccctcggtttattcgagtccgtgaagacaagcagccggagcaggccaccaccagtgctcaggtggcctgtttgtaccggaagcaaagtcagattcagaaccaacaaggcgaggactcaggctctgaccctgaagatacctactaagccctcgccctcctagggcctgggtacagggcatgagttggacggaccccagggttattattgcctttgctttttagcaaatctgctgtggcaggctgtggattttgagagtcaggggaggggtgtgtgtgtgagggggtggcttactccggagtctgggattcatcccgtcatttctttcaataaataattattggat

SEQ ID NO: 149049 - DNA, 3957 bp, Homo sapiens
  Payload ID: 9439
  Gene Symbol: LIG1
  Gene Name: ligase I, DNA, ATP-dependent
  Uniprot ID: P18858
  ENST ID: ENST00000601091
  CDS Start-End: 70-2475
gaccaacgcaaggagcagctgacagacgaagaaaagtgctggacaggaagggagaattctgacgccaacatgcagcgaagtatcatgtcatttttccaccccaagaaagagggtaaagcaaagaagcctgagaaggaggcatccaatagcagcagagagacggagccccctccaaaggcggcactgaaggagtggaatggagtggtgtccgagagtgactctccggtgaagaggccagggaggaaggcggcccgggtcctgggcagcgaaggggaagaggaggatgaagcccttagccctgctaaaggccagaagcctgccctggactgctcacaggtctccccgccccgtcctgccacatctcctgagaacaatgcttccctctctgacacctctcccatggacagttccccatcagggattccgaagcgtcgcacagctcggaagcagctcccgaaacggaccattcaggaagtcctggaagagcagagtgaggacgaggacagagaagccaagaggaagaaggaggaggaagaagaggagaccccgaaagaaagcctcacagaggctgaagtggccacagagaaggaaggagaagacggggaccagcccaccacgcctcccaagcccctaaagacctccaaagcagagaccccgacggaaagcgtttcagagcctgaggtggccacgaagcaggaactgcaggaggaggaagagcagaccaagcctccccgcagagctcccaagacgctcagcagcttcttcaccccccggaagccagcagtcaaaaaagaagtgaaggaagaggagccaggggctccaggaaaggagggagctgctgagggacccctggatccatctggttacaatcctgccaagaacaactatcatcccgtggaagatgcctgctggaaaccgggccagaaggttccttacctggctgtggcccggacgtttgagaagatcgaggaggtgtctgctcggctccggatggtggagacgctgagcaacttgctgcgctccgtggtggccctgtcgcctccagacctcctccctgtcctctacctcagcctcaaccaccttgggccaccccagcagggcctggagcttggcgtgggtgatggtgtccttctcaaggcagtggcccaggccacaggtcggcagctggagtccgtccgggctgaggcagccgagaaaggcgacgtggggctggtggccgagaacagccgcagcacccagaggctcatgctgccaccacctccgctcactgcctccggggtcttcagcaagttccgcgacatcgccaggctcactggcagtgcttccacagccaagaagatagacatcatcaaaggcctctttgtggcctgccgccactcagaagcccggttcatcgctaggtccctgagcggacggctgcgccttgggctggcagagcagtcggtgctggctgccctctcccaggcagtgagcctcacgcccccgggccaagaattcccaccagccatggtggatgctgggaagggcaagacagcagaggccagaaagacgtggctggaggagcaaggcatgatcctgaagcagacgttctgcgaggttcccgacctggaccgaattatccccgtgctgctggagcacggcctggaacgtctcccggagcactgcaagctgagcccagggattcccctgaaaccaatgttggcccatcccacccggggcatcagcgaggtcctgaaacgctttgaggaggcagctttcacctgcgaatacaaatatgacgggcagagggcacagatccacgccctggaaggcggggaggtgaagatcttcagcaggaatcaggaagacaacactgggaagtacccggacatcatcagccgcatccccaagattaaactcccatcggtcacatccttcatcctggacaccgaagccgtggcttgggaccgggaaaagaagcagatccagccattccaagtgctcaccacccgcaaacgcaaggaggtggatgcgtctgagatccaggtgcaggtgtgtttgtacgccttcgacctcatctacctcaatggagagtccctggtacgtgagcccctttcccggcgccggcagctgctccgggagaactttgtggagacagagggcgagtttgtcttcgccacctccctggacaccaaggacatcgagcagatcgccgagttcctggagcagtcagtgaaagactcctgcgaggggctgatggtgaagaccctggatgttgatgccacctacgagatcgccaagagatcgcacaactggctcaagctgaagaaggactaccttgatggcgtgggtgacaccctggacctggtggtgatcggcgcctacctgggccgggggaagcgggccggccggtacgggggcttcctgctggcctcctacgacgaggacagtgaggagctgcaggccatatgcaaggtcctggggaactggggctgatggcagaagcaggagggaaggagattagactcccgggggtatttcctattgcacaacccagaccgaggggtgctcacatccccctgtgaaggatccgttctccccagtttttatttactttttctggttctatgagcaactcttgcttcatatagaaaaacaggctgggatagaaagatgtcaggaatgtgtgtcagtgagagattgagattagctacaaatagtggtggctcacataagaaaagaatttttttgttatgaaatgagaagtgtggagggggcagtctgatgccattagggattcaggttcctcctctccccacatttttttttgtccccacattttttttttctgccatgtgcctctggcctcatcatcacaatgtggctgcaggagttccagccctcatggccatgcctgctccacgcaccagggaagagcaaagggggttggaccctgagtcagcctcagccagtgaacaccttctgctcaagttctgttgctcatcactttgctccatggctcacccctagctgcaaggaattctgggaaatgtaaagtgatttactttttttcaagttaaagtttttcttaaagctgtgcacattttggactagattttcttacgtatttcctatattcccctctccaacaaatttgggtcttttgccacagaaacagaacaaaatatcacctagaatcgtaccacccagagacacgcagtagtgacatttgagggaatgttttatttacatttttgcaaagttgtgatccttctctatgagtaattttcttttctgcctttttaccctggaagtactttgttttcagtgttgtatatgcccttaagcaatatggcaacaggacctgaatgcccgcacaagagttttcaagtgctgtgccccatagcacatagtgctgtgtcctgaaccagctccccgtggctgtgtggggaagttgttgccggctttgttctgatggcttggaactggcttcagtgatgaggagctggaggagcatcaccagagcctcaaggcgctggtgctgcccagcccacgcccttacgtgcggatagatggcgctgtgattcccgaccactggctggaccccagcgctgtgtgggaggtgaagtgcgctgacctctccctctctcccatctaccctgctgcgcggggcctggtggatagtgacaagggcatctcccttcgcttccctcggtttattcgagtccgtgaagacaagcagccggagcaggccaccaccagtgctcaggtggcctgtttgtaccggaagcaaagtcagattcagaaccaacaaggcgaggactcaggctctgaccctgaagatacctactaagccctcgccctcctagggcctgggtacagggcatgagttggacggaccccagggttattattgcctttgctttttagcaaatctgctgtggcaggctgtggattttgagagtcaggggaggggtg

SEQ ID NO: 149050 - DNA, 580 bp, Homo sapiens
  Payload ID: 9439
  Gene Symbol: LIG1
  Gene Name: ligase I, DNA, ATP-dependent
  ENST ID: ENST00000596549
  CDS Start-End: 132-580
acttgggactgcagaggcgcgcctggcggatctgagtgtgttgcccgggcagcggcgcgcgggaccaacgcaaggagcagctgacagacgaagaaaagtgctggacaggaagggagaattctgacgccaacatgcagcgaagtatcatgtcatttttccaccccaagaaagagggtaaagcaaagaagcctgagaaggaggcatccaatagcagcagagagacggagccccctccaaaggcggcactgaaggagtggaatggagtggtgtccgagagtgactctccggtgaagaggccagggaggaaggcggcccgggtcctgggcagcgaaggggaagaggaggatgaagcccttagccctgctaaaggccagaagcctgccctggactgctcacaggtctccccgccccgtcctgccacatctcctgagaacaatgcttccctctctgacacctctcccatggacagttccccatcagggattccgaagcgtcgcacagaagcagagaccccgacggaaagcgtttcagagcctgaggtggccacgaagcaggaactgcaggaggaggaagagcagac

SEQ ID NO: 149051 - DNA, 377 bp, Homo sapiens
  Payload ID: 9439
  Gene Symbol: LIG1
  Gene Name: ligase I, DNA, ATP-dependent
  ENST ID: ENST00000598938
  CDS Start-End: 293-377
cggagggcggcgggtgcgccgaatgcttggggcctatgcttcgccatgtcggggtgtctgcagaggagtgggcgtggggacgctgaggctgccgagagcgcggtggagacggaagagcgcgggctgcgggccgccggagagtgcagagaggtgtctcccagagggaggggggccaggtagagggtagacgagagacagagacagttggacaggtcctctgagaagaggccttgaggagcagctgacagacgaagaaaagtgctggacaggaagggagaattctgacgccaacatgcagcgaagtatcatgtcatttttccaccccaagaaagagggtaaagcaaagaagcctgagaaggaggcatccaatagcagca

SEQ ID NO: 149052 - DNA, 792 bp, Homo sapiens
  Payload ID: 9439
  Gene Symbol: LIG1
  Gene Name: ligase I, DNA, ATP-dependent
  ENST ID: ENST00000596672
  CDS Start-End: 1-110
cgtggctggaggagcaaggcatgatcctgaagcagacgttctgggattcccctgaaaccaatgttggcccatcccacccggggcatcagcgaggtcctgaaacgctttgaggaggcagctttcacctgcgaatacaaatatgacgggcagagggcacagatccacgccctggaaggcggggaggtgaagatcttcagcaggaatcaggaagacaacactgggaagtacccggacatcatcagccgcatccccaagattaaactcccatcggtcacatccttcatcctggacaccgaagccgtggcttgggaccgggaaaagaagcagatccagccattccaagtgctcaccacccgcaaacgcaaggaggtggatgcgtctgagatccaggtgcaggtgtgtttgtacgccttcgacctcatctacctcaatggagagtccctggtacgtgagcccctttcccggcgccggcagctgctccgggagaactttgtggagacagagggcgagtttgtcttcgccacctccctggacaccaaggacatcgagcagatcgccgagttcctggagcagtcagtgaaagactcctgcgaggggctgatggtgaagaccctggatgttgatgccacctacgagatcgccaagagatcgcacaactggctcaagctgaagaaggactaccttgatggcgtgggtgacaccctggacctggtggtgatcggcgcctacctgggccgggggaagcgggccggccggtacgggggcttcctgctggcctcctacgacgaggac

SEQ ID NO: 149053 - DNA, 3949 bp, Homo sapiens
  Payload ID: 9439
  Gene Symbol: LIG1
  Gene Name: ligase I, DNA, ATP-dependent
  Uniprot ID: P18858
  ENST ID: ENST00000613670
  CDS Start-End: 62-2467
ccaggagcagctgacagacgaagaaaagtgctggacaggaagggagaattctgacgccaacatgcagcgaagtatcatgtcatttttccaccccaagaaagagggtaaagcaaagaagcctgagaaggaggcatccaatagcagcagagagacggagccccctccaaaggcggcactgaaggagtggaatggagtggtgtccgagagtgactctccggtgaagaggccagggaggaaggcggcccgggtcctgggcagcgaaggggaagaggaggatgaagcccttagccctgctaaaggccagaagcctgccctggactgctcacaggtctccccgccccgtcctgccacatctcctgagaacaatgcttccctctctgacacctctcccatggacagttccccatcagggattccgaagcgtcgcacagctcggaagcagctcccgaaacggaccattcaggaagtcctggaagagcagagtgaggacgaggacagagaagccaagaggaagaaggaggaggaagaagaggagaccccgaaagaaagcctcacagaggctgaagtggccacagagaaggaaggagaagacggggaccagcccaccacgcctcccaagcccctaaagacctccaaagcagagaccccgacggaaagcgtttcagagcctgaggtggccacgaagcaggaactgcaggaggaggaagagcagaccaagcctccccgcagagctcccaagacgctcagcagcttcttcaccccccggaagccagcagtcaaaaaagaagtgaaggaagaggagccaggggctccaggaaaggagggagctgctgagggacccctggatccatctggttacaatcctgccaagaacaactatcatcccgtggaagatgcctgctggaaaccgggccagaaggttccttacctggctgtggcccggacgtttgagaagatcgaggaggtgtctgctcggctccggatggtggagacgctgagcaacttgctgcgctccgtggtggccctgtcgcctccagacctcctccctgtcctctacctcagcctcaaccaccttgggccaccccagcagggcctggagcttggcgtgggtgatggtgtccttctcaaggcagtggcccaggccacaggtcggcagctggagtccgtccgggctgaggcagccgagaaaggcgacgtggggctggtggccgagaacagccgcagcacccagaggctcatgctgccaccacctccgctcactgcctccggggtcttcagcaagttccgcgacatcgccaggctcactggcagtgcttccacagccaagaagatagacatcatcaaaggcctctttgtggcctgccgccactcagaagcccggttcatcgctaggtccctgagcggacggctgcgccttgggctggcagagcagtcggtgctggctgccctctcccaggcagtgagcctcacgcccccgggccaagaattcccaccagccatggtggatgctgggaagggcaagacagcagaggccagaaagacgtggctggaggagcaaggcatgatcctgaagcagacgttctgcgaggttcccgacctggaccgaattatccccgtgctgctggagcacggcctggaacgtctcccggagcactgcaagctgagcccagggattcccctgaaaccaatgttggcccatcccacccggggcatcagcgaggtcctgaaacgctttgaggaggcagctttcacctgcgaatacaaatatgacgggcagagggcacagatccacgccctggaaggcggggaggtgaagatcttcagcaggaatcaggaagacaacactgggaagtacccggacatcatcagccgcatccccaagattaaactcccatcggtcacatccttcatcctggacaccgaagccgtggcttgggaccgggaaaagaagcagatccagccattccaagtgctcaccacccgcaaacgcaaggaggtggatgcgtctgagatccaggtgcaggtgtgtttgtacgccttcgacctcatctacctcaatggagagtccctggtacgtgagcccctttcccggcgccggcagctgctccgggagaactttgtggagacagagggcgagtttgtcttcgccacctccctggacaccaaggacatcgagcagatcgccgagttcctggagcagtcagtgaaagactcctgcgaggggctgatggtgaagaccctggatgttgatgccacctacgagatcgccaagagatcgcacaactggctcaagctgaagaaggactaccttgatggcgtgggtgacaccctggacctggtggtgatcggcgcctacctgggccgggggaagcgggccggccggtacgggggcttcctgctggcctcctacgacgaggacagtgaggagctgcaggccatatgcaaggtcctggggaactggggctgatggcagaagcaggagggaaggagattagactcccgggggtatttcctattgcacaacccagaccgaggggtgctcacatccccctgtgaaggatccgttctccccagtttttatttactttttctggttctatgagcaactcttgcttcatatagaaaaacaggctgggatagaaagatgtcaggaatgtgtgtcagtgagagattgagattagctacaaatagtggtggctcacataagaaaagaatttttttgttatgaaatgagaagtgtggagggggcagtctgatgccattagggattcaggttcctcctctccccacatttttttttgtccccacattttttttttctgccatgtgcctctggcctcatcatcacaatgtggctgcaggagttccagccctcatggccatgcctgctccacgcaccagggaagagcaaagggggttggaccctgagtcagcctcagccagtgaacaccttctgctcaagttctgttgctcatcactttgctccatggctcacccctagctgcaaggaattctgggaaatgtaaagtgatttactttttttcaagttaaagtttttcttaaagctgtgcacattttggactagattttcttacgtatttcctatattcccctctccaacaaatttgggtcttttgccacagaaacagaacaaaatatcacctagaatcgtaccacccagagacacgcagtagtgacatttgagggaatgttttatttacatttttgcaaagttgtgatccttctctatgagtaattttcttttctgcctttttaccctggaagtactttgttttcagtgttgtatatgcccttaagcaatatggcaacaggacctgaatgcccgcacaagagttttcaagtgctgtgccccatagcacatagtgctgtgtcctgaaccagctccccgtggctgtgtggggaagttgttgccggctttgttctgatggcttggaactggcttcagtgatgaggagctggaggagcatcaccagagcctcaaggcgctggtgctgcccagcccacgcccttacgtgcggatagatggcgctgtgattcccgaccactggctggaccccagcgctgtgtgggaggtgaagtgcgctgacctctccctctctcccatctaccctgctgcgcggggcctggtggatagtgacaagggcatctcccttcgcttccctcggtttattcgagtccgtgaagacaagcagccggagcaggccaccaccagtgctcaggtggcctgtttgtaccggaagcaaagtcagattcagaaccaacaaggcgaggactcaggctctgaccctgaagatacctactaagccctcgccctcctagggcctgggtacagggcatgagttggacggaccccagggttattattgcctttgctttttagcaaatctgctgtggcaggctgtggattttgagagtcaggggaggggtg

SEQ ID NO: 149054 - DNA, 3055 bp, Homo sapiens
  Payload ID: 9440
  Gene Symbol: LIG3
  Gene Name: ligase III, DNA, ATP-dependent
  Uniprot ID: P49916
  ENST ID: ENST00000262327
  CDS Start-End: 82-2931
caaccgtcgtgggctgcccgcggcctgtaatgagcaagttccgaggcctacggtgagcgccggagccggagaggcagctatatgtctttggctttcaagatcttctttccacaaaccctccgtgcactcagccgaaaagaactgtgcctattccgaaaacatcactggcgtgatgtaagacaattcagccagtggtcagaaacagatctgcttcatggacatcccctcttcctgagaagaaagcctgttctatcattccagggaagccatctaagatcacgtgccacctaccttgttttcttgccagggttgcatgtgggactctgcagtggcccctgtgagatggctgagcaacggttctgtgtggactatgccaagcgtggcacagctggctgcaaaaaatgcaaggaaaagattgtgaagggcgtatgccgaattggcaaagtggtgcccaatcccttctcagagtctgggggtgatatgaaagagtggtaccacattaaatgcatgtttgagaaactagagcgggcccgggccaccacaaaaaaaatcgaggacctcacagagctggaaggctgggaagagctggaagataatgagaaggaacagataacccagcacattgcagatctgtcttctaaggcagcaggtacaccaaagaagaaagctgttgtccaggctaagttgacaaccactggccaggtgacttctccagtgaaaggcgcctcatttgtcaccagtaccaatccccggaaattttctggcttttcagccaagcccaacaactctggggaagccccctcgagccccacccctaagagaagtctgtcttcaagcaaatgtgaccccaggcataaggactgtctgctacgggagtttcgaaagttatgcgccatggtggccgataatcctagctacaacacgaagacccagatcatccaggacttccttcggaaaggctcagcaggagatggtttccacggtgatgtgtacctaacagtgaagctgctgctgccaggagtcattaagactgtttacaacttgaacgataagcagattgtgaagcttttcagtcgcatttttaactgcaacccagatgatatggcacgggacctagagcagggtgacgtgtcagagacaatcagagtcttctttgagcagagcaagtctttccccccagctgccaagagcctccttaccatccaggaagtggatgagttccttctgcggctgtccaagctcaccaaggaggatgagcagcaacaggccctacaggacattgcctccaggtgtacagccaatgaccttaaatgcatcatcaggttgatcaaacatgatctgaagatgaactcaggtgcaaaacatgtgttagacgcccttgaccccaatgcctatgaagccttcaaagcctcgcgcaacctgcaggatgtggtggagcgggtccttcacaacgcgcaggaggtggagaaggagccgggccagagacgagctctgagcgtccaggcctcgctgatgacacctgtgcagcccatgttggcggaggcctgcaagtccgttgagtatgcaatgaagaaatgtcccaatggcatgttctctgagatcaagtacgatggagagcgagtccaggtgcataagaatggagaccacttcagctacttcagccgcagtctcaagcccgtccttcctcacaaggtggcccactttaaggactacattccccaggcttttcctgggggccacagcatgatcttggattctgaagtgcttctgattgacaacaagacaggcaaaccactgccctttgggactctgggagtacacaagaaagcagccttccaggatgctaatgtctgcctgtttgtttttgattgtatctactttaatgatgtcagcttgatggacagacctctgtgtgagcggcggaagtttcttcatgacaacatggttgaaattccaaaccggatcatgttctcagaaatgaagcgagtcacaaaagctttggacttggctgacatgataacccgggtgatccaggagggattggaggggctggtgctgaaggatgtgaagggtacatatgagcctgggaagcggcactggctgaaagtgaagaaagactatttgaacgagggggccatggccgacacagctgacctggtggtccttggagccttctatgggcaagggagcaaaggcggcatgatgtcaatcttcctcatgggctgctacgaccctggcagccagaagtggtgcacagtcaccaagtgtgcaggaggccatgatgatgccacgcttgcccgcctgcagaatgaactagacatggtgaagatcagcaaggaccccagcaaaatacccagctggttgaaggtcaacaagatctactatcctgacttcatcgtcccagacccaaagaaagctgccgtgtgggagatcacaggggctgaattctccaaatcggaggctcatacagctgacgggatctccatccgattccctcgctgcacccgaatccgagatgataaggactggaaatctgccactaaccttccccaactcaaggaactgtaccagttgtccaaggagaaggcagacttcactgtagtggctggagatgaggggagctccactacagggggtagcagtgaagagaataagggtccctcagggtctgctgtgtcccgcaaggcccccagcaagccctcagccagtaccaagaaagcagaagggaagctgagtaactccaacagcaaagatggcaacatgcagactgcaaagccttccgctatgaaggtgggggagaagctggccacaaagtcttctccagtgaaagtaggggagaagcggaaagctgctgatgagacgctgtgccaaacaaagaggcggccagccagtgagcagagaggaagaactgtgccagcaggcaggagatagaacagcccggcctagccaggagagactgcagggactcactcagctgctggccccaagtcaaaatttacattaaagggaaaagaccagtctgggtgtgggaatgcagcattgagtttgtggtcag

SEQ ID NO: 149055 - DNA, 8400 bp, Homo sapiens
  Payload ID: 9440
  Gene Symbol: LIG3
  Gene Name: ligase III, DNA, ATP-dependent
  Uniprot ID: P49916
  ENST ID: ENST00000378526
  CDS Start-End: 134-3163
gcctgcgcgctgcctcccgctctaggacccggatttaaagagacaggcgctccaaccgtcgtgggctgcccgcggcctgtaatgagcaagttccgaggcctacggtgagcgccggagccggagaggcagctatatgtctttggctttcaagatcttctttccacaaaccctccgtgcactcagccgaaaagaactgtgcctattccgaaaacatcactggcgtgatgtaagacaattcagccagtggtcagaaacagatctgcttcatggacatcccctcttcctgagaagaaagcctgttctatcattccagggaagccatctaagatcacgtgccacctaccttgttttcttgccagggttgcatgtgggactctgcagtggcccctgtgagatggctgagcaacggttctgtgtggactatgccaagcgtggcacagctggctgcaaaaaatgcaaggaaaagattgtgaagggcgtatgccgaattggcaaagtggtgcccaatcccttctcagagtctgggggtgatatgaaagagtggtaccacattaaatgcatgtttgagaaactagagcgggcccgggccaccacaaaaaaaatcgaggacctcacagagctggaaggctgggaagagctggaagataatgagaaggaacagataacccagcacattgcagatctgtcttctaaggcagcaggtacaccaaagaagaaagctgttgtccaggctaagttgacaaccactggccaggtgacttctccagtgaaaggcgcctcatttgtcaccagtaccaatccccggaaattttctggcttttcagccaagcccaacaactctggggaagccccctcgagccccacccctaagagaagtctgtcttcaagcaaatgtgaccccaggcataaggactgtctgctacgggagtttcgaaagttatgcgccatggtggccgataatcctagctacaacacgaagacccagatcatccaggacttccttcggaaaggctcagcaggagatggtttccacggtgatgtgtacctaacagtgaagctgctgctgccaggagtcattaagactgtttacaacttgaacgataagcagattgtgaagcttttcagtcgcatttttaactgcaacccagatgatatggcacgggacctagagcagggtgacgtgtcagagacaatcagagtcttctttgagcagagcaagtctttccccccagctgccaagagcctccttaccatccaggaagtggatgagttccttctgcggctgtccaagctcaccaaggaggatgagcagcaacaggccctacaggacattgcctccaggtgtacagccaatgaccttaaatgcatcatcaggttgatcaaacatgatctgaagatgaactcaggtgcaaaacatgtgttagacgcccttgaccccaatgcctatgaagccttcaaagcctcgcgcaacctgcaggatgtggtggagcgggtccttcacaacgcgcaggaggtggagaaggagccgggccagagacgagctctgagcgtccaggcctcgctgatgacacctgtgcagcccatgttggcggaggcctgcaagtccgttgagtatgcaatgaagaaatgtcccaatggcatgttctctgagatcaagtacgatggagagcgagtccaggtgcataagaatggagaccacttcagctacttcagccgcagtctcaagcccgtccttcctcacaaggtggcccactttaaggactacattccccaggcttttcctgggggccacagcatgatcttggattctgaagtgcttctgattgacaacaagacaggcaaaccactgccctttgggactctgggagtacacaagaaagcagccttccaggatgctaatgtctgcctgtttgtttttgattgtatctactttaatgatgtcagcttgatggacagacctctgtgtgagcggcggaagtttcttcatgacaacatggttgaaattccaaaccggatcatgttctcagaaatgaagcgagtcacaaaagctttggacttggctgacatgataacccgggtgatccaggagggattggaggggctggtgctgaaggatgtgaagggtacatatgagcctgggaagcggcactggctgaaagtgaagaaagactatttgaacgagggggccatggccgacacagctgacctggtggtccttggagccttctatgggcaagggagcaaaggcggcatgatgtcaatcttcctcatgggctgctacgaccctggcagccagaagtggtgcacagtcaccaagtgtgcaggaggccatgatgatgccacgcttgcccgcctgcagaatgaactagacatggtgaagatcagcaaggaccccagcaaaatacccagctggttgaaggtcaacaagatctactatcctgacttcatcgtcccagacccaaagaaagctgccgtgtgggagatcacaggggctgaattctccaaatcggaggctcatacagctgacgggatctccatccgattccctcgctgcacccgaatccgagatgataaggactggaaatctgccactaaccttccccaactcaaggaactgtaccagttgtccaaggagaaggcagacttcactgtagtggctggagatgaggggagctccactacagggggtagcagtgaagagaataagggtccctcagggtctgctgtgtcccgcaaggcccccagcaagccctcagccagtaccaagaaagcagaagggaagctgagtaactccaacagcaaagatggcaacatgcagactgcaaagccttccgctatgaaggtgggggagaagctggccacaaagtcttctccagtgaaagtaggggagaagcggaaagctgctgatgagacgctgtgccaaacaaaggtattgctggacatcttcactggggtgcggctttacttgccaccctccacaccagacttcagccgtctcagacgctactttgtggcattcgacggggacctggtacaggaatttgatatgacttcagccacgcacgtgctgggtagcagggacaagaaccctgcggcccagcaggtctccccagagtggatttgggcatgtatccggaaacggagactggtagctccctgctaggtttgctgtcttccctctccctcaggccatactctcctttaccatactactggactggactcaggctggaggcagatagacacagtatagggggaatgggcttgcttctcccaaacccaccagttctccactgtctcttctggaccaggaattagttgctgtgggtgccacagctgaagtcagtttgtcttgctggtttaaatagatctttcagagctgggtgctgggtttgccatctttttgttttctttgaaaagcagcttagttaccctttttataaataaaatatcttgcagttatctttgtcctttccccacctacacccccaataatttccctagagattaaggagtaaaggctgggctatggcagctctgtccacaaagccttctctcccatccttgcctgttcctttgtacttccaggctcattttaaagttgtatttaaaggactgccctcggaaatgcttctgtttagcggaacttgtattcagcctgacacgctttgccaggaacaaacctcatgtgaaagaaaacaaaatgaatttttttactttcttctctgtgttctcctattacatggtgaggatccccagtttgaagggaggggactagggtcaggtaggaaaatggggcctttatgaagaaaggggaggttatttgggccactcctctggagggatagagggctccaggaagatctgcatccccaaaacctggaaacaagactgttctttaagaataaaaatccacatggggcttgaggccaagaacagcccttgttgccaccaacatggagactttgtaccatatcccattcttagtgctcgagtgttccaacctgaagttgaagaagccaccctggctgcacatgccatcagccatgactgtgtatgctctggtggtggtgtcttacttcctcatgactggaggaataattatatgatattgttgaacccccaagtattggctgatgaacgtgggcatcagaggccagtagctttcttggcctacaaagtaaatggacagtatattatggaaggatttgcatccagcttcctgtttacaatgggaggtttaggtttcataatgctggaccagtcgaatgcaccaaatatcccaaaactcaatcgattttttttcttctattcattggattcgtctgtgtcctactgagttttttcatggctggagtattcatgtgaatgaaactgccgggctatctgatgggttagagcgcctttaagaagaaatcagtggatactggatttgctcctgtcaatgaagttctaaaggctgtaccaatcctccaatatgaaatgtgggaaagaatgaagagcagcagtaaaagaaatacctagcgaaaaaaacaggaagcatattgaagctcggactagaatttcttcttggtatcagagagacaagtttatcacagtatttttttttttcctgctgacctattgataataccaacaatgttgagtggcattttcttcttagtttttaatttcttaaagaaaatatactccatatctgcagggaaaaaaataaaaatccacacctgagaacagatccatacaacctgcttacaaagaacagctcctgtgctacctgaggctgatttatttgaagaacaaaaggaagagagacaatttagtgtagacaagtgctattcaatagaactttttgcagcagtggaaatatccataaatctgcagtatccaaccaaactagccacagacagctgctgagcaattgaaatgaagctggcacaactaaggaactgaagttcttattttaattcaacttcaaatggtcacatgtcactagtgactaccacactggacagtgcaggtgtagacggagttcagatcagactcctgaaacttaatggctctaaccttaggcaagttacgttaacatctaagcctcaatccctccaagtagaatgggtgcacctaaatcatagggttgtcctgttgtcctgagcaacattatgtaaagcacttagcccagagcctagcacatagttatctagagttgggaacgtcactcctggtgtgcatgtccagaccctacccgggagaagggcctaacctatgactttagaaccctcagttgcaggtgtgcatgttccagccaacactccactctgagtgcaggctcatcaggacaccatatggttgtaaactggctgccatgtcccaatccttccagctcttgagggtcagttctcaccttatgaacaaattaacaggctctggacctataagatcaaggaccactgcgccccctggccaccccaccgcccccccccaactttgatctgattgactttggcttccacctactgtttaaaatgtgtatgttgggggagtagggacagcacgggggaggggtttactttcctgactctagcccaggacatttggtgtttttgaataggcaccattcagccttgcttcagtattaggaataagatactttttattccatcctctatggagacaaaaagctgctcctcctttgagtactgacctacatagatttccatttctctcttcagcctcaggccaaacaaacaaccggacagggcagcagaacaaggctgtctcctcaggatcctgccaaaggcactgtcctctccaacctggacccagccccacttgcccttattggttgcttacacccagagtgcacactcacaggaaagggcctctgctggctgcaggtgatcatcttgtcccttctctgccttagtgtgtgttattgccatttcaatgtcagtggttttttatgtattttcttccagtctttgctgctgagatctgactgtatatactattttgtatcctttcatgtatttctttcatgtatttcaatgcagccctcaacatcatcatcataaatctctccagcagaatgctggaggcctccctcttctgaacctctacatgctgctggctggcatcaagcagaggtcatcactgggtgctgaacaggtcagctccctagggcaatgtgagcaaagtgttgtggctcatcctcgatcctttatgcccttttggcaagattcctttctcttctcagtcacagcagatggacacataatcttgttctcccaggggctgcattctcagtagtcttttccctgctccttgggcgcctggtcagggaggtttgtacaagcctgcgcacacacagcagtctgtcacgaggctgggccaaccttttttttttttttaaacagactcttgctctgtcattcaggctggagtgcagtggtgcaatctcagctcactgcaacctctgcttcccgggttcacaagcaattctcatgcctcagcctcccaagtggctaagacttaacaaacaggcacacaccatcactcgcagctaagtttttgtatttttagtagagaccacgtttcgccatgttgtccagactggtctcaaactcctggcctcgagtcatccacgcacctcagcctcccaaagtgctgggattacaggcgtgagccatggcgcccagcctgggccaaccttttctgagccatagtccagctgtactacagctgtatccaaaaggtaccatgtatctcccagggtaacctgaagacctaactgggcatactaactgtcctcagatttcagttctttaaggcccatctcttctagatcagtgtaaatatctgaactcacttggtgcttcaacccaattggtcttgggattcatcctttacctacccagctctcattctcttctaggttgttccatggcctcttccatatattacatttgtggtcttgagcaagttagttagttacaacaacactgagcatcttgaccaaggtcacttggcccaaccacaggctaatcccaggccatgtgcacatcccaggattagcttgtggtttatcagttgtcaatttttttttttttttaatacagggtctcactctgtcaccctggctggagtgcggtggcgatcagagctcactgcagcttcaatctcctggctcaagtgatcctcccacctcagccttccaagtagttgggactacccacatgcaccaccatgcacggctaattttttggtttttttgggttttttgtttgtgtttttttttgttttgttttttgagacagagtctcgctctttcgcccaggccggactgcagtggcgcaatcttggctcactgcaagctccgcctcccgggttcacaccattctcctgcctcagcctcccgagtagctgggactacaggcacccgccaccacgcctggctaattttttgtatttttagtagagacggggtttcaccgtgttagccagggtggtctcgatctcctgacctcgtgatctgcccgcctcagcctcccaaagtgctgggattacaggcgtgagccaccgcacccggcccttgtttgtttttttaagtagagacaaggtctcactacattgcccaggttggtctcaaactcctgagctcaagcagtcttcccaccttggcctcctaaagtgtggaaattatagcatgaaccactgtcaggctcttttgtcagtcctatcaacctctaacatcctcgcaccagacaggacaggtgtctgtattgaaactttattacaaaattataaagcagagctctgtaacaaaataatacacatttgggtttgctttaacctccaagtaagtctgagaaaatcttaataaaagccacttgaagtaacaattcacatccaagagatttccacaaatttatacaatgtatattgagcactagttcctgtacagcttattcttattagtttggatccaactattccaatgtattatgaaccagtcagctatctgtcttttgaaacaagtcttaactgaaatctcagagtaatcagcaaaagctacggaataattctaagaattagatgtttccatatcattaaaaccaaggatccatgaggggcagaagggaggattcaaagatttaaaaaaaatcaaattttagaccttggttaaatattaactggaatgggatcttggaactcccaactttaatttggtgtaataaaaatgatgcaaaaaaaaaaaaaatcagggttgtttgacaccttttttcctaaagggaaaccttcaccaaaaggggataaaagatttaaaggcaaaatgagtaaacaacctcagttttaattcttactgaggttactaaccagctatcagtatattattttcgattt

SEQ ID NO: 149056 - DNA, 235 bp, Homo sapiens
  Payload ID: 9440
  Gene Symbol: LIG3
  Gene Name: ligase III, DNA, ATP-dependent
  ENST ID: ENST00000585370
  CDS Start-End: 1-109
gaagtttcttcatgacaacatggttgaaattccaaaccggatcatgttctcagaaatgaagcgagtcacacatctctcttgtccctcagaaagctttggacttggctgacatgataacccgggtgatccaggagggattggaggggctggtgctgaaggatgtgaagggtacatatgagcctgggaagcggcactggctgaaagtgaagaaagactatttgaacgagggggccat

SEQ ID NO: 149057 - DNA, 592 bp, Homo sapiens
  Payload ID: 9440
  Gene Symbol: LIG3
  Gene Name: ligase III, DNA, ATP-dependent
  ENST ID: ENST00000588109
  CDS Start-End: 1-115
ggcccgggccaccacaaaaaaaatcgaggacctcacagagctggaaggctgggaagagctggaagataatgagaaggaacagataacccagcacattgcagagatcgttcactgaaggatattttatactcttttgggatcctacagatctgtcttctaaggcagcaggtacaccaaagaagaaagctgttgtccaggctaagttgacaaccactggccaggtgacttctccagtgaaaggcgcctcatttgtcaccagtaccaatccccggaaattttctggcttttcagccaagcccaacaactctggggaagccccctcgagccccacccctaagagaagtctgtcttcaagcaaatgtgaccccaggcataaggactgtctgctacgggagtttcgaaagttatgcgccatggtggccgataatcctagctacaacacgaagacccagatcatccaggacttccttcggaaaggctcagcaggagatggtttccacggtgatgtgtacctaacagtgaagctgctgctgccaggagtcattaagactgtttacaacttgaacgataagcagattgtgaagcttttcag

SEQ ID NO: 149058 - DNA, 722 bp, Homo sapiens
  Payload ID: 9440
  Gene Symbol: LIG3
  Gene Name: ligase III, DNA, ATP-dependent
  ENST ID: ENST00000592690
  CDS Start-End: 101-722
gctgcccgcggcctgtaatgagcaagttccgaggcctacggtgagcgccggagccggagaggcagggttgcatgtgggactctgcagtggcccctgtgagatggctgagcaacggttctgtgtggactatgccaagcgtggcacagctggctgcaaaaaatgcaaggaaaagattgtgaagggcgtatgccgaattggcaaagtggtgcccaatcccttctcagagtctgggggtgatatgaaagagtggtaccacattaaatgcatgtttgagaaactagagcgggcccgggccaccacaaaaaaaatcgaggacctcacagagctggaaggctgggaagagctggaagataatgagaaggaacagataacccagcacattgcagatctgtcttctaaggcagcaggtacaccaaagaagaaagctgttgtccaggctaagttgacaaccactggccaggtgacttctccagtgaaaggcgcctcatttgtcaccagtaccaatccccggaaattttctggcttttcagccaagcccaacaactctggggaagccccctcgagccccacccctaagagaagtctgtcttcaagcaaatgtgaccccaggcataaggactgtctgctacgggagtttcgaaagttatgcgccatggtggccgataatcctagctacaacacgaagacccagatcatccaggacttccttcggaaaggctcag

SEQ ID NO: 149059 - DNA, 887 bp, Homo sapiens
  Payload ID: 9440
  Gene Symbol: LIG3
  Gene Name: ligase III, DNA, ATP-dependent
  ENST ID: ENST00000585740
  CDS Start-End: 331-887
ctgcccgcggcctgtaatgagcaagttccgaggcctacggtgagcgccggagccggagaggcagatctgtcttctaaggcagcaggtacaccaaagaagaaagctgttgtccaggctaagttgacaaccactggccaggtgacttctccagtgaaaggcgcctcatttgtcaccagtaccaatccccggaaattttctggcttttcagccaagcccaacaactctggggaagccccctcgagccccacccctaagagaagtctgtcttcaagcaaatgtgaccccaggcataaggactgtctgctacgggagtttcgaaagttatgcgccatggtggccgataatcctagctacaacacgaagacccagatcatccaggacttccttcggaaaggctcagcaggagatggtttccacggtgatgtgtacctaacagtgaagctgctgctgccaggagtcattaagactgtttacaacttgaacgataagcagattgtgaagcttttcagtcgcatttttaactgcaacccagatgatatggcacgggacctagagcagggtgacgtgtcagagacaatcagagtcttctttgagcagagcaagtctttccccccagctgccaagagcctccttaccatccaggaagtggatgagttccttctgcggctgtccaagctcaccaaggaggatgagcagcaacaggccctacaggacattgcctccaggtgtacagccaatgaccttaaatgcatcatcaggttgatcaaacatgatctgaagatgaactcaggtgcaaaacatgtgttagacgcccttgaccccaatgcctatgaagccttcaaagcctcgcgcaacctgcaggatgtggtggagcgggtccttcacaa

SEQ ID NO: 149060 - DNA, 1699 bp, Homo sapiens
  Payload ID: 9440
  Gene Symbol: LIG3
  Gene Name: ligase III, DNA, ATP-dependent
  ENST ID: ENST00000585941
  CDS Start-End: 64-1699
gctctaggacccggatttaaagagacaggcgctccaaccgtcgtgggctgcccgcggcctgtaatgagcaagttccgaggcctacgctatatgtctttggctttcaagatcttctttccacaaaccctccgtgcactcagccgaaaagaactgtgcctattccgaaaacatcactggcgtgatgtaagacaattcagccagtggtcagaaacagatctgcttcatggacatcccctcttcctgagaagaaagcctgttctatcattccagggaagccatctaagatcacgtgccacctaccttgttttcttgccagggttgcatgtgggactctgcagtggcccctgtgagatggctgagcaacggttctgtgtggactatgccaagcgtggcacagctggctgcaaaaaatgcaaggaaaagattgtgaagggcgtatgccgaattggcaaagtggtgcccaatcccttctcagagtctgggggtgatatgaaagagtggtaccacattaaatgcatgtttgagaaactagagcgggcccgggccaccacaaaaaaaatcgaggacctcacagagctggaaggctgggaagagctggaagataatgagaaggaacagataacccagcacattgcagatctgtcttctaaggcagcaggtacaccaaagaagaaagctgttgtccaggctaagttgacaaccactggccaggtgacttctccagtgaaaggcgcctcatttgtcaccagtaccaatccccggaaattttctggcttttcagccaagcccaacaactctggggaagccccctcgagccccacccctaagagaagtctgtcttcaagcaaatgtgaccccaggcataaggactgtctgctacgggagtttcgaaagttatgcgccatggtggccgataatcctagctacaacacgaagacccagatcatccaggacttccttcggaaaggctcagcaggagatggtttccacggtgatgtgtacctaacagtgaagctgctgctgccaggagtcattaagactgtttacaacttgaacgataagcagattgtgaagcttttcagtcgcatttttaactgcaacccagatgatatggcacgggacctagagcagggtgacgtgtcagagacaatcagagtcttctttgagcagagcaagtctttccccccagctgccaagagcctccttaccatccaggaagtggatgagttccttctgcggctgtccaagctcaccaaggaggatgagcagcaacaggccctacaggacattgcctccaggtgtacagccaatgaccttaaatgcatcatcaggttgatcaaacatgatctgaagatgaactcaggtgcaaaacatgtgttagacgcccttgaccccaatgcctatgaagccttcaaagcctcgcgcaacctgcaggatgtggtggagcgggtccttcacaacgcgcaggaggtggagaaggagccgggccagagacgagctctgagcgtccaggcctcgctgatgacacctgtgcagcccatgttggcggaggcctgcaagtccgttgagtatgcaatgaagaaatgtcccaatggcatgttctctgagatcaagtacgatggagagcgagtccaggtgcataagaatggagaccacttcagctacttcagccgcagtctcaagcccgtccttcctcaca

SEQ ID NO: 149061 - DNA, 4096 bp, Homo sapiens
  Payload ID: 9441
  Gene Symbol: LIG4
  Gene Name: ligase IV, DNA, ATP-dependent
  Uniprot ID: P49917
  ENST ID: ENST00000356922
  CDS Start-End: 274-3009
ccacagcgctgtagactgcgccgcattagaagcctggcctcctgatgctgtgctcttcatctagacccaagccccaggtcgtgggacgatttctcccgtttttgactccctggaactgtattgcctgctttacctgcgtacatgttgattctttctcatggcaaccccgcaggaaaccatcaagatctcattttacagctgggattctctggttcacagaggtaacggagcttgcccgaggccagttaaacgagaagattcatcaccgctttgatggctgcctcacaaacttcacaaactgttgcatctcacgttccttttgcagatttgtgttcaactttagaacgaatacagaaaagtaaaggacgtgcagaaaaaatcagacacttcagggaatttttagattcttggagaaaatttcatgatgctcttcataagaaccacaaagatgtcacagactctttttatccagcaatgagactaattcttcctcagctagaaagagagagaatggcctatggaattaaagaaactatgcttgctaagctttatattgagttgcttaatttacctagagatggaaaagatgccctcaaacttttaaactacagaacacccactggaactcatggagatgctggagactttgcaatgattgcatattttgtgttgaagccaagatgtttacagaaaggaagtttaaccatacagcaagtaaacgaccttttagactcaattgccagcaataattctgctaaaagaaaagacctaataaaaaagagccttcttcaacttataactcagagttcagcacttgagcaaaagtggcttatacggatgatcataaaggatttaaagcttggtgttagtcagcaaactatcttttctgtttttcataatgatgctgctgagttgcataatgtcactacagatctggaaaaagtctgtaggcaactgcatgatccttctgtaggactcagtgatatttctatcactttattttctgcatttaaaccaatgctagctgctattgcagatattgagcacattgagaaggatatgaaacatcagagtttctacatagaaaccaagctagatggtgaacgtatgcaaatgcacaaagatggagatgtatataaatacttctctcgaaatggatataactacactgatcagtttggtgcttctcctactgaaggttctcttaccccattcattcataatgcattcaaagcagatatacaaatctgtattcttgatggtgagatgatggcctataatcctaatacacaaactttcatgcaaaagggaactaagtttgatattaaaagaatggtagaggattctgatctgcaaacttgttattgtgtttttgatgtattgatggttaataataaaaagctagggcatgagactctgagaaagaggtatgagattcttagtagtatttttacaccaattccaggtagaatagaaatagtgcagaaaacacaagctcatactaagaatgaagtaattgatgcattgaatgaagcaatagataaaagagaagagggaattatggtaaaacaacctctatccatctacaagccagacaaaagaggtgaagggtggttaaaaattaaaccagagtatgtcagtggactaatggatgaattggacattttaattgttggaggatattggggtaaaggatcacggggtggaatgatgtctcattttctgtgtgcagtagcagagaagccccctcctggtgagaagccatctgtgtttcatactctctctcgtgttgggtctggctgcaccatgaaagaactgtatgatctgggtttgaaattggccaagtattggaagccttttcatagaaaagctccaccaagcagcattttatgtggaacagagaagccagaagtatacattgaaccttgtaattctgtcattgttcagattaaagcagcagagatcgtacccagtgatatgtataaaactggctgcaccttgcgttttccacgaattgaaaagataagagatgacaaggagtggcatgagtgcatgaccctggacgacctagaacaacttagggggaaggcatctggtaagctcgcatctaaacacctttatataggtggtgatgatgaaccacaagaaaaaaagcggaaagctgccccaaagatgaagaaagttattggaattattgagcacttaaaagcacctaaccttactaacgttaacaaaatttctaatatatttgaagatgtagagttttgtgttatgagtggaacagatagccagccaaagcctgacctggagaacagaattgcagaatttggtggttatatagtacaaaatccaggcccagacacgtactgtgtaattgcagggtctgagaacatcagagtgaaaaacataattttgtcaaataaacatgatgttgtcaagcctgcatggcttttagaatgttttaagaccaaaagctttgtaccatggcagcctcgctttatgattcatatgtgcccatcaaccaaagaacattttgcccgtgaatatgattgctatggtgatagttatttcattgatacagacttgaaccaactgaaggaagtattctcaggaattaaaaattctaacgagcagactcctgaagaaatggcttctctgattgctgatttagaatatcggtattcctgggattgctctcctctcagtatgtttcgacgccacaccgtttatttggactcgtatgctgttattaatgacctgagtaccaaaaatgaggggacaaggttagctattaaagccttggagcttcggtttcatggagcaaaagtagtttcttgtttagctgagggagtgtctcatgtaataattggggaagatcatagtcgtgttgcagattttaaagcttttagaagaacttttaagagaaagtttaaaatcctaaaagaaagttgggtaactgattcaatagacaagtgtgaattacaagaagaaaaccagtatttgatttaaagctaggtttcctagtgaggaaagcctctgatctggcagactcattgcagcaggtggtaatgataaaatactaaactacattttatttttgtatcttaaaaatctatgcctaaaaagtatcattacatataggaaaacaataattttaacttttaaggttgaaaagacaatagcccaaagccaagaaagaaaaattatcttgaatgtagtattcaatgattttttatgatcaaggtgaaataaacagtctaaagaagaggtgtttttataatatccatatagaaatctagaatttttacttagatactaataaaatacatttagaaacttttaaagtcatgaaaaagcattaaccttctaaacagtatattctaaaaagtcaaaacgttaacaatagtttttatctaataaaagcactgcaagaaaatagggtagaattgttacagctggacttgtaaaaatatgtctttttactcagggtttaaaatgtcccatttaaatatgaaatgtaaacaaatttgttttttaaggttaaggccaaatgtaacaataaaaccctgtcgatggttttagctaaattagaggaagttgtatgagacttaatgatctaaaaacttaaaattgaattggtttgattaaaaataaagcttgcaattttaaaagtagctcacatttaatttcttgtgtgaaatagaacatgctttaaaggaagtatttttatgtgaatttgcattccagtataaatagtattcacaaaaaagattttcctagattttatctattgaataggtgtcaatatggcatgcatattgtaactttcattagaaataagttgctttgacttttaaaaatgacatagttagattatttaaagtcaatgtatatagtatatattatgtatggatttatataccaaattttggaatacagcctatctcatgaccatattgaaatgtacggaatttgatccatgcgatactatgtgtgcattatttgaaagttattggaaattttattcaaaccgtggaacaaatgtatgtgattttgttatacttcttaatttaaataaaatatttaatgcactatt

SEQ ID NO: 149062 - DNA, 4065 bp, Homo sapiens
  Payload ID: 9441
  Gene Symbol: LIG4
  Gene Name: ligase IV, DNA, ATP-dependent
  Uniprot ID: P49917
  ENST ID: ENST00000405925
  CDS Start-End: 236-2971
gccagtgagcccccgcgacggtggcccggacggaaaagatacctcggcggcgtgggcccggctccctgctccaggacctagggatcttggccttccaccctcctccgagcaccaggactccctccagttccgtacccgaggcctccgtggtgaagaggtgccggacccgatgagctcgggagtccaccatcgctctgcaagccgcagttaaacgagaagattcatcaccgctttgatggctgcctcacaaacttcacaaactgttgcatctcacgttccttttgcagatttgtgttcaactttagaacgaatacagaaaagtaaaggacgtgcagaaaaaatcagacacttcagggaatttttagattcttggagaaaatttcatgatgctcttcataagaaccacaaagatgtcacagactctttttatccagcaatgagactaattcttcctcagctagaaagagagagaatggcctatggaattaaagaaactatgcttgctaagctttatattgagttgcttaatttacctagagatggaaaagatgccctcaaacttttaaactacagaacacccactggaactcatggagatgctggagactttgcaatgattgcatattttgtgttgaagccaagatgtttacagaaaggaagtttaaccatacagcaagtaaacgaccttttagactcaattgccagcaataattctgctaaaagaaaagacctaataaaaaagagccttcttcaacttataactcagagttcagcacttgagcaaaagtggcttatacggatgatcataaaggatttaaagcttggtgttagtcagcaaactatcttttctgtttttcataatgatgctgctgagttgcataatgtcactacagatctggaaaaagtctgtaggcaactgcatgatccttctgtaggactcagtgatatttctatcactttattttctgcatttaaaccaatgctagctgctattgcagatattgagcacattgagaaggatatgaaacatcagagtttctacatagaaaccaagctagatggtgaacgtatgcaaatgcacaaagatggagatgtatataaatacttctctcgaaatggatataactacactgatcagtttggtgcttctcctactgaaggttctcttaccccattcattcataatgcattcaaagcagatatacaaatctgtattcttgatggtgagatgatggcctataatcctaatacacaaactttcatgcaaaagggaactaagtttgatattaaaagaatggtagaggattctgatctgcaaacttgttattgtgtttttgatgtattgatggttaataataaaaagctagggcatgagactctgagaaagaggtatgagattcttagtagtatttttacaccaattccaggtagaatagaaatagtgcagaaaacacaagctcatactaagaatgaagtaattgatgcattgaatgaagcaatagataaaagagaagagggaattatggtaaaacaacctctatccatctacaagccagacaaaagaggtgaagggtggttaaaaattaaaccagagtatgtcagtggactaatggatgaattggacattttaattgttggaggatattggggtaaaggatcacggggtggaatgatgtctcattttctgtgtgcagtagcagagaagccccctcctggtgagaagccatctgtgtttcatactctctctcgtgttgggtctggctgcaccatgaaagaactgtatgatctgggtttgaaattggccaagtattggaagccttttcatagaaaagctccaccaagcagcattttatgtggaacagagaagccagaagtatacattgaaccttgtaattctgtcattgttcagattaaagcagcagagatcgtacccagtgatatgtataaaactggctgcaccttgcgttttccacgaattgaaaagataagagatgacaaggagtggcatgagtgcatgaccctggacgacctagaacaacttagggggaaggcatctggtaagctcgcatctaaacacctttatataggtggtgatgatgaaccacaagaaaaaaagcggaaagctgccccaaagatgaagaaagttattggaattattgagcacttaaaagcacctaaccttactaacgttaacaaaatttctaatatatttgaagatgtagagttttgtgttatgagtggaacagatagccagccaaagcctgacctggagaacagaattgcagaatttggtggttatatagtacaaaatccaggcccagacacgtactgtgtaattgcagggtctgagaacatcagagtgaaaaacataattttgtcaaataaacatgatgttgtcaagcctgcatggcttttagaatgttttaagaccaaaagctttgtaccatggcagcctcgctttatgattcatatgtgcccatcaaccaaagaacattttgcccgtgaatatgattgctatggtgatagttatttcattgatacagacttgaaccaactgaaggaagtattctcaggaattaaaaattctaacgagcagactcctgaagaaatggcttctctgattgctgatttagaatatcggtattcctgggattgctctcctctcagtatgtttcgacgccacaccgtttatttggactcgtatgctgttattaatgacctgagtaccaaaaatgaggggacaaggttagctattaaagccttggagcttcggtttcatggagcaaaagtagtttcttgtttagctgagggagtgtctcatgtaataattggggaagatcatagtcgtgttgcagattttaaagcttttagaagaacttttaagagaaagtttaaaatcctaaaagaaagttgggtaactgattcaatagacaagtgtgaattacaagaagaaaaccagtatttgatttaaagctaggtttcctagtgaggaaagcctctgatctggcagactcattgcagcaggtggtaatgataaaatactaaactacattttatttttgtatcttaaaaatctatgcctaaaaagtatcattacatataggaaaacaataattttaacttttaaggttgaaaagacaatagcccaaagccaagaaagaaaaattatcttgaatgtagtattcaatgattttttatgatcaaggtgaaataaacagtctaaagaagaggtgtttttataatatccatatagaaatctagaatttttacttagatactaataaaatacatttagaaacttttaaagtcatgaaaaagcattaaccttctaaacagtatattctaaaaagtcaaaacgttaacaatagtttttatctaataaaagcactgcaagaaaatagggtagaattgttacagctggacttgtaaaaatatgtctttttactcagggtttaaaatgtcccatttaaatatgaaatgtaaacaaatttgttttttaaggttaaggccaaatgtaacaataaaaccctgtcgatggttttagctaaattagaggaagttgtatgagacttaatgatctaaaaacttaaaattgaattggtttgattaaaaataaagcttgcaattttaaaagtagctcacatttaatttcttgtgtgaaatagaacatgctttaaaggaagtatttttatgtgaatttgcattccagtataaatagtattcacaaaaaagattttcctagattttatctattgaataggtgtcaatatggcatgcatattgtaactttcattagaaataagttgctttgacttttaaaaatgacatagttagattatttaaagtcaatgtatatagtatatattatgtatggatttatataccaaattttggaatacagcctatctcatgaccatattgaaatgtacggaatttgatccatgcgatactatgtgtgcattatttgaaagttattggaaattttattcaaaccgtggaacaaatgtatgtgattttgttatacttcttaatttaaataaaatatttaatgcactattaaaataa

SEQ ID NO: 149063 - DNA, 3982 bp, Homo sapiens
  Payload ID: 9441
  Gene Symbol: LIG4
  Gene Name: ligase IV, DNA, ATP-dependent
  Uniprot ID: P49917
  ENST ID: ENST00000442234
  CDS Start-End: 153-2888
cttctggcgccagcttccggcttagcggctgagcttcaggcttgacgtcaggaaaccatcaagatctcattttacagctgggattctctggttcacagaggtaacggagcttgcccgaggccagttaaacgagaagattcatcaccgctttgatggctgcctcacaaacttcacaaactgttgcatctcacgttccttttgcagatttgtgttcaactttagaacgaatacagaaaagtaaaggacgtgcagaaaaaatcagacacttcagggaatttttagattcttggagaaaatttcatgatgctcttcataagaaccacaaagatgtcacagactctttttatccagcaatgagactaattcttcctcagctagaaagagagagaatggcctatggaattaaagaaactatgcttgctaagctttatattgagttgcttaatttacctagagatggaaaagatgccctcaaacttttaaactacagaacacccactggaactcatggagatgctggagactttgcaatgattgcatattttgtgttgaagccaagatgtttacagaaaggaagtttaaccatacagcaagtaaacgaccttttagactcaattgccagcaataattctgctaaaagaaaagacctaataaaaaagagccttcttcaacttataactcagagttcagcacttgagcaaaagtggcttatacggatgatcataaaggatttaaagcttggtgttagtcagcaaactatcttttctgtttttcataatgatgctgctgagttgcataatgtcactacagatctggaaaaagtctgtaggcaactgcatgatccttctgtaggactcagtgatatttctatcactttattttctgcatttaaaccaatgctagctgctattgcagatattgagcacattgagaaggatatgaaacatcagagtttctacatagaaaccaagctagatggtgaacgtatgcaaatgcacaaagatggagatgtatataaatacttctctcgaaatggatataactacactgatcagtttggtgcttctcctactgaaggttctcttaccccattcattcataatgcattcaaagcagatatacaaatctgtattcttgatggtgagatgatggcctataatcctaatacacaaactttcatgcaaaagggaactaagtttgatattaaaagaatggtagaggattctgatctgcaaacttgttattgtgtttttgatgtattgatggttaataataaaaagctagggcatgagactctgagaaagaggtatgagattcttagtagtatttttacaccaattccaggtagaatagaaatagtgcagaaaacacaagctcatactaagaatgaagtaattgatgcattgaatgaagcaatagataaaagagaagagggaattatggtaaaacaacctctatccatctacaagccagacaaaagaggtgaagggtggttaaaaattaaaccagagtatgtcagtggactaatggatgaattggacattttaattgttggaggatattggggtaaaggatcacggggtggaatgatgtctcattttctgtgtgcagtagcagagaagccccctcctggtgagaagccatctgtgtttcatactctctctcgtgttgggtctggctgcaccatgaaagaactgtatgatctgggtttgaaattggccaagtattggaagccttttcatagaaaagctccaccaagcagcattttatgtggaacagagaagccagaagtatacattgaaccttgtaattctgtcattgttcagattaaagcagcagagatcgtacccagtgatatgtataaaactggctgcaccttgcgttttccacgaattgaaaagataagagatgacaaggagtggcatgagtgcatgaccctggacgacctagaacaacttagggggaaggcatctggtaagctcgcatctaaacacctttatataggtggtgatgatgaaccacaagaaaaaaagcggaaagctgccccaaagatgaagaaagttattggaattattgagcacttaaaagcacctaaccttactaacgttaacaaaatttctaatatatttgaagatgtagagttttgtgttatgagtggaacagatagccagccaaagcctgacctggagaacagaattgcagaatttggtggttatatagtacaaaatccaggcccagacacgtactgtgtaattgcagggtctgagaacatcagagtgaaaaacataattttgtcaaataaacatgatgttgtcaagcctgcatggcttttagaatgttttaagaccaaaagctttgtaccatggcagcctcgctttatgattcatatgtgcccatcaaccaaagaacattttgcccgtgaatatgattgctatggtgatagttatttcattgatacagacttgaaccaactgaaggaagtattctcaggaattaaaaattctaacgagcagactcctgaagaaatggcttctctgattgctgatttagaatatcggtattcctgggattgctctcctctcagtatgtttcgacgccacaccgtttatttggactcgtatgctgttattaatgacctgagtaccaaaaatgaggggacaaggttagctattaaagccttggagcttcggtttcatggagcaaaagtagtttcttgtttagctgagggagtgtctcatgtaataattggggaagatcatagtcgtgttgcagattttaaagcttttagaagaacttttaagagaaagtttaaaatcctaaaagaaagttgggtaactgattcaatagacaagtgtgaattacaagaagaaaaccagtatttgatttaaagctaggtttcctagtgaggaaagcctctgatctggcagactcattgcagcaggtggtaatgataaaatactaaactacattttatttttgtatcttaaaaatctatgcctaaaaagtatcattacatataggaaaacaataattttaacttttaaggttgaaaagacaatagcccaaagccaagaaagaaaaattatcttgaatgtagtattcaatgattttttatgatcaaggtgaaataaacagtctaaagaagaggtgtttttataatatccatatagaaatctagaatttttacttagatactaataaaatacatttagaaacttttaaagtcatgaaaaagcattaaccttctaaacagtatattctaaaaagtcaaaacgttaacaatagtttttatctaataaaagcactgcaagaaaatagggtagaattgttacagctggacttgtaaaaatatgtctttttactcagggtttaaaatgtcccatttaaatatgaaatgtaaacaaatttgttttttaaggttaaggccaaatgtaacaataaaaccctgtcgatggttttagctaaattagaggaagttgtatgagacttaatgatctaaaaacttaaaattgaattggtttgattaaaaataaagcttgcaattttaaaagtagctcacatttaatttcttgtgtgaaatagaacatgctttaaaggaagtatttttatgtgaatttgcattccagtataaatagtattcacaaaaaagattttcctagattttatctattgaataggtgtcaatatggcatgcatattgtaactttcattagaaataagttgctttgacttttaaaaatgacatagttagattatttaaagtcaatgtatatagtatatattatgtatggatttatataccaaattttggaatacagcctatctcatgaccatattgaaatgtacggaatttgatccatgcgatactatgtgtgcattatttgaaagttattggaaattttattcaaaccgtggaacaaatgtatgtgattttgttatacttcttaatttaaataaaatatttaatgcactattaaaataa

SEQ ID NO: 149064 - DNA, 3884 bp, Homo sapiens
  Payload ID: 9441
  Gene Symbol: LIG4
  Gene Name: ligase IV, DNA, ATP-dependent
  ENST ID: ENST00000614526
  CDS Start-End: 263-2797
agcttccggcttagcggctgagcttcaggcttgacgtcaggaaaccatcaagatctcattttacagctgggattctctggttcacagaggtaacggagcttgcccgaggccagatttgtgttcaactttagaacgaatacagaaaagtaaaggacgtgcagaaaaaatcagacacttcagggaatttttagattcttggagaaaatttcatgatgctcttcataagaaccacaaagatgtcacagactctttttatccagcaatgagactaattcttcctcagctagaaagagagagaatggcctatggaattaaagaaactatgcttgctaagctttatattgagttgcttaatttacctagagatggaaaagatgccctcaaacttttaaactacagaacacccactggaactcatggagatgctggagactttgcaatgattgcatattttgtgttgaagccaagatgtttacagaaaggaagtttaaccatacagcaagtaaacgaccttttagactcaattgccagcaataattctgctaaaagaaaagacctaataaaaaagagccttcttcaacttataactcagagttcagcacttgagcaaaagtggcttatacggatgatcataaaggatttaaagcttggtgttagtcagcaaactatcttttctgtttttcataatgatgctgctgagttgcataatgtcactacagatctggaaaaagtctgtaggcaactgcatgatccttctgtaggactcagtgatatttctatcactttattttctgcatttaaaccaatgctagctgctattgcagatattgagcacattgagaaggatatgaaacatcagagtttctacatagaaaccaagctagatggtgaacgtatgcaaatgcacaaagatggagatgtatataaatacttctctcgaaatggatataactacactgatcagtttggtgcttctcctactgaaggttctcttaccccattcattcataatgcattcaaagcagatatacaaatctgtattcttgatggtgagatgatggcctataatcctaatacacaaactttcatgcaaaagggaactaagtttgatattaaaagaatggtagaggattctgatctgcaaacttgttattgtgtttttgatgtattgatggttaataataaaaagctagggcatgagactctgagaaagaggtatgagattcttagtagtatttttacaccaattccaggtagaatagaaatagtgcagaaaacacaagctcatactaagaatgaagtaattgatgcattgaatgaagcaatagataaaagagaagagggaattatggtaaaacaacctctatccatctacaagccagacaaaagaggtgaagggtggttaaaaattaaaccagagtatgtcagtggactaatggatgaattggacattttaattgttggaggatattggggtaaaggatcacggggtggaatgatgtctcattttctgtgtgcagtagcagagaagccccctcctggtgagaagccatctgtgtttcatactctctctcgtgttgggtctggctgcaccatgaaagaactgtatgatctgggtttgaaattggccaagtattggaagccttttcatagaaaagctccaccaagcagcattttatgtggaacagagaagccagaagtatacattgaaccttgtaattctgtcattgttcagattaaagcagcagagatcgtacccagtgatatgtataaaactggctgcaccttgcgttttccacgaattgaaaagataagagatgacaaggagtggcatgagtgcatgaccctggacgacctagaacaacttagggggaaggcatctggtaagctcgcatctaaacacctttatataggtggtgatgatgaaccacaagaaaaaaagcggaaagctgccccaaagatgaagaaagttattggaattattgagcacttaaaagcacctaaccttactaacgttaacaaaatttctaatatatttgaagatgtagagttttgtgttatgagtggaacagatagccagccaaagcctgacctggagaacagaattgcagaatttggtggttatatagtacaaaatccaggcccagacacgtactgtgtaattgcagggtctgagaacatcagagtgaaaaacataattttgtcaaataaacatgatgttgtcaagcctgcatggcttttagaatgttttaagaccaaaagctttgtaccatggcagcctcgctttatgattcatatgtgcccatcaaccaaagaacattttgcccgtgaatatgattgctatggtgatagttatttcattgatacagacttgaaccaactgaaggaagtattctcaggaattaaaaattctaacgagcagactcctgaagaaatggcttctctgattgctgatttagaatatcggtattcctgggattgctctcctctcagtatgtttcgacgccacaccgtttatttggactcgtatgctgttattaatgacctgagtaccaaaaatgaggggacaaggttagctattaaagccttggagcttcggtttcatggagcaaaagtagtttcttgtttagctgagggagtgtctcatgtaataattggggaagatcatagtcgtgttgcagattttaaagcttttagaagaacttttaagagaaagtttaaaatcctaaaagaaagttgggtaactgattcaatagacaagtgtgaattacaagaagaaaaccagtatttgatttaaagctaggtttcctagtgaggaaagcctctgatctggcagactcattgcagcaggtggtaatgataaaatactaaactacattttatttttgtatcttaaaaatctatgcctaaaaagtatcattacatataggaaaacaataattttaacttttaaggttgaaaagacaatagcccaaagccaagaaagaaaaattatcttgaatgtagtattcaatgattttttatgatcaaggtgaaataaacagtctaaagaagaggtgtttttataatatccatatagaaatctagaatttttacttagatactaataaaatacatttagaaacttttaaagtcatgaaaaagcattaaccttctaaacagtatattctaaaaagtcaaaacgttaacaatagtttttatctaataaaagcactgcaagaaaatagggtagaattgttacagctggacttgtaaaaatatgtctttttactcagggtttaaaatgtcccatttaaatatgaaatgtaaacaaatttgttttttaaggttaaggccaaatgtaacaataaaaccctgtcgatggttttagctaaattagaggaagttgtatgagacttaatgatctaaaaacttaaaattgaattggtttgattaaaaataaagcttgcaattttaaaagtagctcacatttaatttcttgtgtgaaatagaacatgctttaaaggaagtatttttatgtgaatttgcattccagtataaatagtattcacaaaaaagattttcctagattttatctattgaataggtgtcaatatggcatgcatattgtaactttcattagaaataagttgctttgacttttaaaaatgacatagttagattatttaaagtcaatgtatatagtatatattatgtatggatttatataccaaattttggaatacagcctatctcatgaccatattgaaatgtacggaatttgatccatgcgatactatgtgtgcattatttgaaagttattggaaattttattcaaaccgtggaacaaatgtatgtgattttgttatacttcttaatttaaataaaatatttaatgcactatt

SEQ ID NO: 149065 - DNA, 4180 bp, Homo sapiens
  Payload ID: 9441
  Gene Symbol: LIG4
  Gene Name: ligase IV, DNA, ATP-dependent
  Uniprot ID: P49917
  ENST ID: ENST00000611712
  CDS Start-End: 351-3086
tcttctggcgccagcttccggcttagcggctgagcttcaggcttgacgtcagcggcaggtgatgggagttgccgagtccacagcgctgtagactgcgccgcattagaagcctggcctcctgatgctgtgctcttcatctagacccaagccccaggtcgtgggacgatttctcccgtttttgactccctggaactgtattgcctgctttacctgcgtacatgttgattctttctcatggcaaccccgcaggaaaccatcaagatctcattttacagctgggattctctggttcacagaggtaacggagcttgcccgaggccagttaaacgagaagattcatcaccgctttgatggctgcctcacaaacttcacaaactgttgcatctcacgttccttttgcagatttgtgttcaactttagaacgaatacagaaaagtaaaggacgtgcagaaaaaatcagacacttcagggaatttttagattcttggagaaaatttcatgatgctcttcataagaaccacaaagatgtcacagactctttttatccagcaatgagactaattcttcctcagctagaaagagagagaatggcctatggaattaaagaaactatgcttgctaagctttatattgagttgcttaatttacctagagatggaaaagatgccctcaaacttttaaactacagaacacccactggaactcatggagatgctggagactttgcaatgattgcatattttgtgttgaagccaagatgtttacagaaaggaagtttaaccatacagcaagtaaacgaccttttagactcaattgccagcaataattctgctaaaagaaaagacctaataaaaaagagccttcttcaacttataactcagagttcagcacttgagcaaaagtggcttatacggatgatcataaaggatttaaagcttggtgttagtcagcaaactatcttttctgtttttcataatgatgctgctgagttgcataatgtcactacagatctggaaaaagtctgtaggcaactgcatgatccttctgtaggactcagtgatatttctatcactttattttctgcatttaaaccaatgctagctgctattgcagatattgagcacattgagaaggatatgaaacatcagagtttctacatagaaaccaagctagatggtgaacgtatgcaaatgcacaaagatggagatgtatataaatacttctctcgaaatggatataactacactgatcagtttggtgcttctcctactgaaggttctcttaccccattcattcataatgcattcaaagcagatatacaaatctgtattcttgatggtgagatgatggcctataatcctaatacacaaactttcatgcaaaagggaactaagtttgatattaaaagaatggtagaggattctgatctgcaaacttgttattgtgtttttgatgtattgatggttaataataaaaagctagggcatgagactctgagaaagaggtatgagattcttagtagtatttttacaccaattccaggtagaatagaaatagtgcagaaaacacaagctcatactaagaatgaagtaattgatgcattgaatgaagcaatagataaaagagaagagggaattatggtaaaacaacctctatccatctacaagccagacaaaagaggtgaagggtggttaaaaattaaaccagagtatgtcagtggactaatggatgaattggacattttaattgttggaggatattggggtaaaggatcacggggtggaatgatgtctcattttctgtgtgcagtagcagagaagccccctcctggtgagaagccatctgtgtttcatactctctctcgtgttgggtctggctgcaccatgaaagaactgtatgatctgggtttgaaattggccaagtattggaagccttttcatagaaaagctccaccaagcagcattttatgtggaacagagaagccagaagtatacattgaaccttgtaattctgtcattgttcagattaaagcagcagagatcgtacccagtgatatgtataaaactggctgcaccttgcgttttccacgaattgaaaagataagagatgacaaggagtggcatgagtgcatgaccctggacgacctagaacaacttagggggaaggcatctggtaagctcgcatctaaacacctttatataggtggtgatgatgaaccacaagaaaaaaagcggaaagctgccccaaagatgaagaaagttattggaattattgagcacttaaaagcacctaaccttactaacgttaacaaaatttctaatatatttgaagatgtagagttttgtgttatgagtggaacagatagccagccaaagcctgacctggagaacagaattgcagaatttggtggttatatagtacaaaatccaggcccagacacgtactgtgtaattgcagggtctgagaacatcagagtgaaaaacataattttgtcaaataaacatgatgttgtcaagcctgcatggcttttagaatgttttaagaccaaaagctttgtaccatggcagcctcgctttatgattcatatgtgcccatcaaccaaagaacattttgcccgtgaatatgattgctatggtgatagttatttcattgatacagacttgaaccaactgaaggaagtattctcaggaattaaaaattctaacgagcagactcctgaagaaatggcttctctgattgctgatttagaatatcggtattcctgggattgctctcctctcagtatgtttcgacgccacaccgtttatttggactcgtatgctgttattaatgacctgagtaccaaaaatgaggggacaaggttagctattaaagccttggagcttcggtttcatggagcaaaagtagtttcttgtttagctgagggagtgtctcatgtaataattggggaagatcatagtcgtgttgcagattttaaagcttttagaagaacttttaagagaaagtttaaaatcctaaaagaaagttgggtaactgattcaatagacaagtgtgaattacaagaagaaaaccagtatttgatttaaagctaggtttcctagtgaggaaagcctctgatctggcagactcattgcagcaggtggtaatgataaaatactaaactacattttatttttgtatcttaaaaatctatgcctaaaaagtatcattacatataggaaaacaataattttaacttttaaggttgaaaagacaatagcccaaagccaagaaagaaaaattatcttgaatgtagtattcaatgattttttatgatcaaggtgaaataaacagtctaaagaagaggtgtttttataatatccatatagaaatctagaatttttacttagatactaataaaatacatttagaaacttttaaagtcatgaaaaagcattaaccttctaaacagtatattctaaaaagtcaaaacgttaacaatagtttttatctaataaaagcactgcaagaaaatagggtagaattgttacagctggacttgtaaaaatatgtctttttactcagggtttaaaatgtcccatttaaatatgaaatgtaaacaaatttgttttttaaggttaaggccaaatgtaacaataaaaccctgtcgatggttttagctaaattagaggaagttgtatgagacttaatgatctaaaaacttaaaattgaattggtttgattaaaaataaagcttgcaattttaaaagtagctcacatttaatttcttgtgtgaaatagaacatgctttaaaggaagtatttttatgtgaatttgcattccagtataaatagtattcacaaaaaagattttcctagattttatctattgaataggtgtcaatatggcatgcatattgtaactttcattagaaataagttgctttgacttttaaaaatgacatagttagattatttaaagtcaatgtatatagtatatattatgtatggatttatataccaaattttggaatacagcctatctcatgaccatattgaaatgtacggaatttgatccatgcgatactatgtgtgcattatttgaaagttattggaaattttattcaaaccgtggaacaaatgtatgtgattttgttatacttcttaatttaaataaaatatttaatgcactattaaaataa

SEQ ID NO: 149066 - DNA, 4409 bp, Homo sapiens
  Payload ID: 9442
  Gene Symbol: LARGE
  Gene Name: like-glycosyltransferase
  Uniprot ID: O95461
  ENST ID: ENST00000354992
  CDS Start-End: 573-2843
cggccgcgctcgtctcgccgggctgttcgcgggcaggccctgccctgaagggacgaatcggcttggagcgcgggaggtggagtcggccccggcggtcgctccctggacccaacccgaggctgacccaggcccctgcccatgcggggcgcccctggctcggaagagtcccccgggccgggagcagctccaggcagcggccccggaggaagaggaagaagggacagtgctcagcttgggggacccggaccctcgccgcggcatttggagccgggggcagtcccgaactctgtgcttggcaccgccgctccgagtagggcagcgcctgccgggaccctgacccggaccccctgcgcctcgtaggcggcggcgccgccgcgccaccctgttcttccgtgtctccctctgcctggcggcagtcacggccaagaacctacattaagaaacgcattcagatgcatcagccgtttgtaaagcacctgtcgtgagccagagagtattatgagggaggccgaggacttcatgctccggacagagaaacggcgctgggattagggattgccacttctgagaggatgctgggaatctgcagggggagacggaaattcttggctgcctcgttgagtcttctctgcatcccagccatcacctggatttacctgttttctgggagcttcgaagatggaaagcccgtgtctctgtcaccgctggagtcccaggcacacagccccaggtacacggcctccagccagcgggagcgcgagagcctggaggtgcgcatgcgcgaggtggaggaggagaaccgcgccctccgcaggcagctcagcctggcccagggccgagccccatcccatcgccgaggcaaccactccaagacctactccatggaggagggcactggagacagcgagaaccttcgggctggcatcgtggcaggcaacagctccgagtgtgggcagcagccggtcgtggagaaatgcgagacaatccacgttgctattgtctgcgccggatacaatgccagccgggatgtcgtcaccctggtcaaatccgtcctgttccatagacggaaccctctgcacttccaccttattgctgactccattgcggagcagatcctggccacgctcttccagacctggatggtgcccgctgtgcgtgtggacttctacaatgcagacgagctcaagtctgaagtttcctggatccccaataaacattactctgggatttatggtctgatgaagcttgtcctgaccaagactcttcctgccaacctggagagagtcatcgtccttgacacggatatcacctttgccactgacattgcagagctgtgggctgtgttccacaagttcaaaggtcagcaagtcctgggcttggtggagaaccagagtgactggtaccttggaaacctgtggaaaaatcaccgcccatggccagcccttggaagaggctacaacacaggggtgatcctgttacttctggataagctgcggaagatgaaatgggagcagatgtggaggctgaccgcagagagggagctcatgggcatgctctctacatccttagctgaccaggatattttcaatgccgtcatcaaacaaaaccccttccttgtgtaccagctcccctgcttctggaatgtgcagctgtcagaccacacccgctccgagcagtgctacagagacgtgtctgatctaaaggtcattcactggaactcccccaagaagctccgggtgaagaacaagcatgtggagttttttcgcaacctctacctgaccttcctggagtatgacggcaatcttctgaggcgggaactgtttggctgccccagtgaggctgatgtcaacagtgaaaacctccagaagcagctgtctgagctggacgaggacgacctgtgctatgagttccggcgagagcgcttcactgtccaccgcacccacctgtacttcctgcactacgagtatgagcctgcagcagacagcacggacgtcaccctggtcgctcagctgtccatggacaggctccagatgctggaggccatctgcaagcactgggaggggcccatcagcctggccctctacctgtcagacgccgaggcccagcagttcctccgctacgcacagggctctgaggtgcttatgagccgccacaacgtgggctaccacatcgtgtacaaggagggccagttctaccccgtgaacctgctgcgcaacgtggccatgaagcacatcagcactccctacatgttcctgtctgacattgacttcctgcccatgtatgggctctatgagtacctcaggaagtctgtcatccagctcgatcttgccaacaccaagaaagcaatgattgtccccgcgttcgagacactgcgctaccggctgtccttccccaagtcaaaagcggagttgctgtcaatgctggacatggggaccctcttcacattcaggtaccacgtctggacgaaaggccacgcacccacaaacttcgccaagtggcggaccgccaccacgccttaccgggttgagtgggaggccgattttgagccgtatgttgttgtgagacgtgactgcccggagtacgaccggaggtttgtaggctttggctggaacaaagtggctcatatcatggagctggatgtgcaggagtatgagttcattgtgctgcccaacgcctacatgatccacatgcctcatgcccccagcttcgacattaccaagttccgttccaacaagcaataccgcatctgtctcaaaaccctcaaggaagagtttcagcaggacatgtcccgccgctacggctttgctgccctgaaatatctcacagccgagaacaacagctagcaccaagaagcccaccactagggggagacatgctgtaggggaagtgccactcgctgtttggggcccggccttcaaattcaaaattgagccatgctttttcggtttgtttttatttatctctttggcccagccaagctgccctcactacagagaccttggacaaggatccagccagtccctctctgccccacaaccctgcattcccagaggttagctatgcagcccacctagatgagtctcttcaagaatgggaaatcaaggggtgacagggagtaaaagggttatcatcttactgcaaagccacaagatcagggcagggctttaggatgttctggatgctttttaataattatgcttcccatcataactggggagaaagggaagtcagggttctaggggttattcgtcccaggaaatagaagtgaaattgtctttattaagtgaaaactttcccctttgccctgcaatgtagctgggcattcaaacggagggcaaaccgatgatctaaaccaaccacttggaaaaacccaatggggacattgtaaccagagggtcctggaggtggggttgatgggtttccttatccccaaagtcactcctgttttgttttgtttttctttgggggttttgtttatttttggggctggcaatccaaaatagaaaatctgatcctttgaggctctaaaggaaaatcagctgcctctaccaaccaccctctatcagcagtggcccaggaaggaggtcaagcatcttcggccgatatttaaacatgggcagcttccttcaggatgatcaccgaggctcccgtgactttgaactccctactctccagaatccaggggctatagcgatggggactgcggaattacgagggctggctgttttacaccggtcacattttctattggcagtgactgattcatgggaaagggctttgaaggaactacttcagtgcacacacaaggtacgaacctctcaggcctttcgaagaactttcataattcatgaaagcccagttctgaagattcacgtatccatctggagacctacaggaagaaagtgattgggttcctctggttcttgcctgcttcactgtggatgggaagaggtgacaacctcagtctccctttgggacctgtccaagggtaggcaaccaccttcaccttcacacagattgaggagacactggactttttacccattttctttaatcttcaatattaatattgtgtttacattgatgagaacaagagttaatgccctaccctctgctgggctgtttgtattgagttgcaatgtgaccagcgaaagctgcatttaataaatgaaagtacagactgtttcttccccattcccctcccactcttgcaggaagctactgagacacaccttgacatagagagctaaattgcagtggataaacagcaacttcacactttctgttcccccattctatttttctcatcatttgaactttagccttttttttccccttttgcctgaagttagatcccactctgtctctaactcaaaccatcttcaagttttccattccgcatctttctc

SEQ ID NO: 149067 - DNA, 4138 bp, Homo sapiens
  Payload ID: 9442
  Gene Symbol: LARGE
  Gene Name: like-glycosyltransferase
  Uniprot ID: O95461
  ENST ID: ENST00000397394
  CDS Start-End: 517-2787
gggggcgcggccgcgctcgtctcgccgggctgttcgcgggcaggccctgccctgaagggacgaatcggcttggagcgcgggaggtggagtcggccccggcggtcgctccctggacccaacccgaggctgacccaggcccctgcccatgcggggcgcccctggctcggaagagtcccccgggccgggagcagctccaggcagcggccccggaggaagaggaagaagggacagtgctcagcttgggggacccggaccctcgccgcggcatttggagccgggggcagtcccgaactctgtgcttggcaccgccgctccgagtagggcagcgcctgccgggaccctgacccggaccccctgcgcctcgtaggcggcggcgccgccgcgccaccctgttcttccgtgtctccctctgcctggcggcagtcacggccaagagagtattatgagggaggccgaggacttcatgctccggacagagaaacggcgctgggattagggattgccacttctgagaggatgctgggaatctgcagggggagacggaaattcttggctgcctcgttgagtcttctctgcatcccagccatcacctggatttacctgttttctgggagcttcgaagatggaaagcccgtgtctctgtcaccgctggagtcccaggcacacagccccaggtacacggcctccagccagcgggagcgcgagagcctggaggtgcgcatgcgcgaggtggaggaggagaaccgcgccctccgcaggcagctcagcctggcccagggccgagccccatcccatcgccgaggcaaccactccaagacctactccatggaggagggcactggagacagcgagaaccttcgggctggcatcgtggcaggcaacagctccgagtgtgggcagcagccggtcgtggagaaatgcgagacaatccacgttgctattgtctgcgccggatacaatgccagccgggatgtcgtcaccctggtcaaatccgtcctgttccatagacggaaccctctgcacttccaccttattgctgactccattgcggagcagatcctggccacgctcttccagacctggatggtgcccgctgtgcgtgtggacttctacaatgcagacgagctcaagtctgaagtttcctggatccccaataaacattactctgggatttatggtctgatgaagcttgtcctgaccaagactcttcctgccaacctggagagagtcatcgtccttgacacggatatcacctttgccactgacattgcagagctgtgggctgtgttccacaagttcaaaggtcagcaagtcctgggcttggtggagaaccagagtgactggtaccttggaaacctgtggaaaaatcaccgcccatggccagcccttggaagaggctacaacacaggggtgatcctgttacttctggataagctgcggaagatgaaatgggagcagatgtggaggctgaccgcagagagggagctcatgggcatgctctctacatccttagctgaccaggatattttcaatgccgtcatcaaacaaaaccccttccttgtgtaccagctcccctgcttctggaatgtgcagctgtcagaccacacccgctccgagcagtgctacagagacgtgtctgatctaaaggtcattcactggaactcccccaagaagctccgggtgaagaacaagcatgtggagttttttcgcaacctctacctgaccttcctggagtatgacggcaatcttctgaggcgggaactgtttggctgccccagtgaggctgatgtcaacagtgaaaacctccagaagcagctgtctgagctggacgaggacgacctgtgctatgagttccggcgagagcgcttcactgtccaccgcacccacctgtacttcctgcactacgagtatgagcctgcagcagacagcacggacgtcaccctggtcgctcagctgtccatggacaggctccagatgctggaggccatctgcaagcactgggaggggcccatcagcctggccctctacctgtcagacgccgaggcccagcagttcctccgctacgcacagggctctgaggtgcttatgagccgccacaacgtgggctaccacatcgtgtacaaggagggccagttctaccccgtgaacctgctgcgcaacgtggccatgaagcacatcagcactccctacatgttcctgtctgacattgacttcctgcccatgtatgggctctatgagtacctcaggaagtctgtcatccagctcgatcttgccaacaccaagaaagcaatgattgtccccgcgttcgagacactgcgctaccggctgtccttccccaagtcaaaagcggagttgctgtcaatgctggacatggggaccctcttcacattcaggtaccacgtctggacgaaaggccacgcacccacaaacttcgccaagtggcggaccgccaccacgccttaccgggttgagtgggaggccgattttgagccgtatgttgttgtgagacgtgactgcccggagtacgaccggaggtttgtaggctttggctggaacaaagtggctcatatcatggagctggatgtgcaggagtatgagttcattgtgctgcccaacgcctacatgatccacatgcctcatgcccccagcttcgacattaccaagttccgttccaacaagcaataccgcatctgtctcaaaaccctcaaggaagagtttcagcaggacatgtcccgccgctacggctttgctgccctgaaatatctcacagccgagaacaacagctagcaccaagaagcccaccactagggggagacatgctgtaggggaagtgccactcgctgtttggggcccggccttcaaattcaaaattgagccatgctttttcggtttgtttttatttatctctttggcccagccaagctgccctcactacagagaccttggacaaggatccagccagtccctctctgccccacaaccctgcattcccagaggttagctatgcagcccacctagatgagtctcttcaagaatgggaaatcaaggggtgacagggagtaaaagggttatcatcttactgcaaagccacaagatcagggcagggctttaggatgttctggatgctttttaataattatgcttcccatcataactggggagaaagggaagtcagggttctaggggttattcgtcccaggaaatagaagtgaaattgtctttattaagtgaaaactttcccctttgccctgcaatgtagctgggcattcaaacggagggcaaaccgatgatctaaaccaaccacttggaaaaacccaatggggacattgtaaccagagggtcctggaggtggggttgatgggtttccttatccccaaagtcactcctgttttgttttgtttttctttgggggttttgtttatttttggggctggcaatccaaaatagaaaatctgatcctttgaggctctaaaggaaaatcagctgcctctaccaaccaccctctatcagcagtggcccaggaaggaggtcaagcatcttcggccgatatttaaacatgggcagcttccttcaggatgatcaccgaggctcccgtgactttgaactccctactctccagaatccaggggctatagcgatggggactgcggaattacgagggctggctgttttacaccggtcacattttctattggcagtgactgattcatgggaaagggctttgaaggaactacttcagtgcacacacaaggtacgaacctctcaggcctttcgaagaactttcataattcatgaaagcccagttctgaagattcacgtatccatctggagacctacaggaagaaagtgattgggttcctctggttcttgcctgcttcactgtggatgggaagaggtgacaacctcagtctccctttgggacctgtccaagggtaggcaaccaccttcaccttcacacagattgaggagacactggactttttacccattttctttaatcttcaatattaatattgtgtttacattgatgagaacaagagttaatgccctaccctctgctgggctgtttgtattgagttgcaatgtgaccagcgaaagctgcatttaataaatgaaagtacagactgtttcttcccca

SEQ ID NO: 149068 - DNA, 3955 bp, Homo sapiens
  Payload ID: 9442
  Gene Symbol: LARGE
  Gene Name: like-glycosyltransferase
  Uniprot ID: O95461
  ENST ID: ENST00000402320
  CDS Start-End: 503-2617
gctcgtctcgccgggctgttcgcgggcaggccctgccctgaagggacgaatcggcttggagcgcgggaggtggagtcggccccggcggtcgctccctggacccaacccgaggctgacccaggcccctgcccatgcggggcgcccctggctcggaagagtcccccgggccgggagcagctccaggcagcggccccggaggaagaggaagaagggacagtgctcagcttgggggacccggaccctcgccgcggcatttggagccgggggcagtcccgaactctgtgcttggcaccgccgctccgagtagggcagcgcctgccgggaccctgacccggaccccctgcgcctcgtaggcggcggcgccgccgcgccaccctgttcttccgtgtctccctctgcctggcggcagtcacggccaagagagtattatgagggaggccgaggacttcatgctccggacagagaaacggcgctgggattagggattgccacttctgagaggatgctgggaatctgcagggggagacggaaattcttggctgcctcgttgagtcttctctgcatcccagccatcacctggatttacctgttttctgggagcttcgaagatggaaagcccgtgtctctgtcaccgctggagtcccaggcacacagccccaggtacacggcctccagccagcgggagcgcgagagcctggaggtgcgcatgcgcgaggtggaggaggagaaccgcgccctccgcaggcagctcagcctggcccagggccgagccccatcccatcgccgaggcaaccactccaagacctactccatggaggagggcactggagacagcgagaaccttcgggctggcatcgtggcaggcaacagctccgagtgtgggcagcagccggtcgtggagaaatgcgagacaatccacgttgctattgtctgcgccggatacaatgccagccgggatgtcgtcaccctggtcaaatccgtcctgttccatagacggaaccctctgcacttccaccttattgctgactccattgcggagcagatcctggccacgctcttccagacctggatggtgcccgctgtgcgtgtggacttctacaatgcagacgagctcaagtctgaagtttcctggatccccaataaacattactctgggatttatggtctgatgaagcttgtcctgaccaagactcttcctgccaacctggagagagtcatcgtccttgacacggatatcacctttgccactgacattgcagagctgtgggctgtgttccacaagttcaaaggtcagcaagtcctgggcttggtggagaaccagagtgactggtaccttggaaacctgtggaaaaatcaccgcccatggccagcccttggaagaggctacaacacaggggtgatcctgttacttctggataagctgcggaagatgaaatgggagcagatgtggaggctgaccgcagagagggagctcatgggcatgctctctacatccttagctgaccaggatattttcaatgccgtcatcaaacaaaaccccttccttgtgtaccagctcccctgcttctggaatgtgcagctgtcagaccacacccgctccgagcagtgctacagagacgtgtctgatctaaagctccagaagcagctgtctgagctggacgaggacgacctgtgctatgagttccggcgagagcgcttcactgtccaccgcacccacctgtacttcctgcactacgagtatgagcctgcagcagacagcacggacgtcaccctggtcgctcagctgtccatggacaggctccagatgctggaggccatctgcaagcactgggaggggcccatcagcctggccctctacctgtcagacgccgaggcccagcagttcctccgctacgcacagggctctgaggtgcttatgagccgccacaacgtgggctaccacatcgtgtacaaggagggccagttctaccccgtgaacctgctgcgcaacgtggccatgaagcacatcagcactccctacatgttcctgtctgacattgacttcctgcccatgtatgggctctatgagtacctcaggaagtctgtcatccagctcgatcttgccaacaccaagaaagcaatgattgtccccgcgttcgagacactgcgctaccggctgtccttccccaagtcaaaagcggagttgctgtcaatgctggacatggggaccctcttcacattcaggtaccacgtctggacgaaaggccacgcacccacaaacttcgccaagtggcggaccgccaccacgccttaccgggttgagtgggaggccgattttgagccgtatgttgttgtgagacgtgactgcccggagtacgaccggaggtttgtaggctttggctggaacaaagtggctcatatcatggagctggatgtgcaggagtatgagttcattgtgctgcccaacgcctacatgatccacatgcctcatgcccccagcttcgacattaccaagttccgttccaacaagcaataccgcatctgtctcaaaaccctcaaggaagagtttcagcaggacatgtcccgccgctacggctttgctgccctgaaatatctcacagccgagaacaacagctagcaccaagaagcccaccactagggggagacatgctgtaggggaagtgccactcgctgtttggggcccggccttcaaattcaaaattgagccatgctttttcggtttgtttttatttatctctttggcccagccaagctgccctcactacagagaccttggacaaggatccagccagtccctctctgccccacaaccctgcattcccagaggttagctatgcagcccacctagatgagtctcttcaagaatgggaaatcaaggggtgacagggagtaaaagggttatcatcttactgcaaagccacaagatcagggcagggctttaggatgttctggatgctttttaataattatgcttcccatcataactggggagaaagggaagtcagggttctaggggttattcgtcccaggaaatagaagtgaaattgtctttattaagtgaaaactttcccctttgccctgcaatgtagctgggcattcaaacggagggcaaaccgatgatctaaaccaaccacttggaaaaacccaatggggacattgtaaccagagggtcctggaggtggggttgatgggtttccttatccccaaagtcactcctgttttgttttgtttttctttgggggttttgtttatttttggggctggcaatccaaaatagaaaatctgatcctttgaggctctaaaggaaaatcagctgcctctaccaaccaccctctatcagcagtggcccaggaaggaggtcaagcatcttcggccgatatttaaacatgggcagcttccttcaggatgatcaccgaggctcccgtgactttgaactccctactctccagaatccaggggctatagcgatggggactgcggaattacgagggctggctgttttacaccggtcacattttctattggcagtgactgattcatgggaaagggctttgaaggaactacttcagtgcacacacaaggtacgaacctctcaggcctttcgaagaactttcataattcatgaaagcccagttctgaagattcacgtatccatctggagacctacaggaagaaagtgattgggttcctctggttcttgcctgcttcactgtggatgggaagaggtgacaacctcagtctccctttgggacctgtccaagggtaggcaaccaccttcaccttcacacagattgaggagacactggactttttacccattttctttaatcttcaatattaatattgtgtttacattgatgagaacaagagttaatgccctaccctctgctgggctgtttgtattgagttgcaatgtgaccagcgaaagctgcatttaataaatgaaagtacagac

SEQ ID NO: 149069 - DNA, 562 bp, Homo sapiens
  Payload ID: 9442
  Gene Symbol: LARGE
  Gene Name: like-glycosyltransferase
  ENST ID: ENST00000434071
  CDS Start-End: 237-562
aagaatcttttccatttctgttgaatgagggggcttgagaaaaagctcacgaaattaaaaggagaatgaagacgcttctgaagggagctcgaacctacattaagaaacgcattcagatgcatcagccgtttgtaaagcacctgtcgtgagccagagagtattatgagggaggccgaggacttcatgctccggacagagaaacggcgctgggattagggattgccacttctgagaggatgctgggaatctgcagggggagacggaaattcttggctgcctcgttgagtcttctctgcatcccagccatcacctggatttacctgttttctgggagcttcgaagatggaaagcccgtgtctctgtcaccgctggagtcccaggcacacagccccaggtacacggcctccagccagcgggagcgcgagagcctggaggtgcgcatgcgcgaggtggaggaggagaaccgcgccctccgcaggcagctcagcctggcccagggccgagccccatcccatcgccgaggcaaccactccaagacctactccatggaggagggcactgg

SEQ ID NO: 149070 - DNA, 559 bp, Homo sapiens
  Payload ID: 9442
  Gene Symbol: LARGE
  Gene Name: like-glycosyltransferase
  ENST ID: ENST00000430220
  CDS Start-End: 152-559
agatttgacagtcaaggatcctcatggcagcatggagaggccaggcgtgtctgcgtggccattctgtggagagtattatgagggaggccgaggacttcatgctccggacagagaaacggcgctgggattagggattgccacttctgagaggatgctgggaatctgcagggggagacggaaattcttggctgcctcgttgagtcttctctgcatcccagccatcacctggatttacctgttttctgggagcttcgaagatggaaagcccgtgtctctgtcaccgctggagtcccaggcacacagccccaggtacacggcctccagccagcgggagcgcgagagcctggaggtgcgcatgcgcgaggtggaggaggagaaccgcgccctccgcaggcagctcagcctggcccagggccgagccccatcccatcgccgaggcaaccactccaagacctactccatggaggagggcactggagacagcgagaaccttcgggctggcatcgtggcaggcaacagctccgagtgtgggcagcagccggtcgtggagaaatgcgag

SEQ ID NO: 149071 - DNA, 658 bp, Homo sapiens
  Payload ID: 9442
  Gene Symbol: LARGE
  Gene Name: like-glycosyltransferase
  ENST ID: ENST00000421768
  CDS Start-End: 98-658
atgaaaggcaaatgacttttcaaacattctgcagctgggatgacttctttttttaattttttaaaatatgtcaaggtgatttgtaatccacagcaaaatgttaatatggtctgaagtttcctggatccccaataaacattactctgggatttatggtctgatgaagcttgtcctgaccaagactcttcctgccaacctggagagagtcatcgtccttgacacggatatcacctttgccactgacattgcagagctgtgggctgtgttccacaagttcaaaggtcagcaagtcctgggcttggtggagaaccagagtgactggtaccttggaaacctgtggaaaaatcaccgcccatggccagcccttggaagaggctacaacacaggggtgatcctgttacttctggataagctgcggaagatgaaatgggagcagatgtggaggctgaccgcagagagggagctcatgggcatgctctctacatccttagctgaccaggatattttcaatgccgtcatcaaacaaaaccccttccttgtgtaccagctcccctgcttctggaatgtgcagctgtcagaccacacccgctccgagcagtgctacagagacgtgtctgatctaaaggtcattcactggaactcccccaagaagctccgg

SEQ ID NO: 149072 - DNA, 568 bp, Homo sapiens
  Payload ID: 9442
  Gene Symbol: LARGE
  Gene Name: like-glycosyltransferase
  ENST ID: ENST00000423375
  CDS Start-End: 426-568
aaataactccacagcatgtctcattaggccaggaacactccagctaatcgaggcgtgcctttgtcgtgcgctgctcgtgccaggggagttaaaaaaagaaataggcctgatcccaagggtgtgggcagggcagagataataaacccaaatacaaagtcaggccacccaggaatgaggtggtgtgctctatcggggccggattcccccagctccagatcatctggccaaatctgcaccctcctcccgggcctcccttttgctggggatggtttgggcagagaacctacattaagaaacgcattcagatgcatcagccgtttgtaaagcacctgtcgtgagccagagagtattatgagggaggccgaggacttcatgctccggacagagaaacggcgctgggattagggattgccacttctgagaggatgctgggaatctgcagggggagacggaaattcttggctgcctcgttgagtcttctctgcatcccagccatcacctggatttacctgttttctgggagcttcgaagatggaaagcccgtgtctctgtcaccgctggagtccca

SEQ ID NO: 149073 - DNA, 560 bp, Homo sapiens
  Payload ID: 9442
  Gene Symbol: LARGE
  Gene Name: like-glycosyltransferase
  ENST ID: ENST00000432776
  CDS Start-End: 381-560
attcagaacagactagacaaataactccacagcatgtctcattaggccaggaacactccagctaatcgaggcgtgcctttgtcgtgcgctgctcgtgccaggggagttaaaaaaagaaataggcctgatcccaagggtgtgggcagggcagagataataaacccaaatacaaagtcaggccacccaggaatgaggtggtgtgctctatcggggccggattcccccagctccagatcatctggccaaatctgcaccctcctcccgggcctcccttttgctggggatggtttgggcagagagagtattatgagggaggccgaggacttcatgctccggacagagaaacggcgctgggattagggattgccacttctgagaggatgctgggaatctgcagggggagacggaaattcttggctgcctcgttgagtcttctctgcatcccagccatcacctggatttacctgttttctgggagcttcgaagatggaaagcccgtgtctctgtcaccgctggagtcccaggcacacagccccaggtacacggcctccagccagcgg

SEQ ID NO: 149074 - DNA, 773 bp, Homo sapiens
  Payload ID: 9442
  Gene Symbol: LARGE
  Gene Name: like-glycosyltransferase
  ENST ID: ENST00000413114
  CDS Start-End: 367-773
ccccttgttttcagcgcgttctggaacagagctgcacgtcagaggaagaactgagcagccttcgagctaaaagacttggcattaaactttgacactttaatggtctctaggatattagatagtattttttcatataatgttcttctccgacacggtaatggcatcagaaacagaatctgctatgcctgccaacgtgcacggtgaggctcatcgccgcagagaacctacattaagaaacgcattcagatgcatcagccgtttgtaaagcacctgtcgtgagccagagagtattatgagggaggccgaggacttcatgctccggacagagaaacggcgctgggattagggattgccacttctgagaggatgctgggaatctgcagggggagacggaaattcttggctgcctcgttgagtcttctctgcatcccagccatcacctggatttacctgttttctgggagcttcgaagatggaaagcccgtgtctctgtcaccgctggagtcccaggcacacagccccaggtacacggcctccagccagcgggagcgcgagagcctggaggtgcgcatgcgcgaggtggaggaggagaaccgcgccctccgcaggcagctcagcctggcccagggccgagccccatcccatcgccgaggcaaccactccaagacctactccatggaggagggcactggagacagcgagaaccttcgggctggcatcgtggcaggcaacagctccgagtgtgggcagcagccggtcgtggagaaatgcga

SEQ ID NO: 149075 - DNA, 1736 bp, Homo sapiens
  Payload ID: 9442
  Gene Symbol: LARGE
  Gene Name: like-glycosyltransferase
  ENST ID: ENST00000610186
  CDS Start-End: 1-978
ctcatgggcatgctctctacatccttagctgaccaggatattttcaatgccgtcatcaaacaaaaccccttccttgtgtaccagctcccctgcttctggaatgtgcagctgtcagaccacacccgctccgagcagtgctacagagacgtgtctgatctaaaggtcattcactggaactcccccaagaagctccgggtgaagaacaagcatgtggagttttttcgcaacctctacctgaccttcctggagtatgacggcaatcttctgaggcgggaactgtttggctgccccagtgaggctgatgtcaacagtgaaaacctccagaagcagctgtctgagctggacgaggacgacctgtgctatgagttccggcgagagcgcttcactgtccaccgcacccacctgtacttcctgcactacgagtatgagcctgcagcagacagcacggacgtcaccctggtcgctcagctgtccatggacaggctccagatgctggaggccatctgcaagcactgggaggggcccatcagcctggccctctacctgtcagacgccgaggcccagcagttcctccgctacgcacagggctctgaggtgcttatgagccgccacaacgtgggctaccacatcgtgtacaaggagggccagttctaccccgtgaacctgctgcgcaacgtggccatgaagcacatcagcactccctacatgttcctgtctgacattgacttcctgcccatgtatgggctctatgagtacctcaggaagtctgtcatccagctcgatcttgccaacaccaagaaagcaatgattgtccccgcgttcgagacactgcgctaccggctgtccttccccaagtcaaaagcggagttgctgtcaatgctggacatggggaccctcttcacattcagctttgattttagccagaccctatctcccatcatcagctgcaagacgacagttccaaacacatgcctataattgtcctcggcgttggcttccttctcgaggacttgggtactgttcttcatgagccctaattttacagcatgttggaacggctcaacgttgaagccaaagtggtacgtgccaggtgaacatcctcacggtaagattgaagtggtacatgccaggtgaacatcatccccgtggtaagattgaagtagtacatggcaggtgaacatccctgtggaaagattgaagtggtacatgccaggtgaacatccccgtggtaacattgaagtggtacatgccaggtgaacatccccgtggtaagattgaagtggtaggtgcagatgaacatccccgtggtaagattaaggtggtacgtgccaggtgaacatccctgtggtaagattgaggtggtacatgcaggggaacatccccttggtaagattgaagtggcctgatgattacgcaacacttccttgaagacaacgggctgggaggggcctgggatgggatccctcagcttcactgcaaaggcagacttgagtggggaaggacttctcaatgtctcctggagttccaggtggccctaggtatcctggatggcgtgggagtcttaaacaccaacgtaaacagaaaggggatatttgaaattcatgcatttcacagtttattaatttctttccattttaaccctccttactaacattcatttacccttcaagaatcatcataagcatcattttcccaggaagtcctttcctctatgccatcagaatagcaaaatctag

SEQ ID NO: 149076 - DNA, 581 bp, Homo sapiens
  Payload ID: 9442
  Gene Symbol: LARGE
  Gene Name: like-glycosyltransferase
  ENST ID: ENST00000609799
  CDS Start-End: 1-552
ctcatgggcatgctctctacatccttagctgaccaggatattttcaatgccgtcatcaaacaaaaccccttccttgtgtaccagctcccctgcttctggaatgtgcagctgtcagaccacacccgctccgagcagtgctacagagacgtgtctgatctaaaggtcattcactggaactcccccaagaagctccgggtgaagaacaagcatgtggagttttttcgcaacctctacctgaccttcctggagtatgacggcaatcttctgaggcgggaactgtttggctgccccagtgaggctgatgtcaacagtgaaaacctccagaagcagctgtctgagctggacgaggacgacctgtgctatgagttccggcgagagcgcttcactgtccaccgcacccacctgtacttcctgcactacgagtatgagcctgcagcagacagcacggacgtcaccctggtcgctcagctgtccatggacagctttgattttagccagaccctatctcccatcatcagctgcaagacgacagttccaaacacatgcctataattgtcctcggcgttggcttccttctcgag

SEQ ID NO: 149077 - DNA, 5368 bp, Homo sapiens
  Payload ID: 9442
  Gene Symbol: LARGE
  Gene Name: like-glycosyltransferase
  ENST ID: ENST00000608642
  CDS Start-End: 1-831
ctcatgggcatgctctctacatccttagctgaccaggatattttcaatgccgtcatcaaacaaaaccccttccttgtgtaccagctcccctgcttctggaatgtgcagctgtcagaccacacccgctccgagcagtgctacagagacgtgtctgatctaaaggtcattcactggaactcccccaagaagctccgggtgaagaacaagcatgtggagttttttcgcaacctctacctgaccttcctggagtatgacggcaatcttctgaggcgggaactgtttggctgccccagtgaggctgatgtcaacagtgaaaacctccagaagcagctgtctgagctggacgaggacgacctgtgctatgagttccggcgagagcgcttcactgtccaccgcacccacctgtacttcctgcactacgagtatgagcctgcagcagacagcacggacgtcaccctggtcgctcagctgtccatggacaggctccagatgctggaggccatctgcaagcactgggaggggcccatcagcctggccctctacctgtcagacgccgaggcccagcagttcctccgctacgcacagggctctgaggtgcttatgagccgccacaacgtgggctaccacatcgtgtacaaggagggccagttctaccccgtgaacctgctgcgcaacgtggccatgaagcacatcagcactccctacatgttcctgtctgacattgacttcctgcccatgtatgggctctatgagtacctcagctttgattttagccagaccctatctcccatcatcagctgcaagacgacagttccaaacacatgcctataattgtcctcggcgttggcttccttctcgaggacttgggtactgttcttcatgagccctaattttacagcatgttggaacggctcaacgttgaagccaaagtggtacgtgccaggtgaacatcctcacggtaagattgaagtggtacatgccaggtgaacatcatccccgtggtaagattgaagtagtacatggcaggtgaacatccctgtggaaagattgaagtggtacatgccaggtgaacatccccgtggtaacattgaagtggtacatgccaggtgaacatccccgtggtaagattgaagtggtaggtgcagatgaacatccccgtggtaagattaaggtggtacgtgccaggtgaacatccctgtggtaagattgaggtggtacatgcaggggaacatccccttggtaagattgaagtggcctgatgattacgcaacacttccttgaagacaacgggctgggaggggcctgggatgggatccctcagcttcactgcaaaggcagacttgagtggggaaggacttctcaatgtctcctggagttccaggtggccctaggtatcctggatggcgtgggagtcttaaacaccaacgtaaacagaaaggggatatttgaaattcatgcatttcacagtttattaatttctttccattttaaccctccttactaacattcatttacccttcaagaatcatcataagcatcattttcccaggaagtcctttcctctatgccatcagaatagcaaaatctagtgtttactctggccacagcgtttaccacactgaataataatctctcctctatgtacctgttttgtttccttaaacaggccatagcaggtattttacttgattttgttcctgaagtgctaccatacagtgtccagcatagagttggtactcttggtgtttttctgaagcaatgatggaataaatagttgcttagattttcaaattcatctcatatatttgatcatatgattttattatcacaaacagcagttaaggactcgaaggaaacattgacccagggaagtccagggattgtatcatatcagagataaaagggatgttagagtgatgttttcccagctgggctgtgtgatacaatcagctgtagagcctgtgaataacccagtgtcctcgctaataatgctgtgaccttctaaatcagaattttgggggtttggatctaaacctgcatattagtaaaggtccctagatgattttgaagtacaggtagatttaaaaatcacagatgaggaatcaaactggtgagtggcttcccgtgaggttcaaatggcacagcattttctcagaacctatgggagatctcctaatactgtatccaaggttgttgttggtgacaccaaactgcagcaaatccctggacttgcagcaaactcaccagtgctccagtgttaacaatgggtgagcacagagcaactatgccactttaaagagcacaccaattttaatgctatctcaactatcatcaaggtttttccttaatcatataaacatcaaattgtggcttcttcaggatctatccccgaagttcttctggggtaaaatcaaagcatctattctttttataatttaaacttttattttagattcagtggtacacatgcagatttgttacatgggtttattgcacgatgctgaggtttgggatacgattggtcccgtcactcaggtagtgagcatagtatccatagttagtttttccaccctcccttcctcctgcctctagtagtccccgttgtctatagttgccatctttttgtccatgagtacccagtgtttagctcccacttgtaaatgagaatgtgcggtatttggttttctgttcctcagcatatgttttaaggacctatgtgcttacctgtgcttgggatgagagttcgtggtaattttttttttttaattcttgtcttggccgagcgcagtggctcacacctgtaataccagcactttgggaggccatggcaggtggatcatctgaggtcaggagtttgagacaagcctgaccaacatgtgaaaccctgtctctatttaaaaatacgaaaattagccaggtgtggtgttgtgtgcctgtaatcccagctacttgggaggctgaggcagaagaatcacttgaacctgggaggcagaggttgcagtgagctgagatcgcgccactgcactccagcctgggtgacagagcgagactctgtctcaaaaataaaaatatacataaaaataaaaaaaaaaaacaaaatcttacgttgattattactgcttgtcagaaacacctgtatattttcactggtttatggatatttcaatagaagaaaaacaagaaaagaaataaccaataacatctgaatgttttattttctcacctggagtgccgctcatccctggaagacgtacttgggaacttcgagctcctgggaatctatgagaattgcagaaccttgacatttctgaagagttgacatcagctcccactgataaaacagacaaagcgaaaagtcagacatcgacagcaggagatcaatggataaaaacggacataaactgcaagatgtttctgctcctcgtgagggattatgttcccagcactgttagggggcagcaaactcacaatcccaagaaataagtttgagtttggtcatatccatgctctcctcctacctcccttcttaatggggcacaaacagggagaaaggcgacctatagctacctggtatttgatgttaatattgtttgctgaaacttgaacttctgctgacgtagaggttttctcaaggacactcaagcctttgactctttaagtaaatatattaagtggtgctatctttgttatgatttggcactgatagcccacacaattaagcatggaatttcctcaaaaacaagccaattgggagtttcatttactattcaccacttgctaaatgtttccctcatatctgcatcgtaaatttctttttattcttacagaatagctagagatcaccagtttaagaaatcctacaagactttttccatgagagctatgcactctctctccagcatcacctctccatctgcttttcacgatgcatttcttacactggaatgtgataaaaccgtacactgtacttagcccttccctgtaaaggggcaatgagctgtttaagggtaaaggggtagttactaagcccatgccatcgtctgtattaagtcttatttttgtatttctacaagggtggaaagagagcctgttaagtgaatgtacctgtaatgaacaagttcatgccaaacagtggagtagctttcaattattttggagccaaagaccttcacttcattctggagtattgaaacacaaagatggtcattggaaatgttggaaactggtttttttcctacatcagtaaaagcataccacacttcattttaaaatgtaatacagagttatagaaaatatattcaaggcccaagtgacaaattggtaaatagcgaaaagaatcagagcttgaacaatttacttagttcttctgagcacacttttccaacctgcgacatggggacaatgagggctgcccaagacgactgtgttaaggatctgtgataatttatatgatgcatctagtacagtgttggacttaaaagaaactcataatatttgagaatatatgcaaatgctggattttcatggaatgacagacacccctttactcacattgattaagcagtgcaattacaacatagacatgagaagagaatctgagaagacacctctatttgtgggtaccggcatgagcaaacactaaaggaaattttcccagaggactgtaatccacctccaacactaatgaaagaactttgtaagcatacacgtccaagtgttaaccttttaattggtgacaatctccttattatgaaagttttaagaggtacttagtgtgccataacattttgtcataagtgtataattcagtaactttcagtcaattgttagagctgtgcaaccactgccacaattcaattttagaatatttccatcaccccgaaaaggcttcatgtgccaatttacagacatcctctattttcaccccaacctccaggcagccattctttcttctgtagataagcaagccatcagtaacttccttgccagcaaagttgatcctgatttatgatttttctgatactttaagtaaagagaaagaaaagtcatagggaagatgatatagtttggctatgttctcacccagatctcatcttgaattgtagttcccatcatccccacgtgtcaggggagggacctggtgggaggtaattgaatcactggggcagttacccccgtgctgttctgtgatagtgactgagttctcatgagatctgatggtgtgataaggggcttttcctcctttgttcagcacttttctctcctgctgccctgtgaagaggtgccttccaccataattgtaaatttcctgaggccttgcctgccatgctgaactgtgagtcaattaaacctcttttctttataaatc

SEQ ID NO: 149078 - DNA, 6165 bp, Homo sapiens
  Payload ID: 9443
  Gene Symbol: LIMCH1
  Gene Name: LIM and calponin homology domains 1
  Uniprot ID: Q9UPQ0
  ENST ID: ENST00000313860
  CDS Start-End: 55-3306
cgacggcggcggccgtcctcatcccggcgcttgagaggacgcggggctgcgcaaatggcttgtcccgctctcggtctggaagctcttcagcccctgcagcccgagccgccccccgagcccgccttctccgaggcgcagaagtggattgagcaagtaactggcagaagttttggtgataaagattttcggacaggtttagaaaatggaatcctcctctgcgagttgctgaatgctataaagccaggacttgttaaaaagatcaatagattgcctacccccattgcaggactggacaatattatcttattcttgagaggttgtaaagagctcggccttaaagaatctcaactttttgacccgagtgacctccaggatacatccaacagagtaacagtcaagagccttgattatagtaggaagctgaaaaatgtattagttaccatttactggctgggaaaagcagcaaacagctgcacatcctacagcggaacgacactaaacctgaaggagtttgaaggattgttggctcagatgcgaaaggacactgatgacattgaaagtcctaaacgcagtatccgagacagtggctacatcgactgctgggattccgagcgcagcgactccctctctcctcctcgccacggcagagatgattccttcgacagcctggattcctttggctctcgctctcggcagacgccttcaccagatgtagtcctcaggggaagcagcgatgggagaggaagcgactctgaatccgacttgcctcatcggaagctgccagatgtgaagaaggatgacatgtctgcacggcggacttcccatggtgagccgaaatcagcagtgccttttaaccagtacctcccgaacaaaagcaatcagacggcctacgtccccgcgcctctgagaaagaagaaagcagagagagaggaataccgcaagagctggagtaccgccacctccccgctgggtggggagaggcccttcagatacggtccgagaactcctgtgtctgatgacgcagagagcaccagcatgtttgacatgcggtgtgaggaggaggccgcggtgcagccgcacagcagggcccgccaggagcagctgcagctgataaataaccagctgagggaagaggacgacaaatggcaagatgacctggctcgttggaagagtcgtagaagaagtgtttctcaggacttaatcaagaaagaggaagaaaggaaaaaaatggagaagttactggctggagaagatgggacaagtgaacgaaggaaaagcatcaaaacctacagagaaattgttcaagaaaaagagcggagagagagagagctgcatgaagcatataagaacgctcggtcccaggaggaggcagaggggatccttcaacagtacattgagaggttcaccatcagtgaggctgttctcgaacgcttggagatgccaaaaattctggaaagaagccattcaacagagccaaatttatcctccttcctgaatgaccccaatcccatgaaatacctgcggcaacagtcactgcctccacccaaattcactgccactgttgaaaccaccattgctcgtgccagtgttctggataccagcatgtcagcaggcagtgggtctccaagcaaaactgtcactcccaaagcagtgcctatgctgacacccaagccttactcccagcccaaaaattctcaagatgttctgaagacctttaaggtagacgggaaagtcagtgtgaatggagagacggttcatagagaggaggagaaggaaagagagtgtcccacggtggcacctgcccactccttaaccaaatcccagatgtttgaaggtgtggccagagtgcacgggtctccactggagctgaaacaagacaacggtagcatcgagatcaacataaagaagccaaactctgttccccaagagctcgcagcaaccactgagaaaacggaaccgaatagtcaagaggacaagaatgatggtggaaaatcaagaaaagggaatatagaacttgcctcatcagaaccacagcattttacaacaactgtgactcgatgcagcccgaccgtggcctttgtggaatttccctccagcccccagctgaagaatgatgtgtcggaagaaaaagaccagaagaaaccagaaaatgaaatgagtggaaaggtggagttggtgctgtcacaaaaggtggtaaagccaaaatctccagaacccgaagcaacgctgacatttccatttctggacaaaatgcctgaagccaaccaactacatttgccaaatctcaattctcaagtggattctccaagcagtgagaagtcacctgttatgacacctcagtttaagttctgggcatgggacccagaagaggagcgcaggcgacaggaaaaatggcaacaggaacaggaacgtttgctccaggagagataccagaaggagcaggacaagctgaaagaagagtgggaaaaggcccaaaaggaggtggaagaggaagaacgcagatactatgaggaggagcgtaagataattgaagacactgtggttccatttactgtttcttcaagttccgctgaccagctgtctacctcttcctccatgactgaaggcagtgggacaatgaataagatagacctgggaaactgtcaagatgaaaaacaagacagaagatggaagaaatcattccagggagatgacagtgacttattgctgaagactagggaaagtgatcgactggaggagaagggcagcctaactgaaggggccttggctcattctgggaaccctgtatcaaaaggagtccatgaagaccatcagctggataccgaggctggggccccacactgtggaacaaacccacagcttgctcaggatccatcccagaatcagcagacatcaaatccaacgcacagttcagaagatgtgaagccaaaaaccctcccgctggataaaagcattaaccatcagatcgagtctcccagtgaaaggcggaagaaaagtccccgagagcacttccaggctgggcctttctctccctgttctcccacccctcccggtcagtcaccaaacaggtctataagtggaaagaagctgtgctcttcctgtgggcttcctttgggtaaaggagctgcaatgatcatcgagaccctcaatctctattttcacatccagtgtttcaggtgtggaatttgtaaaggccagcttggagatgcagtgagtgggacggatgttaggattcgaaatggtctcctgaactgtaatgattgctacatgcgatccagaagtgccgggcagcctacaacattgtgacacggctttcaagcttccggatcactcaccatttctttactgagagtgtcccctggcaactgcttaacaaaatcccaagctcaggggcttctcagcatttacctaatttctgaaaggctcttctgaaaggtggtatctgttctttcgtagcacagtgtttatgtttttcctgtttattgttttggttttttttttttttttgcatttgcacagtatacacaaaagaatatggggttgtaatgatcctgaatagctcaaaaaaggttttagcatggtcaaacaggcttatggtttaaaatgtgttattctcttctttgggaattagctaaatgatgcaataaacctgttttgttttagaatgtctaggaattaaacactttatgtttacagaattgagctgcagaaagtgcaagacatgccaatttgagacacacggtcttctaagactgaaggataaatttaatgcatttcagaaactaaacatcacagcaagctctatctctgagctataatttgtttttaatgcaaagacactagtttgataatatatactgtaatcctgaaacatttgtgttacttacctttggaggtagaaattataccaataaattattgcaccgttagtattagattctgtgtaccttggaagttatgtcattaatataggctggttcatcaaataaagcaaaaccttgcaatatcagctagatttacactccgggacgttgcccaaaggtaggaagaaagcagagggaaatatttcagtcatcatttccaaagtcattatcaaaatctgtgaggaagtttaatcttccaaagagtcaatgtcagacatcaggcctctgttgcctgcttctctcgaggcactagattaggagtcttcaataagagacttaacatgaggtatatggaagatgaggcaccgagataagttcatcattaggtgtgagcactgctcacccttgctggcaagttctccttaagggcctgaagcacaggtgtccaaagaaaagcgttaagtccatcttaatagaatctatgtggtatatgatgtggtcagcccctggtctgtgatcagcaagaacctacagcacagattatgccctgcccacttcaatgaatacctactctcctccattctccatcactttttttgctatcaagaactccggaccttgcccatggagaagtttagagaggaactcttgtggagagctggtttattttctgccctgtgcgacgagtttcagctggccaagaaaggagtcaagttattaaaaagcatcacaatgtagatctccaggctggttttttgttttttgttgttaagactggggaaagggggactatttattctgccttaaatcaatggcaaataagtcaagatgacattttgtgaatgtagactatggatacactcctaatagattgatgtagtcataaaagggggtcaagtagatgtttttctgttatgtaagcaataatttttccgtgtcttattgagtatggctagcgattatttattacatgctagatgggttctttgcatgtgggttccatataggtgcagaaatttcctcagccactggagggatttcgaccatatttgtcatttggatgagctgttattagattgaaatctacacatcatttcattaaaaattgtgccttagaaaacgcaaagctgttgcacatggcgataaattatggatgcagtacattgaagagagatgaagtcacttccaagtttccaagacttctcatggaggtgtttgctgttttacaggaaaaaataaaaataaaaaaagaaaaaaagaaaaaattaaaaagaaaaattgttttgaaaatgtacagatcaagtccaatattttgattatccacctgcatgttttattaaatattttgataatgtggatgtttacactttgcatgatattagcagagtaccactagtaatgcacaaacatgtacaatatggtcattcataaccgatttttatagaatactttttacatgtgcaactccatccgttatgtaaggattacatgaatattgcacattcccttctggtttcacaaacccatttatacatatttcttagtgaggctcattgtacatgtattgaagctagaatcgagtcaagaaaaataaagccccattctccaactgcaaaatgtgctttcccataatgaacactagtcaccagcacagaataatctccaacattttctaaattctaattgccaactgtttctatttatatttgatttatatttcatttggagtctgttacatggcagcttaggcagactagatcttgttttttccaatgcagcataatgagtatgatctatttcttttcaaataatctttgagatcccaggaaaaaaaaaatgctctgctccattgagctataatgtaaatgtgtttgtttaaaaaacaggtgaggcaagtgagtgatttattgttcctgaggaagtatatctgattttttttctcatactccaaaagctagtccctactctttaataaaaataatgggtaactttttgtttttcactagcgaacttccatgacatttcctttctatgtagtgtgattaatgcaatacatattatagttatctatacacagtgtaagatttaacaaactgaaatgatccacctcatatgtgagtccgtccaaaagatgttactgctctgggtgggccagtgttctatatcggttatactaactttcatttaaagtatttattctaaaatgcctctgagaaacagtaaaaaataaaaacaacaagttgtctaaaatgcaacagcttttatagtaaatgtacatttataaataaaatactcaaatcaa

SEQ ID NO: 149079 - DNA, 5705 bp, Homo sapiens
  Payload ID: 9443
  Gene Symbol: LIMCH1
  Gene Name: LIM and calponin homology domains 1
  Uniprot ID: Q9UPQ0
  ENST ID: ENST00000381753
  CDS Start-End: 174-2846
agagcaggaatttcccttcaaggtagcaggagatgaacgcgtgctgctccaggattttacagaactgattctgcagcaaagacaaatgttgcctgtatttgccagatagtataaacaggagcaaaagttgcacagctaaaccaggggctcattcccaggacagacatgcagttatggattccgaaagacaagtcaaggacactgatgacattgaaagtcctaaacgcagtatccgagacagtggctacatcgactgctgggattccgagcgcagcgactccctctctcctcctcgccacggcagagatgattccttcgacagcctggattcctttggctctcgctctcggcagacgccttcaccagatgtagtcctcaggggaagcagcgatgggagaggaagcgactctgaatccgacttgcctcatcggaagctgccagatgtgaagaaggatgacatgtctgcacggcggacttcccatggtgagccgaaatcagcagtgccttttaaccagtacctcccgaacaaaagcaatcagacggcctacgtccccgcgcctctgagaaagaagaaagcagagagagaggaataccgcaagagctggagtaccgccacctccccgctgggtggggagaggcccttcaggagcaccagcatgtttgacatgcggtgtgaggaggaggccgcggtgcagccgcacagcagggcccgccaggagcagctgcagctgataaataaccagctgagggaagaggacgacaaatggcaagatgacctggctcgttggaagagtcgtagaagaagtgtttctcaggacttaatcaagaaagaggaagaaaggaaaaaaatggagaagttactggctggagaagatgggacaagtgaacgaaggaaaagcatcaaaacctacagagaaattgttcaagaaaaagagcggagagagagagagctgcatgaagcatataagaacgctcggtcccaggaggaggcagaggggatccttcaacagtacattgagaggttcaccatcagtgaggctgttctcgaacgcttggagatgccaaaaattctggaaagaagccattcaacagagccaaatttatcctccttcctgaatgaccccaatcccatgaaatacctgcggcaacagtcactgcctccacccaaattcactgccactgttgaaaccaccattgctcgtgccagtgttctggataccagcatgtcagcaggcagtgggtctccaagcaaaactgtcactcccaaagcagtgcctatgctgacacccaagccttactcccagcccaaaaattctcaagatgttctgaagacctttaaggtagacgggaaagtcagtgtgaatggagagacggttcatagagaggaggagaaggaaagagagtgtcccacggtggcacctgcccactccttaaccaaatcccagatgtttgaaggtgtggccagagtgcacgggtctccactggagctgaaacaagacaacggtagcatcgagatcaacataaagaagccaaactctgttccccaagagctcgcagcaaccactgagaaaacggaaccgaatagtcaagaggacaagaatgatggtggaaaatcaagaaaagggaatatagaacttgcctcatcagaaccacagcattttacaacaactgtgactcgatgcagcccgaccgtggcctttgtggaatttccctccagcccccagctgaagaatgatgtgtcggaagaaaaagaccagaagaaaccagaaaatgaaatgagtggaaaggtggagttggtgctgtcacaaaaggtggtaaagccaaaatctccagaacccgaagcaacgctgacatttccatttctggacaaaatgcctgaagccaaccaactacatttgccaaatctcaattctcaagtggattctccaagcagtgagaagtcacctgttatgacaccttttaagttctgggcatgggacccagaagaggagcgcaggcgacaggaaaaatggcaacaggaacaggaacgtttgctccaggagagataccagaaggagcaggacaagctgaaagaagagtgggaaaaggcccaaaaggaggtggaagaggaagaacgcagatactatgaggaggagcgtaagataattgaagacactgtggttccatttactgtttcttcaagttccgctgaccagctgtctacctcttcctccatgactgaaggcagtgggacaatgaataagatagacctgggaaactgtcaagatgaaaaacaagacagaagatggaagaaatcattccagggagatgacagtgacttattgctgaagactagggaaagtgatcgactggaggagaagggcagcctaactgaaggggccttggctcattctgggaaccctgtatcaaaaggagtccatgaagaccatcagctggataccgaggctggggccccacactgtggaacaaacccacagcttgctcaggatccatcccagaatcagcagacatcaaatccaacgcacagttcagaagatgtgaagccaaaaaccctcccgctggataaaagcattaaccatcagatcgagtctcccagtgaaaggcggaagtctataagtggaaagaagctgtgctcttcctgtgggcttcctttgggtaaaggagctgcaatgatcatcgagaccctcaatctctattttcacatccagtgtttcaggtgtggaatttgtaaaggccagcttggagatgcagtgagtgggacggatgttaggattcgaaatggtctcctgaactgtaatgattgctacatgcgatccagaagtgccgggcagcctacaacattgtgacacggctttcaagcttccggatcactcaccatttctttactgagagtgtcccctggcaactgcttaacaaaatcccaagctcaggggcttctcagcatttacctaatttctgaaaggctcttctgaaaggtggtatctgttctttcgtagcacagtgtttatgtttttcctgtttattgttttggttttttttttttttttgcatttgcacagtatacacaaaagaatatggggttgtaatgatcctgaatagctcaaaaaaggttttagcatggtcaaacaggcttatggtttaaaatgtgttattctcttctttgggaattagctaaatgatgcaataaacctgttttgttttagaatgtctaggaattaaacactttatgtttacagaattgagctgcagaaagtgcaagacatgccaatttgagacacacggtcttctaagactgaaggataaatttaatgcatttcagaaactaaacatcacagcaagctctatctctgagctataatttgtttttaatgcaaagacactagtttgataatatatactgtaatcctgaaacatttgtgttacttacctttggaggtagaaattataccaataaattattgcaccgttagtattagattctgtgtaccttggaagttatgtcattaatataggctggttcatcaaataaagcaaaaccttgcaatatcagctagatttacactccgggacgttgcccaaaggtaggaagaaagcagagggaaatatttcagtcatcatttccaaagtcattatcaaaatctgtgaggaagtttaatcttccaaagagtcaatgtcagacatcaggcctctgttgcctgcttctctcgaggcactagattaggagtcttcaataagagacttaacatgaggtatatggaagatgaggcaccgagataagttcatcattaggtgtgagcactgctcacccttgctggcaagttctccttaagggcctgaagcacaggtgtccaaagaaaagcgttaagtccatcttaatagaatctatgtggtatatgatgtggtcagcccctggtctgtgatcagcaagaacctacagcacagattatgccctgcccacttcaatgaatacctactctcctccattctccatcactttttttgctatcaagaactccggaccttgcccatggagaagtttagagaggaactcttgtggagagctggtttattttctgccctgtgcgacgagtttcagctggccaagaaaggagtcaagttattaaaaagcatcacaatgtagatctccaggctggttttttgttttttgttgttaagactggggaaagggggactatttattctgccttaaatcaatggcaaataagtcaagatgacattttgtgaatgtagactatggatacactcctaatagattgatgtagtcataaaagggggtcaagtagatgtttttctgttatgtaagcaataatttttccgtgtcttattgagtatggctagcgattatttattacatgctagatgggttctttgcatgtgggttccatataggtgcagaaatttcctcagccactggagggatttcgaccatatttgtcatttggatgagctgttattagattgaaatctacacatcatttcattaaaaattgtgccttagaaaacgcaaagctgttgcacatggcgataaattatggatgcagtacattgaagagagatgaagtcacttccaagtttccaagacttctcatggaggtgtttgctgttttacaggaaaaaataaaaataaaaaaagaaaaaaagaaaaaattaaaaagaaaaattgttttgaaaatgtacagatcaagtccaatattttgattatccacctgcatgttttattaaatattttgataatgtggatgtttacactttgcatgatattagcagagtaccactagtaatgcacaaacatgtacaatatggtcattcataaccgatttttatagaatactttttacatgtgcaactccatccgttatgtaaggattacatgaatattgcacattcccttctggtttcacaaacccatttatacatatttcttagtgaggctcattgtacatgtattgaagctagaatcgagtcaagaaaaataaagccccattctccaactgcaaaatgtgctttcccataatgaacactagtcaccagcacagaataatctccaacattttctaaattctaattgccaactgtttctatttatatttgatttatatttcatttggagtctgttacatggcagcttaggcagactagatcttgttttttccaatgcagcataatgagtatgatctatttcttttcaaataatctttgagatcccaggaaaaaaaaaatgctctgctccattgagctataatgtaaatgtgtttgtttaaaaaacaggtgaggcaagtgagtgatttattgttcctgaggaagtatatctgattttttttctcatactccaaaagctagtccctactctttaataaaaataatgggtaactttttgtttttcactagcgaacttccatgacatttcctttctatgtagtgtgattaatgcaatacatattatagttatctatacacagtgtaagatttaacaaactgaaatgatccacctcatatgtgagtccgtccaaaagatgttactgctctgggtgggccagtgttctatatcggttatactaactttcatttaaagtatttattctaaaatgcctctgagaaacagtaaaaaataaaaacaacaagttgtctaaaatgcaacagcttttatagtaaatgtacatttataaataaaatactcaaatcaa

SEQ ID NO: 149080 - DNA, 5740 bp, Homo sapiens
  Payload ID: 9443
  Gene Symbol: LIMCH1
  Gene Name: LIM and calponin homology domains 1
  Uniprot ID: Q9UPQ0
  ENST ID: ENST00000396595
  CDS Start-End: 174-2882
agagcaggaatttcccttcaaggtagcaggagatgaacgcgtgctgctccaggattttacagaactgattctgcagcaaagacaaatgttgcctgtatttgccagatagtataaacaggagcaaaagttgcacagctaaaccaggggctcattcccaggacagacatgcagttatggattccgaaagacaagtcaaggacactgatgacattgaaagtcctaaacgcagtatccgagacagtggctacatcgactgctgggattccgagcgcagcgactccctctctcctcctcgccacggcagagatgattccttcgacagcctggattcctttggctctcgctctcggcagacgccttcaccagatgtagtcctcaggggaagcagcgatgggagaggaagcgactctgaatccgacttgcctcatcggaagctgccagatgtgaagaaggatgacatgtctgcacggcggacttcccatggtgagccgaaatcagcagtgccttttaaccagtacctcccgaacaaaagcaatcagacggcctacgtccccgcgcctctgagaaagaagaaagcagagagagaggaataccgcaagagctggagtaccgccacctccccgctgggtggggagaggcccttcagatacggtccgagaactcctgtgtctgatgacgcagagagcaccagcatgtttgacatgcggtgtgaggaggaggccgcggtgcagccgcacagcagggcccgccaggagcagctgcagctgataaataaccagctgagggaagaggacgacaaatggcaagatgacctggctcgttggaagagtcgtagaagaagtgtttctcaggacttaatcaagaaagaggaagaaaggaaaaaaatggagaagttactggctggagaagatgggacaagtgaacgaaggaaaagcatcaaaacctacagagaaattgttcaagaaaaagagcggagagagagagagctgcatgaagcatataagaacgctcggtcccaggaggaggcagaggggatccttcaacagtacattgagaggttcaccatcagtgaggctgttctcgaacgcttggagatgccaaaaattctggaaagaagccattcaacagagccaaatttatcctccttcctgaatgaccccaatcccatgaaatacctgcggcaacagtcactgcctccacccaaattcactgccactgttgaaaccaccattgctcgtgccagtgttctggataccagcatgtcagcaggcagtgggtctccaagcaaaactgtcactcccaaagcagtgcctatgctgacacccaagccttactcccagcccaaaaattctcaagatgttctgaagacctttaaggtagacgggaaagtcagtgtgaatggagagacggttcatagagaggaggagaaggaaagagagtgtcccacggtggcacctgcccactccttaaccaaatcccagatgtttgaaggtgtggccagagtgcacgggtctccactggagctgaaacaagacaacggtagcatcgagatcaacataaagaagccaaactctgttccccaagagctcgcagcaaccactgagaaaacggaaccgaatagtcaagaggacaagaatgatggtggaaaatcaagaaaagggaatatagaacttgcctcatcagaaccacagcattttacaacaactgtgactcgatgcagcccgaccgtggcctttgtggaatttccctccagcccccagctgaagaatgatgtgtcggaagaaaaagaccagaagaaaccagaaaatgaaatgagtggaaaggtggagttggtgctgtcacaaaaggtggtaaagccaaaatctccagaacccgaagcaacgctgacatttccatttctggacaaaatgcctgaagccaaccaactacatttgccaaatctcaattctcaagtggattctccaagcagtgagaagtcacctgttatgacaccttttaagttctgggcatgggacccagaagaggagcgcaggcgacaggaaaaatggcaacaggaacaggaacgtttgctccaggagagataccagaaggagcaggacaagctgaaagaagagtgggaaaaggcccaaaaggaggtggaagaggaagaacgcagatactatgaggaggagcgtaagataattgaagacactgtggttccatttactgtttcttcaagttccgctgaccagctgtctacctcttcctccatgactgaaggcagtgggacaatgaataagatagacctgggaaactgtcaagatgaaaaacaagacagaagatggaagaaatcattccagggagatgacagtgacttattgctgaagactagggaaagtgatcgactggaggagaagggcagcctaactgaaggggccttggctcattctgggaaccctgtatcaaaaggagtccatgaagaccatcagctggataccgaggctggggccccacactgtggaacaaacccacagcttgctcaggatccatcccagaatcagcagacatcaaatccaacgcacagttcagaagatgtgaagccaaaaaccctcccgctggataaaagcattaaccatcagatcgagtctcccagtgaaaggcggaagtctataagtggaaagaagctgtgctcttcctgtgggcttcctttgggtaaaggagctgcaatgatcatcgagaccctcaatctctattttcacatccagtgtttcaggtgtggaatttgtaaaggccagcttggagatgcagtgagtgggacggatgttaggattcgaaatggtctcctgaactgtaatgattgctacatgcgatccagaagtgccgggcagcctacaacattgtgacacggctttcaagcttccggatcactcaccatttctttactgagagtgtcccctggcaactgcttaacaaaatcccaagctcaggggcttctcagcatttacctaatttctgaaaggctcttctgaaaggtggtatctgttctttcgtagcacagtgtttatgtttttcctgtttattgttttggttttttttttttttttgcatttgcacagtatacacaaaagaatatggggttgtaatgatcctgaatagctcaaaaaaggttttagcatggtcaaacaggcttatggtttaaaatgtgttattctcttctttgggaattagctaaatgatgcaataaacctgttttgttttagaatgtctaggaattaaacactttatgtttacagaattgagctgcagaaagtgcaagacatgccaatttgagacacacggtcttctaagactgaaggataaatttaatgcatttcagaaactaaacatcacagcaagctctatctctgagctataatttgtttttaatgcaaagacactagtttgataatatatactgtaatcctgaaacatttgtgttacttacctttggaggtagaaattataccaataaattattgcaccgttagtattagattctgtgtaccttggaagttatgtcattaatataggctggttcatcaaataaagcaaaaccttgcaatatcagctagatttacactccgggacgttgcccaaaggtaggaagaaagcagagggaaatatttcagtcatcatttccaaagtcattatcaaaatctgtgaggaagtttaatcttccaaagagtcaatgtcagacatcaggcctctgttgcctgcttctctcgaggcactagattaggagtcttcaataagagacttaacatgaggtatatggaagatgaggcaccgagataagttcatcattaggtgtgagcactgctcacccttgctggcaagttctccttaagggcctgaagcacaggtgtccaaagaaaagcgttaagtccatcttaatagaatctatgtggtatatgatgtggtcagcccctggtctgtgatcagcaagaacctacagcacagattatgccctgcccacttcaatgaatacctactctcctccattctccatcactttttttgctatcaagaactccggaccttgcccatggagaagtttagagaggaactcttgtggagagctggtttattttctgccctgtgcgacgagtttcagctggccaagaaaggagtcaagttattaaaaagcatcacaatgtagatctccaggctggttttttgttttttgttgttaagactggggaaagggggactatttattctgccttaaatcaatggcaaataagtcaagatgacattttgtgaatgtagactatggatacactcctaatagattgatgtagtcataaaagggggtcaagtagatgtttttctgttatgtaagcaataatttttccgtgtcttattgagtatggctagcgattatttattacatgctagatgggttctttgcatgtgggttccatataggtgcagaaatttcctcagccactggagggatttcgaccatatttgtcatttggatgagctgttattagattgaaatctacacatcatttcattaaaaattgtgccttagaaaacgcaaagctgttgcacatggcgataaattatggatgcagtacattgaagagagatgaagtcacttccaagtttccaagacttctcatggaggtgtttgctgttttacaggaaaaaataaaaataaaaaaagaaaaaaagaaaaaattaaaaagaaaaattgttttgaaaatgtacagatcaagtccaatattttgattatccacctgcatgttttattaaatattttgataatgtggatgtttacactttgcatgatattagcagagtaccactagtaatgcacaaacatgtacaatatggtcattcataaccgatttttatagaatactttttacatgtgcaactccatccgttatgtaaggattacatgaatattgcacattcccttctggtttcacaaacccatttatacatatttcttagtgaggctcattgtacatgtattgaagctagaatcgagtcaagaaaaataaagccccattctccaactgcaaaatgtgctttcccataatgaacactagtcaccagcacagaataatctccaacattttctaaattctaattgccaactgtttctatttatatttgatttatatttcatttggagtctgttacatggcagcttaggcagactagatcttgttttttccaatgcagcataatgagtatgatctatttcttttcaaataatctttgagatcccaggaaaaaaaaaatgctctgctccattgagctataatgtaaatgtgtttgtttaaaaaacaggtgaggcaagtgagtgatttattgttcctgaggaagtatatctgattttttttctcatactccaaaagctagtccctactctttaataaaaataatgggtaactttttgtttttcactagcgaacttccatgacatttcctttctatgtagtgtgattaatgcaatacatattatagttatctatacacagtgtaagatttaacaaactgaaatgatccacctcatatgtgagtccgtccaaaagatgttactgctctgggtgggccagtgttctatatcggttatactaactttcatttaaagtatttattctaaaatgcctctgagaaacagtaaaaaataaaaacaacaagttgtctaaaatgcaacagcttttatagtaaatgtacatttataaataaaatactcaaatca

SEQ ID NO: 149081 - DNA, 789 bp, Homo sapiens
  Payload ID: 9443
  Gene Symbol: LIMCH1
  Gene Name: LIM and calponin homology domains 1
  ENST ID: ENST00000446625
  CDS Start-End: 410-789
acttcaacactgaaggagtgctactaggcaagtaactggcagaagttttggtgataaagattttcggacaggtttagaaaatggaatcctcctctgcgagttgctgaatgctataaagccaggacttgttaaaaagatcaatagattgcctacccccattgcaggactggacaatattatcttattcttgagaggttgtaaagagctcggccttaaagaatctcaactttttgacccgagtgacctccaggatacatccaacagagtaacagtcaagagccttgattatagtaggaagctgaaaaatgtattagttaccatttactggctgggaaaagcagcaaacagctgcacatcctacagcggaacgacactaaacctgaaggagtttgaaggattgttggctcagatgcgaaaggacactgatgacattgaaagtcctaaacgcagtatccgagacagtggctacatcgactgctgggattccgagcgcagcgactccctctctcctcctcgccacggcagagatgattccttcgacagcctggattcctttggctctcgctctcggcagacgccttcaccagatgtagtcctcaggggaagcagcgatgggagaggaagcgactctgaatccgacttgcctcatcggaagctgccagatgtgaagaaggatgacatgtctgcacggcggacttcccatggtgagccgaaatcagcagtgccttttaaccagtacctcccgaacaaaagcaatcagacggcctacgtccccgcgcctctgagaaa

SEQ ID NO: 149082 - DNA, 3439 bp, Homo sapiens
  Payload ID: 9443
  Gene Symbol: LIMCH1
  Gene Name: LIM and calponin homology domains 1
  Uniprot ID: Q9UPQ0
  ENST ID: ENST00000511496
  CDS Start-End: 387-3080
agcctgcttgtggacagagcaggggttggcagtggtgacgactgttttgggaaaggaaatgtaagggcatttcggctgctgtgctggggctgacgaggagcacacaggagagatgcccctcccatctcccagagtgggttggctggagttcattgcggagcatgaggacgtgtgggggacaatattatcttattcttgagaggttgtaaagagctcggccttaaagaatctcaactttttgacccgagtgacctccaggatacatccaacagagtaacagtcaagtattagttaccatttactggctgggaaaagcagcaaacagctgcacatcctacagcggaacgacactaaacctgaaggagtttgaaggattgttggctcagatgcgaaaggacactgatgacattgaaagtcctaaacgcagtatccgagacagtggctacatcgactgctgggattccgagcgcagcgactccctctctcctcctcgccacggcagagatgattccttcgacagcctggattcctttggctctcgctctcggcagacgccttcaccagatgtagtcctcaggggaagcagcgatgggagaggaagcgactctgaatccgacttgcctcatcggaagctgccagatgtgaagaaggatgacatgtctgcacggcggacttcccatggtgagccgaaatcagcagtgccttttaaccagtacctcccgaacaaaagcaatcagacggcctacgtccccgcgcctctgagaaagaagaaagcagagagagaggaataccgcaagagctggagtaccgccacctccccgctgggtggggagaggcccttcagatacggtccgagaactcctgtgtctgatgacgcagagagcaccagcatgtttgacatgcggtgtgaggaggaggccgcggtgcagccgcacagcagggcccgccaggagcagctgcagctgataaataaccagctgagggaagaggacgacaaatggcaagatgacctggctcgttggaagagtcgtagaagaagtgtttctcaggacttaatcaagaaagaggaagaaaggaaaaaaatggagaagttactggctggagaagatgggacaagtgaacgaaggaaaagcatcaaaacctacagagaaattgttcaagaaaaagagcggagagagagagagctgcatgaagcatataagaacgctcggtcccaggaggaggcagaggggatccttcaacagtacattgagaggttcaccatcagtgaggctgttctcgaacgcttggagatgccaaaaattctggaaagaagccattcaacagagccaaatttatcctccttcctgaatgaccccaatcccatgaaatacctgcggcaacagtcactgcctccacccaaattcactgccactgttgaaaccaccattgctcgtgccagtgttctggataccagcatgtcagcaggcagtgggtctccaagcaaaactgtcactcccaaagcagtgcctatgctgacacccaagccttactcccagcccaaaaattctcaagatgttctgaagacctttaaggtagacgggaaagtcagtgtgaatggagagacggttcatagagaggaggagaaggaaagagagtgtcccacggtggcacctgcccactccttaaccaaatcccagatgtttgaaggtgtggccagagtgcacgggtctccactggagctgaaacaagacaacggtagcatcgagatcaacataaagaagccaaactctgttccccaagagctcgcagcaaccactgagaaaacggaaccgaatagtcaagaggacaagaatgatggtggaaaatcaagaaaagggaatatagaacttgcctcatcagaaccacagcattttacaacaactgtgactcgatgcagcccgaccgtggcctttgtggaatttccctccagcccccagctgaagaatgatgtgtcggaagaaaaagaccagaagaaaccagaaaatgaaatgagtggaaaggtggagttggtgctgtcacaaaaggtggtaaagccaaaatctccagaacccgaagcaacgctgacatttccatttctggacaaaatgcctgaagccaaccaactacatttgccaaatctcaattctcaagtggattctccaagcagtgagaagtcacctgttatgacaccttttaagttctgggcatgggacccagaagaggagcgcaggcgacaggaaaaatggcaacaggaacaggaacgtttgctccaggagagataccagaaggagcaggacaagctgaaagaagagtgggaaaaggcccaaaaggaggtggaagaggaagaacgcagatactatgaggaggagcgtaagataattgaagacactgtggttccatttactgtttcttcaagttccgctgaccagctgtctacctcttcctccatgactgaaggcagtgggacaatgaataagatagacctgggaaactgtcaagatgaaaaacaagacagaagatggaagaaatcattccagggagatgacagtgacttattgctgaagactagggaaagtgatcgactggaggagaagggcagcctaactgaaggggccttggctcattctgggaaccctgtatcaaaaggagtccatgaagaccatcagctggataccgaggctggggccccacactgtggaacaaacccacagcttgctcaggatccatcccagaatcagcagacatcaaatccaacgcacagttcagaagatgtgaagccaaaaaccctcccgctggataaaagcattaaccatcagatcgagtctcccagtgaaaggcggaagtctataagtggaaagaagctgtgctcttcctgtgggcttcctttgggtaaaggagctgcaatgatcatcgagaccctcaatctctattttcacatccagtgtttcaggtgtggaatttgtaaaggccagcttggagatgcagtgagtgggacggatgttaggattcgaaatggtctcctgaactgtaatgattgctacatgcgatccagaagtgccgggcagcctacaacattgtgacacggctttcaagcttccggatcactcaccatttctttactgagagtgtcccctggcaactgcttaacaaaatcccaagctcaggggcttctcagcatttacctaatttctgaaaggctcttctgaaaggtggtatctgttctttcgtagcacagtgtttatgtttttcctgtttattgttttggttttttttttttttttgcatttgcacagtatacacaaaagaatatggggttgtaatgatcctgaatagctcaaaaaaggttttagcatggtcaaacaggcttatggtttaaaatgtgttattctcttctttgggaattagctaaatgatgcaataaacctgttttgttttagaa

SEQ ID NO: 149083 - DNA, 3051 bp, Homo sapiens
  Payload ID: 9443
  Gene Symbol: LIMCH1
  Gene Name: LIM and calponin homology domains 1
  ENST ID: ENST00000508466
  CDS Start-End: 1-2753
acattgaaagtcctaaacgcagtatccgagacagtggctacatcgactgctgggattccgagcgcagcgactccctctctcctcctcgccacggcagagatgattccttcgacagcctggattcctttggctctcgctctcggcagacgccttcaccagatgtagtcctcaggggaagcagcgatgggagaggaagcgactctgaatccgacttgcctcatcggaagctgccagatgtgaagaaggatgacatgtctgcacggcggacttcccatggtgagccgaaatcagcagtgccttttaaccagtacctcccgaacaaaagcaatcagacggcctacgtccccgcgcctctgagaaagaagaaagcagagagagaggaataccgcaagagctggagtaccgccacctccccgctgggtggggagaggcccttcagatacggtccgagaactcctgtgtctgatgacgcagagagcaccagcatgtttgacatgcggtgtgaggaggaggccgcggtgcagccgcacagcagggcccgccaggagcagctgcagctgataaataaccagctgagggaagaggacgacaaatggcaagatgacctggctcgttggaagagtcgtagaagaagtgtttctcaggacttaatcaagaaagaggaagaaaggaaaaaaatggagaagttactggctggagaagatgggacaagtgaacgaaggaaaagcatcaaaacctacagagaaattgttcaagaaaaagagcggagagagagagagctgcatgaagcatataagaacgctcggtcccaggaggaggcagaggggatccttcaacagtacattgagaggttcaccatcagtgaggctgttctcgaacgcttggagatgccaaaaattctggaaagaagccattcaacagagccaaatttatcctccttcctgaatgaccccaatcccatgaaatacctgcggcaacagtcactgcctccacccaaattcactgccactgttgaaaccaccattgctcgtgccagtgttctggataccagcatgtcagcaggcagtgggtctccaagcaaaactgtcactcccaaagcagtgcctatgctgacacccaagccttactcccagcccaaaaattctcaagatgttctgaagacctttaaggtagacgggaaagtcagtgtgaatggagagacggttcatagagaggaggagaaggaaagagagtgtcccacggtggcacctgcccactccttaaccaaatcccagatgtttgaaggtgtggccagagtgcacgggtctccactggagctgaaacaagacaacggtagcatcgagatcaacataaagaagccaaactctgttccccaagagctcgcagcaaccactgagaaaacggaaccgaatagtcaagaggacaagaatgatggtggaaaatcaagaaaagggaatatagaacttgcctcatcagaaccacagcattttacaacaactgtgactcgatgcagcccgaccgtggcctttgtggaatttccctccagcccccagctgaagaatgatgtgtcggaagaaaaagaccagaagaaaccagaaaatgaaatgagtggaaaggtggagttggtgctgtcacaaaaggtggtaaagccaaaatctccagaacccgaagcaacgctgacatttccatttctggacaaaatgcctgaagccaaccaactacatttgccaaatctcaattctcaagtggattctccaagcagtgagaagtcacctgttatgacaccttttaagttctgggcatgggacccagaagaggagcgcaggcgacaggaaaaatggcaacaggaacaggaacgtttgctccaggagagataccagaaggagcaggacaagctgaaagaagagtgggaaaaggcccaaaaggaggtggaagaggaagaacgcagatactatgaggaggagcgtaagataattgaagacactgtggttccatttactgtttcttcaagttccgctgaccagctgtctacctcttcctccatgactgaaggcagtgggacaatgaataagatagacctgggaaactgtcaagatgaaaaacaagacagaagatggaagaaatcattccagggagatgacagtgacttattgctgaagactagggaaagtgatcgactggaggagaagggcagcctaactgaaggggccttggctcattctgggaaccctgtatcaaaaggagtccatgaagaccatcagctggataccgaggctggggccccacactgtggaacaaacccacagcttgctcaggatccatcccagaatcagcagacatcaaatccaacgcacagttcagaagatgtgaagccaaaaaccctcccgctggataaaagcattaaccatcagatcgagtctcccagtgaaaggcggaagaaaagtccccgagagcacttccaggctgggcctttctctccctgttctcccacccctcccggtcagtcaccaaacaggtctataagtggaaagaagctgtgctcttcctgtgggcttcctttgggtaaaggagctgcaatgatcatcgagaccctcaatctctattttcacatccagtgtttcaggtgtggaatttgtaaaggccagcttggagatgcagtgagtgggacggatgttaggattcgaaatggtctcctgaactgtaatgattgctacatgcgatccagaagtgccgggcagcctacaacattgtgacacggctttcaagcttccggatcactcaccatttctttactgagagtgtcccctggcaactgcttaacaaaatcccaagctcaggggcttctcagcatttacctaatttctgaaaggctcttctgaaaggtggtatctgttctttcgtagcacagtgtttatgtttttcctgtttattgttttggttttttttttttttttgcatttgcacagtatacacaaaagaatatggggttgtaatgatcctgaatagctcaaaaaaggttttagcatggtcaaacaggcttatggtttaaaa

SEQ ID NO: 149084 - DNA, 3474 bp, Homo sapiens
  Payload ID: 9443
  Gene Symbol: LIMCH1
  Gene Name: LIM and calponin homology domains 1
  ENST ID: ENST00000509277
  CDS Start-End: 367-3117
attgttctccctgctctgaacatgtgggtcagccacaagtgctttcagctcccccagcgccaagagctggctgagagcgagagcatgcctggattcttctgaggcatcaggaaaagcgttttgcatatttttcattgcctttctttttttttttttttttttaacttttgcctcagaaagacagctccctttcagagcaggaatttcccttcaaggtagcaggagatgaacgcgtgctgctccaggattttacagaactgattctgcagcaaagacaaatgttgcctgtatttgccagatagtataaacaggagcaaaagttgcacagctaaaccaggggctcattcccaggacagacatgcagttatggattccgaaagacaagtcaaggacactgatgacattgaaagtcctaaacgcagtatccgagacagtggctacatcgactgctgggattccgagcgcagcgactccctctctcctcctcgccacggcagagatgattccttcgacagcctggattcctttggctctcgctctcggcagacgccttcaccagatgtagtcctcaggggaagcagcgatgggagaggaagcgactctgaatccgacttgcctcatcggaagctgccagatgtgaagaaggatgacatgtctgcacggcggacttcccatggtgagccgaaatcagcagtgccttttaaccagtacctcccgaacaaaagcaatcagacggcctacgtccccgcgcctctgagaaagaagaaagcagagagagaggaataccgcaagagctggagtaccgccacctccccgctgggtggggagaggcccttcaggagcaccagcatgtttgacatgcggtgtgaggaggaggccgcggtgcagccgcacagcagggcccgccaggagcagctgcagctgataaataaccagctgagggaagaggacgacaaatggcaagatgacctggctcgttggaagagtcgtagaagaagtgtttctcaggacttaatcaagaaagaggaagaaaggaaaaaaatggagaagttactggctggagaagatgggacaagtgaacgaaggaaaagcatcaaaacctacagagaaattgttcaagaaaaagagcggagagagagagagctgcatgaagcatataagaacgctcggtcccaggaggaggcagaggggatccttcaacagtacattgagaggttcaccatcagtgaggctgttctcgaacgcttggagatgccaaaaattctggaaagaagccattcaacagagccaaatttatcctccttcctgaatgaccccaatcccatgaaatacctgcggcaacagtcactgcctccacccaaattcactgccactgttgaaaccaccattgctcgtgccagtgttctggataccagcatgtcagcaggcagtgggtctccaagcaaaactgtcactcccaaagcagtgcctatgctgacacccaagccttactcccagcccaaaaattctcaagatgttctgaagacctttaaggtagacgggaaagtcagtgtgaatggagagacggttcatagagaggaggagaaggaaagagagtgtcccacggtggcacctgcccactccttaaccaaatcccagatgtttgaaggtgtggccagagtgcacgggtctccactggagctgaaacaagacaacggtagcatcgagatcaacataaagaagccaaactctgttccccaagagctcgcagcaaccactgagaaaacggaaccgaatagtcaagaggacaagaatgatggtggaaaatcaagaaaagggaatatagaacttgcctcatcagaaccacagcattttacaacaactgtgactcgatgcagcccgaccgtggcctttgtggaatttccctccagcccccagctgaagaatgatgtgtcggaagaaaaagaccagaagaaaccagaaaatgaaatgagtggaaaggtggagttggtgctgtcacaaaaggtggtaaagccaaaatctccagaacccgaagcaacgctgacatttccatttctggacaaaatgcctgaagccaaccaactacatttgccaaatctcaattctcaagtggattctccaagcagtgagaagtcacctgttatgacaccttttaagttctgggcatgggacccagaagaggagcgcaggcgacaggaaaaatggcaacaggaacaggaacgtttgctccaggagagataccagaaggagcaggacaagctgaaagaagagtgggaaaaggcccaaaaggaggtggaagaggaagaacgcagatactatgaggaggagcgtaagataattgaagacactgtggttccatttactgtttcttcaagttccgctgaccagctgtctacctcttcctccatgactgaaggcagtgggacaatgaataagatagacctgggaaactgtcaagatgaaaaacaagacagaagatggaagaaatcattccagggagatgacagtgacttattgctgaagactagggaaagtgatcgactggaggagaagggcagcctaactgaaggggccttggctcattctgggaaccctgtatcaaaaggagtccatgaagaccatcagctggataccgaggctggggccccacactgtggaacaaacccacagcttgctcaggatccatcccagaatcagcagacatcaaatccaacgcacagttcagaagatgtgaagccaaaaaccctcccgctggataaaagcattaaccatcagatcgagtctcccagtgaaaggcggaagaaaagtccccgagagcacttccaggctgggcctttctctccctgttctcccacccctcccggtcagtcaccaaacaggtctataagtggaaagaagctgtgctcttcctgtgggcttcctttgggtaaaggagctgcaatgatcatcgagaccctcaatctctattttcacatccagtgtttcaggtgtggaatttgtaaaggccagcttggagatgcagtgagtgggacggatgttaggattcgaaatggtctcctgaactgtaatgattgctacatgcgatccagaagtgccgggcagcctacaacattgtgacacggctttcaagcttccggatcactcaccatttctttactgagagtgtcccctggcaactgcttaacaaaatcccaagctcaggggcttctcagcatttacctaatttctgaaaggctcttctgaaaggtggtatctgttctttcgtagcacagtgtttatgtttttcctgtttattgttttggttttttttttttttttgcatttgcacagtatacacaaaagaatatggggttgtaatgatcctgaatagctcaaaaaaggttttagcatggtcaaacaggcttatggtttaaaatgtgttattctcttctttgggaattagctaaatgatgcaataaacctgttttgttttag

SEQ ID NO: 149085 - DNA, 1506 bp, Homo sapiens
  Payload ID: 9443
  Gene Symbol: LIMCH1
  Gene Name: LIM and calponin homology domains 1
  ENST ID: ENST00000509454
  CDS Start-End: 174-656
agagcaggaatttcccttcaaggtagcaggagatgaacgcgtgctgctccaggattttacagaactgattctgcagcaaagacaaatgttgcctgtatttgccagatagtataaacaggagcaaaagttgcacagctaaaccaggggctcattcccaggacagacatgcagttatggattccgaaagacaagtcaaggttaaggacactgatgacattgaaagtcctaaacgcagtatccgagacagtggctacatcgactgctgggattccgagcgcagcgactccctctctcctcctcgccacggcagagatgattccttcgacagcctggattcctttggctctcgctctcggcagacgccttcaccagatgtagtcctcaggggaagcagcgatgggagaggaagcgactctgaatccgacttgcctcatcggaagctgccagatgtgaagaaggatgacatgtctgcacggcggacttcccatggtgagccgaaatcagcagtgccttttaaccagtacctcccgaacaaaagcaatcagacggcctacgtccccgcgcctctgagaaagaagaaagcagagagagaggaataccgcaagagctggagtaccgccacctccccgctgggtggggagaggcccttcaggtaaggcctgagcaccgctgccctcttcctggcttgggcatgagtggtttgggaactgcagctcctggacaggaacgaggttaaatgaccaattcagaactttgatggaagattacagatggaggtgggtgggacagatctttggagagagcttgtcaggagaaaatagaagcttcgtgagtgcgcctagaacagtgcctggcacacagtaggtattcagcaactacttgtctaaataagcagatttctgaaaccaattctgttgataggacattgagagcaaatctgtcatccttgtccttctgcggagactgcttgactcccaatcctgtcagattaggcgtagaaagattcctatctttatgcaaaaagatgttttaaaactctaggcttaaattaacttgatataagctcaaatatgtgatgcatggaatgtggttcacaataacatatagaaatagtcataataaatggatttctcatctctttagagaaacagtgttttaatctctgattatgcttttgtatttatttattcatttattcagcaagtacttattgagcatctactatatgctaggcattggggacccaataacaaataaggcagagtccctgccttcaagaatcttacaataaaataaacttgtctaatagtccatctgtactattattttccattgaataaagatgttattacaatttttaatttgctgaacaaactaatgaaatttacctttccagcagaaaaggtttttgcctttcattatcaagtctgggataactctcaatgttgcgggtatgatgcattgtatgaattaaatggctgcgttgaattttcttcacattatcag

SEQ ID NO: 149086 - DNA, 5071 bp, Homo sapiens
  Payload ID: 9443
  Gene Symbol: LIMCH1
  Gene Name: LIM and calponin homology domains 1
  Uniprot ID: Q9UPQ0
  ENST ID: ENST00000512820
  CDS Start-End: 27-3236
gcttgagaggacgcggggctgcgcaaatggcttgtcccgctctcggtctggaagctcttcagcccctgcagcccgagccgccccccgagcccgccttctccgaggcgcagaagtggattgagcaagtaactggcagaagttttggtgataaagattttcggacaggtttagaaaatggaatcctcctctgcgagttgctgaatgctataaagccaggacttgttaaaaagatcaatagattgcctacccccattgcaggactggacaatattatcttattcttgagaggttgtaaagagctcggccttaaagaatctcaactttttgacccgagtgacctccaggatacatccaacagagtaacagtcaagagccttgattatagtaggaagctgaaaaatgtattagttaccatttactggctgggaaaagcagcaaacagctgcacatcctacagcggaacgacactaaacctgaaggagtttgaaggattgttggctcagatgcgaaaggacactgatgacattgaaagtcctaaacgcagtatccgagacagtggctacatcgactgctgggattccgagcgcagcgactccctctctcctcctcgccacggcagagatgattccttcgacagcctggattcctttggctctcgctctcggcagacgccttcaccagatgtagtcctcaggggaagcagcgatgggagaggaagcgactctgaatccgacttgcctcatcggaagctgccagatgtgaagaaggatgacatgtctgcacggcggacttcccatggtgagccgaaatcagcagtgccttttaaccagtacctcccgaacaaaagcaatcagacggcctacgtccccgcgcctctgagaaagaagaaagcagagagagaggaataccgcaagagctggagtaccgccacctccccgctgggtggggagaggcccttcaggagcaccagcatgtttgacatgcggtgtgaggaggaggccgcggtgcagccgcacagcagggcccgccaggagcagctgcagctgataaataaccagctgagggaagaggacgacaaatggcaagatgacctggctcgttggaagagtcgtagaagaagtgtttctcaggacttaatcaagaaagaggaagaaaggaaaaaaatggagaagttactggctggagaagatgggacaagtgaacgaaggaaaagcatcaaaacctacagagaaattgttcaagaaaaagagcggagagagagagagctgcatgaagcatataagaacgctcggtcccaggaggaggcagaggggatccttcaacagtacattgagaggttcaccatcagtgaggctgttctcgaacgcttggagatgccaaaaattctggaaagaagccattcaacagagccaaatttatcctccttcctgaatgaccccaatcccatgaaatacctgcggcaacagtcactgcctccacccaaattcactgccactgttgaaaccaccattgctcgtgccagtgttctggataccagcatgtcagcaggcagtgggtctccaagcaaaactgtcactcccaaagcagtgcctatgctgacacccaagccttactcccagcccaaaaattctcaagatgttctgaagacctttaaggtagacgggaaagtcagtgtgaatggagagacggttcatagagaggaggagaaggaaagagagtgtcccacggtggcacctgcccactccttaaccaaatcccagatgtttgaaggtgtggccagagtgcacgggtctccactggagctgaaacaagacaacggtagcatcgagatcaacataaagaagccaaactctgttccccaagagctcgcagcaaccactgagaaaacggaaccgaatagtcaagaggacaagaatgatggtggaaaatcaagaaaagggaatatagaacttgcctcatcagaaccacagcattttacaacaactgtgactcgatgcagcccgaccgtggcctttgtggaatttccctccagcccccagctgaagaatgatgtgtcggaagaaaaagaccagaagaaaccagaaaatgaaatgagtggaaaggtggagttggtgctgtcacaaaaggtggtaaagccaaaatctccagaacccgaagcaacgctgacatttccatttctggacaaaatgcctgaagccaaccaactacatttgccaaatctcaattctcaagagtcgcctggcactgccagtgttccgcttagagttcagaactcttggcgacgatcccagtttttctcccagtcagtggattctccaagcagtgagaagtcacctgttatgacaccttttaagttctgggcatgggacccagaagaggagcgcaggcgacaggaaaaatggcaacaggaacaggaacgtttgctccaggagagataccagaaggagcaggacaagctgaaagaagagtgggaaaaggcccaaaaggaggtggaagaggaagaacgcagatactatgaggaggagcgtaagataattgaagacactgtggttccatttactgtttcttcaagttccgctgaccagctgtctacctcttcctccatgactgaaggcagtgggacaatgaataagatagacctgggaaactgtcaagatgaaaaacaagacagaagatggaagaaatcattccagggagatgacagtgacttattgctgaagactagggaaagtgatcgactggaggagaagggcagcctaactgaaggggccttggctcattctgggaaccctgtatcaaaaggagtccatgaagaccatcagctggataccgaggctggggccccacactgtggaacaaacccacagcttgctcaggatccatcccagaatcagcagacatcaaatccaacgcacagttcagaagatgtgaagccaaaaaccctcccgctggataaaagcattaaccatcagatcgagtctcccagtgaaaggcggaagtctataagtggaaagaagctgtgctcttcctgtgggcttcctttgggtaaaggagctgcaatgatcatcgagaccctcaatctctattttcacatccagtgtttcaggtgtggaatttgtaaaggccagcttggagatgcagtgagtgggacggatgttaggattcgaaatggtctcctgaactgtaatgattgctacatgcgatccagaagtgccgggcagcctacaacattgtgacacggctttcaagcttccggatcactcaccatttctttactgagagtgtcccctggcaactgcttaacaaaatcccaagctcaggggcttctcagcatttacctaatttctgaaaggctcttctgaaaggtggtatctgttctttcgtagcacagtgtttatgtttttcctgtttattgttttggttttttttttttttttgcatttgcacagtatacacaaaagaatatggggttgtaatgatcctgaatagctcaaaaaaggttttagcatggtcaaacaggcttatggtttaaaatgtgttattctcttctttgggaattagctaaatgatgcaataaacctgttttgttttagaatgtctaggaattaaacactttatgtttacagaattgagctgcagaaagtgcaagacatgccaatttgagacacacggtcttctaagactgaaggataaatttaatgcatttcagaaactaaacatcacagcaagctctatctctgagctataatttgtttttaatgcaaagacactagtttgataatatatactgtaatcctgaaacatttgtgttacttacctttggaggtagaaattataccaataaattattgcaccgttagtattagattctgtgtaccttggaagttatgtcattaatataggctggttcatcaaataaagcaaaaccttgcaatatcagctagatttacactccgggacgttgcccaaaggtaggaagaaagcagagggaaatatttcagtcatcatttccaaagtcattatcaaaatctgtgaggaagtttaatcttccaaagagtcaatgtcagacatcaggcctctgttgcctgcttctctcgaggcactagattaggagtcttcaataagagacttaacatgaggtatatggaagatgaggcaccgagataagttcatcattaggtgtgagcactgctcacccttgctggcaagttctccttaagggcctgaagcacaggtgtccaaagaaaagcgttaagtccatcttaatagaatctatgtggtatatgatgtggtcagcccctggtctgtgatcagcaagaacctacagcacagattatgccctgcccacttcaatgaatacctactctcctccattctccatcactttttttgctatcaagaactccggaccttgcccatggagaagtttagagaggaactcttgtggagagctggtttattttctgccctgtgcgacgagtttcagctggccaagaaaggagtcaagttattaaaaagcatcacaatgtagatctccaggctggttttttgttttttgttgttaagactggggaaagggggactatttattctgccttaaatcaatggcaaataagtcaagatgacattttgtgaatgtagactatggatacactcctaatagattgatgtagtcataaaagggggtcaagtagatgtttttctgttatgtaagcaataatttttccgtgtcttattgagtatggctagcgattatttattacatgctagatgggttctttgcatgtgggttccatataggtgcagaaatttcctcagccactggagggatttcgaccatatttgtcatttggatgagctgttattagattgaaatctacacatcatttcattaaaaattgtgccttagaaaacgcaaagctgttgcacatggcgataaattatggatgcagtacattgaagagagatgaagtcacttccaagtttccaagacttctcatggaggtgtttgctgttttacaggaaaaaataaaaataaaaaaagaaaaaaagaaaaaattaaaaagaaaaa

SEQ ID NO: 149087 - DNA, 5057 bp, Homo sapiens
  Payload ID: 9443
  Gene Symbol: LIMCH1
  Gene Name: LIM and calponin homology domains 1
  Uniprot ID: Q9UPQ0
  ENST ID: ENST00000512946
  CDS Start-End: 57-3230
ggcgacggcggcggccgtcctcatcccggcgcttgagaggacgcggggctgcgcaaatggcttgtcccgctctcggtctggaagctcttcagcccctgcagcccgagccgccccccgagcccgccttctccgaggcgcagaagtggattgagcaagtaactggcagaagttttggtgataaagattttcggacaggtttagaaaatggaatcctcctctgcgagttgctgaatgctataaagccaggacttgttaaaaagatcaatagattgcctacccccattgcaggactggacaatattatcttattcttgagaggttgtaaagagctcggccttaaagaatctcaactttttgacccgagtgacctccaggatacatccaacagagtaacagtcaagagccttgattatagtaggaagctgaaaaatgtattagttaccatttactggctgggaaaagcagcaaacagctgcacatcctacagcggaacgacactaaacctgaaggagtttgaaggattgttggctcagatgcgaaaggacactgatgacattgaaagtcctaaacgcagtatccgagacagtggctacatcgactgctgggattccgagcgcagcgactccctctctcctcctcgccacggcagagatgattccttcgacagcctggattcctttggctctcgctctcggcagacgccttcaccagatgtagtcctcaggggaagcagcgatgggagaggaagcgactctgaatccgacttgcctcatcggaagctgccagatgtgaagaaggatgacatgtctgcacggcggacttcccatggtgagccgaaatcagcagtgccttttaaccagtacctcccgaacaaaagcaatcagacggcctacgtccccgcgcctctgagaaagaagaaagcagagagagaggaataccgcaagagctggagtaccgccacctccccgctgggtggggagaggcccttcagatacggtccgagaactcctgtgtctgatgacgcagagagcaccagcatgtttgacatgcggtgtgaggaggaggccgcggtgcagccgcacagcagggcccgccaggagcagctgcagctgataaataaccagctgagggaagaggacgacaaatggcaagatgacctggctcgttggaagagtcgtagaagaagtgtttctcaggacttaatcaagaaagaggaagaaaggaaaaaaatggagaagttactggctggagaagatgggacaagtgaacgaaggaaaagcatcaaaacctacagagaaattgttcaagaaaaagagcggagagagagagagctgcatgaagcatataagaacgctcggtcccaggaggaggcagaggggatccttcaacagtacattgagaggttcaccatcagtgaggctgttctcgaacgcttggagatgccaaaaattctggaaagaagccattcaacagagccaaatttatcctccttcctgaatgaccccaatcccatgaaatacctgcggcaacagtcactgcctccacccaaattcactgccactgttgaaaccaccattgctcgtgccagtgttctggataccagcatgtcagcaggcagtgggtctccaagcaaaactgtcactcccaaagcagtgcctatgctgacacccaagccttactcccagcccaaaaattctcaagatgttctgaagacctttaaggtagacgggaaagtcagtgtgaatggagagacggttcatagagaggaggagaaggaaagagagtgtcccacggtggcacctgcccactccttaaccaaatcccagatgtttgaaggtgtggccagagtgcacgggtctccactggagctgaaacaagacaacggtagcatcgagatcaacataaagaagccaaactctgttccccaagagctcgcagcaaccactgagaaaacggaaccgaatagtcaagaggacaagaatgatggtggaaaatcaagaaaagggaatatagaacttgcctcatcagaaccacagcattttacaacaactgtgactcgatgcagcccgaccgtggcctttgtggaatttccctccagcccccagctgaagaatgatgtgtcggaagaaaaagaccagaagaaaccagaaaatgaaatgagtggaaaggtggagttggtgctgtcacaaaaggtggtaaagccaaaatctccagaacccgaagcaacgctgacatttccatttctggacaaaatgcctgaagccaaccaactacatttgccaaatctcaattctcaagtggattctccaagcagtgagaagtcacctgttatgacacctcagtttaagttctgggcatgggacccagaagaggagcgcaggcgacaggaaaaatggcaacaggaacaggaacgtttgctccaggagagataccagaaggagcaggacaagctgaaagaagagtgggaaaaggcccaaaaggaggtggaagaggaagaacgcagatactatgaggaggagcgtaagataattgaagacactgtggttccatttactgtttcttcaagttccgctgaccagctgtctacctcttcctccatgactgaaggcagtgggacaatgaataagatagacctgggaaactgtcaagatgaaaaacaagacagaagatggaagaaatcattccagggagatgacagtgacttattgctgaagactagggaaagtgatcgactggaggagaagggcagcctaactgaaggggccttggctcattctgggaaccctgtatcaaaaggagtccatgaagaccatcagctggataccgaggctggggccccacactgtggaacaaacccacagcttgctcaggatccatcccagaatcagcagacatcaaatccaacgcacagttcagaagatgtgaagccaaaaaccctcccgctggataaaagcattaaccatcagatcgagtctcccagtgaaaggcggaagtctataagtggaaagaagctgtgctcttcctgtgggcttcctttgggtaaaggagctgcaatgatcatcgagaccctcaatctctattttcacatccagtgtttcaggtgtggaatttgtaaaggccagcttggagatgcagtgagtgggacggatgttaggattcgaaatggtctcctgaactgtaatgattgctacatgcgatccagaagtgccgggcagcctacaacattgtgacacggctttcaagcttccggatcactcaccatttctttactgagagtgtcccctggcaactgcttaacaaaatcccaagctcaggggcttctcagcatttacctaatttctgaaaggctcttctgaaaggtggtatctgttctttcgtagcacagtgtttatgtttttcctgtttattgttttggttttttttttttttttgcatttgcacagtatacacaaaagaatatggggttgtaatgatcctgaatagctcaaaaaaggttttagcatggtcaaacaggcttatggtttaaaatgtgttattctcttctttgggaattagctaaatgatgcaataaacctgttttgttttagaatgtctaggaattaaacactttatgtttacagaattgagctgcagaaagtgcaagacatgccaatttgagacacacggtcttctaagactgaaggataaatttaatgcatttcagaaactaaacatcacagcaagctctatctctgagctataatttgtttttaatgcaaagacactagtttgataatatatactgtaatcctgaaacatttgtgttacttacctttggaggtagaaattataccaataaattattgcaccgttagtattagattctgtgtaccttggaagttatgtcattaatataggctggttcatcaaataaagcaaaaccttgcaatatcagctagatttacactccgggacgttgcccaaaggtaggaagaaagcagagggaaatatttcagtcatcatttccaaagtcattatcaaaatctgtgaggaagtttaatcttccaaagagtcaatgtcagacatcaggcctctgttgcctgcttctctcgaggcactagattaggagtcttcaataagagacttaacatgaggtatatggaagatgaggcaccgagataagttcatcattaggtgtgagcactgctcacccttgctggcaagttctccttaagggcctgaagcacaggtgtccaaagaaaagcgttaagtccatcttaatagaatctatgtggtatatgatgtggtcagcccctggtctgtgatcagcaagaacctacagcacagattatgccctgcccacttcaatgaatacctactctcctccattctccatcactttttttgctatcaagaactccggaccttgcccatggagaagtttagagaggaactcttgtggagagctggtttattttctgccctgtgcgacgagtttcagctggccaagaaaggagtcaagttattaaaaagcatcacaatgtagatctccaggctggttttttgttttttgttgttaagactggggaaagggggactatttattctgccttaaatcaatggcaaataagtcaagatgacattttgtgaatgtagactatggatacactcctaatagattgatgtagtcataaaagggggtcaagtagatgtttttctgttatgtaagcaataatttttccgtgtcttattgagtatggctagcgattatttattacatgctagatgggttctttgcatgtgggttccatataggtgcagaaatttcctcagccactggagggatttcgaccatatttgtcatttggatgagctgttattagattgaaatctacacatcatttcattaaaaattgtgccttagaaaacgcaaagctgttgcacatggcgataaattatggatgcagtacattgaagagagatgaagtcacttccaagtttccaagacttctcatggaggtgtttgctgttttacaggaaaaaataaaaataaaaaaagaaaaaaagaaaaaattaaa

SEQ ID NO: 149088 - DNA, 5054 bp, Homo sapiens
  Payload ID: 9443
  Gene Symbol: LIMCH1
  Gene Name: LIM and calponin homology domains 1
  Uniprot ID: Q9UPQ0
  ENST ID: ENST00000508501
  CDS Start-End: 57-3227
ggcgacggcggcggccgtcctcatcccggcgcttgagaggacgcggggctgcgcaaatggcttgtcccgctctcggtctggaagctcttcagcccctgcagcccgagccgccccccgagcccgccttctccgaggcgcagaagtggattgagcaagtaactggcagaagttttggtgataaagattttcggacaggtttagaaaatggaatcctcctctgcgagttgctgaatgctataaagccaggacttgttaaaaagatcaatagattgcctacccccattgcaggactggacaatattatcttattcttgagaggttgtaaagagctcggccttaaagaatctcaactttttgacccgagtgacctccaggatacatccaacagagtaacagtcaagagccttgattatagtaggaagctgaaaaatgtattagttaccatttactggctgggaaaagcagcaaacagctgcacatcctacagcggaacgacactaaacctgaaggagtttgaaggattgttggctcagatgcgaaaggacactgatgacattgaaagtcctaaacgcagtatccgagacagtggctacatcgactgctgggattccgagcgcagcgactccctctctcctcctcgccacggcagagatgattccttcgacagcctggattcctttggctctcgctctcggcagacgccttcaccagatgtagtcctcaggggaagcagcgatgggagaggaagcgactctgaatccgacttgcctcatcggaagctgccagatgtgaagaaggatgacatgtctgcacggcggacttcccatggtgagccgaaatcagcagtgccttttaaccagtacctcccgaacaaaagcaatcagacggcctacgtccccgcgcctctgagaaagaagaaagcagagagagaggaataccgcaagagctggagtaccgccacctccccgctgggtggggagaggcccttcagatacggtccgagaactcctgtgtctgatgacgcagagagcaccagcatgtttgacatgcggtgtgaggaggaggccgcggtgcagccgcacagcagggcccgccaggagcagctgcagctgataaataaccagctgagggaagaggacgacaaatggcaagatgacctggctcgttggaagagtcgtagaagaagtgtttctcaggacttaatcaagaaagaggaagaaaggaaaaaaatggagaagttactggctggagaagatgggacaagtgaacgaaggaaaagcatcaaaacctacagagaaattgttcaagaaaaagagcggagagagagagagctgcatgaagcatataagaacgctcggtcccaggaggaggcagaggggatccttcaacagtacattgagaggttcaccatcagtgaggctgttctcgaacgcttggagatgccaaaaattctggaaagaagccattcaacagagccaaatttatcctccttcctgaatgaccccaatcccatgaaatacctgcggcaacagtcactgcctccacccaaattcactgccactgttgaaaccaccattgctcgtgccagtgttctggataccagcatgtcagcaggcagtgggtctccaagcaaaactgtcactcccaaagcagtgcctatgctgacacccaagccttactcccagcccaaaaattctcaagatgttctgaagacctttaaggtagacgggaaagtcagtgtgaatggagagacggttcatagagaggaggagaaggaaagagagtgtcccacggtggcacctgcccactccttaaccaaatcccagatgtttgaaggtgtggccagagtgcacgggtctccactggagctgaaacaagacaacggtagcatcgagatcaacataaagaagccaaactctgttccccaagagctcgcagcaaccactgagaaaacggaaccgaatagtcaagaggacaagaatgatggtggaaaatcaagaaaagggaatatagaacttgcctcatcagaaccacagcattttacaacaactgtgactcgatgcagcccgaccgtggcctttgtggaatttccctccagcccccagctgaagaatgatgtgtcggaagaaaaagaccagaagaaaccagaaaatgaaatgagtggaaaggtggagttggtgctgtcacaaaaggtggtaaagccaaaatctccagaacccgaagcaacgctgacatttccatttctggacaaaatgcctgaagccaaccaactacatttgccaaatctcaattctcaagtggattctccaagcagtgagaagtcacctgttatgacaccttttaagttctgggcatgggacccagaagaggagcgcaggcgacaggaaaaatggcaacaggaacaggaacgtttgctccaggagagataccagaaggagcaggacaagctgaaagaagagtgggaaaaggcccaaaaggaggtggaagaggaagaacgcagatactatgaggaggagcgtaagataattgaagacactgtggttccatttactgtttcttcaagttccgctgaccagctgtctacctcttcctccatgactgaaggcagtgggacaatgaataagatagacctgggaaactgtcaagatgaaaaacaagacagaagatggaagaaatcattccagggagatgacagtgacttattgctgaagactagggaaagtgatcgactggaggagaagggcagcctaactgaaggggccttggctcattctgggaaccctgtatcaaaaggagtccatgaagaccatcagctggataccgaggctggggccccacactgtggaacaaacccacagcttgctcaggatccatcccagaatcagcagacatcaaatccaacgcacagttcagaagatgtgaagccaaaaaccctcccgctggataaaagcattaaccatcagatcgagtctcccagtgaaaggcggaagtctataagtggaaagaagctgtgctcttcctgtgggcttcctttgggtaaaggagctgcaatgatcatcgagaccctcaatctctattttcacatccagtgtttcaggtgtggaatttgtaaaggccagcttggagatgcagtgagtgggacggatgttaggattcgaaatggtctcctgaactgtaatgattgctacatgcgatccagaagtgccgggcagcctacaacattgtgacacggctttcaagcttccggatcactcaccatttctttactgagagtgtcccctggcaactgcttaacaaaatcccaagctcaggggcttctcagcatttacctaatttctgaaaggctcttctgaaaggtggtatctgttctttcgtagcacagtgtttatgtttttcctgtttattgttttggttttttttttttttttgcatttgcacagtatacacaaaagaatatggggttgtaatgatcctgaatagctcaaaaaaggttttagcatggtcaaacaggcttatggtttaaaatgtgttattctcttctttgggaattagctaaatgatgcaataaacctgttttgttttagaatgtctaggaattaaacactttatgtttacagaattgagctgcagaaagtgcaagacatgccaatttgagacacacggtcttctaagactgaaggataaatttaatgcatttcagaaactaaacatcacagcaagctctatctctgagctataatttgtttttaatgcaaagacactagtttgataatatatactgtaatcctgaaacatttgtgttacttacctttggaggtagaaattataccaataaattattgcaccgttagtattagattctgtgtaccttggaagttatgtcattaatataggctggttcatcaaataaagcaaaaccttgcaatatcagctagatttacactccgggacgttgcccaaaggtaggaagaaagcagagggaaatatttcagtcatcatttccaaagtcattatcaaaatctgtgaggaagtttaatcttccaaagagtcaatgtcagacatcaggcctctgttgcctgcttctctcgaggcactagattaggagtcttcaataagagacttaacatgaggtatatggaagatgaggcaccgagataagttcatcattaggtgtgagcactgctcacccttgctggcaagttctccttaagggcctgaagcacaggtgtccaaagaaaagcgttaagtccatcttaatagaatctatgtggtatatgatgtggtcagcccctggtctgtgatcagcaagaacctacagcacagattatgccctgcccacttcaatgaatacctactctcctccattctccatcactttttttgctatcaagaactccggaccttgcccatggagaagtttagagaggaactcttgtggagagctggtttattttctgccctgtgcgacgagtttcagctggccaagaaaggagtcaagttattaaaaagcatcacaatgtagatctccaggctggttttttgttttttgttgttaagactggggaaagggggactatttattctgccttaaatcaatggcaaataagtcaagatgacattttgtgaatgtagactatggatacactcctaatagattgatgtagtcataaaagggggtcaagtagatgtttttctgttatgtaagcaataatttttccgtgtcttattgagtatggctagcgattatttattacatgctagatgggttctttgcatgtgggttccatataggtgcagaaatttcctcagccactggagggatttcgaccatatttgtcatttggatgagctgttattagattgaaatctacacatcatttcattaaaaattgtgccttagaaaacgcaaagctgttgcacatggcgataaattatggatgcagtacattgaagagagatgaagtcacttccaagtttccaagacttctcatggaggtgtttgctgttttacaggaaaaaataaaaataaaaaaagaaaaaaagaaaaaattaaa

SEQ ID NO: 149089 - DNA, 5129 bp, Homo sapiens
  Payload ID: 9443
  Gene Symbol: LIMCH1
  Gene Name: LIM and calponin homology domains 1
  Uniprot ID: Q9UPQ0
  ENST ID: ENST00000513024
  CDS Start-End: 579-3311
ggatcgggagaccattatgggatggggaagcctttaccatacctaggcctgggaggttgagtgggacaagaggagatgaggaaccttctggaaaccccctaaccacctgcaggaagggacgagataaataaatgcacgtctctcttcagctcactgaccatctgcctacctcccgttaatggaaccgcgactcacagcaagtaactggcagaagttttggtgataaagattttcggacaggtttagaaaatggaatcctcctctgcgagttgctgaatgctataaagccaggacttgttaaaaagatcaatagattgcctacccccattgcaggactggacaatattatcttattcttgagaggttgtaaagagctcggccttaaagaatctcaactttttgacccgagtgacctccaggatacatccaacagagtaacagtcaagagccttgattatagtaggaagctgaaaaatgtattagttaccatttactggctgggaaaagcagcaaacagctgcacatcctacagcggaacgacactaaacctgaaggagtttgaaggattgttggctcagatgcgaaaggacactgatgacattgaaagtcctaaacgcagtatccgagacagtggctacatcgactgctgggattccgagcgcagcgactccctctctcctcctcgccacggcagagatgattccttcgacagcctggattcctttggctctcgctctcggcagacgccttcaccagatgtagtcctcaggggaagcagcgatgggagaggaagcgactctgaatccgacttgcctcatcggaagctgccagatgtgaagaaggatgacatgtctgcacggcggacttcccatggtgagccgaaatcagcagtgccttttaaccagtacctcccgaacaaaagcaatcagacggcctacgtccccgcgcctctgagaaagaagaaagcagagagagaggaataccgcaagagctggagtaccgccacctccccgctgggtggggagaggcccttcaggagcaccagcatgtttgacatgcggtgtgaggaggaggccgcggtgcagccgcacagcagggcccgccaggagcagctgcagctgataaataaccagctgagggaagaggacgacaaatggcaagatgacctggctcgttggaagagtcgtagaagaagtgtttctcaggacttaatcaagaaagaggaagaaaggaaaaaaatggagaagttactggctggagaagatgggacaagtgaacgaaggaaaagcatcaaaacctacagagaaattgttcaagaaaaagagcggagagagagagagctgcatgaagcatataagaacgctcggtcccaggaggaggcagaggggatccttcaacagtacattgagaggttcaccatcagtgaggctgttctcgaacgcttggagatgccaaaaattctggaaagaagccattcaacagagccaaatttatcctccttcctgaatgaccccaatcccatgaaatacctgcggcaacagtcactgcctccacccaaattcactgccactgttgaaaccaccattgctcgtgccagtgttctggataccagcatgtcagcaggcagtgggtctccaagcaaaactgtcactcccaaagcagtgcctatgctgacacccaagccttactcccagcccaaaaattctcaagatgttctgaagacctttaaggtagacgggaaagtcagtgtgaatggagagacggttcatagagaggaggagaaggaaagagagtgtcccacggtggcacctgcccactccttaaccaaatcccagatgtttgaaggtgtggccagagtgcacgggtctccactggagctgaaacaagacaacggtagcatcgagatcaacataaagaagccaaactctgttccccaagagctcgcagcaaccactgagaaaacggaaccgaatagtcaagaggacaagaatgatggtggaaaatcaagaaaagggaatatagaacttgcctcatcagaaccacagcattttacaacaactgtgactcgatgcagcccgaccgtggcctttgtggaatttccctccagcccccagctgaagaatgatgtgtcggaagaaaaagaccagaagaaaccagaaaatgaaatgagtggaaaggtggagttggtgctgtcacaaaaggtggtaaagccaaaatctccagaacccgaagcaacgctgacatttccatttctggacaaaatgcctgaagccaaccaactacatttgccaaatctcaattctcaagagtcgcctggcactgccagtgttccgcttagagttcagaactcttggcgacgatcccagtttttctcccagtcagtggattctccaagcagtgagaagtcacctgttatgacaccttttaagttctgggcatgggacccagaagaggagcgcaggcgacaggaaaaatggcaacaggaacaggaacgtttgctccaggagagataccagaaggagcaggacaagctgaaagaagagtgggaaaaggcccaaaaggaggtggaagaggaagaacgcagatactatgaggaggagcgtaagataattgaagacactgtggttccatttactgtttcttcaagttccgctgaccagctgtctacctcttcctccatgactgaaggcagtgggacaatgaataagatagacctgggaaactgtcaagatgaaaaacaagacagaagatggaagaaatcattccagggagatgacagtgacttattgctgaagactagggaaagtgatcgactggaggagaagggcagcctaactgaaggggccttggctcattctgggaaccctgtatcaaaaggagtccatgaagaccatcagctggataccgaggctggggccccacactgtggaacaaacccacagcttgctcaggatccatcccagaatcagcagacatcaaatccaacgcacagttcagaagatgtgaagccaaaaaccctcccgctggataaaagcattaaccatcagatcgagtctcccagtgaaaggcggaagtctataagtggaaagaagctgtgctcttcctgtgggcttcctttgggtaaaggagctgcaatgatcatcgagaccctcaatctctattttcacatccagtgtttcaggtgtggaatttgtaaaggccagcttggagatgcagtgagtgggacggatgttaggattcgaaatggtctcctgaactgtaatgattgctacatgcgatccagaagtgccgggcagcctacaacattgtgacacggctttcaagcttccggatcactcaccatttctttactgagagtgtcccctggcaactgcttaacaaaatcccaagctcaggggcttctcagcatttacctaatttctgaaaggctcttctgaaaggtggtatctgttctttcgtagcacagtgtttatgtttttcctgtttattgttttggttttttttttttttttgcatttgcacagtatacacaaaagaatatggggttgtaatgatcctgaatagctcaaaaaaggttttagcatggtcaaacaggcttatggtttaaaatgtgttattctcttctttgggaattagctaaatgatgcaataaacctgttttgttttagaatgtctaggaattaaacactttatgtttacagaattgagctgcagaaagtgcaagacatgccaatttgagacacacggtcttctaagactgaaggataaatttaatgcatttcagaaactaaacatcacagcaagctctatctctgagctataatttgtttttaatgcaaagacactagtttgataatatatactgtaatcctgaaacatttgtgttacttacctttggaggtagaaattataccaataaattattgcaccgttagtattagattctgtgtaccttggaagttatgtcattaatataggctggttcatcaaataaagcaaaaccttgcaatatcagctagatttacactccgggacgttgcccaaaggtaggaagaaagcagagggaaatatttcagtcatcatttccaaagtcattatcaaaatctgtgaggaagtttaatcttccaaagagtcaatgtcagacatcaggcctctgttgcctgcttctctcgaggcactagattaggagtcttcaataagagacttaacatgaggtatatggaagatgaggcaccgagataagttcatcattaggtgtgagcactgctcacccttgctggcaagttctccttaagggcctgaagcacaggtgtccaaagaaaagcgttaagtccatcttaatagaatctatgtggtatatgatgtggtcagcccctggtctgtgatcagcaagaacctacagcacagattatgccctgcccacttcaatgaatacctactctcctccattctccatcactttttttgctatcaagaactccggaccttgcccatggagaagtttagagaggaactcttgtggagagctggtttattttctgccctgtgcgacgagtttcagctggccaagaaaggagtcaagttattaaaaagcatcacaatgtagatctccaggctggttttttgttttttgttgttaagactggggaaagggggactatttattctgccttaaatcaatggcaaataagtcaagatgacattttgtgaatgtagactatggatacactcctaatagattgatgtagtcataaaagggggtcaagtagatgtttttctgttatgtaagcaataatttttccgtgtcttattgagtatggctagcgattatttattacatgctagatgggttctttgcatgtgggttccatataggtgcagaaatttcctcagccactggagggatttcgaccatatttgtcatttggatgagctgttattagattgaaatctacacatcatttcattaaaaattgtgccttagaaaacgcaaagctgttgcacatggcgataaattatggatgcagtacattgaagagagatgaagtcacttccaagtttccaagacttctcatggaggtgtttgctgttttacaggaaaaaataaaaataaaaaaagaaaaaaagaa

SEQ ID NO: 149090 - DNA, 5467 bp, Homo sapiens
  Payload ID: 9443
  Gene Symbol: LIMCH1
  Gene Name: LIM and calponin homology domains 1
  ENST ID: ENST00000503057
  CDS Start-End: 435-4838
agcatttcagccgcagcagcctgcttgtggacagagcaggggttggcagtggtgacgactgttttgggaaaggaaatgtaagggcatttcggctgctgtgctggggctgacgaggagcacacaggagagatgcccctcccatctcccagagtgggttggctggagttcattgcggagcatgaggacgtgtgggggacaatattatcttattcttgagaggttgtaaagagctcggccttaaagaatctcaactttttgacccgagtgacctccaggatacatccaacagagtaacagtcaagagccttgattatagtaggaagctgaaaaatgtattagttaccatttactggctgggaaaagcagcaaacagctgcacatcctacagcggaacgacactaaacctgaaggagtttgaaggattgttggctcagatgcgaaaggacactgatgacattgaaagtcctaaacgcagtatccgagacagtggctacatcgactgctgggattccgagcgcagcgactccctctctcctcctcgccacggcagagatgattccttcgacagcctggattcctttggctctcgctctcggcagacgccttcaccagatgtagtcctcaggggaagcagcgatgggagaggaagcgactctgaatccgacttgcctcatcggaagctgccagatgtgaagaaggatgacatgtctgcacggcggacttcccatggtgagccgaaatcagcagtgccttttaaccagtacctcccgaacaaaagcaatcagacggcctacgtccccgcgcctctgagaaagaagaaagcagagagagaggaataccgcaagagctggagtaccgccacctccccgctgggtggggagaggcccttcagctttcctgaaacgatagaggaagaggggagtgaagtggggtctgctggtgaagacaacccagctggccaaatgaatcctggttggaagccttccgatggtgggtgtgaattacctgacggcagtggtaaggagcacccttcttcagacggggctgtggtggcaccagctcccaagtctgaagaaaaagatgctgctgagatccaaaagcgcaaaaggctagagcaagctggaatcaaggtcatgccagcagcacagcgctttgccagtcaaaaacaattaagtgaagagaaagaagctattcgtgatattgtccttcgcaaagaaaactctttcctgacccaccaacatggcaacgattcagaggcagaaggtgaagttgtgtgtcgactgcctgatcttgagaaggatgactttgctgcaaggagagcaaggatgaaccaaaccaagccaatggtgccattaaatcaactcctctatggcccttatccaaagaaaggggcagagaaatcagatggcagcaaacagctctcaaagggaatctcaaaaaaaagaagtctagaatataaaagaaaccagggccacacagaagaggtgaagttgatagtgacctgtaacatgagggctcaggaaagtgaacctgtggaaggaggactcaggaaggtgccagatcttcacaaggatgacctggcccagcagagaattcagggcagccttgcccctcaccgcgagcccccgagcttcattacgctctccaacataacagaagctgacttggagacgtgggagagactcaaagtgtcagaaaaggcgagggatggagatgttcagcacatctgtgcttctgagccttccccagaaattaaagcagaaactgccattcgtgatgactttgccaaccgcaaagcaagggcctctaagaaagcttccagccccaggcaaaagtttgtgcactttgggccagtgacggagctagatcagcagaaatggaagcggcttagcattggcaaggctgggcctagagaggatgaagaagaagtcatctgtcatggcagcaagattcaaatggactctgtgtctcctgtctcagcggccacttccagcttaaagggccaccaaatatttaatcgacaaaatgactgcagaacaatgaattgtggccgaggtgactattgcagaagggcctcgtggctggctcctgtgccggagtctcaggaagagtgggtctgcagtttgggcgagtgcccgagggggacagaggaagttacatccaaacagctgccacaggatggcaaagaagaaacagaaagcgctccaagagattctgagaggctgtcaaaggcagaaagatcagaggacagcagccagccactggtgtgtcctctggcctctgagtgtgaggcttcagggacagaagagaagttggagaagatgacagctcctgcctggagtggcagtggactgaaaggccagcgaaagttggatgattcacgaaaagatgacatgatggccaggagaactgggatgtcccttagacacactggatccaacccaaaccagttccttccagttccatttgcaaagcaacaggatgtggaagaatcttctaaaggtctacccatgaaagatcagagatacggtccgagaactcctgtgtctgatgacgcagagagcaccagcatgtttgacatgcggtgtgaggaggaggccgcggtgcagccgcacagcagggcccgccaggagcagctgcagctgataaataaccagctgagggaagaggacgacaaatggcaagatgacctggctcgttggaagagtcgtagaagaagtgtttctcaggacttaatcaagaaagaggaagaaaggaaaaaaatggagaagttactggctggagaagatgggacaagtgaacgaaggaaaagcatcaaaacctacagagaaattgttcaagaaaaagagcggagagagagagagctgcatgaagcatataagaacgctcggtcccaggaggaggcagaggggatccttcaacagtacattgagaggttcaccatcagtgaggctgttctcgaacgcttggagatgccaaaaattctggaaagaagccattcaacagagccaaatttatcctccttcctgaatgaccccaatcccatgaaatacctgcggcaacagtcactgcctccacccaaattcactgccactgttgaaaccaccattgctcgtgccagtgttctggataccagcatgtcagcaggcagtgggtctccaagcaaaactgtcactcccaaagcagtgcctatgctgacacccaagccttactcccagcccaaaaattctcaagatgttctgaagacctttaaggtagacgggaaagtcagtgtgaatggagagacggttcatagagaggaggagaaggaaagagagtgtcccacggtggcacctgcccactccttaaccaaatcccagatgtttgaaggtgtggccagagtgcacgggtctccactggagctgaaacaagacaacggtagcatcgagatcaacataaagaagccaaactctgttccccaagagctcgcagcaaccactgagaaaacggaaccgaatagtcaagaggacaagaatgatggtggaaaatcaagaaaagggaatatagaacttgcctcatcagaaccacagcattttacaacaactgtgactcgatgcagcccgaccgtggcctttgtggaatttccctccagcccccagctgaagaatgatgtgtcggaagaaaaagaccagaagaaaccagaaaatgaaatgagtggaaaggtggagttggtgctgtcacaaaaggtggtaaagccaaaatctccagaacccgaagcaacgctgacatttccatttctggacaaaatgcctgaagccaaccaactacatttgccaaatctcaattctcaagtggattctccaagcagtgagaagtcacctgttatgacaccttttaagttctgggcatgggacccagaagaggagcgcaggcgacaggaaaaatggcaacaggaacaggaacgtttgctccaggagagataccagaaggagcaggacaagctgaaagaagagtgggaaaaggcccaaaaggaggtggaagaggaagaacgcagatactatgaggaggagcgtaagataattgaagacactgtggttccatttactgtttcttcaagttccgctgaccagctgtctacctcttcctccatgactgaaggcagtgggacaatgaataagatagacctgggaaactgtcaagatgaaaaacaagacagaagatggaagaaatcattccagggagatgacagtgacttattgctgaagactagggaaagtgatcgactggaggagaagggcagcctaactgaaggggccttggctcattctgggaaccctgtatcaaaaggagtccatgaagaccatcagctggataccgaggctggggccccacactgtggaacaaacccacagcttgctcaggatccatcccagaatcagcagacatcaaatccaacgcacagttcagaagatgtgaagccaaaaaccctcccgctggataaaagcattaaccatcagatcgagtctcccagtgaaaggcggaagaaaagtccccgagagcacttccaggctgggcctttctctccctgttctcccacccctcccggtcagtcaccaaacaggtctataagtggaaagaagctgtgctcttcctgtgggcttcctttgggtaaaggagctgcaatgatcatcgagaccctcaatctctattttcacatccagtgtttcaggtgtggaatttgtaaaggccagcttggagatgcagtgagtgggacggatgttaggattcgaaatggtctcctgaactgtaatgattgctacatgcgatccagaagtgccgggcagcctacaacattgtgacacggctttcaagcttccggatcactcaccatttctttactgagagtgtcccctggcaactgcttaacaaaatcccaagctcaggggcttctcagcatttacctaatttctgaaaggctcttctgaaaggtggtatctgttctttcgtagcacagtgtttatgtttttcctgtttattgttttggttttttttttttttttgcatttgcacagtatacacaaaagaatatggggttgtaatgatcctgaatagctcaaaaaaggttttagcatggtcaaacaggcttatggtttaaaatgtgttattctcttctttgggaattagctaaatgatgcaataaacctgttttgttttagaatgtctaggaattaaacactttatgtttacagaattgagctgcagaaagtgcaagacatgccaatttgagacacacggtcttctaagactgaaggataaatttaatgcatttcagaaactaaacatcacagcaagctctatctctgagctataatttgtttttaatgcaaagacactagtttgataatatatactgtaatcctgaaacatttgtgttacttacctttggaggtagaaattataccaataaattattgcaccgttagtatta

SEQ ID NO: 149091 - DNA, 3543 bp, Homo sapiens
  Payload ID: 9443
  Gene Symbol: LIMCH1
  Gene Name: LIM and calponin homology domains 1
  ENST ID: ENST00000514096
  CDS Start-End: 221-2914
tttatttttcctttctattgggaatgcagaggggactttcgcgagcatcccagggaatctgcagtgtggcattccagtctttgcggatgagaacatgcctctctgccagtgttatccacagtcctaattttaagcgacagtctggatgatattaaattgaggtttatctttgagtgaccagagttatttttgttttagtcagcctggactattgtaattaatgctaagacactggcgggaacaaggcttttattataatacgagggacactgatgacattgaaagtcctaaacgcagtatccgagacagtggctacatcgactgctgggattccgagcgcagcgactccctctctcctcctcgccacggcagagatgattccttcgacagcctggattcctttggctctcgctctcggcagacgccttcaccagatgtagtcctcaggggaagcagcgatgggagaggaagcgactctgaatccgacttgcctcatcggaagctgccagatgtgaagaaggatgacatgtctgcacggcggacttcccatggtgagccgaaatcagcagtgccttttaaccagtacctcccgaacaaaagcaatcagacggcctacgtccccgcgcctctgagaaagaagaaagcagagagagaggaataccgcaagagctggagtaccgccacctccccgctgggtggggagaggcccttcaggagcaccagcatgtttgacatgcggtgtgaggaggaggccgcggtgcagccgcacagcagggcccgccaggagcagctgcagctgataaataaccagctgagggaagaggacgacaaatggcaagatgacctggctcgttggaagagtcgtagaagaagtgtttctcaggacttaatcaagaaagaggaagaaaggaaaaaaatggagaagttactggctggagaagatgggacaagtgaacgaaggaaaagcatcaaaacctacagagaaattgttcaagaaaaagagcggagagagagagagctgcatgaagcatataagaacgctcggtcccaggaggaggcagaggggatccttcaacagtacattgagaggttcaccatcagtgaggctgttctcgaacgcttggagatgccaaaaattctggaaagaagccattcaacagagccaaatttatcctccttcctgaatgaccccaatcccatgaaatacctgcggcaacagtcactgcctccacccaaattcactgccactgttgaaaccaccattgctcgtgccagtgttctggataccagcatgtcagcaggcagtgggtctccaagcaaaactgtcactcccaaagcagtgcctatgctgacacccaagccttactcccagcccaaaaattctcaagatgttctgaagacctttaaggtagacgggaaagtcagtgtgaatggagagacggttcatagagaggaggagaaggaaagagagtgtcccacggtggcacctgcccactccttaaccaaatcccagatgtttgaaggtgtggccagagtgcacgggtctccactggagctgaaacaagacaacggtagcatcgagatcaacataaagaagccaaactctgttccccaagagctcgcagcaaccactgagaaaacggaaccgaatagtcaagaggacaagaatgatggtggaaaatcaagaaaagggaatatagaacttgcctcatcagaaccacagcattttacaacaactgtgactcgatgcagcccgaccgtggcctttgtggaatttccctccagcccccagctgaagaatgatgtgtcggaagaaaaagaccagaagaaaccagaaaatgaaatgagtggaaaggtggagttggtgctgtcacaaaaggtggtaaagccaaaatctccagaacccgaagcaacgctgacatttccatttctggacaaaatgcctgaagccaaccaactacatttgccaaatctcaattctcaagtggattctccaagcagtgagaagtcacctgttatgacaccttttaagttctgggcatgggacccagaagaggagcgcaggcgacaggaaaaatggcaacaggaacaggaacgtttgctccaggagagataccagaaggagcaggacaagctgaaagaagagtgggaaaaggcccaaaaggaggtggaagaggaagaacgcagatactatgaggaggagcgtaagataattgaagacactgtggttccatttactgtttcttcaagttccgctgaccagctgtctacctcttcctccatgactgaaggcagtgggacaatgaataagatagacctgggaaactgtcaagatgaaaaacaagacagaagatggaagaaatcattccagggagatgacagtgacttattgctgaagactagggaaagtgatcgactggaggagaagggcagcctaactgaaggggccttggctcattctgggaaccctgtatcaaaaggagtccatgaagaccatcagctggataccgaggctggggccccacactgtggaacaaacccacagcttgctcaggatccatcccagaatcagcagacatcaaatccaacgcacagttcagaagatgtgaagccaaaaaccctcccgctggataaaagcattaaccatcagatcgagtctcccagtgaaaggcggaagtctataagtggaaagaagctgtgctcttcctgtgggcttcctttgggtaaaggagctgcaatgatcatcgagaccctcaatctctattttcacatccagtgtttcaggtgtggaatttgtaaaggccagcttggagatgcagtgagtgggacggatgttaggattcgaaatggtctcctgaactgtaatgattgctacatgcgatccagaagtgccgggcagcctacaacattgtgacacggctttcaagcttccggatcactcaccatttctttactgagagtgtcccctggcaactgcttaacaaaatcccaagctcaggggcttctcagcatttacctaatttctgaaaggctcttctgaaaggtggtatctgttctttcgtagcacagtgtttatgtttttcctgtttattgttttggttttttttttttttttgcatttgcacagtatacacaaaagaatatggggttgtaatgatcctgaatagctcaaaaaaggttttagcatggtcaaacaggcttatggtttaaaatgtgttattctcttctttgggaattagctaaatgatgcaataaacctgttttgttttagaatgtctaggaattaaacactttatgtttacagaattgagctgcagaaagtgcaagacatgccaatttgagacacacggtcttctaagactgaaggataaatttaatgcatttcagaaactaaacatcacagcaagctctatctctgagctataatttgtttttaatgcaaagacactagtttgataatatatactgtaatcctgaaacatttgtgttacttacctttggaggtagaaattataccaataaattattgcaccgttagtatta

SEQ ID NO: 149092 - DNA, 551 bp, Homo sapiens
  Payload ID: 9443
  Gene Symbol: LIMCH1
  Gene Name: LIM and calponin homology domains 1
  ENST ID: ENST00000511424
  CDS Start-End: 474-551
aaaaaggtggcgtatatattgacactactaaaacagatctgccaaagagcctgttgaatttttctttgtaatgcaactttttggagccaactcaagtaactggcagaagttttggtgataaagattttcggacaggtttagaaaatggaatcctcctctgcgagttgctgaatgctataaagccaggacttgttaaaaagatcaatagattgcctacccccattgcaggactggacaatattatcttattcttgagaggttgtaaagagctcggccttaaagaatctcaactttttgacccgagtgacctccaggatacatccaacagagtaacagtcaagagccttgattatagtaggaagctgaaaaatgtattagttaccatttactggctgggaaaagcagcaaacagctgcacatcctacagcggaacgacactaaacctgaaggagtttgaaggattgttggctcagatgcgaaaggacactgatgacattgaaagtcctaaacgcagtatccgagacagtggctacatcgactgctgggattcc

SEQ ID NO: 149093 - DNA, 4792 bp, Homo sapiens
  Payload ID: 9443
  Gene Symbol: LIMCH1
  Gene Name: LIM and calponin homology domains 1
  ENST ID: ENST00000512632
  CDS Start-End: 35-2977
atcccggcgcttgagaggacgcggggctgcgcaaatggcttgtcccgctctcggtctggaagctcttcagcccctgcagcccgagccgccccccgagcccgccttctccgaggcgcagaagtggattgagcaagtaactggcagaagttttggtgataaagattttcggacaggtttagaaaatggaatcctcctctgcgagttgctgaatgctataaagccaggacttgttaaaaagatcaatagattgcctacccccattgcaggactggacaatattatcttattcttgagaggttgtaaagagctcggccttaaagaatctcaactttttgacccgagtgacctccaggatacatccaacagagtaacagtcaagagccttgattatagtaggaagctgaaaaatgtattagttaccatttactggctgggaaaagcagcaaacagctgcacatcctacagcggaacgacactaaacctgaaggagtttgaaggattgttggctcagatgcgaaaggacactgatgacattgaaagtcctaaacgcagtatccgagacagtggctacatcgactgctgggattccgagcgcagcgactccctctctcctcctcgccacggcagagatgattccttcgacagcctggattcctttggctctcgctctcggcagacgccttcaccagatgtagtcctcaggggaagcagcgatgggagaggaagcgactctgaatccgacttgcctcatcggaagctgccagatgtgaagaaggatgacatgtctgcacggcggacttcccatggtgagccgaaatcagcagtgccttttaaccagtacctcccgaacaaaagcaatcagacggcctacgtccccgcgcctctgagaaagaagaaagcagagagagaggaataccgcaagagctggagtaccgccacctccccgctgggtggggagaggcccttcagatacggtccgagaactcctgtgtctgatgacgcagagagcaccagcatgtttgacatgcggtgtgaggaggaggccgcggtgcagccgcacagcagggcccgccaggagcagctgcagctgataaataaccagctgagggaagaggacgacaaatggcaagatgacctggctcgttggaagagtcgtagaagaagtgtttctcaggacttaatcaagaaagaggaagaaaggaaaaaaatggagaagttactggctggagaagatgggacaagtgaacgaaggaaaagcatcaaaacctacagagaaattgttcaagaaaaagagcggagagagagagagctgcatgaagcatataagaacgctcggtcccaggaggaggcagaggggatccttcaacagtacattgagaggttcaccatcagtgaggctgttctcgaacgcttggagatgccaaaaattctggaaagaagccattcaacagagccaaatttatcctccttcctgaatgaccccaatcccatgaaatacctgcggcaacagtcactgcctccacccaaattcactgccactgttgaaaccaccattgctcgtgccagtgttctggataccagcatgtcagcaggcagtgggtctccaagcaaaactgtcactcccaaagcagtgcctatgctgacacccaagccttactcccagcccaaaaattctcaagatgttctgaagacctttaaggtagacgggaaagtcagtgtgaatggagagacggttcatagagaggaggagaaggaaagagagtgtcccacggtggcacctgcccactccttaaccaaatcccagatgtttgaaggtgtggccagagtgcacgggtctccactggagctgaaacaagacaacggtagcatcgagatcaacataaagaagccaaactctgttccccaagagctcgcagcaaccactgagaaaacggaaccgaatagtcaagaggacaagaatgatggtggaaaatcaagaaaagggaatatagaacttgcctcatcagaaccacagcattttacaacaactgtgactcgatgcagcccgaccgtggcctttgtggaatttccctccagcccccagctgaagaatgatgtgtcggaagaaaaagaccagaagaaaccagaaaatgaaatgagtggaaaggtggagttggtgctgtcacaaaaggagagataccagaaggagcaggacaagctgaaagaagagtgggaaaaggcccaaaaggaggtggaagaggaagaacgcagatactatgaggaggagcgtaagataattgaagacactgtggttccatttactgtttcttcaagttccgctgaccagctgtctacctcttcctccatgactgaaggcagtgggacaatgaataagatagacctgggaaactgtcaagatgaaaaacaagacagaagatggaagaaatcattccagggagatgacagtgacttattgctgaagactagggaaagtgatcgactggaggagaagggcagcctaactgaaggggccttggctcattctgggaaccctgtatcaaaaggagtccatgaagaccatcagctggataccgaggctggggccccacactgtggaacaaacccacagcttgctcaggatccatcccagaatcagcagacatcaaatccaacgcacagttcagaagatgtgaagccaaaaaccctcccgctggataaaagcattaaccatcagatcgagtctcccagtgaaaggcggaagtctataagtggaaagaagctgtgctcttcctgtgggcttcctttgggtaaaggagctgcaatgatcatcgagaccctcaatctctattttcacatccagtgtttcaggtgtggaatttgtaaaggccagcttggagatgcagtgagtgggacggatgttaggattcgaaatggtctcctgaactgtaatgattgctacatgcgatccagaagtgccgggcagcctacaacattgtgacacggctttcaagcttccggatcactcaccatttctttactgagagtgtcccctggcaactgcttaacaaaatcccaagctcaggggcttctcagcatttacctaatttctgaaaggctcttctgaaaggtggtatctgttctttcgtagcacagtgtttatgtttttcctgtttattgttttggttttttttttttttttgcatttgcacagtatacacaaaagaatatggggttgtaatgatcctgaatagctcaaaaaaggttttagcatggtcaaacaggcttatggtttaaaatgtgttattctcttctttgggaattagctaaatgatgcaataaacctgttttgttttagaatgtctaggaattaaacactttatgtttacagaattgagctgcagaaagtgcaagacatgccaatttgagacacacggtcttctaagactgaaggataaatttaatgcatttcagaaactaaacatcacagcaagctctatctctgagctataatttgtttttaatgcaaagacactagtttgataatatatactgtaatcctgaaacatttgtgttacttacctttggaggtagaaattataccaataaattattgcaccgttagtattagattctgtgtaccttggaagttatgtcattaatataggctggttcatcaaataaagcaaaaccttgcaatatcagctagatttacactccgggacgttgcccaaaggtaggaagaaagcagagggaaatatttcagtcatcatttccaaagtcattatcaaaatctgtgaggaagtttaatcttccaaagagtcaatgtcagacatcaggcctctgttgcctgcttctctcgaggcactagattaggagtcttcaataagagacttaacatgaggtatatggaagatgaggcaccgagataagttcatcattaggtgtgagcactgctcacccttgctggcaagttctccttaagggcctgaagcacaggtgtccaaagaaaagcgttaagtccatcttaatagaatctatgtggtatatgatgtggtcagcccctggtctgtgatcagcaagaacctacagcacagattatgccctgcccacttcaatgaatacctactctcctccattctccatcactttttttgctatcaagaactccggaccttgcccatggagaagtttagagaggaactcttgtggagagctggtttattttctgccctgtgcgacgagtttcagctggccaagaaaggagtcaagttattaaaaagcatcacaatgtagatctccaggctggttttttgttttttgttgttaagactggggaaagggggactatttattctgccttaaatcaatggcaaataagtcaagatgacattttgtgaatgtagactatggatacactcctaatagattgatgtagtcataaaagggggtcaagtagatgtttttctgttatgtaagcaataatttttccgtgtcttattgagtatggctagcgattatttattacatgctagatgggttctttgcatgtgggttccatataggtgcagaaatttcctcagccactggagggatttcgaccatatttgtcatttggatgagctgttattagattgaaatctacacatcatttcattaaaaattgtgccttagaaaacgcaaagctgttgcacatggcgataaattatggatgcagtacattgaagagagatgaagtcacttccaagtttccaagacttctcatggaggtgtttgctgttttacaggaaaaaataaaaataaaaaaagaaaaaaa

SEQ ID NO: 149094 - DNA, 1570 bp, Homo sapiens
  Payload ID: 9443
  Gene Symbol: LIMCH1
  Gene Name: LIM and calponin homology domains 1
  ENST ID: ENST00000509638
  CDS Start-End: 617-1078
acggcgcgttggagcccgggcggcgccgggaacagctgccgcggcgtcctctagcagcgcgcggctctcccgggacctgcgccggccgggggcggggagaggcggggaggggaggccggcgggcgggaaggggcggggagcgcgctcctgcggcggcgacggcggcggccgtcctcatcccggcgcttgagaggacgcggggctgcgcaaatggcttgtcccgctctcggtctggaagctcttcagcccctgcagcccgagccgccccccgagcccgccttctccgaggcgcagaagtggattgaggttgctgaatgctataaagccaggacttgttaaaaagatcaatagattgcctacccccattgcaggactggacaatattatcttattcttgagaggttgtaaagagctcggccttaaagaatctcaactttttgacccgagtgacctccaggatacatccaacagagtaacagtcaagagccttgattatagtaggaagctgaaaaatgtattagttaccatttactggctgggaaaagcagcaaacagctgcacatcctacagcggaacgacactaaacctgaaggagtttgaaggattgttggctcagatgcgaaaggacactgatgacattgaaagtcctaaacgcagtatccgagacagtggctacatcgactgctgggattccgagcgcagcgactccctctctcctcctcgccacggcagagatgattccttcgacagcctggattcctttggctctcgctctcggcagacgccttcaccagatgtagtcctcaggggaagcagcgatgggagaggaagcgactctgaatccgacttgcctcatcggaagctgccagatgtgaagaaggatgacatgtctgcacggcggacttcccatggtgagccgaaatcagcagtgccttttaaccagtacctcccgaacaaaagcaatcagacggcctacgtccccgcgcctctgagaaagaagaaagcagagagagaggaataccgcaagagctggagtaccgccacctccccgctgggtggggagaggcccttcaggtaaggcctgagcaccgctgccctcttcctggcttgggcatgagtggtttgggaactgcagctcctggacaggaacgaggttaaatgaccaattcagaactttgatggaagattacagatggaggtgggtgggacagatctttggagagagcttgtcaggagaaaatagaagcttcgtgagtgcgcctagaacagtgcctggcacacagtaggtattcagcaactacttgtctaaataagcagatttctgaaaccaattctgttgataggacattgagagcaaatctgtcatccttgtccttctgcggagactgcttgactcccaatcctgtcagattaggcgtagaaagattcctatctttatgcaaaaagatgttttaaaactctaggcttaaattaacttgatataagctcaaatatgtgatgcatggaatgtggttcacaataacatatagaaatagtcataataaatggatttctcatctctttagagaaa

SEQ ID NO: 149095 - DNA, 8405 bp, Homo sapiens
  Payload ID: 9444
  Gene Symbol: LMCD1
  Gene Name: LIM and cysteine-rich domains 1
  Uniprot ID: Q9NZU5
  ENST ID: ENST00000157600
  CDS Start-End: 233-1330
ggacagcctcgcgctgggattggctggcctcgcgcgagcgccggcgcggagtggctggcgaggttttagagggagtcccgctctccaattaaagcggcccagctgcgcctggctgcgcacagagctccctcccaggcccgcgaacttggccattcagccgccgctgtccccgctgcgcgccctcgcgcctctgcctgagaagccaggcgctgttcccccaccccagaagaggatggcaaaggtggctaaggacctcaacccaggagttaaaaagatgtccctgggccagctgcagtcagcaagaggtgtggcatgtttgggatgcaaggggacgtgttcgggcttcgagccacattcatggaggaaaatatgcaagtcttgcaaatgcagccaagaggaccactgcctaacatctgacctagaagacgatcggaaaattggccgcttgctgatggactccaagtattccaccctcactgctcgggtgaaaggcggggacggcatccggatttacaagaggaaccggatgatcatgaccaaccctattgctactgggaaagatcccacttttgacaccatcacctacgagtgggctccccctggagtcacccagaaactgggactgcagtacatggagctcatccccaaggagaagcagccagtgacaggcacagagggtgccttttaccgccgccgccagctcatgcaccagctccccatctatgaccaggatccctcgcgctgccgtggacttttggagaatgagttgaaactgatggaagaatttgtcaagcaatataagagcgaggccctcggcgtgggagaagtggccctcccggggcagggtggcttgcccaaggaggaggggaagcagcaggaaaagccagagggggcagagaccactgctgctaccaccaacggcagtctcagtgacccgtccaaagaagtggaatacgtctgcgagctctgcaagggagcggcccctcctgacagccccgtggtctactcggacagggcaggctacaacaagcagtggcaccccacctgctttgtgtgtgccaagtgctccgagccgctggtggacctcatctacttctggaaggatggtgcaccctggtgcggccgccattactgcgagagtctgcggccccggtgctccggctgcgatgagataatattcgctgaggactaccagcgtgtggaagatctggcctggcaccgaaagcactttgtctgtgagggttgtgagcagctgctgagcggccgggcgtacatcgtcaccaagggtcagcttctgtgcccaacttgcagcaagtccaaacgctcctgaagggctgcccacccacagccagaatccacaggatcccaccgagaaggagagccaggtgtgccgagaccatcctaagggtccgatgtgacagcaagcaagtgaaataaacaatgatttgcttttcagtgagaatatatatatgagatatatatagatatatattctaggttgggtggtggtagatccttgagggtcagtagtttcaaaaccaaaaatattctaagaagtcttaggatggagttccttttctttctgttgttgtttcccagctacaaccaactaaagacacaaatggcgttctgcaaggggactctgggaggagttttccagaatgcaattccgagtgagcaaatcgcatagctgtagaatgtgcgtgcttttttgtggacacaggagctcctccaggagcaggctgggatcccaactatcgcttgttgcctctttttcaagtggaatttgaattttaaataaacaactttttttggcatgataaacagatcaataaaagttttgtgaattccacatacacccttatctaattatttacaccatggcagtgattttgcaacacccagtgctggcagaaaatatagtaaaatactaatgagcctctctatcaatgtatctcatcagacttccactgggagtgtaggctttgggacagaacccccgccccacctgcctattccagatactcccagatcactaatgtaacaaaggtatcatgttttatggtacactgaaaagtggcctgctgggaactgatgagcttctctttagccagggacctgactcagctgccctcagagcccaggaaaatagcgaatgaacccctctgggaataagaccagtactgggaaaccactgaacaggggccacctaagctccaccaatgggtgccacatgggatgtggtgactaatgtgggcagatctttaaaaatacagcactttttcaaatgccaaaacaatcagaaacaaaattttttcaataaaaattaatctaaaatttaacaatgccacttttatgagaaatctcaatttttaatgttgccaactaaacattgaatgagtcacgtagaataggtctttgggccaaattgtatctccattttatggtctctctgaacattttcagctcttaaattaatttctttcccacagtttctaagaaaaacatatttttctactgggagtataaggatgaaaaagacacaagtcctaggagcttacggtctggtcgccagtggttttctttcttgaacttcctcatctgctgccagttttctttaacctcaccatccaaatttcactctgaccatctcgtacctagaaaacccccattcatgtgctttataagtttcaccaaagccattgctatatcctcccaaggcagtggttttctgctcccagctcctttctctagtcaccctcagtttcctcgtcatgttcatcttctcaaagataagtttcaagtgtgtcatttccttcactcaatctccatggctcttcattgcctgccaagttaacaaccaagtcctcatggacatttgaatccttccaaaacttggcttatgtctttctggccttggagccctttatttccctagatttctagttccctatttcttcctaagcatgcagaagctccctctgatcaagcccttccctttgcttttgctagttgaagactggctacctgaagaccaactctggctgttgaaattctattcatcctataaggtgcttctcaagcataacctgcttctctggcactttcctgaagcaccagtgaaatattcaccaattcatcattcattcatccattccacaagtatttcagtgagcacggcaaagttccaattcccatgctgaatataggggatgcggggtgcacaaaaagaacagtgacccctacgcccatagatgttacggtctgtgggggagatgggcctcaagcaaatattctcacaagtcaatgcaaaattacactactgtgcatgctataaaaggaagatttgtgttactataatgcatgtaaactggacttaggaatatcgagagaggtgcccctgggaaagtgatgcttgaactgggctgtaaaggatgagtagccttgccaggcatagtggctcaggcctgtattctcagcactttgggaggccaaagcgggtggatcacttgagcctaggagttcgagaccggcctgggcaacatggcaaaactccacccctacaaaaaatacaaaaactatctggcatggtggcacacctgtagtatcagttactctagaggataacctgagcccagtaagtcaaggctgcagtgagctgtgatcatgccacagcactccagcctgggtgacagagtgagaccctgtttccaaaaaaaaaaaaaaaggataggttgcctctaagttggcaaagagaggaaggacaatggttaaagatggatacatgaatgcatgtgcaaaggccctgtggtggaagccccaccagtttattcaacacctatttgctggtgttggagatacagtggtgaacatggcccatggatggaactgaaagaaaactggtgtggcaggagcacagagcatggtgaggagggtgggcctggggcatgagaggcaggcatggccagcctgctccagttctggggcaattcaaaagactggtctctgttctaggagcaagggggagccttcaaacagctttaaggagggggtggtgatggctggacagggagatcatgagatacgtcatctcttctctgttgaaaccccagcacaatgcatgattgacttggtccactgggtcacaccatcatggatgggcattatctcccacaacagtccccatggggcaccacccagcacctgcccctgcctttctcatgtctattaatgacacccacccttgcatttggagcacctgaatcatctctgccacttgccttcatatctgatgggtcactcagtccagtcctttctctccatcctcgctttcactccatccccaaagtcatatctcaccttgaacattttctgctcagactgacaagtctccccgacgggaactcaccctctccacccaccacttccagatgaattgctcagaaacacaccctcatcttgcactctcctcttcaagaacaatcaggggctccctgttgcacacacagaaaaaaattgaaactgttttaccttgcagtcgagtttcttatttttcctgccccaaccctccttccttcctgttatcctttcagaagccaaatgggcagtttacagtcacagtgtgtgcccctgctttcctcacctctgtaccatcactcacgctgtgctttttgcctgcaattccccacactgtgtttaattgctgcctctgctggggggctgcaatagctgagtgggattctgtaccagaattggaaagatccatgttaactcttgcctgattctatctcccatgtcagcaggaagaggggctgccatccccacccctcccactctctaggaagactttcctccctcacccttcccttggggtgttttaggtgccctttatctgtaagttcataatatcccaggcttacagtaattcttccaaggcctttattgtgctataattatttattcatgaaagccttcccctatgaacttctaaagaataatcgtattatctttatttccccaactcttagtacaaatcctggcaactaaatgaaagaacaaacaacctggggttctgggatggttcgtctttgctgatggcactgtgttccaaaatggccaaggtcaaatataaaaatttcagactgaggtagacactgctggcagcctacacattgccaccacaccccacttccttcttcctagtggcaaggaagcagtgggtggagagggtgagttcctgtcagggagacttgtcagtctgagcagaaaatgttcaaagtgagatatgactttggggatggagacaaagggaggatggagagaaacgactggactgagagaagagcccactcccctttatgtaaattggctttgccaacctggtctgcagctggagaaaggccatgcgcctctattaccagccagtggggcttccgccttaggagggtcttagaaaagtgtttttccttaatgaaaggagatactgtgcagtaaatagccctgctgttgttttcttttcttttgatagaatgtcaaacttacgaaaaaagttacaagaagagaacaaagagctattagagggtgttgctgacacaatgctttatcactcttgaatattttcgtgtgtaattcctacaaataaggacattctcccacatagccacaatacaaccatcaaaatcaggaagttaacgctgatgtgtttctaccatgtaatcctcagatccaattcaagtgtcaccagctgtcccaataatgtcttttataacaaaaacattcagtctaagatcactcattctatttagttatcttgtctattcttcaatttggaagtgttctttgttctttcctgaatgttcatgaccttgacatcttagaagattaaaggttatttaaagttgttgagttaaatatccattaaattaggtttgtcagatatttcctcgaaattagattcagcttatgcattttttggaaggaataccacagaagtgatgttgttttctttctgttgcatccaatcagatgatacaggattttgatttgttccattactgttgacatgaattttgaacatttgataatgccagtatcagccagatttttccattgtaaagtcattcctttgtcctttgtatttaataagtatgtttagggactttgagactatgtcaatgtcctgttcttcatcaaaattccactcactcattcttagtattcattgacgtttactgatcgaactaattattattatgatagttgccaaatgttggtttttctaattcaatcatttctttagtgtttattagcattctactataaggaaaagcactatcttctccccatttattaattcacatatttacatcagcttggagttattgatttctattttattaaatagtttataattgattaccatccttatttattttaatgctcaaattgtcccaaattatggccaaagaaagctccttcaaactggttgctatgtccttttgacatggcccatcattctttaaacacattttacatctggcacaataacgtgctacatacccatcttgtatttttcctgccccatctttgaaatcagccattctcaaggggttccttcttaatctggctgttgttgtgttggaactcctggtaccatcttagaaccttaaggagacaagcgaaccaagccaataagctttccatgatgctgcttagagttaaacagagcccaggtactaagttatgtcatggagacagtgaactaacctctggactgcttgctacatgagacaattgattttcttattttctatgtagggtggtacatttcctcattttgagatatttcttcaacatatagcttttcattagtggggattttgtcaattataaccaaaaacaatgtgacggatacccaagatgtttcatgttgtagcttgggtgaattacacatttctgaagccattacacttcctagtttatttggatttaagttgacaaataaaaattgcatatgtttatggtctataacatggtgtttcgatatatgtatacatcgtggaatggctaaatcaagctaacatatccattacctcacatagttattttttgtggtgagaacattttaaaaatattgtcttagcaattttcaatcaagcctgtcccatggagacacaagcaatagtgacatgagcacttgactcgctgggttatcaggctttggctccaaatgtttggcttcaaatatgaaaaagttacatgaaagatgaaactatgcaatggcatggctgttggtcattcacatctctctctgccaagaatggggatgacgctgttgaaggaagaaatgtgttttctcctttttctcaagtgatatttgccttaggtcagattctactagtttaaagcaaaacgatctcctggtctgattcctttgggtctctaataatggaaactgcaaggatcagcataaagtgttcctttgttctgacgttggtataacattgcttcttgaaaaatgaaagtatttggacatacagacagaagcaatattattcaggtcttccttgttgcaagtgagggaaatccaattaaaactggtttaaacctaaaaaaaaaaaaaagaagaaaagaaaagaaaaaatatgagaggggttttgctttctggaatctgctttctagtcagaaagtgcagaagaagggctagcttcaggaacaattggatgcagtagttcaaatcacaagttaagtctctgcttcttttctccatctctcttctgtcttcctccacactggctttattcttaggtaggcttacccagatagtcataaacacagccaccagtggcagctgggctcacttttgtccttggagccagtgagcccatgaaaaaggagcttctctttctggagcttcccaggggtaactttgatcagccaacaagggtcagtcctatgcttatcccttgaccaatctctgtgcccagagggcagggtactctgattggcaataccttcatcgtgggccaaccactgtggggaagggggagggattagaaaagacagccacacccaaatctcatgaagcagtcccctttattttaaaaaagtccctgtgagagcaacaggagcaaagcatggagaagaagcaatcttggagaagctggaagagaactgacccaaagaatccaagagactaagactgtgcagggttggggaacggaagctcacacaggaggcctggacagagctgcagcagagccaggagagaagccaagtggcacagctcatcttgaagtaattataatgccactaaaattctcatttgtattaattttttttaattactggcaagataaggcaaatgtttttaaaggcctaaataaaatgatattccctgaaggaaa

SEQ ID NO: 149096 - DNA, 1501 bp, Homo sapiens
  Payload ID: 9444
  Gene Symbol: LMCD1
  Gene Name: LIM and cysteine-rich domains 1
  ENST ID: ENST00000397386
  CDS Start-End: 213-974
agctgcgcctggctgcgcacagagctccctcccaggcccgcgaacttggccattcagccgccgctgtccccgctgcgcgccctcgcgcctctgcctgagaagccaggcgctgttcccccaccccagaagaggatggcaaaggtggctaaggacctcaacccaggagttaaaaagatgtccctgggccagctgcagtcagcaagaggtgtggcatgtttgggatgcaaggggacgtgttcgggcttcgagccacattcatggagggactgcagtacatggagctcatccccaaggagaagcagccagtgacaggcacagagggtgccttttaccgccgccgccagctcatgcaccagctccccatctatgaccaggatccctcgcgctgccgtggacttttggagaatgagttgaaactgatggaagaatttgtcaagcaatataagagcgaggccctcggcgtgggagaagtggccctcccggggcagggtggcttgcccaaggaggaggggaagcagcaggaaaagccagagggggcagagaccactgctgctaccaccaacggcagtctcagtgacccgtccaaagaagtggaatacgtctgcgagctctgcaagggagcggcccctcctgacagccccgtggtctactcggacagggcaggctacaacaagcagtggcaccccacctgctttgtgtgtgccaagtgctccgagccgctggtggacctcatctacttctggaaggatggtgcaccctggtgcggccgccattactgcgagagtctgcggccccggtgctccggctgcgatgagataatattcgctgaggactaccagcgtgtggaagatctggcctggcaccgaaagcactttgtctgtgagggttgtgagcagctgctgagcggccgggcgtacatcgtcaccaagggtcagcttctgtgcccaacttgcagcaagtccaaacgctcctgaagggctgcccacccacagccagaatccacaggatcccaccgagaaggagagccaggtgtgccgagaccatcctaagggtccgatgtgacagcaagcaagtgaaataaacaatgatttgcttttcagtgagaatatatatatgagatatatatagatatatattctaggttgggtggtggtagatccttgagggtcagtagtttcaaaaccaaaaatattctaagaagtcttaggatggagttccttttctttctgttgttgtttcccagctacaaccaactaaagacacaaatggcgttctgcaaggggactctgggaggagttttccagaatgcaattccgagtgagcaaatcgcatagctgtagaatgtgcgtgcttttttgtggacacaggagctcctccaggagcaggctgggatcccaactatcgcttgttgcctctttttcaagtggaatttgaattttaaataaacaactttttttggcatgataaacagatcaataaaagttttgtgaattccacatac

SEQ ID NO: 149097 - DNA, 1113 bp, Homo sapiens
  Payload ID: 9444
  Gene Symbol: LMCD1
  Gene Name: LIM and cysteine-rich domains 1
  Uniprot ID: Q9NZU5
  ENST ID: ENST00000454244
  CDS Start-End: 212-1090
attcagccgccgctgtccccgctgcgcgccctcgcgcctctgcctgagaagccaggcgctgttcccccaccccagaagaggatggcaaaggtggctaaggacctcaacccaggagttaaaaaggaaaatatgcaagtcttgcaaatgcagccaagaggaccactgcctaacatctgacctagaagacgatcggaaaattggccgcttgctgatggactccaagtattccaccctcactgctcgggtgaaaggcggggacggcatccggatttacaagaggaaccggatgatcatgaccaaccctattgctactgggaaagatcccacttttgacaccatcacctacgagtgggctccccctggagtcacccagaaactgggactgcagtacatggagctcatccccaaggagaagcagccagtgacaggcacagagggtgccttttaccgccgccgccagctcatgcaccagctccccatctatgaccaggatccctcgcgctgccgtggacttttggagaatgagttgaaactgatggaagaatttgtcaagcaatataagagcgaggccctcggcgtgggagaagtggccctcccggggcagggtggcttgcccaaggaggaggggaagcagcaggaaaagccagagggggcagagaccactgctgctaccaccaacggcagtctcagtgacccgtccaaagaagtggaatacgtctgcgagctctgcaagggagcggcccctcctgacagccccgtggtctactcggacagggcaggctacaacaagcagtggcaccccacctgctttgtgtgtgccaagtgctccgagccgctggtggacctcatctacttctggaaggatggtgcaccctggtgcggccgccattactgcgagagtctgcggccccggtgctccggctgcgatgagataatattcgctgaggactaccagcgtgtggaagatctggcctggcaccgaaagcactttgtctgtgagggttgtgagcagctgctgagcggccgggcgtacatcgtcaccaagggtcagcttctgtgcccaacttgcagcaagtccaaacgctcctgaagggctgcccacccacagccaga

SEQ ID NO: 149098 - DNA, 870 bp, Homo sapiens
  Payload ID: 9444
  Gene Symbol: LMCD1
  Gene Name: LIM and cysteine-rich domains 1
  ENST ID: ENST00000415597
  CDS Start-End: 170-870
gcacagagctccctcccaggcccgcgaacttggccattcagccgccgctgtccccgctgcgcgccctcgcgcctctgcctgagaagccaggcgctgttcccccaccccagaagaggatggcaaaggtggctaaggacctcaacccaggagttaaaaagatggtgatcacatgggatatacatataaagtaatcgagcgaatactggagattggtgcatttcgaccgcatatgtccctgggccagctgcagtcagcaagaggtgtggcatgtttgggatgcaaggggacgtgttcgggcttcgagccacattcatggaggaaaatatgcaagtcttgcaaatgcagccaagaggaccactgcctaacatctgacctagaagacgatcggaaaattggccgcttgctgatggactccaagtattccaccctcactgctcgggtgaaaggcggggacggcatccggatttacaagaggaaccggatgatcatgaccaaccctattgctactgggaaagatcccacttttgacaccatcacctacgagtgggctccccctggagtcacccagaaactgggactgcagtacatggagctcatccccaaggagaagcagccagtgacaggcacagagggtgccttttaccgccgccgccagctcatgcaccagctccccatctatgaccaggatccctcgcgctgccgtggacttttggagaatgagttgaaactgatggaagaatttgtcaagcaatataagagcgaggccctcggcgtgggagaagtggccctcccggggcagggtggcttgcccaaggaggaggggaagcagcaggaaaagccagagggggcagagaccactgctgctaccac

SEQ ID NO: 149099 - DNA, 1059 bp, Homo sapiens
  Payload ID: 9444
  Gene Symbol: LMCD1
  Gene Name: LIM and cysteine-rich domains 1
  ENST ID: ENST00000456506
  CDS Start-End: 52-228
ctcgcgcctctgcctgagaagccaggcgctgttcccccaccccagaagaggatggcaaaggtggctaaggacctcaacccaggagttaaaaagatgtccctgggccagctgcagtcagcaagaggtgtggcatgtttgggatgcaaggggacgtgttcgggcttcgagccacattcatggagggactgcagtacatggagctcatccccaaggagaagcagccagtgacaggcacagagggtgccttttaccgccgccgccagctcatgcaccagctccccatctatgaccaggatccctcgcgctgccgtggacttttggagaatgagttgaaactgatggaagaatttgtcaagcaatataagagcgaggccctcggcgtgggagaagtggccctcccggggcagggtggcttgcccaaggaggaggggaagcagcaggaaaagccagagggggcagagaccactgctgctaccaccaacggcagtctcagtgacccgtccaaagaagtggaatacgtctgcgagctctgcaagggagcggcccctcctgacagccccgtggtctactcggacagggcaggctacaacaagcagtggcaccccacctgctttgtgtgtgccaagtgctccgagccgctggtggacctcatctacttctggaaggatggtgcaccctggtgcggccgccattactgcgagagtctgcggccccggtgctccggctgcgatgagataatattcgctgaggactaccagcgtgtggaagatctggcctggcaccgaaagcactttgtctgtgagggttgtgagcagctgctgagcggccgggcgtacatcgtcaccaagggtcagcttctgtgcccaacttgcagcaagtccaaacgctcctgaagggctgcccacccacagccagaatccacaggatcccaccgagaaggagagccaggtgtgccgagaccatcctaagggtccgatgtgacagcaagcaagtgaaataaacaatgatttgcttttcagtgagaatatatatatgagatatatatagatatatattcta

SEQ ID NO: 149100 - DNA, 1431 bp, Homo sapiens
  Payload ID: 9444
  Gene Symbol: LMCD1
  Gene Name: LIM and cysteine-rich domains 1
  ENST ID: ENST00000426878
  CDS Start-End: 133-876
agctgcgcctggctgcgcacagagctccctcccaggcccgcgaacttggccattcagccgccgctgtccccgctgcgcgccctcgcgcctctgcctgagaagccaggcgctgttcccccaccccagaagaggatggcaaaggtggctaaggacctcaacccaggagttaaaaagatgtccctgggccagctgcagtcagcaagaggtgtggcatgtttgggatgcaaggggacgtgttcgggcttcgagccacattcatggaggaaaatatgcaagtcttgcaaatgcagccaagaggaccactgcctaacatctgacctagaagacgatcggaaaattggccgcttgctgatggactccaagtattccaccctcactgctcgggtgaaaggcggggacggcatccggatttacaagaggaaccggatgatcatgaccaaccctattgctactgggaaagatcccacttttgacaccatcacctacgagtgggctccccctggagtcacccagaaactgggactgcagtacatggagctcatccccaaggagaagcagccagtgacaggcacagagggtgccttttaccgccgccgccagctcatgcaccagctccccatctatgaccaggatccctcgcgctgccgtggacttttggagaatgagttgaaactgatggaagaatttgtcaagcaatataagagcgaggccctcggcgtgggagaagtggccctcccggggcagggtggcttgcccaaggaggaggggaagcagcaggaaaagccagagggggcagagaccactgctgctaccaccaacggcagtctcagtgacccgtccaaagaagtggaatacaagccagtcccactcgtgtgataacccattaatctattaagccataagtggattaatccattcctgaggacctgagccctcacgacccaatcatctcttaaaggccccacctctcaatactgccatgcagaggattatgtttcaacctgagtgtttggaggggatgttcaacccataggaagtggcagtgtggaagaagtgctgctgaggagtgagtcactgggggccattttgagaaaacagaaaggagaagccagagttggggagatgaaagcctcatggcttggtttgtcttaaactgccccacagaaggcgaaaggaatgcttgaggctggaccacgtgggtctagcgtgtactgcgtttctggtccccagcccctgttttaccttttgctcctcctgccccatcaaccaagtgtcttcatttgtttctatggcaattaacttttggagatagaagtcccagcacacgagatccccaagcacattatctaccttgctgaacaggctggcagtcacacatgagccaggcgacccagggaaatgccagcccaaacaaagctgctgccacatcca

SEQ ID NO: 149101 - DNA, 1235 bp, Homo sapiens
  Payload ID: 9445
  Gene Symbol: LIMS1
  Gene Name: LIM and senescent cell antigen-like domains 1
  Uniprot ID: P48059
  ENST ID: ENST00000332345
  CDS Start-End: 120-1097
tagttcaagacaacagagacaaagctaagatgaggaagttctgtacagtttaggaaatagaggctttcaaagataattcgcagtgatgtgaaactggcctcccaagccctgataacaacatggccaacgccctggccagcgccacttgcgagcgctgcaagggcggctttgcgcccgctgagaagatcgtgaacagtaatggggagctgtaccatgagcagtgtttcgtgtgcgctcagtgcttccagcagttcccagaaggactcttctatgagtttgaaggaagaaagtactgtgaacatgactttcagatgctctttgccccttgctgtcatcagtgtggtgaattcatcattggccgagttatcaaagccatgaataacagctggcatccggagtgcttccgctgtgacctctgccaggaagttctggcagatatcgggtttgtcaagaatgctgggagacacctgtgtcgcccctgtcataatcgtgagaaagccagaggccttgggaaatacatctgccagaaatgccatgctatcatcgatgagcagcctctgatattcaagaacgacccctaccatccagaccatttcaactgcgccaactgcgggaaggagctgactgccgatgcacgggagctgaaaggggagctatactgcctcccatgccatgataaaatgggggtccccatctgtggtgcttgccgacggcccatcgaagggcgcgtggtgaacgctatgggcaagcagtggcatgtggagcattttgtttgtgccaagtgtgagaaaccctttcttggacatcgccattatgagaggaaaggcctggcatattgtgaaactcactataaccagctatttggtgatgtttgcttccactgcaatcgtgttatagaaggtgatgtggtctctgctcttaataaggcctggtgcgtgaactgctttgcctgttctacctgcaacactaaattaacactcaagaataagtttgtggagtttgacatgaagccagtctgtaagaagtgctatgagaaatttccattggagctgaagaaaagacttaagaaactagctgagaccttaggaaggaaataagttcctttattttttcttttctatgcaagataagagattaccaacattacttgtcttgatctacccatatttaaagctatatctcaaagcagttgagagaagaggacctatatgaatggttttatgtcatttttttaa

SEQ ID NO: 149102 - DNA, 1876 bp, Homo sapiens
  Payload ID: 9445
  Gene Symbol: LIMS1
  Gene Name: LIM and senescent cell antigen-like domains 1
  Uniprot ID: P48059
  ENST ID: ENST00000338045
  CDS Start-End: 264-1427
acaaagactgtgtcactactttgtggaatgttattttagaacttccagaatgcctcagtaaatcctgactgccatgtaactgtgtactgtgctgctgagctcttaacatgaagcagcagtagtgaccctggcgggccaggctgacgtgcgtgggaacagtgggagtgaccctggctgggaagcagggaggcctggatattgtttctcctggctctgtgtcctgccattctcgtccctgtgctcagagctctcaagcacccacgatggccttctcaggccgagcgcgcccctgcattatcccagagaacgaagaaatcccccgagcagcccttaacactgtccacgaggccaatgggaccgaggacgagagggctgtttccaaactgcagcgcaggcacagtgacgtgaaagtctacaaggagttctgtgacttttatgcgaaattcaacatggccaacgccctggccagcgccacttgcgagcgctgcaagggcggctttgcgcccgctgagaagatcgtgaacagtaatggggagctgtaccatgagcagtgtttcgtgtgcgctcagtgcttccagcagttcccagaaggactcttctatgagtttgaaggaagaaagtactgtgaacatgactttcagatgctctttgccccttgctgtcatcagtgtggtgaattcatcattggccgagttatcaaagccatgaataacagctggcatccggagtgcttccgctgtgacctctgccaggaagttctggcagatatcgggtttgtcaagaatgctgggagacacctgtgtcgcccctgtcataatcgtgagaaagccagaggccttgggaaatacatctgccagaaatgccatgctatcatcgatgagcagcctctgatattcaagaacgacccctaccatccagaccatttcaactgcgccaactgcgggaaggagctgactgccgatgcacgggagctgaaaggggagctatactgcctcccatgccatgataaaatgggggtccccatctgtggtgcttgccgacggcccatcgaagggcgcgtggtgaacgctatgggcaagcagtggcatgtggagcattttgtttgtgccaagtgtgagaaaccctttcttggacatcgccattatgagaggaaaggcctggcatattgtgaaactcactataaccagctatttggtgatgtttgcttccactgcaatcgtgttatagaaggtgatgtggtctctgctcttaataaggcctggtgcgtgaactgctttgcctgttctacctgcaacactaaattaacactcaagaataagtttgtggagtttgacatgaagccagtctgtaagaagtgctatgagaaatttccattggagctgaagaaaagacttaagaaactagctgagaccttaggaaggaaataagttcctttattttttcttttctatgcaagataagagattaccaacattacttgtcttgatctacccatatttaaagctatatctcaaagcagttgagagaagaggacctatatgaatggttttatgtcatttttttaattaaaaaagaaaaattcatataatcgtgtttaaaacacaaatgaagtcagtatttgcctttgttaacccttatccatttgttgacatgtagactgtttacaaaaaaaaaacacatggttaaatgttaaattttaattaaggcccccaaaaattaaatataactttttaaaatgaaaggagtcaccttttacatgactcaggtgaaaaaacagtataaacattaatttactttgtgttcaaaagaaaattccaactgctgttggggaaggacacagaaaagaaaaataaccacccaagaaaaacaaaaacaa

SEQ ID NO: 149103 - DNA, 4392 bp, Homo sapiens
  Payload ID: 9445
  Gene Symbol: LIMS1
  Gene Name: LIM and senescent cell antigen-like domains 1
  Uniprot ID: P48059
  ENST ID: ENST00000393310
  CDS Start-End: 168-1145
actcttgaattaagagaaggggagctggaggtggctcaggtagagtgcgtaggtttgcagaactgggcctgtgtgtgtaaagtgactaaggcaaaggagtggaagtttgagagaagtttaagagaagaaatggacatgattgcctaaatcagccaaacacaggcaacatggccaacgccctggccagcgccacttgcgagcgctgcaagggcggctttgcgcccgctgagaagatcgtgaacagtaatggggagctgtaccatgagcagtgtttcgtgtgcgctcagtgcttccagcagttcccagaaggactcttctatgagtttgaaggaagaaagtactgtgaacatgactttcagatgctctttgccccttgctgtcatcagtgtggtgaattcatcattggccgagttatcaaagccatgaataacagctggcatccggagtgcttccgctgtgacctctgccaggaagttctggcagatatcgggtttgtcaagaatgctgggagacacctgtgtcgcccctgtcataatcgtgagaaagccagaggccttgggaaatacatctgccagaaatgccatgctatcatcgatgagcagcctctgatattcaagaacgacccctaccatccagaccatttcaactgcgccaactgcgggaaggagctgactgccgatgcacgggagctgaaaggggagctatactgcctcccatgccatgataaaatgggggtccccatctgtggtgcttgccgacggcccatcgaagggcgcgtggtgaacgctatgggcaagcagtggcatgtggagcattttgtttgtgccaagtgtgagaaaccctttcttggacatcgccattatgagaggaaaggcctggcatattgtgaaactcactataaccagctatttggtgatgtttgcttccactgcaatcgtgttatagaaggtgatgtggtctctgctcttaataaggcctggtgcgtgaactgctttgcctgttctacctgcaacactaaattaacactcaagaataagtttgtggagtttgacatgaagccagtctgtaagaagtgctatgagaaatttccattggagctgaagaaaagacttaagaaactagctgagaccttaggaaggaaataagttcctttattttttcttttctatgcaagataagagattaccaacattacttgtcttgatctacccatatttaaagctatatctcaaagcagttgagagaagaggacctatatgaatggttttatgtcatttttttaattaaaaaagaaaaattcatataatcgtgtttaaaacacaaatgaagtcagtatttgcctttgttaacccttatccatttgttgacatgtagactgtttacaaaaaaaaaacacatggttaaatgttaaattttaattaaggcccccaaaaattaaatataactttttaaaatgaaaggagtcaccttttacatgactcaggtgaaaaaacagtataaacattaatttactttgtgttcaaaagaaaattccaactgctgttggggaaggacacagaaaagaaaaataaccacccaagaaaaacaaaaacaagaaaaacaaatcttatacaatcttagtatatttatcaaactagtagctagaaagtgaatatgcacattactaagacaaaaaacaagtgtaattcagaactacttgattttttttagttaaatgcaataattattatgcttagttttataacctgctctccttgtgaattcttccttcaaatgattacttaacgcagtagtaatagctagctgtaggatgtcctttaaatttttgtgcaaaaaaaaatttataccaggtatttggaaatatactttacaatattggaaaatgaagtatttttaatgtattacagcaattatgtttctaagcttaatgttaagcatgtagtcttagaataggacatgaaattaaattgtatgtagcttggaatatattgcttcagaaaactgaatgtgtatgtcggtcatattgcctttataaccatgctaatatctatgctttatacatactcaaacttgccttgccttaaaaacatacatactacatacttaaatcaggaattctagccatctcacagaataccaactaaaactaagtgcattgagatctgagattggtaaacccagattcatttaccacagctgtaattaagtttttagaaactattctctttttggggaaatccattgaagttaatttctgttatcttattagaagaaaatgatgttgatatgtgtttcagattttccatttgaaatcttataattaatttgatttatttactgtaagtaggaggtataaatgacactcttaaattggaaggaggggtgttttagtgtctgttttaggtcaaaattagtgattctatttttatcaaaagttttatcctgaagtttcaggaccactcttccttaataaacttgttaatggaaagcgagctttatgaacatttaaaaatgttgctgctgctttgttgcttaaaaagaaagttgccaagagagacttcttagggaaaatatttgggttttttttccaaaaattgctgaaatattgttttgccatttttaaaaagtctcaggttattaccactctgccattaaatatttgtatgcctgcatttttaaaaattctgtgcatgtactttatggagtacattctatttttgttttcagataccctacaaccaattttttttagtaatcttttagaattgaaattatcataaatgatcgagaataatcatcacatagtttaagattgtatatgttgagtagtttaaaacaatctttgcattttacagtaagaatcaaagtcccttcagtgtgcctttgtcagctaatatgtgaccagcaatgacaaccttgggagtatttattaaatattatgctatgaatataggcaacacagaacagggtttgcagtatagcgtcttgatgctaaattctcatatacctctacacgagaaatatggaggagaaaaacaagcatttacatatattcttcgtcactttgaagatgcatggcctgaactcgactgcttgtgtttgtttacatatcaggcatacccaggcatctcctgcagccagaggttccattgctgtctttgctcagtcctcttttaaaatatgaattagtggacaggcacggtgcctcacacctgtaatcccagcactttgggaggtcgaggcaggtggatcacgaggtcaggagatcaagaccatcctggctaccactgaaaccccatctctactacaaaaaaattagccgggcgtggtggcgggcacctgcagtcccagctactcgggaggctgaggcaggagaatggtgggaacccgggaggcagagcttgcagtgagccaagatcacgccactgcactccagcctgggcaacagagcaagactctgtctcaaaaaaaataaataaataaattatgaatgagtattttctagaaattcaacttgctaagcctgtaatacttaagggtagtttatctagatacagtactttcttccctgataagtagtatcattggagcccttaggtataggagaagaggaagaagtttaaaaagtgtaagtgggccgggcgtggtggctcatgcctgtaatcccagcactttgggaggccgaggggggcggatcacgaggtcaggagatccagactatcctggctaacaaggtgaaaccccgtctctactaaaaatacaaaaaaaaacattagccaggcgtggtggcgggcgcttgtagtcccagctactcgggaggctgaggtaggagaatggcttgaacccaggaggcggagcttgcagtgagccgagattgcaccactgcactccagcctgggcgacagagcaagactccgtctcaaaaaaaaaaaaaaagtgtaagtggattaaaagagaaacttggtctagttcataatatttttaatagggctttccctggctgctggaaaacttaggccagtaagcatctctttgtttaaagtcctacaagacaatttgaaataattcattgttcatgccaaaattctaagtactgtttttcttagcaagtgtaacataatcaggaacaatgggtacaagtaaaacattctttggatgatattcaaagccttattagcactgcacctgaataataggtcattttgcctcactcatttgccaaagtagccatttctaagttaaggaagtttttagataggctcatagccttgtatttcgttttagattgtaagctcaatggcagggatactatattggtaattatgttttcatatagcaaccaccacagtatattcttggtgcttaataaatgtttataattgttaacaataa

SEQ ID NO: 149104 - DNA, 1526 bp, Homo sapiens
  Payload ID: 9445
  Gene Symbol: LIMS1
  Gene Name: LIM and senescent cell antigen-like domains 1
  Uniprot ID: P48059
  ENST ID: ENST00000410093
  CDS Start-End: 88-1077
gaggacacagtgagagggtgccatctatgagcatggagagcttagcttggacagccagctgatgagggacacatcgaatcaagatacatgacatgcaacatggccaacgccctggccagcgccacttgcgagcgctgcaagggcggctttgcgcccgctgagaagatcgtgaacagtaatggggagctgtaccatgagcagtgtttcgtgtgcgctcagtgcttccagcagttcccagaaggactcttctatgagtttgaaggaagaaagtactgtgaacatgactttcagatgctctttgccccttgctgtcatcagtgtggtgaattcatcattggccgagttatcaaagccatgaataacagctggcatccggagtgcttccgctgtgacctctgccaggaagttctggcagatatcgggtttgtcaagaatgctgggagacacctgtgtcgcccctgtcataatcgtgagaaagccagaggccttgggaaatacatctgccagaaatgccatgctatcatcgatgagcagcctctgatattcaagaacgacccctaccatccagaccatttcaactgcgccaactgcgggaaggagctgactgccgatgcacgggagctgaaaggggagctatactgcctcccatgccatgataaaatgggggtccccatctgtggtgcttgccgacggcccatcgaagggcgcgtggtgaacgctatgggcaagcagtggcatgtggagcattttgtttgtgccaagtgtgagaaaccctttcttggacatcgccattatgagaggaaaggcctggcatattgtgaaactcactataaccagctatttggtgatgtttgcttccactgcaatcgtgttatagaaggtgatgtggtctctgctcttaataaggcctggtgcgtgaactgctttgcctgttctacctgcaacactaaattaacactcaagaataagtttgtggagtttgacatgaagccagtctgtaagaagtgctatgagaaatttccattggagctgaagaaaagacttaagaaactagctgagaccttaggaaggaaataagttcctttattttttcttttctatgcaagataagagattaccaacattacttgtcttgatctacccatatttaaagctatatctcaaagcagttgagagaagaggacctatatgaatggttttatgtcatttttttaattaaaaaagaaaaattcatataatcgtgtttaaaacacaaatgaagtcagtatttgcctttgttaacccttatccatttgttgacatgtagactgtttacaaaaaaaaaacacatggttaaatgttaaattttaattaaggcccccaaaaattaaatataactttttaaaatgaaaggagtcaccttttacatgactcaggtgaaaaaacagtataaacattaatttactttgtgttcaaaagaaaattccaactgctgttggggaaggacacagaaaagaaaaataaccacccaagaaaaacaaaaacaa

SEQ ID NO: 149105 - DNA, 1627 bp, Homo sapiens
  Payload ID: 9445
  Gene Symbol: LIMS1
  Gene Name: LIM and senescent cell antigen-like domains 1
  Uniprot ID: P48059
  ENST ID: ENST00000409441
  CDS Start-End: 90-1178
cctcggcaagggacgctgctttcccctggcagccacactgctgagcataaatgctttaaagtgtcagcaattgatgtgtggagagaagtatgactgcattacagcttaaagagctttcacattcaggtctctacaggagaagacgagatcgccccgatagtttgagagtaaatgggttaccagaggaagagctaagcaacatggccaacgccctggccagcgccacttgcgagcgctgcaagggcggctttgcgcccgctgagaagatcgtgaacagtaatggggagctgtaccatgagcagtgtttcgtgtgcgctcagtgcttccagcagttcccagaaggactcttctatgagtttgaaggaagaaagtactgtgaacatgactttcagatgctctttgccccttgctgtcatcagtgtggtgaattcatcattggccgagttatcaaagccatgaataacagctggcatccggagtgcttccgctgtgacctctgccaggaagttctggcagatatcgggtttgtcaagaatgctgggagacacctgtgtcgcccctgtcataatcgtgagaaagccagaggccttgggaaatacatctgccagaaatgccatgctatcatcgatgagcagcctctgatattcaagaacgacccctaccatccagaccatttcaactgcgccaactgcgggaaggagctgactgccgatgcacgggagctgaaaggggagctatactgcctcccatgccatgataaaatgggggtccccatctgtggtgcttgccgacggcccatcgaagggcgcgtggtgaacgctatgggcaagcagtggcatgtggagcattttgtttgtgccaagtgtgagaaaccctttcttggacatcgccattatgagaggaaaggcctggcatattgtgaaactcactataaccagctatttggtgatgtttgcttccactgcaatcgtgttatagaaggtgatgtggtctctgctcttaataaggcctggtgcgtgaactgctttgcctgttctacctgcaacactaaattaacactcaagaataagtttgtggagtttgacatgaagccagtctgtaagaagtgctatgagaaatttccattggagctgaagaaaagacttaagaaactagctgagaccttaggaaggaaataagttcctttattttttcttttctatgcaagataagagattaccaacattacttgtcttgatctacccatatttaaagctatatctcaaagcagttgagagaagaggacctatatgaatggttttatgtcatttttttaattaaaaaagaaaaattcatataatcgtgtttaaaacacaaatgaagtcagtatttgcctttgttaacccttatccatttgttgacatgtagactgtttacaaaaaaaaaacacatggttaaatgttaaattttaattaaggcccccaaaaattaaatataactttttaaaatgaaaggagtcaccttttacatgactcaggtgaaaaaacagtataaacattaatttactttgtgttcaaaagaaaattccaactgctgttggggaaggacacagaaaagaaaaataaccacccaagaaaaacaaaaacaa

SEQ ID NO: 149106 - DNA, 637 bp, Homo sapiens
  Payload ID: 9445
  Gene Symbol: LIMS1
  Gene Name: LIM and senescent cell antigen-like domains 1
  ENST ID: ENST00000428064
  CDS Start-End: 108-637
gctccgggcccgccagtagccggccgcggcggcgagggactaggacgcggctggagcggcgccgggagacgaggggctgagagacggcggcggccgaaagcggagagatgctgggcgtggcggccgggatgacccacagcaacatggccaacgccctggccagcgccacttgcgagcgctgcaagggcggctttgcgcccgctgagaagatcgtgaacagtaatggggagctgtaccatgagcagtgtttcgtgtgcgctcagtgcttccagcagttcccagaaggactcttctatgagtttgaaggaagaaagtactgtgaacatgactttcagatgctctttgccccttgctgtcatcagtgtggtgaattcatcattggccgagttatcaaagccatgaataacagctggcatccggagtgcttccgctgtgacctctgccaggaagttctggcagatatcgggtttgtcaagaatgctgggagacacctgtgtcgcccctgtcataatcgtgagaaagccagaggccttgggaaatacatctgccagaaatgccatgctatcatcgatgagcagcctctgatattcaagaacgacccctaccatccagaccatttcaactgcgccaactgcgg

SEQ ID NO: 149107 - DNA, 439 bp, Homo sapiens
  Payload ID: 9445
  Gene Symbol: LIMS1
  Gene Name: LIM and senescent cell antigen-like domains 1
  ENST ID: ENST00000414829
  CDS Start-End: 23-376
tcagagctctcaagcacccacgatggccttctcaggccgagcgcgcccctgcattatcccagagaacgaagaaatcccccgagcagcccttaacactgtccacgaggccaatgggaccgaggacgagagggctgtttccaaactgcagcgcaggcacagtgacgtgaaagtctacaaggagttctgtgacttttatgcgaaattcaacatggccaacgccctggccagcgccacttgcgagcgctgcaagggcggctttgcgcccgctgagaagatcgtgaacagtaatggggagctgtaccatgagcagtgtttcgtgtgcgctcagtgcttccagcagttcccagaaggactcttctatgaggaacgaacatgatggttaagctaccttcattaagcagcatgaccgcttcctgagctcctgctgccgcatttaggc

SEQ ID NO: 149108 - DNA, 1544 bp, Homo sapiens
  Payload ID: 9445
  Gene Symbol: LIMS1
  Gene Name: LIM and senescent cell antigen-like domains 1
  ENST ID: ENST00000422797
  CDS Start-End: 83-385
aagggacgctgctttcccctggcagccacactgctgagcataaatgctttaaagtgtcagcaattgatgtgtggagagaagtatgactgcattacagcttaaagagctttcacattcaggtctctacaggagaagacgagatcgccccgatagtttgagagtaaatgggttaccagaggaagagctaagcaacatggccaacgccctggccagcgccacttgcgagcgctgcaagggcggctttgcgcccgctgagaagatcgtgaacagtaatggggagctgtaccatgagcagtgtttcgtgtgcgctcagtgcttccagcagttcccagaaggactcttctatgaggtgaattcatcattggccgagttatcaaagccatgaataacagctggcatccggagtgcttccgctgtgacctctgccaggaagttctggcagatatcgggtttgtcaagaatgctgggagacacctgtgtcgcccctgtcataatcgtgagaaagccagaggccttgggaaatacatctgccagaaatgccatgctatcatcgatgagcagcctctgatattcaagaacgacccctaccatccagaccatttcaactgcgccaactgcgggtactggaattgtttcttttttattacacaagcagtgggaatgaaagattacatttatctatatttctgttactctagcaaaccaaattgtttttctccaatttttagtctagaaaattttaaacctatagacgagtcaagagaatgatataatgaaacctgtatacacttaatttcgtttcaccagttgacattttgccatgcttgtgtgtatacagtccacattctcgtttcaccctcctatgtatgtgtgcacgtgtgcctgtatacgcatacctctaaaatttctcatgagtcccagtatgcgtctcctgagaataagagcattttcctatggaaccacgatactttttgtaaatttttttttgccttgagacagggtctctctcgctctattgcccaggctgaagtgcagtgggcaatcagagctcactgcagcctcaccctcctgggctcaagcagtcctcccacttcagcctccagagtagctgagaccacaggcacacaccacccttcctgactaatttttttaaattttttgtagagatggagccttgctgcgttgcccaggctggtctcaaactcctgggctcaagcaatctactcatctcagccttccaaagtgctgggactataggcatgagccactgcacctggccagaaccacaatactcttattatgcctaagaaaattagcaataatcttataatatcaactatcagtccatattaaaaatattcccagtagccccagaaatatttgtcatcactatgtttttccaatcgaagatctaaaaacaaaaaaaggtcttatctctgtacatgcataacttttacagttgtaataattaggtattatcttaaaagatgttgttacatttatttaatttggcttggtttatatctaaaagaaatatatttaat

SEQ ID NO: 149109 - DNA, 779 bp, Homo sapiens
  Payload ID: 9445
  Gene Symbol: LIMS1
  Gene Name: LIM and senescent cell antigen-like domains 1
  ENST ID: ENST00000434274
  CDS Start-End: 52-219
ggcaaagggaaagttgtcttccagaggtgtggaggggagtgaagcaacaacatggccaacgccctggccagcgccacttgcgagcgctgcaagggcggctttgcgcccgctgagaagatcgtgaacagtaatggggagctgtaccatgagcagtgtttcgtgtgcgctcagtgcttccagcagttcccagaaggactcttctatgaggaacgaacatgatggttaagctaccttcattaagcagcatgaccgcttcctgagctcctgctgccgcatttaggccctgtcagctgtgaggccactggtgctgagtcagagggaaaagctcagaacagccttgagcagtgaagaataaagtgtgactcatctcgtcctgcccacccctcacactggactataaataccctccctgggtctgtgtgctgttattccaaaagatgcgatgaatacccagaactaggctattcatgggctgttgcccagttcaagatctgttgggtcctgaggaagattactattttggctaaattgtttatcattaaaaccagcccagggatgtgtaaacctgcatctggagaataagacatttctttttggttaaatgatattagagaaaaaaactatccaagactgctaacaaataatcttcactttcagttatatccagcaataagttgttttccagaaaagaaagcttggaaacttacccagtttgccttccatttgggacatgactgatgtgcttcagtctttgtataataaatgcatcttcgccactc

SEQ ID NO: 149110 - DNA, 4461 bp, Homo sapiens
  Payload ID: 9445
  Gene Symbol: LIMS1
  Gene Name: LIM and senescent cell antigen-like domains 1
  Uniprot ID: P48059
  ENST ID: ENST00000544547
  CDS Start-End: 209-1222
agccgctcccgcccctcccccgccttcccgcgcggcccgcctcgccttcccccccctcccgcgcccccgcgcggccggcccctggccttcctccccttcctgctccgggcccgccagtagccggccgcggcggcgagggactaggacgcggctggagcggcgccgggagacgaggggctgagagacggcggcggccgaaagcggagagatgctgggcgtggcggccgggatgacccacagcaacatggccaacgccctggccagcgccacttgcgagcgctgcaagggcggctttgcgcccgctgagaagatcgtgaacagtaatggggagctgtaccatgagcagtgtttcgtgtgcgctcagtgcttccagcagttcccagaaggactcttctatgagtttgaaggaagaaagtactgtgaacatgactttcagatgctctttgccccttgctgtcatcagtgtggtgaattcatcattggccgagttatcaaagccatgaataacagctggcatccggagtgcttccgctgtgacctctgccaggaagttctggcagatatcgggtttgtcaagaatgctgggagacacctgtgtcgcccctgtcataatcgtgagaaagccagaggccttgggaaatacatctgccagaaatgccatgctatcatcgatgagcagcctctgatattcaagaacgacccctaccatccagaccatttcaactgcgccaactgcgggaaggagctgactgccgatgcacgggagctgaaaggggagctatactgcctcccatgccatgataaaatgggggtccccatctgtggtgcttgccgacggcccatcgaagggcgcgtggtgaacgctatgggcaagcagtggcatgtggagcattttgtttgtgccaagtgtgagaaaccctttcttggacatcgccattatgagaggaaaggcctggcatattgtgaaactcactataaccagctatttggtgatgtttgcttccactgcaatcgtgttatagaaggtgatgtggtctctgctcttaataaggcctggtgcgtgaactgctttgcctgttctacctgcaacactaaattaacactcaagaataagtttgtggagtttgacatgaagccagtctgtaagaagtgctatgagaaatttccattggagctgaagaaaagacttaagaaactagctgagaccttaggaaggaaataagttcctttattttttcttttctatgcaagataagagattaccaacattacttgtcttgatctacccatatttaaagctatatctcaaagcagttgagagaagaggacctatatgaatggttttatgtcatttttttaattaaaaaagaaaaattcatataatcgtgtttaaaacacaaatgaagtcagtatttgcctttgttaacccttatccatttgttgacatgtagactgtttacaaaaaaaaaacacatggttaaatgttaaattttaattaaggcccccaaaaattaaatataactttttaaaatgaaaggagtcaccttttacatgactcaggtgaaaaaacagtataaacattaatttactttgtgttcaaaagaaaattccaactgctgttggggaaggacacagaaaagaaaaataaccacccaagaaaaacaaaaacaagaaaaacaaatcttatacaatcttagtatatttatcaaactagtagctagaaagtgaatatgcacattactaagacaaaaaacaagtgtaattcagaactacttgattttttttagttaaatgcaataattattatgcttagttttataacctgctctccttgtgaattcttccttcaaatgattacttaacgcagtagtaatagctagctgtaggatgtcctttaaatttttgtgcaaaaaaaaatttataccaggtatttggaaatatactttacaatattggaaaatgaagtatttttaatgtattacagcaattatgtttctaagcttaatgttaagcatgtagtcttagaataggacatgaaattaaattgtatgtagcttggaatatattgcttcagaaaactgaatgtgtatgtcggtcatattgcctttataaccatgctaatatctatgctttatacatactcaaacttgccttgccttaaaaacatacatactacatacttaaatcaggaattctagccatctcacagaataccaactaaaactaagtgcattgagatctgagattggtaaacccagattcatttaccacagctgtaattaagtttttagaaactattctctttttggggaaatccattgaagttaatttctgttatcttattagaagaaaatgatgttgatatgtgtttcagattttccatttgaaatcttataattaatttgatttatttactgtaagtaggaggtataaatgacactcttaaattggaaggaggggtgttttagtgtctgttttaggtcaaaattagtgattctatttttatcaaaagttttatcctgaagtttcaggaccactcttccttaataaacttgttaatggaaagcgagctttatgaacatttaaaaatgttgctgctgctttgttgcttaaaaagaaagttgccaagagagacttcttagggaaaatatttgggttttttttccaaaaattgctgaaatattgttttgccatttttaaaaagtctcaggttattaccactctgccattaaatatttgtatgcctgcatttttaaaaattctgtgcatgtactttatggagtacattctatttttgttttcagataccctacaaccaattttttttagtaatcttttagaattgaaattatcataaatgatcgagaataatcatcacatagtttaagattgtatatgttgagtagtttaaaacaatctttgcattttacagtaagaatcaaagtcccttcagtgtgcctttgtcagctaatatgtgaccagcaatgacaaccttgggagtatttattaaatattatgctatgaatataggcaacacagaacagggtttgcagtatagcgtcttgatgctaaattctcatatacctctacacgagaaatatggaggagaaaaacaagcatttacatatattcttcgtcactttgaagatgcatggcctgaactcgactgcttgtgtttgtttacatatcaggcatacccaggcatctcctgcagccagaggttccattgctgtctttgctcagtcctcttttaaaatatgaattagtggacaggcacggtgcctcacacctgtaatcccagcactttgggaggtcgaggcaggtggatcacgaggtcaggagatcaagaccatcctggctaccactgaaaccccatctctactacaaaaaaattagccgggcgtggtggcgggcacctgcagtcccagctactcgggaggctgaggcaggagaatggtgggaacccgggaggcagagcttgcagtgagccaagatcacgccactgcactccagcctgggcaacagagcaagactctgtctcaaaaaaaataaataaataaattatgaatgagtattttctagaaattcaacttgctaagcctgtaatacttaagggtagtttatctagatacagtactttcttccctgataagtagtatcattggagcccttaggtataggagaagaggaagaagtttaaaaagtgtaagtgggccgggcgtggtggctcatgcctgtaatcccagcactttgggaggccgaggggggcggatcacgaggtcaggagatccagactatcctggctaacaaggtgaaaccccgtctctactaaaaatacaaaaaaaaacattagccaggcgtggtggcgggcgcttgtagtcccagctactcgggaggctgaggtaggagaatggcttgaacccaggaggcggagcttgcagtgagccgagattgcaccactgcactccagcctgggcgacagagcaagactccgtctcaaaaaaaaaaaaaaagtgtaagtggattaaaagagaaacttggtctagttcataatatttttaatagggctttccctggctgctggaaaacttaggccagtaagcatctctttgtttaaagtcctacaagacaatttgaaataattcattgttcatgccaaaattctaagtactgtttttcttagcaagtgtaacataatcaggaacaatgggtacaagtaaaacattctttggatgatattcaaagccttattagcactgcacctgaataataggtcattttgcctcactcatttgccaaagtagccatttctaagttaaggaagtttttagataggctcatagccttgtatttcgttttagattgtaagctcaatggcagggatactatattggtaattatgttttcatatagcaaccaccacagtatattcttggtgcttaataaatgtttataattgtt

SEQ ID NO: 149111 - DNA, 727 bp, Homo sapiens
  Payload ID: 9445
  Gene Symbol: LIMS1
  Gene Name: LIM and senescent cell antigen-like domains 1
  ENST ID: ENST00000542845
  CDS Start-End: 1-628
gaaggagctgactgccgatgcacgggagctgaaaggggagctatactgcctcccatgccatgataaaatgggggtccccatctgtggtgcttgccgacggcccatcgaagggcgcgtggtgaacgctatgggcaagcagtggcatgtggagcattttgtttgtgccaagtgtgagaaaccctttcttggacatcgccattatgagaggaaaggcctggcatattgtgaaactcactataaccagctatttggtgatgtttgcttccactgcaatcgtgttatagaaggtgatgtggtctctgctcttaataaggcctggtgcgtgaactgctttgcctgttctacctgcaacactaaattaacactcaaggataagtttgttgaaattgacctaaagccagtctgcaaacactgttatgagaaaatgccagaagaatttaagaggcgacttgccaaacgggagagagaagcaaaggataaggacaagcagaaaaagaaaaagccagtctgtttgaataagtttgtggagtttgacatgaagccagtctgtaagaagtgctatgagaaatttccattggagctgaagaaaagacttaagaaactagctgagaccttaggaaggaaataagttcctttattttttcttttctatgcaagataagagattaccaacattacttgtcttgatctacccatatttaaagctatatctcaaagcagttgagag

SEQ ID NO: 149112 - DNA, 2111 bp, Homo sapiens
  Payload ID: 9446
  Gene Symbol: LIMS2
  Gene Name: LIM and senescent cell antigen-like domains 2
  Uniprot ID: Q7Z4I7
  ENST ID: ENST00000324938
  CDS Start-End: 159-1256
gcgtaacgtgagctcgcgaccagcgcgggggaggcgcccacacgcccgtcccgtcttggtgtctggccccaggcggccgcgcctcccctccgaggtggtcccatagcccctgcaccaggcggcccgcgcccgcgacctcaaggcggctgccccgcgccatggcggcccggctgggtgcgctggccgcgtcggggctgtaccggcggcgccagcaccggcagagcccgccgccagccacgggcaatatgtcggacgccttggccaacgccgtgtgccagcgctgccaggcccgcttctcccccgccgagcgcattgtcaacagcaatggggagctgtaccatgagcactgcttcgtgtgtgcccagtgcttccggcccttccccgaggggctcttctatgagtttgaaggccggaagtactgcgaacacgacttccaaatgctgtttgctccgtgctgtggatcctgcggtgagttcatcattggccgcgtcatcaaggccatgaacaacaactggcacccgggctgcttccgctgcgagctgtgtgatgtggagctggctgacctgggctttgtgaagaatgccggcaggcatctctgccggccttgccacaaccgtgagaaggccaagggcctgggcaagtacatctgccagcggtgccacctggtcatcgacgagcagcccctcatgttcaggagcgacgcctaccaccctgaccacttcaactgcacccactgtgggaaggagctgacagccgaggcccgcgagctgaagggtgagctctactgcctgccctgccatgacaagatgggcgtccccatctgcggggcctgccgccggcccatcgagggccgagtggtcaacgcgctgggcaagcagtggcacgtggagcactttgtctgtgccaagtgtgagaagccattcctggggcaccggcactatgagaagaagggcctggcctactgcgagactcactacaaccagctcttcggggacgtctgctacaactgcagccatgtgattgaaggcgatgtggtgtcggccctcaacaaggcctggtgtgtgagctgcttctcctgctccacctgcaacagcaagctcaccctgaagaacaagtttgtggagttcgacatgaagcccgtgtgtaagaggtgctacgagaagttcccgctggagctgaagaagcggctgaagaagctgtcggagctgacctcccgcaaggcccagcccaaggccacagacctcaactctgcctgaaggccctcttgcgcagctgcctctcggcccctccgccttctcccctcctgctgtccatgcttggccccctcgtccccatccacctgtgccctccgcatcttaccctccctttctctttcctcattgccttctcccttcctgttccctcatctctgccttccccatgtctctcctctccttggccgtggcttctgtctgtgaggaggcaggagctggggagtgggagcctatgaccccacgtctgacagccatgtccacctgtgcccacagcttccgcccacagacctccagggacaggagcaaattgcaccacagctccccgcctggcctggccctccccaggcggctcagtggctcatgctgtcctgtgagagcccctgccccagagcggccccactaagcgcatgtggctcctgggctacccacagccagggcagcctgctggagccacagggccagggccatgcagatggaggcctctgggagccacctccaatccctcaccactcactcaaccagtggcacagtgtccttgtgcccacactgagccagcaagtcctgctgtccacacccacaagctacctggagggacaggacccacctccatccttcggaaggccttcctggaatcccaccttggcctccgccctcggttccgccccgcccctctccccccgaccttggggcttgtgtcgagcccttgggtggggccaggaggaggtgatggcgtcagaggaggtgtggtcagaggtgacttgttcccacctccagggaggacgcttcgtcttcggccagcgcagacctggtgtttgtttgttgggctcacgcttgcacaatgaaggcttgttcacacaa

SEQ ID NO: 149113 - DNA, 2045 bp, Homo sapiens
  Payload ID: 9446
  Gene Symbol: LIMS2
  Gene Name: LIM and senescent cell antigen-like domains 2
  Uniprot ID: Q7Z4I7
  ENST ID: ENST00000355119
  CDS Start-End: 167-1192
gccacccccgcccacccctctcgcgggcggagcggctcttggccttttttgggcgtctccctgctccgcggcccgggctggcgggcgggcgctcggctggcggctgcagcagcagagggagacccgcggcaaccccggcaacccagggctcggcgtcgctgccaccatgacgggaagcaatatgtcggacgccttggccaacgccgtgtgccagcgctgccaggcccgcttctcccccgccgagcgcattgtcaacagcaatggggagctgtaccatgagcactgcttcgtgtgtgcccagtgcttccggcccttccccgaggggctcttctatgagtttgaaggccggaagtactgcgaacacgacttccaaatgctgtttgctccgtgctgtggatcctgcggtgagttcatcattggccgcgtcatcaaggccatgaacaacaactggcacccgggctgcttccgctgcgagctgtgtgatgtggagctggctgacctgggctttgtgaagaatgccggcaggcatctctgccggccttgccacaaccgtgagaaggccaagggcctgggcaagtacatctgccagcggtgccacctggtcatcgacgagcagcccctcatgttcaggagcgacgcctaccaccctgaccacttcaactgcacccactgtgggaaggagctgacagccgaggcccgcgagctgaagggtgagctctactgcctgccctgccatgacaagatgggcgtccccatctgcggggcctgccgccggcccatcgagggccgagtggtcaacgcgctgggcaagcagtggcacgtggagcactttgtctgtgccaagtgtgagaagccattcctggggcaccggcactatgagaagaagggcctggcctactgcgagactcactacaaccagctcttcggggacgtctgctacaactgcagccatgtgattgaaggcgatgtggtgtcggccctcaacaaggcctggtgtgtgagctgcttctcctgctccacctgcaacagcaagctcaccctgaagaacaagtttgtggagttcgacatgaagcccgtgtgtaagaggtgctacgagaagttcccgctggagctgaagaagcggctgaagaagctgtcggagctgacctcccgcaaggcccagcccaaggccacagacctcaactctgcctgaaggccctcttgcgcagctgcctctcggcccctccgccttctcccctcctgctgtccatgcttggccccctcgtccccatccacctgtgccctccgcatcttaccctccctttctctttcctcattgccttctcccttcctgttccctcatctctgccttccccatgtctctcctctccttggccgtggcttctgtctgtgaggaggcaggagctggggagtgggagcctatgaccccacgtctgacagccatgtccacctgtgcccacagcttccgcccacagacctccagggacaggagcaaattgcaccacagctccccgcctggcctggccctccccaggcggctcagtggctcatgctgtcctgtgagagcccctgccccagagcggccccactaagcgcatgtggctcctgggctacccacagccagggcagcctgctggagccacagggccagggccatgcagatggaggcctctgggagccacctccaatccctcaccactcactcaaccagtggcacagtgtccttgtgcccacactgagccagcaagtcctgctgtccacacccacaagctacctggagggacaggacccacctccatccttcggaaggccttcctggaatcccaccttggcctccgccctcggttccgccccgcccctctccccccgaccttggggcttgtgtcgagcccttgggtggggccaggaggaggtgatggcgtcagaggaggtgtggtcagaggtgacttgttcccacctccagggaggacgcttcgtcttcggccagcgcagacctggtgtttgtttgttgggctcacgcttgcacaatgaaggcttgttcacac

SEQ ID NO: 149114 - DNA, 1678 bp, Homo sapiens
  Payload ID: 9446
  Gene Symbol: LIMS2
  Gene Name: LIM and senescent cell antigen-like domains 2
  Uniprot ID: Q7Z4I7
  ENST ID: ENST00000409286
  CDS Start-End: 254-823
gtgacagggcagtctgctttcccataccctgggctgagcccctttgaagcccccagctgctcagtgaagttgcaggggtctggcctctcttctcctggaggtggccaggctgtgtgggagtgggggctctgcccctaatgcccccgcctcccgcaggcatctctgccggccttgccacaaccgtgagaaggccaagggcctgggcaagtacatctgccagcggtgccacctggtcatcgacgagcagcccctcatgttcaggagcgacgcctaccaccctgaccacttcaactgcacccactgtgggaaggagctgacagccgaggcccgcgagctgaagggtgagctctactgcctgccctgccatgacaagatgggcgtccccatctgcggggcctgccgccggcccatcgagggccgagtggtcaacgcgctgggcaagcagtggcacgtggagcactttgtctgtgccaagtgtgagaagccattcctggggcaccggcactatgagaagaagggcctggcctactgcgagactcactacaaccagctcttcggggacgtctgctacaactgcagccatgtgattgaaggcgatgtggtgtcggccctcaacaaggcctggtgtgtgagctgcttctcctgctccacctgcaacagcaagctcaccctgaagaacaagtttgtggagttcgacatgaagcccgtgtgtaagaggtgctacgagaagttcccgctggagctgaagaagcggctgaagaagctgtcggagctgacctcccgcaaggcccagcccaaggccacagacctcaactctgcctgaaggccctcttgcgcagctgcctctcggcccctccgccttctcccctcctgctgtccatgcttggccccctcgtccccatccacctgtgccctccgcatcttaccctccctttctctttcctcattgccttctcccttcctgttccctcatctctgccttccccatgtctctcctctccttggccgtggcttctgtctgtgaggaggcaggagctggggagtgggagcctatgaccccacgtctgacagccatgtccacctgtgcccacagcttccgcccacagacctccagggacaggagcaaattgcaccacagctccccgcctggcctggccctccccaggcggctcagtggctcatgctgtcctgtgagagcccctgccccagagcggccccactaagcgcatgtggctcctgggctacccacagccagggcagcctgctggagccacagggccagggccatgcagatggaggcctctgggagccacctccaatccctcaccactcactcaaccagtggcacagtgtccttgtgcccacactgagccagcaagtcctgctgtccacacccacaagctacctggagggacaggacccacctccatccttcggaaggccttcctggaatcccaccttggcctccgccctcggttccgccccgcccctctccccccgaccttggggcttgtgtcgagcccttgggtggggccaggaggaggtgatggcgtcagaggaggtgtggtcagaggtgacttgttcccacctccagggaggacgcttcgtcttcggccagcgcagacctggtgtttgtttgttgggctcacgcttgcacaatgaaggcttgttcacacaa

SEQ ID NO: 149115 - DNA, 1620 bp, Homo sapiens
  Payload ID: 9446
  Gene Symbol: LIMS2
  Gene Name: LIM and senescent cell antigen-like domains 2
  Uniprot ID: Q7Z4I7
  ENST ID: ENST00000409754
  CDS Start-End: 196-765
cagtgctgtgcaggatggagtccagacacccagcagtagcagaaatcgcctgtacgtgtttgggcccttcttcatctggcaaaccccgaaggaagggggcatctctgccggccttgccacaaccgtgagaaggccaagggcctgggcaagtacatctgccagcggtgccacctggtcatcgacgagcagcccctcatgttcaggagcgacgcctaccaccctgaccacttcaactgcacccactgtgggaaggagctgacagccgaggcccgcgagctgaagggtgagctctactgcctgccctgccatgacaagatgggcgtccccatctgcggggcctgccgccggcccatcgagggccgagtggtcaacgcgctgggcaagcagtggcacgtggagcactttgtctgtgccaagtgtgagaagccattcctggggcaccggcactatgagaagaagggcctggcctactgcgagactcactacaaccagctcttcggggacgtctgctacaactgcagccatgtgattgaaggcgatgtggtgtcggccctcaacaaggcctggtgtgtgagctgcttctcctgctccacctgcaacagcaagctcaccctgaagaacaagtttgtggagttcgacatgaagcccgtgtgtaagaggtgctacgagaagttcccgctggagctgaagaagcggctgaagaagctgtcggagctgacctcccgcaaggcccagcccaaggccacagacctcaactctgcctgaaggccctcttgcgcagctgcctctcggcccctccgccttctcccctcctgctgtccatgcttggccccctcgtccccatccacctgtgccctccgcatcttaccctccctttctctttcctcattgccttctcccttcctgttccctcatctctgccttccccatgtctctcctctccttggccgtggcttctgtctgtgaggaggcaggagctggggagtgggagcctatgaccccacgtctgacagccatgtccacctgtgcccacagcttccgcccacagacctccagggacaggagcaaattgcaccacagctccccgcctggcctggccctccccaggcggctcagtggctcatgctgtcctgtgagagcccctgccccagagcggccccactaagcgcatgtggctcctgggctacccacagccagggcagcctgctggagccacagggccagggccatgcagatggaggcctctgggagccacctccaatccctcaccactcactcaaccagtggcacagtgtccttgtgcccacactgagccagcaagtcctgctgtccacacccacaagctacctggagggacaggacccacctccatccttcggaaggccttcctggaatcccaccttggcctccgccctcggttccgccccgcccctctccccccgaccttggggcttgtgtcgagcccttgggtggggccaggaggaggtgatggcgtcagaggaggtgtggtcagaggtgacttgttcccacctccagggaggacgcttcgtcttcggccagcgcagacctggtgtttgtttgttgggctcacgcttgcacaatgaaggcttgttcacacaa

SEQ ID NO: 149116 - DNA, 2500 bp, Homo sapiens
  Payload ID: 9446
  Gene Symbol: LIMS2
  Gene Name: LIM and senescent cell antigen-like domains 2
  Uniprot ID: Q7Z4I7
  ENST ID: ENST00000409455
  CDS Start-End: 637-1647
aagtgcatgactcaggactgggtgggagggggctgtccctgaggccctggtctcccccagccaagtcctggcagggggatgctgttcttcaggatcccatgacctggggctcttggggagccccagcccggagagtgacctgtggctttgctggggaaaggggcttggagggtacagggcagtgtccaggattgcagtctcaaatccgaggcccacaggggagctgcctctgtgatcgccattaaggctgtggcctggggtctcagggcagcccaggaaccaaaaatagcctgtaacttgtcactttgtaagtcctgccctccagacacacttccctttcttctccccaagcctctcttcccagttagctcccctgacttggagtcacctctaagccttggcccaggcccctctgcagtgagatggagggactcatcccccggagagtggcatctgcaggcccactggctgcctgtggtcaccccctagggttctagcggggctgcctcccattttcctcagagcatccctgccagctggctggttctcactctcctgttttctaggaaaagaaagtggggagagacaggaacagggtccggagcagccccagcagcagcattgaggtggagcaatatgtcggacgccttggccaacgccgtgtgccagcgctgccaggcccgcttctcccccgccgagcgcattgtcaacagcaatggggagctgtaccatgagcactgcttcgtgtgtgcccagtgcttccggcccttccccgaggggctcttctatgagtttgaaggccggaagtactgcgaacacgacttccaaatgctgtttgctccgtgctgtggatcctgcggtgagttcatcattggccgcgtcatcaaggccatgaacaacaactggcacccgggctgcttccgctgcgagctgtgtgatgtggagctggctgacctgggctttgtgaagaatgccggcaggcatctctgccggccttgccacaaccgtgagaaggccaagggcctgggcaagtacatctgccagcggtgccacctggtcatcgacgagcagcccctcatgttcaggagcgacgcctaccaccctgaccacttcaactgcacccactgtgggaaggagctgacagccgaggcccgcgagctgaagggtgagctctactgcctgccctgccatgacaagatgggcgtccccatctgcggggcctgccgccggcccatcgagggccgagtggtcaacgcgctgggcaagcagtggcacgtggagcactttgtctgtgccaagtgtgagaagccattcctggggcaccggcactatgagaagaagggcctggcctactgcgagactcactacaaccagctcttcggggacgtctgctacaactgcagccatgtgattgaaggcgatgtggtgtcggccctcaacaaggcctggtgtgtgagctgcttctcctgctccacctgcaacagcaagctcaccctgaagaacaagtttgtggagttcgacatgaagcccgtgtgtaagaggtgctacgagaagttcccgctggagctgaagaagcggctgaagaagctgtcggagctgacctcccgcaaggcccagcccaaggccacagacctcaactctgcctgaaggccctcttgcgcagctgcctctcggcccctccgccttctcccctcctgctgtccatgcttggccccctcgtccccatccacctgtgccctccgcatcttaccctccctttctctttcctcattgccttctcccttcctgttccctcatctctgccttccccatgtctctcctctccttggccgtggcttctgtctgtgaggaggcaggagctggggagtgggagcctatgaccccacgtctgacagccatgtccacctgtgcccacagcttccgcccacagacctccagggacaggagcaaattgcaccacagctccccgcctggcctggccctccccaggcggctcagtggctcatgctgtcctgtgagagcccctgccccagagcggccccactaagcgcatgtggctcctgggctacccacagccagggcagcctgctggagccacagggccagggccatgcagatggaggcctctgggagccacctccaatccctcaccactcactcaaccagtggcacagtgtccttgtgcccacactgagccagcaagtcctgctgtccacacccacaagctacctggagggacaggacccacctccatccttcggaaggccttcctggaatcccaccttggcctccgccctcggttccgccccgcccctctccccccgaccttggggcttgtgtcgagcccttgggtggggccaggaggaggtgatggcgtcagaggaggtgtggtcagaggtgacttgttcccacctccagggaggacgcttcgtcttcggccagcgcagacctggtgtttgtttgttgggctcacgcttgcacaatgaaggcttgttcacac

SEQ ID NO: 149117 - DNA, 1695 bp, Homo sapiens
  Payload ID: 9446
  Gene Symbol: LIMS2
  Gene Name: LIM and senescent cell antigen-like domains 2
  Uniprot ID: Q7Z4I7
  ENST ID: ENST00000410038
  CDS Start-End: 315-884
aagatgcctgaagttctaacaccagagatggtttcctgctgcttccaggaacagggtctgttcttagtccaatgtggagttcctcatggggaccccattccccaggaatccaggttccacagtactctgacttggtctggctggtctcggctggcactttccctaggactgctaaaaccacggtgagggcggagagctgagggccgaagaaggcggggcatctctgccggccttgccacaaccgtgagaaggccaagggcctgggcaagtacatctgccagcggtgccacctggtcatcgacgagcagcccctcatgttcaggagcgacgcctaccaccctgaccacttcaactgcacccactgtgggaaggagctgacagccgaggcccgcgagctgaagggtgagctctactgcctgccctgccatgacaagatgggcgtccccatctgcggggcctgccgccggcccatcgagggccgagtggtcaacgcgctgggcaagcagtggcacgtggagcactttgtctgtgccaagtgtgagaagccattcctggggcaccggcactatgagaagaagggcctggcctactgcgagactcactacaaccagctcttcggggacgtctgctacaactgcagccatgtgattgaaggcgatgtggtgtcggccctcaacaaggcctggtgtgtgagctgcttctcctgctccacctgcaacagcaagctcaccctgaagaacaagtttgtggagttcgacatgaagcccgtgtgtaagaggtgctacgagaagttcccgctggagctgaagaagcggctgaagaagctgtcggagctgacctcccgcaaggcccagcccaaggccacagacctcaactctgcctgaaggccctcttgcgcagctgcctctcggcccctccgccttctcccctcctgctgtccatgcttggccccctcgtccccatccacctgtgccctccgcatcttaccctccctttctctttcctcattgccttctcccttcctgttccctcatctctgccttccccatgtctctcctctccttggccgtggcttctgtctgtgaggaggcaggagctggggagtgggagcctatgaccccacgtctgacagccatgtccacctgtgcccacagcttccgcccacagacctccagggacaggagcaaattgcaccacagctccccgcctggcctggccctccccaggcggctcagtggctcatgctgtcctgtgagagcccctgccccagagcggccccactaagcgcatgtggctcctgggctacccacagccagggcagcctgctggagccacagggccagggccatgcagatggaggcctctgggagccacctccaatccctcaccactcactcaaccagtggcacagtgtccttgtgcccacactgagccagcaagtcctgctgtccacacccacaagctacctggagggacaggacccacctccatccttcggaaggccttcctggaatcccaccttggcctccgccctcggttccgccccgcccctctccccccgaccttggggcttgtgtcgagcccttgggtggggccaggaggaggtgatggcgtcagaggaggtgtggtcagaggtgacttgttcccacctccagggaggacgcttcgtcttcggccagcgcagacctggtgttt

SEQ ID NO: 149118 - DNA, 2315 bp, Homo sapiens
  Payload ID: 9446
  Gene Symbol: LIMS2
  Gene Name: LIM and senescent cell antigen-like domains 2
  Uniprot ID: Q7Z4I7
  ENST ID: ENST00000409808
  CDS Start-End: 452-1462
ctatactcccgcaacctcccaccgtcacctccccaacacccccaccaccctcagccttgacctccccatcccaccccgccccgcgggccccaccctgccacccccgcccacccctctcgcgggcggagcggctcttggccttttttgggcgtctccctgctccgcggcccgggctggcgggcgggcgctcggctggcggctgcagcagcagagggagacccgcggcaaccccggcaacccagggctcggcgtcgctgccaccatgacgggaagatgaggtcaccagaggccacagaggctgagccactcaggaggccagtcacaggtccaccagtgtccggccagtgtttgtccctgcagccctttctggaacctagctgggaaaagaaagtggggagagacaggaacagggtccggagcagccccagcagcagcattgaggtggagcaatatgtcggacgccttggccaacgccgtgtgccagcgctgccaggcccgcttctcccccgccgagcgcattgtcaacagcaatggggagctgtaccatgagcactgcttcgtgtgtgcccagtgcttccggcccttccccgaggggctcttctatgagtttgaaggccggaagtactgcgaacacgacttccaaatgctgtttgctccgtgctgtggatcctgcggtgagttcatcattggccgcgtcatcaaggccatgaacaacaactggcacccgggctgcttccgctgcgagctgtgtgatgtggagctggctgacctgggctttgtgaagaatgccggcaggcatctctgccggccttgccacaaccgtgagaaggccaagggcctgggcaagtacatctgccagcggtgccacctggtcatcgacgagcagcccctcatgttcaggagcgacgcctaccaccctgaccacttcaactgcacccactgtgggaaggagctgacagccgaggcccgcgagctgaagggtgagctctactgcctgccctgccatgacaagatgggcgtccccatctgcggggcctgccgccggcccatcgagggccgagtggtcaacgcgctgggcaagcagtggcacgtggagcactttgtctgtgccaagtgtgagaagccattcctggggcaccggcactatgagaagaagggcctggcctactgcgagactcactacaaccagctcttcggggacgtctgctacaactgcagccatgtgattgaaggcgatgtggtgtcggccctcaacaaggcctggtgtgtgagctgcttctcctgctccacctgcaacagcaagctcaccctgaagaacaagtttgtggagttcgacatgaagcccgtgtgtaagaggtgctacgagaagttcccgctggagctgaagaagcggctgaagaagctgtcggagctgacctcccgcaaggcccagcccaaggccacagacctcaactctgcctgaaggccctcttgcgcagctgcctctcggcccctccgccttctcccctcctgctgtccatgcttggccccctcgtccccatccacctgtgccctccgcatcttaccctccctttctctttcctcattgccttctcccttcctgttccctcatctctgccttccccatgtctctcctctccttggccgtggcttctgtctgtgaggaggcaggagctggggagtgggagcctatgaccccacgtctgacagccatgtccacctgtgcccacagcttccgcccacagacctccagggacaggagcaaattgcaccacagctccccgcctggcctggccctccccaggcggctcagtggctcatgctgtcctgtgagagcccctgccccagagcggccccactaagcgcatgtggctcctgggctacccacagccagggcagcctgctggagccacagggccagggccatgcagatggaggcctctgggagccacctccaatccctcaccactcactcaaccagtggcacagtgtccttgtgcccacactgagccagcaagtcctgctgtccacacccacaagctacctggagggacaggacccacctccatccttcggaaggccttcctggaatcccaccttggcctccgccctcggttccgccccgcccctctccccccgaccttggggcttgtgtcgagcccttgggtggggccaggaggaggtgatggcgtcagaggaggtgtggtcagaggtgacttgttcccacctccagggaggacgcttcgtcttcggccagcgcagacctggtgtttgtttgttgggctcacgcttgcacaatgaaggcttgttcacac

SEQ ID NO: 149119 - DNA, 867 bp, Homo sapiens
  Payload ID: 9446
  Gene Symbol: LIMS2
  Gene Name: LIM and senescent cell antigen-like domains 2
  Uniprot ID: Q7Z4I7
  ENST ID: ENST00000409254
  CDS Start-End: 214-783
gcattctgaacttcagcacaaggcaaacgcagaaccagggcttggaatttcgccgctatgcagctgcacccctgccacccaggagatctgaggctcctcagagctgggaggaccgggcatctctgccggccttgccacaaccgtgagaaggccaagggcctgggcaagtacatctgccagcggtgccacctggtcatcgacgagcagcccctcatgttcaggagcgacgcctaccaccctgaccacttcaactgcacccactgtgggaaggagctgacagccgaggcccgcgagctgaagggtgagctctactgcctgccctgccatgacaagatgggcgtccccatctgcggggcctgccgccggcccatcgagggccgagtggtcaacgcgctgggcaagcagtggcacgtggagcactttgtctgtgccaagtgtgagaagccattcctggggcaccggcactatgagaagaagggcctggcctactgcgagactcactacaaccagctcttcggggacgtctgctacaactgcagccatgtgattgaaggcgatgtggtgtcggccctcaacaaggcctggtgtgtgagctgcttctcctgctccacctgcaacagcaagctcaccctgaagaacaagtttgtggagttcgacatgaagcccgtgtgtaagaggtgctacgagaagttcccgctggagctgaagaagcggctgaagaagctgtcggagctgacctcccgcaaggcccagcccaaggccacagacctcaactctgcctgaaggccctcttgcgcagctgcctctcggcccctccgccttctcccctcctgctgtccatgcttggccccctcgtccccatccacc

SEQ ID NO: 149120 - DNA, 2335 bp, Homo sapiens
  Payload ID: 9446
  Gene Symbol: LIMS2
  Gene Name: LIM and senescent cell antigen-like domains 2
  Uniprot ID: Q7Z4I7
  ENST ID: ENST00000410011
  CDS Start-End: 472-1482
ttttgcagtctgtccgtggatactgtgaacatcaggctactcggccgggctcctgcgctcagggcttcgagaaatgctcattttggggctgcccctctgccggcctctctggattcagagggcagccgctgctccttttgttttgtgggcctggctctgggcccggagcagcacctccctggggaggccgcctttccttccgcggcttcttccgtctcctcctgaccccaaggtgcctccggcctctgcctccagctaaggacctctggccaagcctcctgcccagggagaggtgaagctgccgtgcctgggtgccccgtggtggccggacactcctggcggctgctcagtcttgcacgtggctgtgccaagcgggccaggcagctgctatttccctcagagaagttgctggcggcgctcagggaaggaagcacccgaggaggcggagcggcatctcagccacagagcaatatgtcggacgccttggccaacgccgtgtgccagcgctgccaggcccgcttctcccccgccgagcgcattgtcaacagcaatggggagctgtaccatgagcactgcttcgtgtgtgcccagtgcttccggcccttccccgaggggctcttctatgagtttgaaggccggaagtactgcgaacacgacttccaaatgctgtttgctccgtgctgtggatcctgcggtgagttcatcattggccgcgtcatcaaggccatgaacaacaactggcacccgggctgcttccgctgcgagctgtgtgatgtggagctggctgacctgggctttgtgaagaatgccggcaggcatctctgccggccttgccacaaccgtgagaaggccaagggcctgggcaagtacatctgccagcggtgccacctggtcatcgacgagcagcccctcatgttcaggagcgacgcctaccaccctgaccacttcaactgcacccactgtgggaaggagctgacagccgaggcccgcgagctgaagggtgagctctactgcctgccctgccatgacaagatgggcgtccccatctgcggggcctgccgccggcccatcgagggccgagtggtcaacgcgctgggcaagcagtggcacgtggagcactttgtctgtgccaagtgtgagaagccattcctggggcaccggcactatgagaagaagggcctggcctactgcgagactcactacaaccagctcttcggggacgtctgctacaactgcagccatgtgattgaaggcgatgtggtgtcggccctcaacaaggcctggtgtgtgagctgcttctcctgctccacctgcaacagcaagctcaccctgaagaacaagtttgtggagttcgacatgaagcccgtgtgtaagaggtgctacgagaagttcccgctggagctgaagaagcggctgaagaagctgtcggagctgacctcccgcaaggcccagcccaaggccacagacctcaactctgcctgaaggccctcttgcgcagctgcctctcggcccctccgccttctcccctcctgctgtccatgcttggccccctcgtccccatccacctgtgccctccgcatcttaccctccctttctctttcctcattgccttctcccttcctgttccctcatctctgccttccccatgtctctcctctccttggccgtggcttctgtctgtgaggaggcaggagctggggagtgggagcctatgaccccacgtctgacagccatgtccacctgtgcccacagcttccgcccacagacctccagggacaggagcaaattgcaccacagctccccgcctggcctggccctccccaggcggctcagtggctcatgctgtcctgtgagagcccctgccccagagcggccccactaagcgcatgtggctcctgggctacccacagccagggcagcctgctggagccacagggccagggccatgcagatggaggcctctgggagccacctccaatccctcaccactcactcaaccagtggcacagtgtccttgtgcccacactgagccagcaagtcctgctgtccacacccacaagctacctggagggacaggacccacctccatccttcggaaggccttcctggaatcccaccttggcctccgccctcggttccgccccgcccctctccccccgaccttggggcttgtgtcgagcccttgggtggggccaggaggaggtgatggcgtcagaggaggtgtggtcagaggtgacttgttcccacctccagggaggacgcttcgtcttcggccagcgcagacctggtgtttgtttgttgggctcacgcttgcacaatgaaggcttgttcacac

SEQ ID NO: 149121 - DNA, 930 bp, Homo sapiens
  Payload ID: 9446
  Gene Symbol: LIMS2
  Gene Name: LIM and senescent cell antigen-like domains 2
  ENST ID: ENST00000413578
  CDS Start-End: 214-396
gcattctgaacttcagcacaaggcaaacgcagaaccagggcttggaatttcgccgctatgcagctgcacccctgccacccaggagatctgaggctcctcagagctgggaggaccgggcatctctgccggccttgccacaaccgtgagaaggccaagggcctgggcaagtacatctgccagcggtgccacctggtcatcgacgagcagcccctcatgttcaggagcgacgcctaccaccctgaccacttcaactgcacccactgtggcactttgtctgtgccaagtgtgagaagccattcctggggcaccggcactatgagaagaagggcctggcctactgcgagactcactacaaccagctcttcggggacgtctgctacaactgcagccatgtgattgaaggcgatgtggtgtcggccctcaacaaggcctggtgtgtgagctgcttctcctgctccacctgcaacagcaagctcaccctgaagaacaagtttgtggagttcgacatgaagcccgtgtgtaagaggtgctacgagaagttcccgctggagctgaagaagcggctgaagaagctgtcggagctgacctcccgcaaggcccagcccaaggccacagacctcaactctgcctgaaggccctcttgcgcagctgcctctcggcccctccgccttctcccctcctgctgtccatgcttggccccctcgtccccatccacctgtgccctccgcatcttaccctccctttctctttcctcattgccttctcccttcctgttccctcatctctgccttccccatgtctctcctctccttggccgtggcttctgtctgtgaggaggcaggagctggggagtgggagcctatgaccccacgtctgacagccatgtccacctgtgcccacagcttccgcccacagacctccagggacagg

SEQ ID NO: 149122 - DNA, 1409 bp, Homo sapiens
  Payload ID: 9446
  Gene Symbol: LIMS2
  Gene Name: LIM and senescent cell antigen-like domains 2
  ENST ID: ENST00000426981
  CDS Start-End: 1-509
tgggcgtccccatctgcggggcctgccgccggcccatcgagggccgagtggtcaacgcgctgggcaagcagtggcacgtggaggtgagccaggctggtggacacgtggcctcaggttggggggtgccccagctcagggtcatgcactttgtctgtgccaagtgtgagaagccattcctggggcaccggcactatgagaagaagggcctggcctactgcgagactcactacaaccagctcttcggggacgtctgctacaactgcagccatgtgattgaaggcgatgtggtgtcggccctcaacaaggcctggtgtgtgagctgcttctcctgctccacctgcaacagcaagctcaccctgaagaacaagtttgtggagttcgacatgaagcccgtgtgtaagaggtgctacgagaagttcccgctggagctgaagaagcggctgaagaagctgtcggagctgacctcccgcaaggcccagcccaaggccacagacctcaactctgcctgaaggccctcttgcgcagctgcctctcggcccctccgccttctcccctcctgctgtccatgcttggccccctcgtccccatccacctgtgccctccgcatcttaccctccctttctctttcctcattgccttctcccttcctgttccctcatctctgccttccccatgtctctcctctccttggccgtggcttctgtctgtgaggaggcaggagctggggagtgggagcctatgaccccacgtctgacagccatgtccacctgtgcccacagcttccgcccacagacctccagggacaggagcaaattgcaccacagctccccgcctggcctggccctccccaggcggctcagtggctcatgctgtcctgtgagagcccctgccccagagcggccccactaagcgcatgtggctcctgggctacccacagccagggcagcctgctggagccacagggccagggccatgcagatggaggcctctgggagccacctccaatccctcaccactcactcaaccagtggcacagtgtccttgtgcccacactgagccagcaagtcctgctgtccacacccacaagctacctggagggacaggacccacctccatccttcggaaggccttcctggaatcccaccttggcctccgccctcggttccgccccgcccctctccccccgaccttggggcttgtgtcgagcccttgggtggggccaggaggaggtgatggcgtcagaggaggtgtggtcagaggtgacttgttcccacctccagggaggacgcttcgtcttcggccagcgcagacctggtgtttgtttgttgggctcacgcttgcacaatgaaggcttgttcacacaaccacagcagcctgcgtggtttgtggcgggggtcgggggtggaggg

SEQ ID NO: 149123 - DNA, 1730 bp, Homo sapiens
  Payload ID: 9446
  Gene Symbol: LIMS2
  Gene Name: LIM and senescent cell antigen-like domains 2
  Uniprot ID: Q7Z4I7
  ENST ID: ENST00000545738
  CDS Start-End: 79-1170
gcgctcggctggcggctgcagcagcagagggagacccgcggcaaccccggcaacccagggctcggcgtcgctgccaccatgacgggaaggaaaagaaagtggggagagacaggaacagggtccggagcagccccagcagcagcattgaggtggagcaatatgtcggacgccttggccaacgccgtgtgccagcgctgccaggcccgcttctcccccgccgagcgcattgtcaacagcaatggggagctgtaccatgagcactgcttcgtgtgtgcccagtgcttccggcccttccccgaggggctcttctatgagtttgaaggccggaagtactgcgaacacgacttccaaatgctgtttgctccgtgctgtggatcctgcggtgagttcatcattggccgcgtcatcaaggccatgaacaacaactggcacccgggctgcttccgctgcgagctgtgtgatgtggagctggctgacctgggctttgtgaagaatgccggcaggcatctctgccggccttgccacaaccgtgagaaggccaagggcctgggcaagtacatctgccagcggtgccacctggtcatcgacgagcagcccctcatgttcaggagcgacgcctaccaccctgaccacttcaactgcacccactgtgggaaggagctgacagccgaggcccgcgagctgaagggtgagctctactgcctgccctgccatgacaagatgggcgtccccatctgcggggcctgccgccggcccatcgagggccgagtggtcaacgcgctgggcaagcagtggcacgtggagcactttgtctgtgccaagtgtgagaagccattcctggggcaccggcactatgagaagaagggcctggcctactgcgagactcactacaaccagctcttcggggacgtctgctacaactgcagccatgtgattgaaggcgatgtggtgtcggccctcaacaaggcctggtgtgtgagctgcttctcctgctccacctgcaacagcaagctcaccctgaagaacaagtttgtggagttcgacatgaagcccgtgtgtaagaggtgctacgagaagttcccgctggagctgaagaagcggctgaagaagctgtcggagctgacctcccgcaaggcccagcccaaggccacagacctcaactctgcctgaaggccctcttgcgcagctgcctctcggcccctccgccttctcccctcctgctgtccatgcttggccccctcgtccccatccacctgtgccctccgcatcttaccctccctttctctttcctcattgccttctcccttcctgttccctcatctctgccttccccatgtctctcctctccttggccgtggcttctgtctgtgaggaggcaggagctggggagtgggagcctatgaccccacgtctgacagccatgtccacctgtgcccacagcttccgcccacagacctccagggacaggagcaaattgcaccacagctccccgcctggcctggccctccccaggcggctcagtggctcatgctgtcctgtgagagcccctgccccagagcggccccactaagcgcatgtggctcctgggctacccacagccagggcagcctgctggagccacagggccagggccatgcagatggaggcctctgggagccacctccaatccctcaccactcactcaaccagtggcacagtgtccttgtgcccacactgagccagcaagtcct

SEQ ID NO: 149124 - DNA, 1617 bp, Homo sapiens
  Payload ID: 9446
  Gene Symbol: LIMS2
  Gene Name: LIM and senescent cell antigen-like domains 2
  ENST ID: ENST00000612860
  CDS Start-End: 17-766
cacagtgctgtgcaggatggagtccagacacccagcagtagcagaaatcgcctgtacgtgttgggcccttcttcatctggcaaaccccgaaggaagggggcatctctgccggccttgccacaaccgtgagaaggccaagggcctgggcaagtacatctgccagcggtgccacctggtcatcgacgagcagcccctcatgttcaggagcgacgcctaccaccctgaccacttcaactgcacccactgtgggaaggagctgacagccgaggcccgcgagctgaagggtgagctctactgcctgccctgccatgacaagatgggcgtccccatctgcggggcctgccgccggcccatcgagggccgagtggtcaacgcgctgggcaagcagtggcacgtggagcactttgtctgtgccaagtgtgagaagccattcctggggcaccggcactatgagaagaagggcctggcctactgcgagactcactacaaccagctcttcggggacgtctgctacaactgcagccatgtgattgaaggcgatgtggtgtcggccctcaacaaggcctggtgtgtgagctgcttctcctgctccacctgcaacagcaagctcaccctgaagaacaagtttgtggagttcgacatgaagcccgtgtgtaagaggtgctacgagaagttcccgctggagctgaagaagcggctgaagaagctgtcggagctgacctcccgcaaggcccagcccaaggccacagacctcaactctgcctgaaggccctcttgcgcagctgcctctcggcccctccgccttctcccctcctgctgtccatgcttggccccctcgtccccatccacctgtgccctccgcatcttaccctccctttctctttcctcattgccttctcccttcctgttccctcatctctgccttccccatgtctctcctctccttggccgtggcttctgtctgtgaggaggcaggagctggggagtgggagcctatgaccccacgtctgacagccatgtccacctgtgcccacagcttccgcccacagacctccagggacaggagcaaattgcaccacagctccccgcctggcctggccctccccaggcggctcagtggctcatgctgtcctgtgagagcccctgccccagagcggccccactaagcgcatgtggctcctgggctacccacagccagggcagcctgctggagccacagggccagggccatgcagatggaggcctctgggagccacctccaatccctcaccactcactcaaccagtggcacagtgtccttgtgcccacactgagccagcaagtcctgctgtccacacccacaagctacctggagggacaggacccacctccatccttcggaaggccttcctggaatcccaccttggcctccgccctcggttccgccccgcccctctccccccgaccttggggcttgtgtcgagcccttgggtggggccaggaggaggtgatggcgtcagaggaggtgtggtcagaggtgacttgttcccacctccagggaggacgcttcgtcttcggccagcgcagacctggtgtttgtttgttgggctcacgcttgcacaatgaaggcttgttcac

SEQ ID NO: 149125 - DNA, 1220 bp, Homo sapiens
  Payload ID: 9447
  Gene Symbol: LIMS3
  Gene Name: LIM and senescent cell antigen-like domains 3
  Uniprot ID: P0CW19
  ENST ID: ENST00000437679
  CDS Start-End: 302-655
cagtgtttatagcatagtccactgggactgccgctctgacaaagactgtgtcactactttgtggaatgttattttagaacttccagaatgcctcagtaaatcctgactgccatgtaactgtgtactgtgctgctgagctcttaacatgaagcagcagcagtgaccctggcgggccaggctgacgtgcgtgggaacagtgggagtgaccctggctgggaagcagggaggcctggatattgtttctcctggctctgtgtcctgccattctcatccctgtgctcagagctctcaagcacccacgatggccttctcaggccgagcgcgcccctgcattatcccagagaacgaagaaatcccccgagcagcccttaacactgtccacgaggccaatgggaccgaggacgagagggctgtttccaaactgcagcgcaggcacagtgacgtgaaagtctacaaggagttctgtgacttttatgcgaaattcaacatggccaacgccctggccagcgccacttgcgagcgctgcaagggcggctttgcgcccgctgagacgatcgtgaacagtaatggggagctgtaccatgagcagtgtttcgtgtgcgctcagtgcttccagcagttcccagaaggactcttctatgaggaacgaacgtgatggttaagctaccttcattaagcagcatgaccgcttcctgagctcctgctgccgcatttaggccctgtcagctgtgaggccactggtgctgagtcagagggaaaagctcagaacagccttgagcagcgaagaataaagcatgactcatctcgtcctgcccacccctcacactggactataaataccctccctgggtctgtgtgctgttattccaaaagatgcgatgaatacccagaactaggctattcatgggctgttgcccagttcaagctctattgggtcctgaggaagattactattttggctacattgtttatcattaaaaccagcccagggatgtgtaaacctgcatctggagaataagacatttctttttggttaaatgatattagagaaaaaaaaaactatccaaggctgctaacaaataatcttcactttcaattatatccagcaataagttgttctccagaaaagaaagcttggaaacttacccagtttgccttccatttgggacatgactgatgtgcttcagtctttgtataataaatgcatcttcgccactcta

SEQ ID NO: 149126 - DNA, 1580 bp, Homo sapiens
  Payload ID: 9447
  Gene Symbol: LIMS3
  Gene Name: LIM and senescent cell antigen-like domains 3
  Uniprot ID: P0CW19
  ENST ID: ENST00000631420
  CDS Start-End: 83-829
gcagggaggcctggatattgtttctcctggctctgtgtcctgccattctcatccctgtgctcagagctctcaagcacccacgatggccttctcaggccgagcgcgcccctgcattatcccagagaacgaagaaatcccccgagcagcccttaacactgtccacgaggccaatgggaccgaggacgagagggctgtttccaaactgcagcgcaggcacagtgacgtgaaagtctacaaggagttctgtgacttttatgcgaaattcaacatggccaacgccctggccagcgccacttgcgagcgctgcaagggcggctttgcgcccgctgagacgatcgtgaacagtaatggggagctgtaccatgagcagtgtttcgtgtgcgctcagtgcttccagcagttcccagaaggactcttctatgagtttgaaggaagaaagtactgtgaacatgactttcagatgctctttgccccttgctgtcatcagtgtggtgaattcatcattggccgagttatcaaagccatgaataacagctggcatccggagtgcttccgctgtgacctctgccaggaagttctggcagatatcgggtttgtcaagaatgctgggagacacctgtgtcgcccctgtcataatcgtgagaaagccagaggccttgggaaatacatctgccagaaatgccatgctatcatcgatgagcagcctctgatattcaagaacgacccctaccatccagaccatttcaactgcgccaactgcggacaggaaggatctgactgccgatgcacaggagctgaaaggggagctatactgcctgccatgccatgataaaatgggggtccccatctgtggcgcttgccgacggcccatcgaagggcgtgtggtgaacgccatgggcaagcagtggcatgtggagcattttgtttgtgccaagtgtgagaaaccctttcttggacatcgccattatgagaggaaaggcctggcgtattgtgaaactcactataaccagctatttggtgatgtttgcttccactgcaatcgtgttatagaaggtgatgtggtctctgctcttaataaggcctggtgcgtgaactgctttgcctgttctacctgcaacactaaattaacactcaagtaagtgtacggttttgtccagtgtgaatcctaagactgaaaactttggggggacactgaaaaaaaatcctagaatttagaaaaagagaattatttgatttcttatttcctctttctgttcaggccttctgaaagtaaaggttcttcctttaactgttccctgttctttcttctattccttctttgtcctactcaaagggataagtttgttgaaattgacctaaagccagtctgcaaacactgttatgagaaaatgccagaagaatttaagaggcgacttgccaaacgggagagagaagcaaaggataaggacaagcagaaaaagaaaaagccagtctgtttgtaaacttttctatccctgtgtcatcattttcactactttctcctttggttagtcctttggaatatgtttttgttctgtttctgtcttttgctttcttccccc

SEQ ID NO: 149127 - DNA, 1197 bp, Homo sapiens
  Payload ID: 9447
  Gene Symbol: LIMS3
  Gene Name: LIM and senescent cell antigen-like domains 3
  ENST ID: ENST00000480744
  CDS Start-End: 1-1197
atggccttctcaggccgagcgcgcccctgcattatcccagagaacgaagaaatcccccgagcagcccttaacactgtccacgaggccaatgggaccgaggacgagagggctgtttccaaactgcagcgcaggcacagtgacgtgaaagtctacaaggagttctgtgacttttatgcgaaattcaacatggccaacgccctggccagcgccacttgcgagcgctgcaagggcggctttgcgcccgctgagacgatcgtgaacagtaatggggagctgtaccatgagcagtgtttcgtgtgcgctcagtgcttccagcagttcccagaaggactcttctatgagtttgaaggaagaaagtactgtgaacatgactttcagatgctctttgccccttgctgtcatcagtgtggtgaattcatcattggccgagttatcaaagccatgaataacagctggcatccggagtgcttccgctgtgacctctgccaggaagttctggcagatatcgggtttgtcaagaatgctgggagacacctgtgtcgcccctgtcataatcgtgagaaagccagaggccttgggaaatacatctgccagaaatgccatgctatcatcgatgagcagcctctgatattcaagaacgacccctaccatccagaccatttcaactgcgccaactgcgggaaggatctgactgccgatgcacaggagctgaaaggggagctatactgcctgccatgccatgataaaatgggggtccccatctgtggcgcttgccgacggcccatcgaagggcgtgtggtgaacgccatgggcaagcagtggcatgtggagcattttgtttgtgccaagtgtgagaaaccctttcttggacatcgccattatgagaggaaaggcctggcgtattgtgaaactcactataaccagctatttggtgatgtttgcttccactgcaatcgtgttatagaaggtgatgtggtctctgctcttaataaggcctggtgcgtgaactgctttgcctgttctacctgcaacactaaattaacactcaaggataagtttgttgaaattgacctaaagccagtctgcaaacactgttatgagaaaatgccagaagaatttaagaggcgacttgccaaacgggagagagaagcaaaggataaggacaagcagaaaaagaaaaagccagtctgtttgtaa

SEQ ID NO: 149128 - DNA, 782 bp, Homo sapiens
  Payload ID: 9447
  Gene Symbol: LIMS3
  Gene Name: LIM and senescent cell antigen-like domains 3
  ENST ID: ENST00000487150
  CDS Start-End: 52-219
ggcaaagggaaagttgtcttccagaggtgtggaggggagtgaagcaacaacatggccaacgccctggccagcgccacttgcgagcgctgcaagggcggctttgcgcccgctgagacgatcgtgaacagtaatggggagctgtaccatgagcagtgtttcgtgtgcgctcagtgcttccagcagttcccagaaggactcttctatgaggaacgaacgtgatggttaagctaccttcattaagcagcatgaccgcttcctgagctcctgctgccgcatttaggccctgtcagctgtgaggccactggtgctgagtcagagggaaaagctcagaacagccttgagcagcgaagaataaagcatgactcatctcgtcctgcccacccctcacactggactataaataccctccctgggtctgtgtgctgttattccaaaagatgcgatgaatacccagaactaggctattcatgggctgttgcccagttcaagctctattgggtcctgaggaagattactattttggctacattgtttatcattaaaaccagcccagggatgtgtaaacctgcatctggagaataagacatttctttttggttaaatgatattagagaaaaaaaaaactatccaaggctgctaacaaataatcttcactttcaattatatccagcaataagttgttctccagaaaagaaagcttggaaacttacccagtttgccttccatttgggacatgactgatgtgcttcagtctttgtataataaatgcatcttcgccactc

SEQ ID NO: 149129 - DNA, 1215 bp, Homo sapiens
  Payload ID: 9448
  Gene Symbol: LIMS3L
  Gene Name: LIM and senescent cell antigen-like domains 3-like
  Uniprot ID: P0CW20
  ENST ID: ENST00000413601
  CDS Start-End: 298-651
gtttatagcatagtccactgggactgccgctctgacaaagactgtgtcactactttgtggaatgttattttagaacttccagaatgcctcagtaaatcctgactgccatgtaactgtgtactgtgctgctgagctcttaacatgaagcagcagcagtgaccctggcgggccaggctgacgtgcgtgggaacagtgggagtgaccctggctgggaagcagggaggcctggatattgtttctcctggctctgtgtcctgccattctcatccctgtgctcagagctctcaagcacccacgatggccttctcaggccgagcgcgcccctgcattatcccagagaacgaagaaatcccccgagcagcccttaacactgtccacgaggccaatgggaccgaggacgagagggctgtttccaaactgcagcgcaggcacagtgacgtgaaagtctacaaggagttctgtgacttttatgcgaaattcaacatggccaacgccctggccagcgccacttgcgagcgctgcaagggcggctttgcgcccgctgagacgatcgtgaacagtaatggggagctgtaccatgagcagtgtttcgtgtgcgctcagtgcttccagcagttcccagaaggactcttctatgaggaacgaacgtgatggttaagctaccttcattaagcagcatgaccgcttcctgagctcctgctgccgcatttaggccctgtcagctgtgaggccactggtgctgagtcagagggaaaagctcagaacagccttgagcagcgaagaataaagcatgactcatctcgtcctgcccacccctcacactggactataaataccctccctgggtctgtgtgctgttattccaaaagatgcgatgaatacccagaactaggctattcatgggctgttgcccagttcaagctctattgggtcctgaggaagattactattttggctacattgtttatcattaaaaccagcccagggatgtgtaaacctgcatctggagaataagacatttctttttggttaaatgatattagagaaaaaaaaaactatccaaggctgctaacaaataatcttcactttcaattatatccagcaataagttgttctccagaaaagaaagcttggaaacttacccagtttgccttccatttgggacatgactgatgtgcttcagtctttgtataataaatgcatcttcgccactct

SEQ ID NO: 149130 - DNA, 1580 bp, Homo sapiens; identical to SEQ ID NO: 149126
  Payload ID: 9448
  Gene Symbol: LIMS3L
  Gene Name: LIM and senescent cell antigen-like domains 3-like
  ENST ID: ENST00000632758
  CDS Start-End: 83-829

SEQ ID NO: 149131 - DNA, 1460 bp, Homo sapiens
  Payload ID: 9448
  Gene Symbol: LIMS3L
  Gene Name: LIM and senescent cell antigen-like domains 3-like
  ENST ID: ENST00000632897
  CDS Start-End: 264-1460
acaaagactgtgtcactactttgtggaatgttattttagaacttccagaatgcctcagtaaatcctgactgccatgtaactgtgtactgtgctgctgagctcttaacatgaagcagcagcagtgaccctggcgggccaggctgacgtgcgtgggaacagtgggagtgaccctggctgggaagcagggaggcctggatattgtttctcctggctctgtgtcctgccattctcatccctgtgctcagagctctcaagcacccacgatggccttctcaggccgagcgcgcccctgcattatcccagagaacgaagaaatcccccgagcagcccttaacactgtccacgaggccaatgggaccgaggacgagagggctgtttccaaactgcagcgcaggcacagtgacgtgaaagtctacaaggagttctgtgacttttatgcgaaattcaacatggccaacgccctggccagcgccacttgcgagcgctgcaagggcggctttgcgcccgctgagacgatcgtgaacagtaatggggagctgtaccatgagcagtgtttcgtgtgcgctcagtgcttccagcagttcccagaaggactcttctatgagtttgaaggaagaaagtactgtgaacatgactttcagatgctctttgccccttgctgtcatcagtgtggtgaattcatcattggccgagttatcaaagccatgaataacagctggcatccggagtgcttccgctgtgacctctgccaggaagttctggcagatatcgggtttgtcaagaatgctgggagacacctgtgtcgcccctgtcataatcgtgagaaagccagaggccttgggaaatacatctgccagaaatgccatgctatcatcgatgagcagcctctgatattcaagaacgacccctaccatccagaccatttcaactgcgccaactgcgggaaggatctgactgccgatgcacaggagctgaaaggggagctatactgcctgccatgccatgataaaatgggggtccccatctgtggcgcttgccgacggcccatcgaagggcgtgtggtgaacgccatgggcaagcagtggcatgtggagcattttgtttgtgccaagtgtgagaaaccctttcttggacatcgccattatgagaggaaaggcctggcgtattgtgaaactcactataaccagctatttggtgatgtttgcttccactgcaatcgtgttatagaaggtgatgtggtctctgctcttaataaggcctggtgcgtgaactgctttgcctgttctacctgcaacactaaattaacactcaaggataagtttgttgaaattgacctaaagccagtctgcaaacactgttatgagaaaatgccagaagaatttaagaggcgacttgccaaacgggagagagaagcaaaggataaggacaagcagaaaaagaaaaagccagtctgtttgtaa

SEQ ID NO: 149132 - DNA, 4109 bp, Homo sapiens
  Payload ID: 9449
  Gene Symbol: LASP1
  Gene Name: LIM and SH3 protein 1
  Uniprot ID: Q14847
  ENST ID: ENST00000318008
  CDS Start-End: 332-1117
gcagtcagcctgagagcgctgaggcgccagcaccgcgggccccgccgtccccccaggaacccgcccccgcgcagccccacgtcgcccggagagcgcgcctcgctgcgcgtgcccttgcccgcgcccgaggcgcgtgcccgccccagtgcagcccctcctccccgctgtgtttattaggggaaggagggcggaggcggaggccagttccccagctccagccgccgtcgctgctgcctgtgtagttgcagccgcggccgcctcccgccagctcgcctcggggaacaggacgcgcgtgagctcaggcgtccccgccccagcttttctcggaaccatgaaccccaactgcgcccggtgcggcaagatcgtgtatcccacggagaaggtgaactgtctggataagttctggcataaagcatgcttccattgcgagacctgcaagatgacactgaacatgaagaactacaagggctacgagaagaagccctactgcaacgcacactaccccaagcagtccttcaccatggtggcggacaccccggaaaaccttcgcctcaagcaacagagtgagctccagagtcaggtgcgctacaaggaggagtttgagaagaacaagggcaaaggtttcagcgtagtggcagacacgcccgagctccagagaatcaagaagacccaggaccagatcagtaacataaaataccatgaggagtttgagaagagccgcatgggccctagcgggggcgagggcatggagccagagcgtcgggattcacaggacggcagcagctaccggcggcccctggagcagcagcagcctcaccacatcccgaccagtgccccggtttaccagcagccccagcagcagccggtggcccagtcctatggtggctacaaggagcctgcagccccagtctccatacagcgcagcgccccaggtggtggcgggaagcggtaccgcgcggtgtatgactacagcgccgccgacgaggacgaggtctccttccaggacggggacaccatcgtcaacgtgcagcagatcgacgacggctggatgtacgggacggtggagcgcaccggcgacacggggatgctgccggccaactacgtggaggccatctgaacccgcagcgcccccatctgtcttcagcacattccacggcatcgcatccgtcctgggcgtgacccgtccattcttcagtgtctctgttttttaaaacctgcgacagcttgtgattcctacccctcttccagcttcttttgccaactgaagccttcttctgccacttctgcgggctccctcctctggcaggcttcccccttgatcgacttcttggttttctctctggatggaacgggcatgggcctctctgggggaggcagggctggaatgggagacctgttggcctgtgggcctcacctgcccctctgttctctcccctcacatcctcctgcccagctcctcacatacccacacattccagggctggggtgagcctgactgccaggaccccaggtcaggggctccctacattccccagagtgggatccacttcttggttcctgggatggcgatggggactctgccgctgtgtagggaccagtgggatgggctctacctctctttctcaaagagggggctctgcccacctggggtctctctccctacctccctcctcaggggcaacaacaggagaatggggttcctgctgtggggcgaattcatcccctccccgcgcgttccttcgcacactgtgattttgccctcctgcccacgcagacctgcagcgggcaaagagctcccgaggaagcacagcttgggtcaggttcttgcctttcttaattttagggacagctaccggaaggaggggaacaaggagttctcttccgcagcccctttccccacgcccacccccagtctccagggacccttgcctgcctcctaggctggaagccatggtcccgaagtgtagggcaagggtgcctcaggaccttttggtcttcagcctccctcagcccccaggatctgggttaggtggccgctcctccctgctcctcatgggaagatgtctcagagccttccatgacctcccctccccagcccaatgccaagtggacttggagctgcacaaagtcagcagggaccactaaatctccaagacctggtgtgcggaggcaggagcatgtatgtctgcaggtgtctgacacgcaagtgtgtgagtgtgagtgtgagagatggggcgggggtgtgtctgtaggtgtctctgggcctgtgtgtgggtggggttatgtgagggtatgaagagctgtcttcccctgagagtttcctcagaacccacagtgagaggggagggctcctggggcagagaagttccttaggttttctttggaatgaaattcctccttccccccatctctgagtggaggaagcccaccaatctgccctttgcagtgtgcagggtggaaggtaagaggttggtgtggagttggggctgccatagggtctgcagcctgctggggctaagcggtggaggaaggctctgtcactccaggcatatgtttccccatctctgtctggggctacagaatagggtggcagaagtgtcaccctgtgggtgtctccctcgggggctcttcccctagacctccccctcacttacataaagctcccttgaagcaagaaagagggtcccagggctgcaaaactggaagcacagcctcggggatggggagggaaagacggtgctatatccagttcctgctctctgctcatgggtggctgtgacaaccctggcctcacttgattcatctctggttttcttgccaccctctgggagtccccatcccattttcatcctgagcccaaccaggccctgccattggcctcttgtcccttggcacacttgtacccacaggtgaggggcaggacctgaaggtattggcctgttcaacaatcagtcatcatgggtgtttttgtcaactgcttgttaattgatttggggatgtttgccccgaatgagaggttgaggaaaagactgtgggtggggaggccctgcctgacccatcccttttcctttctggccccagcctaggtggaggcaagtggaatatcttatattgggcgatttgggggctcggggaggcagagaatctcttgggagtcttgggtggcgctggtgcattctgtttcctcttgatctcaaagcacaatgtggatttggggaccaaaggtcagggacacatccccttagaggacctgagtttgggagagtggtgagtggaagggaggagcagcaagaagcagcctgttttcactcagcttaattctccttcccagataaggcaagccagtcatggaatcttgctgcaggccctccctctactcttcctgtcctaaaaataggggccgttttcttacacacccccagagagaggagggactgtcacactggtgctgagtgaccgggggctgctgggcgtctgttctttaccaaaaccatccatccctagaagagcacagagccctgaggggctgggctgggctgggctgagcccctggtcttctctacagttcacagaggtctttcagctcatttaatcccaggaaagaggcatcaaagctagaatgtgaatataacttttgtggaccaatactaagaataacaagaagcccagtggtgaggaaagtgcgttctcccagcactgcctcctgttttctccctctcatgtccctccagggaaaatgactttattgcttaatttctgcctttcccccctcacacatgcacttttgggcctttttttatagctggaaaaaacaaaataccaccctacaaacctgtatttaaaaagaaacagaaatgaccacgtgaaatttgcctctgtccaaacatttcatccgtgtgtatgtgtatgtgtgtgagtgtgtgaagccgccagttcatctttttatatggggttgttgtctcattttggtctgttttggtcccctccctcgtgggcttgtgctcgggatcaaacctttctggcctgttatgattctgaacatttgacttgaaccacaagtgaatctttctcctggtgactcaaataaaagtataatttttacctgcgga

SEQ ID NO: 149133 - DNA, 762 bp, Homo sapiens
  Payload ID: 9449
  Gene Symbol: LASP1
  Gene Name: LIM and SH3 protein 1
  ENST ID: ENST00000419929
  CDS Start-End: 264-762
gtgccaggctgcaggcacagtgacacgaagcttgccacatcccccccaacccagagccacagagggacaggctgtcccaagtgaggggtatccttgcaggcttctgcccctaccagcctgtttacctttctttagagtgggttgcaggtaggcaagggaagatcaagatgaccctgccttggagcctcggatccaggctgagaggcctctaacaggcagcagagttctggcataaagcatgcttccattgcgagacctgcaagatgacactgaacatgaagaactacaagggctacgagaagaagccctactgcaacgcacactaccccaagcagtccttcaccatggtggcggacaccccggaaaaccttcgcctcaagcaacagagtgagctccagagtcaggtgcgctacaaggaggagtttgagaagaacaagggcaaaggtttcagcgtagtggcagacacgcccgagctccagagaatcaagaagacccaggaccagatcagtaacataaaataccatgaggagtttgagaagagccgcatgggccctagcgggggcgagggcatggagccagagcgtcgggattcacaggacggcagcagctaccggcggcccctggagcagcagcagcctcaccacatcccgaccagtgccccggtttaccagcagccccagcagcagccggtggcccagtcctatggtggctacaaggagcctgcagccccagtctccatacagcgcagcgccccaggtggtg

SEQ ID NO: 149134 - DNA, 3492 bp, Homo sapiens
  Payload ID: 9449
  Gene Symbol: LASP1
  Gene Name: LIM and SH3 protein 1
  Uniprot ID: Q14847
  ENST ID: ENST00000435347
  CDS Start-End: 48-833
ggacgcgcgtgagctcaggcgtccccgccccagcttttctcggaaccatgaaccccaactgcgcccggtgcggcaagatcgtgtatcccacggagaaggtgaactgtctggataagttctggcataaagcatgcttccattgcgagacctgcaagatgacactgaacatgaagaactacaagggctacgagaagaagccctactgcaacgcacactaccccaagcagtccttcaccatggtggcggacaccccggaaaaccttcgcctcaagcaacagagtgagctccagagtcaggtgcgctacaaggaggagtttgagaagaacaagggcaaaggtttcagcgtagtggcagacacgcccgagctccagagaatcaagaagacccaggaccagatcagtaacataaaataccatgaggagtttgagaagagccgcatgggccctagcgggggcgagggcatggagccagagcgtcgggattcacaggacggcagcagctaccggcggcccctggagcagcagcagcctcaccacatcccgaccagtgccccggtttaccagcagccccagcagcagccggtggcccagtcctatggtggctacaaggagcctgcagccccagtctccatacagcgcagcgccccaggtggtggcgggaagcggtaccgcgcggtgtatgactacagcgccgccgacgaggacgaggtctccttccaggacggggacaccatcgtcaacgtgcagcagatcgacgacggctggatgtacgggacggtggagcgcaccggcgacacggggatgctgccggccaactacgtggaggccatctgaacccgcagcgcccccatctgtcttcagcacattccacggcatcgcatccgtcctgggcgtgacccgtccattcttcagtgtctctgttttttaaaacctgcgacagcttgtgattcctacccctcttccagcttcttttgccaactgaagccttcttctgccacttctgcgggctccctcctctggcaggcttcccccttgatcgacttcttggttttctctctggatggaacgggcatgggcctctctgggggaggcagggctggaatgggagacctgttggcctgtgggcctcacctgcccctctgttctctcccctcacatcctcctgcccagctcctcacatacccacacattccagggctggggtgagcctgactgccaggaccccaggtcaggggctccctacattccccagagtgggatccacttcttggttcctgggatggcgatggggactctgccgctgtgtagggaccagtgggatgggctctacctctctttctcaaagagggggctctgcccacctggggtctctctccctacctccctcctcaggggcaacaacaggagaatggggttcctgctgtggggcgaattcatcccctccccgcgcgttccttcgcacactgtgattttgccctcctgcccacgcagacctgcagcgggcaaagagctcccgaggaagcacagcttgggtcaggttcttgcctttcttaattttagggacagctaccggaaggaggggaacaaggagttctcttccgcagcccctttccccacgcccacccccagtctccagggacccttgcctgcctcctaggctggaagccatggtcccgaagtgtagggcaagggtgcctcaggaccttttggtcttcagcctccctcagcccccaggatctgggttaggtggccgctcctccctgctcctcatgggaagatgtctcagagccttccatgacctcccctccccagcccaatgccaagtggacttggagctgcacaaagtcagcagggaccactaaatctccaagacctggtgtgcggaggcaggagcatgtatgtctgcaggtgtctgacacgcaagtgtgtgagtgtgagtgtgagagatggggcgggggtgtgtctgtaggtgtctctgggcctgtgtgtgggtggggttatgtgagggtatgaagagctgtcttcccctgagagtttcctcacttacataaagctcccttgaagcaagaaagagggtcccagggctgcaaaactggaagcacagcctcggggatggggagggaaagacggtgctatatccagttcctgctctctgctcatgggtggctgtgacaaccctggcctcacttgattcatctctggttttcttgccaccctctgggagtccccatcccattttcatcctgagcccaaccaggccctgccattggcctcttgtcccttggcacacttgtacccacaggtgaggggcaggacctgaaggtattggcctgttcaacaatcagtcatcatgggtgtttttgtcaactgcttgttaattgatttggggatgtttgccccgaatgagaggttgaggaaaagactgtgggtggggaggccctgcctgacccatcccttttcctttctggccccagcctaggtggaggcaagtggaatatcttatattgggcgatttgggggctcggggaggcagagaatctcttgggagtcttgggtggcgctggtgcattctgtttcctcttgatctcaaagcacaatgtggatttggggaccaaaggtcagggacacatccccttagaggacctgagtttgggagagtggtgagtggaagggaggagcagcaagaagcagcctgttttcactcagcttaattctccttcccagataaggcaagccagtcatggaatcttgctgcaggccctccctctactcttcctgtcctaaaaataggggccgttttcttacacacccccagagagaggagggactgtcacactggtgctgagtgaccgggggctgctgggcgtctgttctttaccaaaaccatccatccctagaagagcacagagccctgaggggctgggctgggctgggctgagcccctggtcttctctacagttcacagaggtctttcagctcatttaatcccaggaaagaggcatcaaagctagaatgtgaatataacttttgtggaccaatactaagaataacaagaagcccagtggtgaggaaagtgcgttctcccagcactgcctcctgttttctccctctcatgtccctccagggaaaatgactttattgcttaatttctgcctttcccccctcacacatgcacttttgggcctttttttatagctggaaaaaacaaaataccaccctacaaacctgtatttaaaaagaaacagaaatgaccacgtgaaatttgcctctgtccaaacatttcatccgtgtgtatgtgtatgtgtgtgagtgtgtgaagccgccagttcatctttttatatggggttgttgtctcattttggtctgttttggtcccctccctcgtgggcttgtgctcgggatcaaacctttctggcctgttatgattctgaacatttgacttgaaccacaagtgaatctttctcctggtgactcaaataaaagtataattttt

SEQ ID NO: 149135 - DNA, 4023 bp, Homo sapiens
  Payload ID: 9449
  Gene Symbol: LASP1
  Gene Name: LIM and SH3 protein 1
  Uniprot ID: Q14847
  ENST ID: ENST00000433206
  CDS Start-End: 415-1032
gcagtcagcctgagagcgctgaggcgccagcaccgcgggccccgccgtccccccaggaacccgcccccgcgcagccccacgtcgcccggagagcgcgcctcgctgcgcgtgcccttgcccgcgcccgaggcgcgtgcccgccccagtgcagcccctcctccccgctgtgtttattaggggaaggagggcggaggcggaggccagttccccagctccagccgccgtcgctgctgcctgtgtagttgcagccgcggccgcctcccgccagctcgcctcggggaacaggacgcgcgtgagctcaggcgtccccgccccagcttttctcggaaccatgaaccccaactgcgcccggtgcggcaagatcgtgtatcccacggagaaggtgaactgtctggataagttctggcataaagcatgcttccattgcgagacctgcaagatgacactgaacatgaagaactacaagggctacgagaagaagccctactgcaacgcgtgcgctacaaggaggagtttgagaagaacaagggcaaaggtttcagcgtagtggcagacacgcccgagctccagagaatcaagaagacccaggaccagatcagtaacataaaataccatgaggagtttgagaagagccgcatgggccctagcgggggcgagggcatggagccagagcgtcgggattcacaggacggcagcagctaccggcggcccctggagcagcagcagcctcaccacatcccgaccagtgccccggtttaccagcagccccagcagcagccggtggcccagtcctatggtggctacaaggagcctgcagccccagtctccatacagcgcagcgccccaggtggtggcgggaagcggtaccgcgcggtgtatgactacagcgccgccgacgaggacgaggtctccttccaggacggggacaccatcgtcaacgtgcagcagatcgacgacggctggatgtacgggacggtggagcgcaccggcgacacggggatgctgccggccaactacgtggaggccatctgaacccgcagcgcccccatctgtcttcagcacattccacggcatcgcatccgtcctgggcgtgacccgtccattcttcagtgtctctgttttttaaaacctgcgacagcttgtgattcctacccctcttccagcttcttttgccaactgaagccttcttctgccacttctgcgggctccctcctctggcaggcttcccccttgatcgacttcttggttttctctctggatggaacgggcatgggcctctctgggggaggcagggctggaatgggagacctgttggcctgtgggcctcacctgcccctctgttctctcccctcacatcctcctgcccagctcctcacatacccacacattccagggctggggtgagcctgactgccaggaccccaggtcaggggctccctacattccccagagtgggatccacttcttggttcctgggatggcgatggggactctgccgctgtgtagggaccagtgggatgggctctacctctctttctcaaagagggggctctgcccacctggggtctctctccctacctccctcctcaggggcaacaacaggagaatggggttcctgctgtggggcgaattcatcccctccccgcgcgttccttcgcacactgtgattttgccctcctgcccacgcagacctgcagcgggcaaagagctcccgaggaagcacagcttgggtcaggttcttgcctttcttaattttagggacagctaccggaaggaggggaacaaggagttctcttccgcagcccctttccccacgcccacccccagtctccagggacccttgcctgcctcctaggctggaagccatggtcccgaagtgtagggcaagggtgcctcaggaccttttggtcttcagcctccctcagcccccaggatctgggttaggtggccgctcctccctgctcctcatgggaagatgtctcagagccttccatgacctcccctccccagcccaatgccaagtggacttggagctgcacaaagtcagcagggaccactaaatctccaagacctggtgtgcggaggcaggagcatgtatgtctgcaggtgtctgacacgcaagtgtgtgagtgtgagtgtgagagatggggcgggggtgtgtctgtaggtgtctctgggcctgtgtgtgggtggggttatgtgagggtatgaagagctgtcttcccctgagagtttcctcagaacccacagtgagaggggagggctcctggggcagagaagttccttaggttttctttggaatgaaattcctccttccccccatctctgagtggaggaagcccaccaatctgccctttgcagtgtgcagggtggaaggtaagaggttggtgtggagttggggctgccatagggtctgcagcctgctggggctaagcggtggaggaaggctctgtcactccaggcatatgtttccccatctctgtctggggctacagaatagggtggcagaagtgtcaccctgtgggtgtctccctcgggggctcttcccctagacctccccctcacttacataaagctcccttgaagcaagaaagagggtcccagggctgcaaaactggaagcacagcctcggggatggggagggaaagacggtgctatatccagttcctgctctctgctcatgggtggctgtgacaaccctggcctcacttgattcatctctggttttcttgccaccctctgggagtccccatcccattttcatcctgagcccaaccaggccctgccattggcctcttgtcccttggcacacttgtacccacaggtgaggggcaggacctgaaggtattggcctgttcaacaatcagtcatcatgggtgtttttgtcaactgcttgttaattgatttggggatgtttgccccgaatgagaggttgaggaaaagactgtgggtggggaggccctgcctgacccatcccttttcctttctggccccagcctaggtggaggcaagtggaatatcttatattgggcgatttgggggctcggggaggcagagaatctcttgggagtcttgggtggcgctggtgcattctgtttcctcttgatctcaaagcacaatgtggatttggggaccaaaggtcagggacacatccccttagaggacctgagtttgggagagtggtgagtggaagggaggagcagcaagaagcagcctgttttcactcagcttaattctccttcccagataaggcaagccagtcatggaatcttgctgcaggccctccctctactcttcctgtcctaaaaataggggccgttttcttacacacccccagagagaggagggactgtcacactggtgctgagtgaccgggggctgctgggcgtctgttctttaccaaaaccatccatccctagaagagcacagagccctgaggggctgggctgggctgggctgagcccctggtcttctctacagttcacagaggtctttcagctcatttaatcccaggaaagaggcatcaaagctagaatgtgaatataacttttgtggaccaatactaagaataacaagaagcccagtggtgaggaaagtgcgttctcccagcactgcctcctgttttctccctctcatgtccctccagggaaaatgactttattgcttaatttctgcctttcccccctcacacatgcacttttgggcctttttttatagctggaaaaaacaaaataccaccctacaaacctgtatttaaaaagaaacagaaatgaccacgtgaaatttgcctctgtccaaacatttcatccgtgtgtatgtgtatgtgtgtgagtgtgtgaagccgccagttcatctttttatatggggttgttgtctcattttggtctgttttggtcccctccctcgtgggcttgtgctcgggatcaaacctttctggcctgttatgattctgaacatttgacttgaaccacaagtgaatctttctcctggtgactcaaataaaagtataatttttacctgcgg

SEQ ID NO: 149136 - DNA, 1482 bp, Homo sapiens
  Payload ID: 9449
  Gene Symbol: LASP1
  Gene Name: LIM and SH3 protein 1
  ENST ID: ENST00000443937
  CDS Start-End: 130-405
agttccccagctccagccgccgtcgctgctgcctgtgtagttgcagccgcggccgcctcccgccagctcgcctcggggaacaggacgcgcgtgagctcaggcgtccccgccccagcttttctcggaaccatgaaccccaactgcgcccggtgcggcaagatcgtgtatcccacggagaaggtgaactgtctggataagttctggcataaagcatgcttccattgcgagacctgcaagatgacactgaacatgaagaactacaagggctacgagaagaagccctactgcaacgcacactaccccaagcagtccttcaccatggtggcggacaccccggaaaaccttcgcctcaagcaacagagtgagctccagagtcagatgaagaaaccgaggccaggggcttgagatgcagggcttctgtatctggagctacatttctctgcctctgagtgccctaccttccccgatgcccgcttcccaaagggcctcccactaagagtcaccgtgctggcccagggcttccaggactgaggaagagctggtgctaggtgcgctacaaggaggagtttgagaagaacaagggcaaaggtttcagcgtagtggcagacacgcccgagctccagagaatcaagaagacccaggaccagatcagtaacataaaataccatgaggagtttgagaagagccgcatgggccctagcgggggcgagggcatggagccagagcgtcgggattcacaggacggcagcagctaccggcggcccctggagcagcagcagcctcaccacatcccgaccagtgccccggtttaccagcagccccagcagcagccggtggcccagtcctatggtggctacaaggagcctgcagccccagtctccatacagcgcagcgccccaggtggtggcgggaagcggtaccgcgcggtgtatgactacagcgccgccgacgaggacgaggtctccttccaggacggggacaccatcgtcaacgtgcagcagatcgacgacggctggatgtacgggacggtggagcgcaccggcgacacggggatgctgccggccaactacgtggaggccatctgaacccgcagcgcccccatctgtcttcagcacattccacggcatcgcatccgtcctgggcgtgacccgtccattcttcagtgtctctgttttttaaaacctgcgacagcttgtgattcctacccctcttccagcttcttttgccaactgaagccttcttctgccacttctgcgggctccctcctctggcaggcttcccccttgatcgacttcttggttttctctctggatggaacgggcatgggcctctctgggggaggcagggctggaatgggagacctgttggcctgtgggcctcacctgcccctctgttctctcccctcacatcctcctgcccagctcctcacatacccacacattccagggctggggtgagcctgactgccaggaccccaggtca

SEQ ID NO: 149137 - DNA, 1874 bp, Homo sapiens
  Payload ID: 9449
  Gene Symbol: LASP1
  Gene Name: LIM and SH3 protein 1
  ENST ID: ENST00000579123
  CDS Start-End: 1-318
cgggattcacaggacggcagcagctaccggcggcccctggagcagcagcagcctcaccacatcccgaccagtgccccggtttaccagcagccccagcagcagccggtggcccagtcctatggtggctacaaggagcctgcagccccagtctccatacagcgcagcgccccaggtggtggcggggtgagtaaccctggccggaggggagaggccagaggcagggggtccttcgggaaggcttggacacagctcatggattctcctgacctttgcacccaccctctgttgtgtgtgatgataaggatctcagccttgtgagcagagaggaaattggttggcgtagtgggcagaggctggctgggactggggccctgcgttccagccctggtgtaccatgggcaggttgctcaccctgctttgggtggggtttccttaccccagctacctgggaacacacaaggcaactttctgcatggggccttccagcactgggcgctgctctcctcgcttcatgaggatggcccccacatccttcagctctcaggctgcccctgcctctgaggggcctccccagccatgtcgtgtaaagcgcatcaccctgatgctttgcatcactcgactccgctggctgccttcagagcactttttccaactaaaaagagctcttcgtgttggtcaccttctctgtgtcccctgctgggctggggaccctggcagcgtccgtctggttcacctactctgagccaggcctagagcaagtgaataagcccagcaggaatggggtgagatcaggcttcctgagccctcagagctgaagtcccggctctgtaagtcctgccactcactccacccatgggtgccgctgagccacccttaccaagctcctggcaggctcagcgcctccaggctgggtgcctgggaattcaaagtagctcacgtaggagcagaacagatacttagagagataaaatcgcctgagataatggctggctggagtctgatgctctgggcacacaaacaaagggatgttaggactgcccagggcactgtgggcgcaagagttagtctgaagtataaggttccaggcagcccagccagtccctccctcctcaatgggtctgtcctggatgtgtagggtccatctctgaatataaagccacctctctgccctctgggggcttacattccagtcagggggacaaacaagaaaacaataagaaaataggtgtataacataaggtcagcggtgacacgctgtgaagagaaagacagcagggtgagggatggatagaaagcagctggattaagacatttggccgggggtggtggctcacgcctgtaatcccagcactttgggaggccaaggcgggcaggtcacttgaggtcaggagttcgagatcagcctggccaacatggtgaaaccccctgtctaccaaaaatacaaaaattagccaggtgtggtggtgtatgcctgtaacctgtaatcccagctactcgggaggctgaggcagtagaattgcttgaacccgagaggcagaggttgcagtgagccaagattgcactattgcactccagcctgggtgacagagcaatatctccaaagaaaaaagacatttggccgggtgcgatggctcacacctgtaatcccagcactttgggaggccaaagtgggcagatcacctgaggtcaggagttcgaaaccagcctggccaacatggtgaaaccctgtctctactaaaaatataaaattagctcggcatggtggtgcatgttcataatcccagctactcgggaggctgaggcaggagaattgcttgaacctgggaggtggaggttgcagtgagccgagatcacgccatttgcactccagcctg

SEQ ID NO: 149138 - DNA, 1408 bp, Homo sapiens
  Payload ID: 9449
  Gene Symbol: LASP1
  Gene Name: LIM and SH3 protein 1
  ENST ID: ENST00000585841
  CDS Start-End: 160-375
attaggggaaggagggcggaggcggaggccagttccccagctccagccgccgtcgctgctgcctgtgtagttgcagccgcggccgcctcccgccagctcgcctcggggaacaggacgcgcgtgagctcaggcgtccccgccccagcttttctcggaaccatgaaccccaactgcgcccggtgcggcaagatcgtgtatcccacggagaaggtgaactgtctggataagttctggcataaagcatgcttccattgcgagacctgcaagatgacactgaacatgaagaactacaagggctacgagaagaagccctactgcaacgcgtgcgctacaaggaggagtttgagaagaacaagggcaaaggtttcagcgtagtggcagacacgcccgagctccagagaatcaagaagacccaggaccagatcagtaacataaaataccatgaggagtttgagaagagccgcatgggccctagcgggggcgagggcatggagccagagcgtcgggattcacaggacggcagcagctaccggcggcccctggagcagcagcagcctcaccacatcccgaccagtgccccggtttaccagcagccccagcagcagccggtggcccagtcctatggtggctacaaggagcctgcagccccagtctccatacagcgcagcgccccaggtggtggcgggaagcggtaccgcgcggtgtatgactacagcgccgccgacgaggacgaggtctccttccaggacggggacaccatcgtcaacgtgcagcagatcgacgacggctggatgtacgggacggtggagcgcaccggcgacacggggatgctgccggccaactacgtggaggccatctgaacccgcagcgcccccatctgtcttcagcacattccacggcatcgcatccgtcctgggcgtgacccgtccattcttcagtgtctctgttttttaaaacctgcgacagcttgtgattcctacccctcttccagcttcttttgccaactgaagccttcttctgccacttctgcgggctccctcctctggcaggcttcccccttgatcgacttcttggttttctctctggatggaacgggcatgggcctctctgggggaggcagggctggaatgggagacctgttggcctgtgggcctcacctgcccctctgttctctcccctcacatcctcctgcccagctcctcacatacccacacattccagggctggggtgagcctgactgccaggaccccaggtcaggggctccctacattccccagagtgggatccacttcttggttcctgggatggcgatggggactctgccgctgtgtagggaccagtgggatgggctctacctctctttctcaaagagggggctctgcccacctggggtctctctccctacct

SEQ ID NO: 149139 - DNA, 5647 bp, Homo sapiens
  Payload ID: 9450
  Gene Symbol: LMO7
  Gene Name: LIM domain 7
  ENST ID: ENST00000321797
  CDS Start-End: 722-4918
ggtattccacagtcgttctgtaatttgtaatcatagaaacagaatgttcctcctcttatttcttccctgccaacagtttctgggtgggtgaatgtcagtagctggagttatttttaaagaggagaggtgaggcttgccgtgcaaagctggaaagagggcgtttgtttgcagagcagagctgacatcaaagtgtagattactgctcagtggctaggcacttgtcctgtaacaggataatataaacgttttcttgaaagcttgtgaacagattggattgaaagaagcccagcttttccatcctggagatctacaggatttatcaaatcgagtcactgtcaagcaagaagagactgacaggagagtgaaaaatgttttgataacattgtactggctgggaagaaaagcacaaagcaacccgtactataatggtccccatcttaatttgaaagcgtttgagaatcttttaggacaagcactgacgaaggcactcgaagactccagcttcctgaaaagaagtggcagggacagtggctacggtgacatctggtgtcctgaacgtggagaatttcttgctcctccaaggcaccataagagagaagattcctttgaaagcttggactctttgggctcgaggtcattgacaagctgctcctctgatatcacgttgagaggggggcgtgaaggttttgaaagtgacacagattcggaatttacatttaagatgcaggattataataaagatgatatgtcgtatcgaaggatttcggctgttgagccaaagactgcgttacccttcaatcgttttttacccaacaaaagtagacagccatcctatgtaccagcacctctgagaaagaaaaagccagacaaacatgaggataacagaagaagttgggcaagcccggtttatacagaagcagatggaacattttcaagtaatcagaggaggatttggggcaccaatgtggagaactggccaactgtacaaggaacttcaaagtcctcttgttatttggaagaggaaaaagcaaagacaagaagcatacccaacattgtaaaggatgatctttatgtgcgcaagctcagtccagtcatgccaaacccagggaatgcttttgatcagtttcttcccaaatgttggaccccagaagatgtgaactggaaaagaataaaaagggaaacttataagccatggtataaagaatttcagggattcagtcagtttttactgcttcaggccctccaaacatactctgatgacatcttgtcttctgaaacacataccaaaattgatcccacttctggcccaaggctcataacccgcaggaagaatctctcttatgcaccaggctatagaagagatgacctcgagatggcagccctggatcctgacttagagaatgatgatttctttgtcagaaagactggggctttccatgcaaatccatatgttctccgagcttttgaagactttagaaagttctctgagcaagatgattctgtagagcgagatataattttacagtgtagagaaggtgaacttgtacttccggatttggaaaaagatgatatgattgttcgccgaattccagcacagaagaaagaagtgccgctgtctggggccccagatagataccacccagtcccttttcccgaaccctggactcttcctccagaaattcaagcaaaatttctctgtgtacttgaaaggacatgcccatccaaagaaaaaagtaatagctgtagaatattagttccttcatatcggcagaagaaagatgacatgctgacacgtaagattcagtcctggaaactgggaactaccgtgcctcccatcagtttcacccctggcccctgcagtgaggctgacttgaagagatgggaggccatccgggaggccagcagacttaggcacaagaaaaggctgatggtggagagactctttcaaaagatttatggtgagaatgggagtaagtccatgagtgatgtcagcgcagaagatgttcaaaacttgcgtcagctgcgttacgaggagatgcagaaaataaaatcacaattaaaagaacaagatcagaaatggcaggatgaccttgcaaaatggaaagatcgtcgaaaaagttacacttcagatctgcagaagaaaaaagaagagagagaagaaattgaaaagcaggcacttgagaagtctaagagaagctctaagacgtttaaggaaatgctgcaggacagggaatcccaaaatcaaaagtctacagttccgtcaagaaggagaatgtattcttttgatgatgtgctggaggaaggaaagcgaccccctacaatgactgtgtcagaagcaagttaccagagtgagagagtagaagagaagggagcaacttatccttcagaaattcccaaagaagattctaccacttttgcaaaaagagaggaccgtgtaacaactgaaattcagcttccttctcaaagtcctgtggaagaacaaagcccagcctctttgtcttctctgcgttcacggagcacacaaatggaatcaactcgtgtttcagcttctctccccagaagttaccggaaaactgatacagtcaggttaacatctgtggtcacaccaagaccctttggctctcagacaaggggaatctcatcactccccagatcttacacgatggatgatgcttggaagtataatggagatgttgaagacattaagagaactccaaacaatgtggtcagcacccctgcaccaagcccggacgcaagccaactggcttcaagcttatctagccagaaagaggtagcagcaacagaagaagatgtgacaaggctgccctctcctacatcccccttctcatctctttcccaagaccaggctgccacttctaaagccacattgtcttccacatctggtcttgatttaatgtctgaatctggagaaggggaaatctccccacaaagagaagtctcaagatcccaggatcagttcagtgatatgagaatcagcataaaccagacgcctgggaagagtcttgactttgggtttacaataaaatgggatattcctgggatcttcgtagcatcagttgaagcaggtagcccagcagaattttctcagctacaagtagatgatgaaattattgctattaacaacaccaagttttcatataacgattcaaaagagtgggaggaagccatggctaaggctcaagaaactggacacctagtgatggatgtgaggcgctatggaaaggctggttcacctgaaacaaagtggattgatgcaacttctggaatttacaactcagaaaaatcttcaaatctatctgtaacaactgatttctccgaaagccttcagagttctaatattgaatccaaagaaatcaatggaattcatgatgaaagcaatgcttttgaatcaaaagcatctgaatccatttctttgaaaaacttaaaaaggcgatcacaattttttgaacaaggaagctctgattcggtggttcctgatcttccagttccaaccatcagtgccccgagtcgctgggtgtgggatcaagaggaggagcggaagcggcaggagaggtggcagaaggagcaggaccgcctactgcaggaaaaatatcaacgtgagcaggagaaactgagggaagagtggcaaagggccaaacaggaggcagagagagagaattccaagtacttggatgaggaactgatggtcctaagctcaaacagcatgtctctgaccacacgggagccctctcttgccacctgggaagctacctggagtgaagggtccaagtcttcagacagagaaggaacccgagcaggagaagaggagaggagacagccacaagaggaagttgttcatgaggaccaaggaaagaagccgcaggatcagcttgttattgagagagagaggaaatgggagcaacagcttcaggaagagcaagagcaaaagcggcttcaggctgaggctgaggagcagaagcgtcctgcggaggagcagaagcgccaggcagagatagagcgggaaacatcagtcagaatataccagtacaggaggcctgttgattcctatgatataccaaagacagaagaagcatcttcaggttttcttcctggtgacaggaataaatccagatctactactgaactggatgattactccacaaataaaaatggaaacaataaatatttagaccaaattgggaacatgacctcttcacagaggagatccaagaaagaacaagtaccatcaggagcagaattggagaggcaacaaatccttcaggaaatgaggaagagaacaccccttcacaatgacaacagctggatccgacagcgcagtgccagtgtcaacaaagagcctgttagtcttcctgggatcatgagaagaggcgaatctttagataacctggactccccccgatccaattcttggagacagcctccttggctcaatcagcccacaggattctatgcttcttcctctgtgcaagactttagtcgcccaccacctcagctggtgtccacatcaaaccgtgcctacatgcggaacccctcctccagcgtgcccccaccttcagctggctccgtgaagacctccaccacaggtgtggccaccacacagtcccccaccccgagaagccattccccttcagcttcacagtcaggctctcagctgcgtaacaggtcagtcagtgggaagcgcatatgctcctactgcaataacattctgggcaaaggagccgccatgatcatcgagtccctgggtctttgttatcatttgcattgttttaagtgtgttgcctgtgagtgtgacctcggaggctcttcctcaggagctgaagtcaggatcagaaaccaccaactgtactgcaacgactgctatctcagattcaaatctggacggccaaccgccatgtgatgtaagcctccatacgaaagcactgttgcagatagaagaagaggtggttgctgctcatgtagatctataaatatgtgttgtatgtcttttttgctttttttttaaaaaaaagaataactttttttgcctctttagattacatagaagcattgtagtcttggtagaaccagtatttttgttgtttatttataaggtaattgtgtgtggggaaaagtgcagtatttacctgttgaattcagcatcttgagagcacaagggaaaaaataagaacctacgaatatttttgaggcagataatgatctagtttgactttctagttagtggtgttttgaagagggtattttattgttttttaaaaaaaggttcttaaacattatttgaaatagttaatataaatacataattgcatttgctctgtttattgtaatgtattctaaattaatgcagaaccatatggaaaatttcattaaaatctatccccaaatgtgctttctgtatccttccttctacctattattctgatttttaaaaatgcagttaatgtaccatttatttgcttgatgaagggagctctattttctttaccagaaatgttgctaagtaattcccaatagaaagctgcttattttcattaatgaaaaataaccatggtttgtatactagaagtcttcttcagaaactggtgagcctttctgttcaattgcatttgtaaataaacttgctgatgca

SEQ ID NO: 149140 - DNA, 7237 bp, Homo sapiens
  Payload ID: 9450
  Gene Symbol: LMO7
  Gene Name: LIM domain 7
  Uniprot ID: Q8WWI1
  ENST ID: ENST00000341547
  CDS Start-End: 1261-5310
ggaaagaagtggaataattaggaacctagggtggggtagggtagcaggacatttcaaacattaatgagcatatgagattccaggtcttgttaaaatgcaaattctgattcagctggtaggtgaggtctgagattgtgcatttctaacaagcactcagataatcttaaggctgttggccccagggtcacacttatagtgattttctagaacccagttggggaagtgaatcttgggcaggagaaatacacacctcttgcattgagtttggagatctcatctgatataactttttaagaaagaaaaataattttccaaatatccaattgataagctttcccactaagtggctttcccactaagtggctgcgttatgaaaattgcttcactttgaaacttctggtcttggtaatatagaatttctgtgttctcacagtgcttgattgagaatatgatattgagattatggcataaaatatagtggctgtacaaaaaaaaatacattattaggatctctaacaattatgtaaaagtcattgcttcatgggtagagctcaaactttggtgtgagacctggttttattcttggcacttactctgagttgtcttaggcaaattaataccttaagcaaaaatattctcatgtacattttacatgagaattataaatgaagtacataaagtccagcagtcacaaatgttatctattattaccatcgtcctaagactgcaatcagctatagtgaaagtagtctcaaagattgtttcataaatcatcagattcacctaattttctaaagaatttaaataaggagatggaatgaatagattgcattttgtttccatgcacaggggaactgtgcatatttcttctgtgactcggaaatggtttaacttttaaaaatcccaaaatagctgaagttagcagacatgcaatttaccaaggatgattggaatttttatctttcctgtaataatactatacccaagcacactgctcatgaggaaaacatttttatgtgaatcttttactcttgggggcaaagaatgctgtttttctttttgataactatgtttatagaatctaaatcaccctgagcaattatttcaacatctaaagttattattaccattcatgtttcatttatagctatttgaattttgatgaatttcaatatggtgctacagtgatagggcaagtgcaaataagttcaatatatgggtacggtctaaagctattttaatttttttattacaactgctatgaagaaaattaggatatgccatattttcacgttttacagttggatgtcctatgatgttctcttccagagaacagagctcggagctctggaaatttggaggcaactgatatgtgctcatgtctgcatctgtgtgggttggctgtatctcagggacagagtctgcagcaaaaaagatataattttgaggactgaacaaaattcaggaaggactattctcattaaggcagtaacagagaagaattttgaaacaaaagattttcgagcctctctagaaaatggtgttctgctgtgtgatttgattaataagcttaaacctggcgtcattaagaagatcaatagactgtctacaccaatagcaggattggataatataaacgttttcttgaaagcttgtgaacagattggattgaaagaagcccagcttttccatcctggagatctacaggatttatcaaatcgagtcactgtcaagcaagaagagactgacaggagagtgaaaaatgttttgataacattgtactggctgggaagaaaagcacaaagcaacccgtactataatggtccccatcttaatttgaaagcgtttgagaatcttttaggacaagcactgacgaaggcactcgaagactccagcttcctgaaaagaagtggcagggacagtggctacggtgacatctggtgtcctgaacgtggagaatttcttgctcctccaaggcaccataagagagaagattcctttgaaagcttggactctttgggctcgaggtcattgacaagctgctcctctgatatcacgttgagaggggggcgtgaaggttttgaaagtgacacagattcggaatttacatttaagatgcaggattataataaagatgatatgtcgtatcgaaggatttcggctgttgagccaaagactgcgttacccttcaatcgttttttacccaacaaaagtagacagccatcctatgtaccagcacctctgagaaagaaaaagccagacaaacatgaggataacagaagaagttgggcaagcccggtttatacagaagcagatggaacattttcaagactctttcaaaagatttatggtgagaatgggagtaagtccatgagtgatgtcagcgcagaagatgttcaaaacttgcgtcagctgcgttacgaggagatgcagaaaataaaatcacaattaaaagaacaagatcagaaatggcaggatgaccttgcaaaatggaaagatcgtcgaaaaagttacacttcagatctgcagaagaaaaaagaagagagagaagaaattgaaaagcaggcacttgagaagtctaagagaagctctaagacgtttaaggaaatgctgcaggacagggaatcccaaaatcaaaagtctacagttccgtcaagaaggagaatgtattcttttgatgatgtgctggaggaaggaaagcgaccccctacaatgactgtgtcagaagcaagttaccagagtgagagagtagaagagaagggagcaacttatccttcagaaattcccaaagaagattctaccacttttgcaaaaagagaggaccgtgtaacaactgaaattcagcttccttctcaaagtcctgtggaagaacaaagcccagcctctttgtcttctctgcgttcacggagcacacaaatggaatcaactcgtgtttcagcttctctccccagaagttaccggaaaactgatacagtcaggttaacatctgtggtcacaccaagaccctttggctctcagacaaggggaatctcatcactccccagatcttacacgatggatgatgcttggaagtataatggagatgttgaagacattaagagaactccaaacaatgtggtcagcacccctgcaccaagcccggacgcaagccaactggcttcaagcttatctagccagaaagaggtagcagcaacagaagaagatgtgacaaggctgccctctcctacatcccccttctcatctctttcccaagaccaggctgccacttctaaagccacattgtcttccacatctggtcttgatttaatgtctgaatctggagaaggggaaatctccccacaaagagaagtctcaagatcccaggatcagttcagtgatatgagaatcagcataaaccagacgcctgggaagagtcttgactttgggtttacaataaaatgggatattcctgggatcttcgtagcatcagttgaagcaggtagcccagcagaattttctcagctacaagtagatgatgaaattattgctattaacaacaccaagttttcatataacgattcaaaagagtgggaggaagccatggctaaggctcaagaaactggacacctagtgatggatgtgaggcgctatggaaaggctggttcacctgaaacaaagtggattgatgcaacttctggaatttacaactcagaaaaatcttcaaatctatctgtaacaactgatttctccgaaagccttcagagttctaatattgaatccaaagaaatcaatggaattcatgatgaaagcaatgcttttgaatcaaaagcatctgaatccatttctttgaaaaacttaaaaaggcgatcacaattttttgaacaaggaagctctgattcggtggttcctgatcttccagttccaaccatcagtgccccgagtcgctgggtgtgggatcaagaggaggagcggaagcggcaggagaggtggcagaaggagcaggaccgcctactgcaggaaaaatatcaacgtgagcaggagaaactgagggaagagtggcaaagggccaaacaggaggcagagagagagaattccaagtacttggatgaggaactgatggtcctaagctcaaacagcatgtctctgaccacacgggagccctctcttgccacctgggaagctacctggagtgaagggtccaagtcttcagacagagaaggaacccgagcaggagaagaggagaggagacagccacaagaggaagttgttcatgaggaccaaggaaagaagccgcaggatcagcttgttattgagagagagaggaaatgggagcaacagcttcaggaagagcaagagcaaaagcggcttcaggctgaggctgaggagcagaagcgtcctgcggaggagcagaagcgccaggcagagatagagcgggaaacatcagtcagaatataccagtacaggaggcctgttgattcctatgatataccaaagacagaagaagcatcttcaggttttcttcctggtgacaggaataaatccagatctactactgaactggatgattactccacaaataaaaatggaaacaataaatatttagaccaaattgggaacatgacctcttcacagaggagatccaagaaagaacaagtaccatcaggagcagaattggagaggcaacaaatccttcaggaaatgaggaagagaacaccccttcacaatgacaacagctggatccgacagcgcagtgccagtgtcaacaaagagcctgttagtcttcctgggatcatgagaagaggcgaatctttagataacctggactccccccgatccaattcttggagacagcctccttggctcaatcagcccacaggattctatgcttcttcctctgtgcaagactttagtcgcccaccacctcagctggtgtccacatcaaaccgtgcctacatgcggaacccctcctccagcgtgcccccaccttcagctggctccgtgaagacctccaccacaggtgtggccaccacacagtcccccaccccgagaagccattccccttcagcttcacagtcaggctctcagctgcgtaacaggtcagtcagtgggaagcgcatatgctcctactgcaataacattctgggcaaaggagccgccatgatcatcgagtccctgggtctttgttatcatttgcattgttttaagtgtgttgcctgtgagtgtgacctcggaggctcttcctcaggagctgaagtcaggatcagaaaccaccaactgtactgcaacgactgctatctcagattcaaatctggacggccaaccgccatgtgatgtaagcctccatacgaaagcactgttgcagatagaagaagaggtggttgctgctcatgtagatctataaatatgtgttgtatgtcttttttgctttttttttaaaaaaaagaataactttttttgcctctttagattacatagaagcattgtagtcttggtagaaccagtatttttgttgtttatttataaggtaattgtgtgtggggaaaagtgcagtatttacctgttgaattcagcatcttgagagcacaagggaaaaaataagaacctacgaatatttttgaggcagataatgatctagtttgactttctagttagtggtgttttgaagagggtattttattgttttttaaaaaaaggttcttaaacattatttgaaatagttaatataaatacataattgcatttgctctgtttattgtaatgtattctaaattaatgcagaaccatatggaaaatttcattaaaatctatccccaaatgtgctttctgtatccttccttctacctattattctgatttttaaaaatgcagttaatgtaccatttatttgcttgatgaagggagctctattttctttaccagaaatgttgctaagtaattcccaatagaaagctgcttattttcattaatgaaaaataaccatggtttgtatactagaagtcttcttcagaaactggtgagcctttctgttcaattgcatttgtaaataaacttgctgatgcatttaacgagtgggtcgtctttttcttaggtgtatgtgtctgacctcaggccttttagccatatttcagtatgtggccttttttgatgttatgttttatccagtagctttactaaggtataattgatgtaataaactgcatatatttaaagtgtatactttgacaaattttgacatggtgtataccttcgaaactatgccacagtctggatgtgtttactgaaacattttaataaggaagtttatttttgataaagttatgtttttggatacaatatatttgtatggtgagagtgatgaattgttggatcatttgaataaaatcttttactaaccccatgataaaaggagaagacaacagtgagcttagaatatctataaagcaaaaaatgtagtctcttgtttaaaaaatctggagcgggaatgcaaggatacaaaactttagcatgctttgagcaaaaatttaaacttactggaatcttttataataatgtaagtggaatggaggattctaggaactgagaactgtattggaataggttcaaaatatgtaagaaatgctaatgtgggagataaaaattttatttagtacttattctgattattattaaagtaataatgtgttccttgaggataacttgtcaaatgccccaaagcataaagaatataattctgaatcccaaattccaaagacaagaactctgtgtttgaattcattctgcatataattatttataagtatagattgtgaatttttccatgttcttaaaattatttttatcttttttcatggttgcatagtgctccattgtttggccttggtaatatttagttgataattccattactgtgtatttttcacttgtttctaagatcaaacattttaatatgtgcatgttatatataaatatgtaaattctgtgatactctatgatcatctctttctttatattattttcatagacatgaaatagttgctcagagattatgcattttaagacactcatagtatatattgccaaagtggtttccagaaaggcactgctggcttcgactcctataagcagcacgtgggcttgttcatctcactgcatgtttatgaagatacagttcttttgccttgttctctgcctgatgtgtatgcagaggcagccctcaatatgcagtggttgaataaatgaatgaagaaaccactatcaa

SEQ ID NO: 149141 - DNA, 8237 bp, Homo sapiens
  Payload ID: 9450
  Gene Symbol: LMO7
  Gene Name: LIM domain 7
  ENST ID: ENST00000357063
  CDS Start-End: 1306-6312
ggaaagaagtggaataattaggaacctagggtggggtagggtagcaggacatttcaaacattaatgagcatatgagattccaggtcttgttaaaatgcaaattctgattcagctggtaggtgaggtctgagattgtgcatttctaacaagcactcagataatcttaaggctgttggccccagggtcacacttatagtgattttctagaacccagttggggaagtgaatcttgggcaggagaaatacacacctcttgcattgagtttggagatctcatctgatataactttttaagaaagaaaaataattttccaaatatccaattgataagctttcccactaagtggctttcccactaagtggctgcgttatgaaaattgcttcactttgaaacttctggtcttggtaatatagaatttctgtgttctcacagtgcttgattgagaatatgatattgagattatggcataaaatatagtggctgtacaaaaaaaaatacattattaggatctctaacaattatgtaaaagtcattgcttcatgggtagagctcaaactttggtgtgagacctggttttattcttggcacttactctgagttgtcttaggcaaattaataccttaagcaaaaatattctcatgtacattttacatgagaattataaatgaagtacataaagtccagcagtcacaaatgttatctattattaccatcgtcctaagactgcaatcagctatagtgaaagtagtctcaaagattgtttcataaatcatcagattcacctaattttctaaagaatttaaataaggagatggaatgaatagattgcattttgtttccatgcacaggggaactgtgcatatttcttctgtgactcggaaatggtttaacttttaaaaatcccaaaatagctgaagttagcagacatgcaatttaccaaggatgattggaatttttatctttcctgtaataatactatacccaagcacactgctcatgaggaaaacatttttatgtgaatcttttactcttgggggcaaagaatgctgtttttctttttgataactatgtttatagaatctaaatcaccctgagcaattatttcaacatctaaagttattattaccattcatgtttcatttatagctatttgaattttgatgaatttcaatatggtgctacagtgatagggcaagtgcaaataagttcaatatatgggtacggtctaaagctattttaatttttttattacaactgctatgaagaaaattaggatatgccatattttcacgttttacagttggatgtcctatgatgttctcttccagagaacagagctcggagctctggaaatttggaggcaactgatatgtgctcatgtctgcatctgtgtgggttggctgtatctcagggacagagtctgcagcaaaaaagatataattttgaggactgaacaaaattcaggaaggactattctcattaaggcagtaacagagaagaattttgaaacaaaagattttcgagcctctctagaaaatggtgttctgctgtgtgatttgattaataagcttaaacctggcgtcattaagaagatcaatagactgtctacaccaatagcaggattggataatataaacgttttcttgaaagcttgtgaacagattggattgaaagaagcccagcttttccatcctggagatctacaggatttatcaaatcgagtcactgtcaagcaagaagagactgacaggagagtgaaaaatgttttgataacattgtactggctgggaagaaaagcacaaagcaacccgtactataatggtccccatcttaatttgaaagcgtttgagaatcttttaggacaagcactgacgaaggcactcgaagactccagcttcctgaaaagaagtggcagggacagtggctacggtgacatctggtgtcctgaacgtggagaatttcttgctcctccaaggcaccataagagagaagattcctttgaaagcttggactctttgggctcgaggtcattgacaagctgctcctctgatatcacgttgagaggggggcgtgaaggttttgaaagtgacacagattcggaatttacatttaagatgcaggattataataaagatgatatgtcgtatcgaaggatttcggctgttgagccaaagactgcgttacccttcaatcgttttttacccaacaaaagtagacagccatcctatgtaccagcacctctgagaaagaaaaagccagacaaacatgaggataacagaagaagttgggcaagcccggtttatacagaagcagatggaacattttcaagtaatcagaggaggatttggggcaccaatgtggagaactggccaactgtacaaggaacttcaaagtcctcttgttatttggaagaggaaaaagcaaagacaagaagcatacccaacattgtaaaggatgatctttatgtgcgcaagctcagtccagtcatgccaaacccagggaatgcttttgatcagtttcttcccaaatgttggaccccagaagatgtgaactggaaaagaataaaaagggaaacttataagccatggtataaagaatttcagggattcagtcagtttttactgcttcaggccctccaaacatactctgatgacatcttgtcttctgaaacacataccaaaattgatcccacttctggcccaaggctcataacccgcaggaagaatctctcttatgcaccaggctatagaagagatgacctcgagatggcagccctggatcctgacttagagaatgatgatttctttgtcagaaagactggggctttccatgcaaatccatatgttctccgagcttttgaagactttagaaagttctctgagcaagatgattctgtagagcgagatataattttacagtgtagagaaggtgaacttgtacttccggatttggaaaaagatgatatgattgttcgccgaattccagcacagaagaaagaagtgccgctgtctggggccccagatagataccacccagtcccttttcccgaaccctggactcttcctccagaaattcaagcaaaatttctctgtgtacttgaaaggacatgcccatccaaagaaaaaagtaatagctgtagaatattagttccttcatatcggcagaagaaagatgacatgctgacacgtaagattcagtcctggaaactgggaactaccgtgcctcccatcagtttcacccctggcccctgcagtgaggctgacttgaagagatgggaggccatccgggaggccagcagacttaggcacaagaaaaggctgatggtggagagactctttcaaaagatttatggtgagaatgggagtaagtccatgagtgatgtcagcgcagaagatgttcaaaacttgcgtcagctgcgttacgaggagatgcagaaaataaaatcacaattaaaagaacaagatcagaaatggcaggatgaccttgcaaaatggaaagatcgtcgaaaaagttacacttcagatctgcagaagaaaaaagaagagagagaagaaattgaaaagcaggcacttgagaagtctaagagaagctctaagacgtttaaggaaatgctgcaggacagggaatcccaaaatcaaaagtctacagttccgtcaagaaggagaatgtattcttttgatgatgtgctggaggaaggaaagcgaccccctacaatgactgtgtcagaagcaagttaccagagtgagagagtagaagagaagggagcaacttatccttcagaaattcccaaagaagattctaccacttttgcaaaaagagaggaccgtgtaacaactgaaattcagcttccttctcaaagtcctgtggaagaacaaagcccagcctctttgtcttctctgcgttcacggagcacacaaatggaatcaactcgtgtttcagcttctctccccagaagttaccggaaaactgatacagtcaggttaacatctgtggtcacaccaagaccctttggctctcagacaaggggaatctcatcactccccagatcttacacgatggatgatgcttggaagtataatggagatgttgaagacattaagagaactccaaacaatgtggtcagcacccctgcaccaagcccggacgcaagccaactggcttcaagcttatctagccagaaagaggtagcagcaacagaagaagatgtgacaaggctgccctctcctacatcccccttctcatctctttcccaagaccaggctgccacttctaaagccacattgtcttccacatctggtcttgatttaatgtctgaatctggagaaggggaaatctccccacaaagagaagtctcaagatcccaggatcagttcagtgatatgagaatcagcataaaccagacgcctgggaagagtcttgactttgggtttacaataaaatgggatattcctgggatcttcgtagcatcagttgaagcaggtagcccagcagaattttctcagctacaagtagatgatgaaattattgctattaacaacaccaagttttcatataacgattcaaaagagtgggaggaagccatggctaaggctcaagaaactggacacctagtgatggatgtgaggcgctatggaaaggctggttcacctgaaacaaagtggattgatgcaacttctggaatttacaactcagaaaaatcttcaaatctatctgtaacaactgatttctccgaaagccttcagagttctaatattgaatccaaagaaatcaatggaattcatgatgaaagcaatgcttttgaatcaaaagcatctgaatccatttctttgaaaaacttaaaaaggcgatcacaattttttgaacaaggaagctctgattcggtggttcctgatcttccagttccaaccatcagtgccccgagtcgctgggtgtgggatcaagaggaggagcggaagcggcaggagaggtggcagaaggagcaggaccgcctactgcaggaaaaatatcaacgtgagcaggagaaactgagggaagagtggcaaagggccaaacaggaggcagagagagagaattccaagtacttggatgaggaactgatggtcctaagctcaaacagcatgtctctgaccacacgggagccctctcttgccacctgggaagctacctggagtgaagggtccaagtcttcagacagagaaggaacccgagcaggagaagaggagaggagacagccacaagaggaagttgttcatgaggaccaaggaaagaagccgcaggatcagcttgttattgagagagagaggaaatgggagcaacagcttcaggaagagcaagagcaaaagcggcttcaggctgaggctgaggagcagaagcgtcctgcggaggagcagaagcgccaggcagagatagagcgggaaacatcagtcagaatataccagtacaggaggcctgttgattcctatgatataccaaagacagaagaagcatcttcaggttttcttcctggtgacaggaataaatccagatctactactgaactggatgattactccacaaataaaaatggaaacaataaatatttagaccaaattgggaacatgacctcttcacagaggagatccaagaaagaacaagtaccatcaggagcagaattggagaggcaacaaatccttcaggaaatgaggaagagaacaccccttcacaatgacaacagctggatccgacagcgcagtgccagtgtcaacaaagagcctgttagtcttcctgggatcatgagaagaggcgaatctttagataacctggactccccccgatccaattcttggagacagcctccttggctcaatcagcccacaggattctatgcttcttcctctgtgcaagactttagtcgcccaccacctcagctggtgtccacatcaaaccgtgcctacatgcggaacccctcctccagcgtgcccccaccttcagctggctccgtgaagacctccaccacaggtgtggccaccacacagtcccccaccccgagaagccattccccttcagcttcacagtcaggctctcagctgcgtaacaggtcagtcagtgggaagcgcatatgctcctactgcaataacattctgggcaaaggagccgccatgatcatcgagtccctgggtctttgttatcatttgcattgttttaagtgtgttgcctgtgagtgtgacctcggaggctcttcctcaggagctgaagtcaggatcagaaaccaccaactgtactgcaacgactgctatctcagattcaaatctggacggccaaccgccatgtgatgtaagcctccatacgaaagcactgttgcagatagaagaagaggtggttgctgctcatgtagatctataaatatgtgttgtatgtcttttttgctttttttttaaaaaaaagaataactttttttgcctctttagattacatagaagcattgtagtcttggtagaaccagtatttttgttgtttatttataaggtaattgtgtgtggggaaaagtgcagtatttacctgttgaattcagcatcttgagagcacaagggaaaaaataagaacctacgaatatttttgaggcagataatgatctagtttgactttctagttagtggtgttttgaagagggtattttattgttttttaaaaaaaggttcttaaacattatttgaaatagttaatataaatacataattgcatttgctctgtttattgtaatgtattctaaattaatgcagaaccatatggaaaatttcattaaaatctatccccaaatgtgctttctgtatccttccttctacctattattctgatttttaaaaatgcagttaatgtaccatttatttgcttgatgaagggagctctattttctttaccagaaatgttgctaagtaattcccaatagaaagctgcttattttcattaatgaaaaataaccatggtttgtatactagaagtcttcttcagaaactggtgagcctttctgttcaattgcatttgtaaataaacttgctgatgcatttaacgagtgggtcgtctttttcttaggtgtatgtgtctgacctcaggccttttagccatatttcagtatgtggccttttttgatgttatgttttatccagtagctttactaaggtataattgatgtaataaactgcatatatttaaagtgtatactttgacaaattttgacatggtgtataccttcgaaactatgccacagtctggatgtgtttactgaaacattttaataaggaagtttatttttgataaagttatgtttttggatacaatatatttgtatggtgagagtgatgaattgttggatcatttgaataaaatcttttactaaccccatgataaaaggagaagacaacagtgagcttagaatatctataaagcaaaaaatgtagtctcttgtttaaaaaatctggagcgggaatgcaaggatacaaaactttagcatgctttgagcaaaaatttaaacttactggaatcttttataataatgtaagtggaatggaggattctaggaactgagaactgtattggaataggttcaaaatatgtaagaaatgctaatgtgggagataaaaattttatttagtacttattctgattattattaaagtaataatgtgttccttgaggataacttgtcaaatgccccaaagcataaagaatataattctgaatcccaaattccaaagacaagaactctgtgtttgaattcattctgcatataattatttataagtatagattgtgaatttttccatgttcttaaaattatttttatcttttttcatggttgcatagtgctccattgtttggccttggtaatatttagttgataattccattactgtgtatttttcacttgtttctaagatcaaacattttaatatgtgcatgttatatataaatatgtaaattctgtgatactctatgatcatctctttctttatattattttcatagacatgaaatagttgctcagagattatgcattttaagacactcatagtatatattgccaaagtggtttccagaaaggcactgctggcttcgactcctataagcagcacgtgggcttgttcatctcactgcatgtttatgaagatacagttcttttgccttgttctctgcctgatgtgtatgcagaggcagccctcaatatgcagtggttgaataaatgaatgaagaaaccactatc

SEQ ID NO: 149142 - DNA, 3472 bp, Homo sapiens
  Payload ID: 9450
  Gene Symbol: LMO7
  Gene Name: LIM domain 7
  ENST ID: ENST00000377499
  CDS Start-End: 336-3472
gaagtccaaactgtcgtcggggctggtgccgcgcgctgccgctgggcacccgcttcgcttcccgcgtcctgcctgactgcccgggtccccgcgggccttgggtcgctttcaggagtttagagaaagccaggtcttcacgttcgtgtaggttcgagaccttaacgaactgcagagcgcaacaaagggaactagagccccggcgccttcgcagccggagcggaagccggagttgtgggaggcccgcgtgccctccccgcccgtggggcccagacgcgcggggacaacccctcccctccacgcatcccgagtctctctctccctcccttgtcctagccatggaagggctggaggaggcagaggccaactgctccgtggcgttcgctgaggctcagagatgggtggaggcagtaacagagaagaattttgaaacaaaagattttcgagcctctctagaaaatggtgttctgctgtgtgatttgattaataagcttaaacctggcgtcattaagaagatcaatagactgtctacaccaatagcaggattggataatataaacgttttcttgaaagcttgtgaacagattggattgaaagaagcccagcttttccatcctggagatctacaggatttatcaaatcgagtcactgtcaagcaagaagagactgacaggagagtgaaaaatgttttgataacattgtactggctgggaagaaaagcacaaagcaacccgtactataatggtccccatcttaatttgaaagcgtttgagaatcttttaggacaagcactgacgaaggcactcgaagactccagcttcctgaaaagaagtggcagggacagtggctacggtgacatctggtgtcctgaacgtggagaatttcttgctcctccaaggcaccataagagagaagattcctttgaaagcttggactctttgggctcgaggtcattgacaagctgctcctctgatatcacgttgagaggggggcgtgaaggttttgaaagtgacacagattcggaatttacatttaagatgcaggattataataaagatgatatgtcgtatcgaaggatttcggctgttgagccaaagactgcgttacccttcaatcgttttttacccaacaaaagtagacagccatcctatgtaccagcacctctgagaaagaaaaagccagacaaacatgaggataacagaagaagttgggcaagcccggtttatacagaagcagatggaacattttcaagactctttcaaaagatttatggtgagaatgggagtaagtccatgagtgatgtcagcgcagaagatgttcaaaacttgcgtcagctgcgttacgaggagatgcagaaaataaaatcacaattaaaagaacaagatcagaaatggcaggatgaccttgcaaaatggaaagatcgtcgaaaaagttacacttcagatctgcagaagaaaaaagaagagagagaagaaattgaaaagcaggcacttgagaagtctaagagaagctctaagacgtttaaggaaatgctgcaggacagggaatcccaaaatcaaaagtctacagttccgtcaagaaggagaatgtattcttttgatgatgtgctggaggaaggaaagcgaccccctacaatgactgtgtcagaagcaagttaccagagtgagagagtagaagagaagggagcaacttatccttcagaaattcccaaagaagattctaccacttttgcaaaaagagaggaccgtgtaacaactgaaattcagcttccttctcaaagtcctgtggaagaacaaagcccagcctctttgtcttctctgcgttcacggagcacacaaatggaatcaactcgtgtttcagcttctctccccagaagttaccggaaaactgatacagtcaggttaacatctgtggtcacaccaagaccctttggctctcagacaaggggaatctcatcactccccagatcttacacgatggatgatgcttggaagtataatggagatgttgaagacattaagagaactccaaacaatgtggtcagcacccctgcaccaagcccggacgcaagccaactggcttcaagcttatctagccagaaagaggtagcagcaacagaagaagatgtgacaaggctgccctctcctacatcccccttctcatctctttcccaagaccaggctgccacttctaaagccacattgtcttccacatctggtcttgatttaatgtctgaatctggagaaggggaaatctccccacaaagagaagtctcaagatcccaggatcagttcagtgatatgagaatcagcataaaccagacgcctgggaagagtcttgactttgggtttacaataaaatgggatattcctgggatcttcgtagcatcagttgaagcaggtagcccagcagaattttctcagctacaagtagatgatgaaattattgctattaacaacaccaagttttcatataacgattcaaaagagtgggaggaagccatggctaaggctcaagaaactggacacctagtgatggatgtgaggcgctatggaaaggctggttcacctgaaacaaagtggattgatgcaacttctggaatttacaactcagaaaaatcttcaaatctatctgtaacaactgatttctccgaaagccttcagagttctaatattgaatccaaagaaatcaatggaattcatgatgaaagcaatgcttttgaatcaaaagcatctgaatccatttctttgaaaaacttaaaaaggcgatcacaattttttgaacaaggaagctctgattcggtggttcctgatcttccagttccaaccatcagtgccccgagtcgctgggtgtgggatcaagaggaggagcggaagcggcaggagaggtggcagaaggagcaggaccgcctactgcaggaaaaatatcaacgtgagcaggagaaactgagggaagagtggcaaagggccaaacaggaggcagagagagagaattccaagtacttggatgaggaactgatggtcctaagctcaaacagcatgtctctgaccacacgggagccctctcttgccacctgggaagctacctggagtgaagggtccaagtcttcagacagagaaggaacccgagcaggagaagaggagaggagacagccacaagaggaagttgttcatgaggaccaaggaaagaagccgcaggatcagcttgttattgagagagagaggaaatgggagcaacagcttcaggaagagcaagagcaaaagcggcttcaggctgaggctgaggagcagaagcgtcctgcggaggagcagaagcgccaggcagagatagagcgggaaacatcagtcagaatataccagtacaggaggcctgttgattcctatgatataccaaagacagaagaagcatcttcaggttttcttcctggtgacaggaataaatccagatctactactgaactggatgattactccac

SEQ ID NO: 149143 - DNA, 4896 bp, Homo sapiens
  Payload ID: 9450
  Gene Symbol: LMO7
  Gene Name: LIM domain 7
  ENST ID: ENST00000377534
  CDS Start-End: 1-4896
atggaagggctggaggaggcagaggccaactgctccgtggcgttcgctgaggctcagagatgggtggaggcagtaacagagaagaattttgaaacaaaagattttcgagcctctctagaaaatggtgttctgctgtgtgatttgattaataagcttaaacctggcgtcattaagaagatcaatagactgtctacaccaatagcaggattggataatataaacgttttcttgaaagcttgtgaacagattggattgaaagaagcccagcttttccatcctggagatctacaggatttatcaaatcgagtcactgtcaagcaagaagagactgacaggagagtgaaaaatgttttgataacattgtactggctgggaagaaaagcacaaagcaacccgtactataatggtccccatcttaatttgaaagcgtttgagaatcttttaggacaagcactgacgaaggcactcgaagactccagcttcctgaaaagaagtggcagggacagtggctacggtgacatctggtgtcctgaacgtggagaatttcttgctcctccaaggcaccataagagagaagattcctttgaaagcttggactctttgggctcgaggtcattgacaagctgctcctctgatatcacgttgagaggggggcgtgaaggttttgaaagtgacacagattcggaatttacatttaagatgcaggattataataaagatgatatgtcgtatcgaaggatttcggctgttgagccaaagactgcgttacccttcaatcgttttttacccaacaaaagtagacagccatcctatgtaccagcacctctgagaaagaaaaagccagacaaacatgaggataacagaagaagttgggcaagcccggtttatacagaagcagatggaacattttcaagtaatcagaggaggatttggggcaccaatgtggagaactggccaactgtacaaggaacttcaaagtcctcttgttatttggaagaggaaaaagcaaagacaagaagcatacccaacattgtaaaggatgatctttatgtgcgcaagctcagtccagtcatgccaaacccagggaatgcttttgatcagtttcttcccaaatgttggaccccagaagatgtgaactggaaaagaataaaaagggaaacttataagccatggtataaagaatttcagggattcagtcagtttttactgcttcaggccctccaaacatactctgatgacatcttgtcttctgaaacacataccaaaattgatcccacttctggcccaaggctcataacccgcaggaagaatctctcttatgcaccaggctatagaagagatgacctcgagatggcagccctggatcctgacttagagaatgatgatttctttgtcagaaagactggggctttccatgcaaatccatatgttctccgagcttttgaagactttagaaagttctctgagcaagatgattctgtagagcgagatataattttacagtgtagagaaggtgaacttgtacttccggatttggaaaaagatgatatgattgttcgccgaattccagcacagaagaaagaagtgccgctgtctggggccccagatagataccacccagtcccttttcccgaaccctggactcttcctccagaaattcaagcaaaatttctctgtgtacttgaaaggacatgcccatccaaagaaaaaagtaatagctgtagaatattagttccttcatatcggcagaagaaagatgacatgctgacacgtaagattcagtcctggaaactgggaactaccgtgcctcccatcagtttcacccctggcccctgcagtgaggctgacttgaagagatgggaggccatccgggaggccagcagacttaggcacaagaaaaggctgatggtggagagactctttcaaaagatttatggtgagaatgggagtaagtccatgagtgatgtcagcgcagaagatgttcaaaacttgcgtcagctgcgttacgaggagatgcagaaaataaaatcacaattaaaagaacaagatcagaaatggcaggatgaccttgcaaaatggaaagatcgtcgaaaaagttacacttcagatctgcagaagaaaaaagaagagagagaagaaattgaaaagcaggcacttgagaagtctaagagaagctctaagacgtttaaggaaatgctgcaggacagggaatcccaaaatcaaaagtctacagttccgtcaagaaggagaatgtattcttttgatgatgtgctggaggaaggaaagcgaccccctacaatgactgtgtcagaagcaagttaccagagtgagagagtagaagagaagggagcaacttatccttcagaaattcccaaagaagattctaccacttttgcaaaaagagaggaccgtgtaacaactgaaattcagcttccttctcaaagtcctgtggaagaacaaagcccagcctctttgtcttctctgcgttcacggagcacacaaatggaatcaactcgtgtttcagcttctctccccagaagttaccggaaaactgatacagtcaggttaacatctgtggtcacaccaagaccctttggctctcagacaaggggaatctcatcactccccagatcttacacgatggatgatgcttggaagtataatggagatgttgaagacattaagagaactccaaacaatgtggtcagcacccctgcaccaagcccggacgcaagccaactggcttcaagcttatctagccagaaagaggtagcagcaacagaagaagatgtgacaaggctgccctctcctacatcccccttctcatctctttcccaagaccaggctgccacttctaaagccacattgtcttccacatctggtcttgatttaatgtctgaatctggagaaggggaaatctccccacaaagagaagtctcaagatcccaggatcagttcagtgatatgagaatcagcataaaccagacgcctgggaagagtcttgactttgggtttacaataaaatgggatattcctgggatcttcgtagcatcagttgaagcaggtagcccagcagaattttctcagctacaagtagatgatgaaattattgctattaacaacaccaagttttcatataacgattcaaaagagtgggaggaagccatggctaaggctcaagaaactggacacctagtgatggatgtgaggcgctatggaaaggctggttcacctgaaacaaagtggattgatgcaacttctggaatttacaactcagaaaaatcttcaaatctatctgtaacaactgatttctccgaaagccttcagagttctaatattgaatccaaagaaatcaatggaattcatgatgaaagcaatgcttttgaatcaaaagcatctgaatccatttctttgaaaaacttaaaaaggcgatcacaattttttgaacaaggaagctctgattcggtggttcctgatcttccagttccaaccatcagtgccccgagtcgctgggtgtgggatcaagaggaggagcggaagcggcaggagaggtggcagaaggagcaggaccgcctactgcaggaaaaatatcaacgtgagcaggagaaactgagggaagagtggcaaagggccaaacaggaggcagagagagagaattccaagtacttggatgaggaactgatggtcctaagctcaaacagcatgtctctgaccacacgggagccctctcttgccacctgggaagctacctggagtgaagggtccaagtcttcagacagagaaggaacccgagcaggagaagaggagaggagacagccacaagaggaagttgttcatgaggaccaaggaaagaagccgcaggatcagcttgttattgagagagagaggaaatgggagcaacagcttcaggaagagcaagagcaaaagcggcttcaggctgaggctgaggagcagaagcgtcctgcggaggagcagaagcgccaggcagagatagagcgggaaacatcagtcagaatataccagtacaggaggcctgttgattcctatgatataccaaagacagaagaagcatcttcaggttttcttcctggtgacaggaataaatccagatctactactgaactggatgattactccacaaataaaaatggaaacaataaatatttagaccaaattgggaacatgacctcttcacagaggagatccaagaaagaacaagtaccatcaggagcagaattggagaggcaacaaatccttcaggaaatgaggaagagaacaccccttcacaatgacaacagctggatccgacagcgcagtgccagtgtcaacaaagagcctgttagtcttcctgggatcatgagaagaggcgaatctttagataacctggactccccccgatccaattcttggagacagcctccttggctcaatcagcccacaggattctatgcttcttcctctgtgcaagactttagtcgcccaccacctcagctggtgtccacatcaaaccgtgcctacatgcggaacccctcctccagcgtgcccccaccttcagctggctccgtgaagacctccaccacaggtgtggccaccacacagtcccccaccccgagaagccattccccttcagcttcacagtcaggctctcagctgcgtaacaggtcagtcagtgggaagcgcatatgctcctactgcaataacattctgggcaaaggagccgccatgatcatcgagtccctgggtctttgttatcatttgcattgttttaagtgtgttgcctgtgagtgtgacctcggaggctcttcctcaggagctgaagtcaggatcagaaaccaccaactgtactgcaacgactgctatctcagattcaaatctggacggccaaccgccatgtga

SEQ ID NO: 149144 - DNA, 3165 bp, Homo sapiens
  Payload ID: 9450
  Gene Symbol: LMO7
  Gene Name: LIM domain 7
  ENST ID: ENST00000447038
  CDS Start-End: 1-3165
atttaagatgcaggattataataaagatgatatgtcgtatcgaaggatttcggctgttgagccaaagactgcgttacccttcaatcgttttttacccaacaaaagtagacagccatcctatgtaccagcacctctgagaaagaaaaagccagacaaacatgaggataacagaagaagttgggcaagcccggtttatacagaagcagatggaacattttcaagtcagtttttactgcttcaggccctccaaacatactctgatgacatcttgtcttctgaaacacataccaaaattgatcccacttctggcccaaggctcataacccgcaggaagaatctctcttatgcaccaggctatagaagagatgacctcgagatggcagccctggatcctgacttagagaatgatgatttctttgtcagaaagactggggctttccatgcaaatccatatgttctccgagcttttgaagactttagaaagttctctgagcaagatgattctgtagagcgagatataattttacagtgtagagaaggtgaacttgtacttccggatttggaaaaagatgatatgattgttcgccgaattccagcacagaagaaagaagtgccgctgtctggggccccagatagataccacccagtcccttttcccgaaccctggactcttcctccagaaattcaagcaaaatttctctgtgtacttgaaaggacatgcccatccaaagaaaaaagtaatagctgtagaatattagttccttcatatcggcagaagaaagatgacatgctgacacgtaagattcagtcctggaaactgggaactaccgtgcctcccatcagtttcacccctggcccctgcagtgaggctgacttgaagagatgggaggccatccgggaggccagcagacttaggcacaagaaaaggctgatggtggagagactctttcaaaagatttatggtgagaatgggagtaagtccatgagtgatgtcagcgcagaagatgttcaaaacttgcgtcagctgcgttacgaggagatgcagaaaataaaatcacaattaaaagaacaagatcagaaatggcaggatgaccttgcaaaatggaaagatcgtcgaaaaagttacacttcagatctgcagaagaaaaaagaagagagagaagaaattgaaaagcaggcacttgagaagtctaagagaagctctaagacgtttaaggaaatgctgcaggacagggaatcccaaaatcaaaagtctacagttccgtcaagaaggagaatgtattcttttgatgatgtgctggaggaaggaaagcgaccccctacaatgactgtgtcagaagcaagttaccagagtgagagagtagaagagaagggagcaacttatccttcagaaattcccaaagaagattctaccacttttgcaaaaagagaggaccgtgtaacaactgaaattcagcttccttctcaaagtcctgtggaagaacaaagcccagcctctttgtcttctctgcgttcacggagcacacaaatggaatcaactcgtgtttcagcttctctccccagaagttaccggaaaactgatacagtcaggttaacatctgtggtcacaccaagaccctttggctctcagacaaggggaatctcatcactccccagatcttacacgatggatgatgcttggaagtataatggagatgttgaagacattaagagaactccaaacaatgtggtcagcacccctgcaccaagcccggacgcaagccaactggcttcaagcttatctagccagaaagaggtagcagcaacagaagaagatgtgacaaggctgccctctcctacatcccccttctcatctctttcccaagaccaggctgccacttctaaagccacattgtcttccacatctggtcttgatttaatgtctgaatctggagaaggggaaatctccccacaaagagaagtctcaagatcccaggatcagttcagtgatatgagaatcagcataaaccagacgcctgggaagagtcttgactttgggtttacaataaaatgggatattcctgggatcttcgtagcatcagttgaagcaggtagcccagcagaattttctcagctacaagtagatgatgaaattattgctattaacaacaccaagttttcatataacgattcaaaagagtgggaggaagccatggctaaggctcaagaaactggacacctagtgatggatgtgaggcgctatggaaaggctggttcacctgaaacaaagtggattgatgcaacttctggaatttacaactcagaaaaatcttcaaatctatctgtaacaactgatttctccgaaagccttcagagttctaatattgaatccaaagaaatcaatggaattcatgatgaaagcaatgcttttgaatcaaaagcatctgaatccatttctttgaaaaacttaaaaaggcgatcacaattttttgaacaaggaagctctgattcggtggttcctgatcttccagttccaaccatcagtgccccgagtcgctgggtgtgggatcaagaggaggagcggaagcggcaggagaggtggcagaaggagcaggaccgcctactgcaggaaaaatatcaacgtgagcaggagaaactgagggaagagtggcaaagggccaaacaggaggcagagagagagaattccaagtacttggatgaggaactgatggtcctaagctcaaacagcatgtctctgaccacacgggagccctctcttgccacctgggaagctacctggagtgaagggtccaagtcttcagacagagaaggaacccgagcaggagaagaggagaggagacagccacaagaggaagttgttcatgaggaccaaggaaagaagccgcaggatcagcttgttattgagagagagaggaaatgggagcaacagcttcaggaagagcaagagcaaaagcggcttcaggctgaggctgaggagcagaagcgtcctgcggaggagcagaagcgccaggcagagatagagcgggaaacatcagtcagaatataccagtacaggaggcctgttgattcctatgatataccaaagacagaagaagcatcttcaggttttcttcctggtgacaggaataaatccagatctactactgaactggatgattactccac

SEQ ID NO: 149145 - DNA, 4121 bp, Homo sapiens
  Payload ID: 9450
  Gene Symbol: LMO7
  Gene Name: LIM domain 7
  ENST ID: ENST00000526202
  CDS Start-End: 81-3908
gtaacaggtaatgtttaacgtgccagtcacaaagatcacagaaacagtgtatgcccgggcataagatagcacgactgtgtatgctctggaggactgaaaggctgtacaagccctatgtattttttttcaaatatacatatgcatgggtcttgctgctgcctcttttgctgactgataatataaacgttttcttgaaagcttgtgaacagattggattgaaagaagcccagcttttccatcctggagatctacaggatttatcaaatcgagtcactgtcaagcaagaagagactgacaggagagtgaaaaatgttttgataacattgtactggctgggaagaaaagcacaaagcaacccgtactataatggtccccatcttaatttgaaagcgtttgagaatcttttaggacaagcactgacgaaggcactcgaagactccagcttcctgaaaagaagtggcagggacagtggctacggtgacatctggtgtcctgaacgtggagaatttcttgctcctccaaggcaccataagagagaagattcctttgaaagcttggactctttgggctcgaggtcattgacaagctgctcctctgatatcacgttgagaggggggcgtgaaggttttgaaagtgacacagattcggaatttacatttaagatgcaggattataataaagatgatatgtcgtatcgaaggatttcggctgttgagccaaagactgcgttacccttcaatcgttttttacccaacaaaagtagacagccatcctatgtaccagcacctctgagaaagaaaaagccagacaaacatgaggataacagaagaagttgggcaagcccggtttatacagaagcagatggaacattttcaaggagtaagtccatgagtgatgtcagcgcagaagatgttcaaaacttgcgtcagctgcgttacgaggagatgcagaaaataaaatcacaattaaaagaacaagatcagaaatggcaggatgaccttgcaaaatggaaagatcgtcgaaaaagttacacttcagatctgcagaagaaaaaagaagagagagaagaaattgaaaagcaggcacttgagaagtctaagagaagctctaagacgtttaaggaaatgctgcaggacagggaatcccaaaatcaaaagtctacagttccgtcaagaaggagaatgtattcttttgatgatgtgctggaggaaggaaagcgaccccctacaatgactgtgtcagaagcaagttaccagagtgagagagtagaagagaagggagcaacttatccttcagaaattcccaaagaagattctaccacttttgcaaaaagagaggaccgtgtaacaactgaaattcagcttccttctcaaagtcctgtggaagaacaaagcccagcctctttgtcttctctgcgttcacggagcacacaaatggaatcaactcgtgtttcagcttctctccccagaagttaccggaaaactgatacagtcaggttaacatctgtggtcacaccaagaccctttggctctcagacaaggggaatctcatcactccccagatcttacacgatggatgatgcttggaagtataatggagatgttgaagacattaagagaactccaaacaatgtggtcagcacccctgcaccaagcccggacgcaagccaactggcttcaagcttatctagccagaaagaggtagcagcaacagaagaagatgtgacaaggctgccctctcctacatcccccttctcatctctttcccaagaccaggctgccacttctaaagccacattgtcttccacatctggtcttgatttaatgtctgaatctggagaaggggaaatctccccacaaagagaagtctcaagatcccaggatcagttcagtgatatgagaatcagcataaaccagacgcctgggaagagtcttgactttgggtttacaataaaatgggatattcctgggatcttcgtagcatcagttgaagcaggtagcccagcagaattttctcagctacaagtagatgatgaaattattgctattaacaacaccaagttttcatataacgattcaaaagagtgggaggaagccatggctaaggctcaagaaactggacacctagtgatggatgtgaggcgctatggaaaggctgactggggcaaagaccaaccttccctgccatttatacggcataaaaccctcaatctcaccagtatggctaccaaaattataggttcacctgaaacaaagtggattgatgcaacttctggaatttacaactcagaaaaatcttcaaatctatctgtaacaactgatttctccgaaagccttcagagttctaatattgaatccaaagaaatcaatggaattcatgatgaaagcaatgcttttgaatcaaaagcatctgaatccatttctttgaaaaacttaaaaaggcgatcacaattttttgaacaaggaagctctgattcggtggttcctgatcttccagttccaaccatcagtgccccgagtcgctgggtgtgggatcaagaggaggagcggaagcggcaggagaggtggcagaaggagcaggaccgcctactgcaggaaaaatatcaacgtgagcaggagaaactgagggaagagtggcaaagggccaaacaggaggcagagagagagaattccaagtacttggatgaggaactgatggtcctaagctcaaacagcatgtctctgaccacacgggagccctctcttgccacctgggaagctacctggagtgaagggtccaagtcttcagacagagaaggaacccgagcaggagaagaggagaggagacagccacaagaggaagttgttcatgaggaccaaggaaagaagccgcaggatcagcttgttattgagagagagaggaaatgggagcaacagcttcaggaagagcaagagcaaaagcggcttcaggctgaggctgaggagcagaagcgtcctgcggaggagcagaagcgccaggcagagatagagcgggaaacatcagtcagaatataccagtacaggaggcctgttgattcctatgatataccaaagacagaagaagcatcttcaggttttcttcctggtgacaggaataaatccagatctactactgaactggatgattactccacaaataaaaatggaaacaataaatatttagaccaaattgggaacatgacctcttcacagaggagatccaagaaagaacaagtaccatcaggagcagaattggagaggcaacaaatccttcaggaaatgaggaagagaacaccccttcacaatgacaacagctggatccgacagcgcagtgccagtgtcaacaaagagcctgttagtcttcctgggatcatgagaagaggcgaatctttagataacctggactccccccgatccaattcttggagacagcctccttggctcaatcagcccacaggattctatgcttcttcctctgtgcaagactttagtcgcccaccacctcagctggtgtccacatcaaaccgtgcctacatgcggaacccctcctccagcgtgcccccaccttcagctggctccgtgaagacctccaccacaggtgtggccaccacacagtcccccaccccgagaagccattccccttcagcttcacagtcaggctctcagctgcgtaacaggtcagtcagtgggaagcgcatatgctcctactgcaataacattctgggcaaaggagccgccatgatcatcgagtccctgggtctttgttatcatttgcattgttttaagtgtgttgcctgtgagtgtgacctcggaggctcttcctcaggagctgaagtcaggatcagaaaccaccaactgtactgcaacgactgctatctcagattcaaatctggacggccaaccgccatgtgatgtaagcctccatacgaaagcactgttgcagatagaagaagaggtggttgctgctcatgtagatctataaatatgtgttgtatgtcttttttgctttttttttaaaaaaaagaataactttttttgcctctttagattacatagaagcattgtagtcttggtagaaccagtatttttgttgtttatttataaggtaattgtgtgtggggaaaa

SEQ ID NO: 149146 - DNA, 995 bp, Homo sapiens
  Payload ID: 9450
  Gene Symbol: LMO7
  Gene Name: LIM domain 7
  ENST ID: ENST00000497947
  CDS Start-End: 633-995
gacttttgaagggtggggtctgtaggaagaatccatgcattgctctgggaagtggcctcaggaagtagagggctggggacagaatcactcatgagttgcagttgttctgggcaacaaagcaaggcggatacttattctggtagcagggtggagtttgaactgggcagttacctctgctcaagccccttgaagaatttcagattccctgttaaccatggaggcatgggctggaagctgggtgtgggggcaggcaagaagagactgacaggagagtgaaaaatgttttgataacattgtactggctgggaagaaaagcacaaagcaacccgtactataatggtccccatcttaatttgaaagcgtttgagaatcttttaggacaagcactgacgaaggcactcgaagactccagcttcctgaaaagaagtggcagggacagtggctacggtgacatctggtgtcctgaacgtggagaatttcttgctcctccaaggcaccataagagagaagattcctttgaaagcttggactctttgggctcgaggtcattgacaagctgctcctctgatatcacgttgagaggggggcgtgaaggttttgaaagtgacacagattcggaatttacatttaagatgcaggattataataaagatgatatgtcgtatcgaaggatttcggctgttgagccaaagactgcgttacccttcaatcgttttttacccaacaaaagtagacagccatcctatgtaccagcacctctgagaaagaaaaagccagacaaacatgaggataacagaagaagttgggcaagcccggtttatacagaagcagatggaacattttcaagactctttcaaaagatttatggtgagaatgggagtaagtccatgagtgatgtcagcgcagaagatgttcaaaacttgcgtcagctgcgttacgaggagatgcagaaaataaaatcacaattaaaagaacaagatcagaaatggcaggat

SEQ ID NO: 149147 - DNA, 597 bp, Homo sapiens
  Payload ID: 9450
  Gene Symbol: LMO7
  Gene Name: LIM domain 7
  ENST ID: ENST00000489941
  CDS Start-End: 101-597
tgtgggtttcagttaggcgaataatctggagagtaaagcaaattcttgtgccttctttataggttttgaaagtgacacagattcggaatttacatttaagatgcaggattataataaagatgatatgtcgtatcgaaggatttcggctgttgagccaaagactgcgttacccttcaatcgttttttacccaacaaaagtagacagccatcctatgtaccagcacctctgagaaagaaaaagccagacaaacatgaggataacagaagaagttgggcaagcccggtttatacagaagcagatggaacattttcaagactctttcaaaagatttatggtgagaatgggagtaagtccatgagtgatgtcagcgcagaagatgttcaaaacttgcgtcagctgcgttacgaggagatgcagaaaataaaatcacaattaaaagaacaagatcagaaatggcaggatgaccttgcaaaatggaaagatcgtcgaaaaagttacacttcagatctgcagaagaaaaaagaagagagagaagaaattgaaaagcaggcacttgagaagtctaagagaagctctaagacgtttaaggaaatgct

SEQ ID NO: 149148 - DNA, 672 bp, Homo sapiens
  Payload ID: 9450
  Gene Symbol: LMO7
  Gene Name: LIM domain 7
  ENST ID: ENST00000525373
  CDS Start-End: 98-672
gggtttcagttaggcgaataatctggagagtaaagcaaattcttgtgccttctttataggttttgaaagtgacacagattcggaatttacatttaagatgcaggattataataaagatgatatgtcgtatcgaaggatttcggctgttgagccaaagactgcgttacccttcaatcgttttttacccaacaaaagtagacagccatcctatgtaccagcacctctgagaaagaaaaagccagacaaacatgaggataacagaagaagttgggcaagcccggtttatacagaagcagatggaacattttcaaggagtaagtccatgagtgatgtcagcgcagaagatgttcaaaacttgcgtcagctgcgttacgaggagatgcagaaaataaaatcacaattaaaagaacaagatcagaaatggcaggatgaccttgcaaaatggaaagatcgtcgaaaaagttacacttcagatctgcagaagaaaaaagaagagagagaagaaattgaaaagcaggcacttgagaagtctaagagaagctctaagacgtttaaggaaatgctgcaggacagggaatcccaaaatcaaaagtctacagttccgtcaagaaggagaatgtattcttttgatgatgtgctggaggaaggaaagcgaccccctacaatgactgt

SEQ ID NO: 149149 - DNA, 650 bp, Homo sapiens
  Payload ID: 9450
  Gene Symbol: LMO7
  Gene Name: LIM domain 7
  ENST ID: ENST00000526371
  CDS Start-End: 154-650
agttagcagtggcagcactgggtttctaagggaaagacaaagcaggcgcgctgtgtgggtttcagttaggcgaataatctggagagtaaagcaaattcttgtgccttctttataggttttgaaagtgacacagattcggaatttacatttaagatgcaggattataataaagatgatatgtcgtatcgaaggatttcggctgttgagccaaagactgcgttacccttcaatcgttttttacccaacaaaagtagacagccatcctatgtaccagcacctctgagaaagaaaaagccagacaaacatgaggataacagaagaagttgggcaagcccggtttatacagaagcagatggaacattttcaagtaatcagaggaggatttggggcaccaatgtggagaactggccaactgtacaaggaacttcaaagtcctcttgttatttggaagaggaaaaagcaaagacaagaagcatacccaacattgtaaaggatgatctttatgtgcgcaagctcagtccagtcatgccaaacccagggaatgcttttgatcagtttcttcccaaatgttggaccccagaagatgtgaactggaaaagaataaaaagggaaacttataagccatggtataaagaatttcagggattcag

SEQ ID NO: 149150 - DNA, 5580 bp, Homo sapiens
  Payload ID: 9450
  Gene Symbol: LMO7
  Gene Name: LIM domain 7
  ENST ID: ENST00000465261
  CDS Start-End: 761-4918
aacaggtaatgtttaacgtgccagtcacaaagatcacagaaacagtgtatgcccgggcataagatagcacgactgtgtatgctctggaggactgaaaggctgtacaagccctatgtattttttttcaaatatacatatgcatgggtcttgctgctgcctcttttgctgactgtaattggactttgaagcttcgaagttatatcataaaaatttgtaacctttgtctgagagagagctcagctaagcaatcactttccacttcttttcacaggataatataaacgttttcttgaaagcttgtgaacagattggattgaaagaagcccagcttttccatcctggagatctacaggatttatcaaatcgagtcactgtcaagcaagaagagactgacaggagagtgaaaaatgttttgataacattgtactggctgggaagaaaagcacaaagcaacccgtactataatggtccccatcttaatttgaaagcgtttgagaatcttttaggacaagcactgacgaaggcactcgaagactccagcttcctgaaaagaagtggcagggacagtggctacggtgacatctggtgtcctgaacgtggagaatttcttgctcctccaaggcaccataagagagaagattcctttgaaagcttggactctttgggctcgaggtcattgacaagctgctcctctgatatcacgttgagaggggggcgtgaaggttttgaaagtgacacagattcggaatttacatttaagatgcaggattataataaagatgatatgtcgtatcgaaggatttcggctgttgagccaaagactgcgttacccttcaatcgttttttacccaacaaaagtagacagccatcctatgtaccagcacctctgagaaagaaaaagccagacaaacatgaggataacagaagaagttgggcaagcccggtttatacagaagcagatggaacattttcaagtaatcagaggaggatttggggcaccaatgtggagaactggccaactgtacaaggaacttcaaagtcctcttgttatttggaagaggaaaaagcaaagacaagaagcatacccaacattgtaaaggatgatctttatgtgcgcaagctcagtccagtcatgccaaacccagggaatgcttttgatcagtttcttcccaaatgttggaccccagaagatgtgaactggaaaagaataaaaagggaaacttataagccatggtataaagaatttcagggattcagtcagtttttactgcttcaggccctccaaacatactctgatgacatcttgtcttctgaaacacataccaaaattgatcccacttctggcccaaggctcataacccgcaggaagaatctctcttatgcaccaggctatagaagagatgacctcgagatggcagccctggatcctgacttagagaatgatgatttctttgtcagaaagactggggctttccatgcaaatccatatgttctccgagcttttgaagactttagaaagttctctgagcaagatgattctgtagagcgagatataattttacagtgtagagaaggtgaacttgtacttccggatttggaaaaagatgatatgattgttcgccgaattccagcacagaagaaagaagtgccgctgtctggggccccagatagataccacccagtcccttttcccgaaccctggactcttcctccagaaattcaagcaaaatttctctgtgtacttgaaaggacatgcccatccaaagaaaaaagtaatagctgtagaatattagttccttcatatcggcagaagaaagatgacatgctgacacgtaagattcagtcctggaaactgggaactaccgtgcctcccatcagtttcacccctggcccctgcagtgaggctgacttgaagagatgggaggccatccgggaggccagcagacttaggcacaagaaaaggctgatggtggagagactctttcaaaagatttatggtgagaatgggagtaagtccatgagtgatgtcagcgcagaagatgttcaaaacttgcgtcagctgcgttacgaggagatgcagaaaataaaatcacaattaaaagaacaagatcagaaatggcaggatgaccttgcaaaatggaaagatcgtcgaaaaagttacacttcagatctgcagaagaaaaaagaagagagagaagaaattgaaaagcaggcacttgagaagtctaagagaagctctaagacgtttaaggaaatgctgcaggacagggaatcccaaaatcaaaagtctacagttccgtcaagaaggagaatgtattcttttgatgatgtgctggaggaaggaaagcgaccccctacaatgactgtgtcagaagcaagttaccagagtgagagagtagaagagaagggagcaacttatccttcagaaattcccaaagaagattctaccacttttgcaaaaagagaggaccgtgtaacaactgaaattcagcttccttctcaaagtcctgtggaagaacaaagcccagcctctttgtcttctctgcgttcacggagcacacaaatggaatcaactcgtgtttcagcttctctccccagaagttaccggaaaactgatacagtcaggttaacatctgtggtcacaccaagaccctttggctctcagacaaggggaatctcatcactccccagatcttacacgatggatgatgcttggaagtataatggagatgttgaagacattaagagaactccaaacaatgtggtcagcacccctgcaccaagcccggacgcaagccaactggcttcaagcttatctagccagaaagaggtagcagcaacagaagaagatgtgacaaggctgccctctcctacatcccccttctcatctctttcccaagaccaggctgccacttctaaagccacattgtcttccacatctggtcttgatttaatgtctgaatctggagaaggggaaatctccccacaaagagaagtctcaagatcccaggatcagttcagtgatatgagaatcagcataaaccagacgcctgggaagagtcttgactttgggtttacaataaaatgggatattcctgggatcttcgtagcatcagttgaagcaggtagcccagcagaattttctcagctacaagtagatgatgaaattattgctattaacaacaccaagttttcatataacgattcaaaagagtgggaggaagccatggctaaggctcaagaaactggacacctagtgatggatgtgaggcgctatggaaaggctggttcacctgaaacaaagtggattgatgcaacttctggaatttacaactcagaaaaatcttcaaatctatctgtaacaactgatttctccgaaagccttcagagttctaatattgaatccaaagaaatcaatggaattcatgatgaaagcaatgcttttgaatcaaaagcatctgaatccatttctttgaaaaacttaaaaaggcgatcacaattttttgaacaaggaagctctgattcggtggttcctgatcttccagttccaaccatcagtgccccgagtcgctgggtgtgggatcaagaggaggagcggaagcggcaggagaggtggcagaaggagcaggaccgcctactgcaggaaaaatatcaacgtgagcaggagaaactgagggaagagtggcaaagggccaaacaggaggcagagagagagaattccaagtacttggatgaggaactgatggtcctaagctcaaacagcatgtctctgaccacacgggagccctctcttgccacctgggaagctacctggagtgaagggtccaagtcttcagacagagaaggaacccgagcaggagaagaggagaggagacagccacaagaggaagttgttcatgaggaccaaggaaagaagccgcaggatcagcttgttattgagagagagaggaaatgggagcaacagcttcaggaagagcaagagcaaaagcggcttcaggctgaggctgaggagcagaagcgtcctgcggaggagcagaagcgccaggcagagatagagcgggaaacatcagtcagaatataccagtacaggaggcctgttgattcctatgatataccaaagacagaagaagcatcttcaggttttcttcctggtgacaggaataaatccagatctactactgaactggatgattactccacaaataaaaatggaaacaataaatatttagaccaaattgggaacatgacctcttcacagaggagatccaagaaagaacaagtaccatcaggagcagaattggagaggcaacaaatccttcaggaaatgaggaagagaacaccccttcacaatgacaacagctggatccgacagcgcagtgccagtgtcaacaaagagcctgttagtcttcctgggatcatgagaagaggcgaatctttagataacctggactccccccgatccaattcttggagacagcctccttggctcaatcagcccacaggattctatgcttcttcctctgtgcaagactttagtcgcccaccacctcagctggtgtccacatcaaaccgtgcctacatgcggaacccctcctccagcgtgcccccaccttcagctggctccgtgaagacctccaccacaggtgtggccaccacacagtcccccaccccgagaagccattccccttcagcttcacagtcaggctctcagctgcgtaacagtgtgttgcctgtgagtgtgacctcggaggctcttcctcaggagctgaagtcaggatcagaaaccaccaactgtactgcaacgactgctatctcagattcaaatctggacggccaaccgccatgtgatgtaagcctccatacgaaagcactgttgcagatagaagaagaggtggttgctgctcatgtagatctataaatatgtgttgtatgtcttttttgctttttttttaaaaaaaagaataactttttttgcctctttagattacatagaagcattgtagtcttggtagaaccagtatttttgttgtttatttataaggtaattgtgtgtggggaaaagtgcagtatttacctgttgaattcagcatcttgagagcacaagggaaaaaataagaacctacgaatatttttgaggcagataatgatctagtttgactttctagttagtggtgttttgaagagggtattttattgttttttaaaaaaaggttcttaaacattatttgaaatagttaatataaatacataattgcatttgctctgtttattgtaatgtattctaaattaatgcagaaccatatggaaaatttcattaaaatctatccccaaatgtgctttctgtatccttccttctacctattattctgatttttaaaaatgcagttaatgtaccatttatttgcttgatgaagggagctctattttctttaccagaaatgttgctaagtaattcccaatagaaagctgcttattttcattaatgaaaaataaccatggtttgtatactagaagtcttcttcagaaactggtgagcctttctgttcaattgcatttgtaaataaacttgctgatgcattt

SEQ ID NO: 149151 - DNA, 914 bp, Homo sapiens
  Payload ID: 9450
  Gene Symbol: LMO7
  Gene Name: LIM domain 7
  ENST ID: ENST00000524651
  CDS Start-End: 1-914
aagatgtgacaaggctgccctctcctacatcccccttctcatctctttcccaagaccaggctgccacttctaaagccacattgtcttccacatctggtcttgatttaatgtctgaatctggagaaggggaaatctccccacaaagagaagtctcaagatcccaggatcagttcagtgatatgagaatcagcataaaccagacgcctgggaagagtcttgactttgggtttacaataaaatgggatattcctgggatcttcgtagcatcagttgaagcaggtagcccagcagaattttctcagctacaagtagatgatgaaattattgctattaacaacaccaagttttcatataacgattcaaaagagtgggaggaagccatggctaaggctcaagaaactggacacctagtgatggatgtgaggcgctatggaaaggctgactggggcaaagaccaaccttccctgccatttatacggcataaaaccctcaatctcaccagtatggctaccaaaattataggttcacctgaaacaaagtggattgatgcaacttctggaatttacaactcagaaaaatcttcaaatctatctgtaacaactgatttctccgaaagccttcagagttctaatattgaatccaaagaaatcaatggaattcatgatgaaagcaatgcttttgaatcaaaaggaagctctgattcggtggttcctgatcttccagttccaaccatcagtgccccgagtcgctgggtgtgggatcaagaggaggagcggaagcggcaggagaggtggcagaaggagcaggaccgcctactgcaggaaaaatatcaacgtgagcaggagaaactgagggaagagtggcaaagggccaaacaggaggcagagagagagaattccaagtacttggatgag

SEQ ID NO: 149152 - DNA, 874 bp, Homo sapiens
  Payload ID: 9450
  Gene Symbol: LMO7
  Gene Name: LIM domain 7
  ENST ID: ENST00000525914
  CDS Start-End: 1-874
taacgattcaaaagagtgggaggaagccatggctaaggctcaagaaactggacacctagtgatggatgtgaggcgctatggaaaggctggttcacctgaaacaaagtggattgatgcaacttctggaatttacaactcagaaaaatcttcaaatctatctgtaacaactgatttctccgaaagccttcagagttctaatattgaatccaaagaaatcaatggaattcatgatgaaagcaatgcttttgaatcaaaaggaagctctgattcggtggttcctgatcttccagttccaaccatcagtgccccgagtcgctgggtgtgggatcaagaggaggagcggaagcggcaggagaggtggcagaaggagcaggaccgcctactgcaggaaaaatatcaacgtgagcaggagaaactgagggaagagtggcaaagggccaaacaggaggcagagagagagaattccaagtacttggatgaggaactgatggtcctaagctcaaacagcatgtctctgaccacacgggagccctctcttgccacctgggaagctacctggagtgaagggtccaagtcttcagacagagaaggaacccgagcaggagaagaggagaggagacagccacaagaggaagttgttcatgaggaccaaggaaagaagccgcaggatcagcttgttattgagagagagaggaaatgggagcaacagcttcaggaagagcaagagcaaaagcggcttcaggctgaggctgaggagcagaagcgtcctgcggaggagcagaagcgccaggcagagatagagcgggaaacatcagtcagaatataccagtacaggaggcctgttgattcctatgatataccaaagacagaagaa

SEQ ID NO: 149153 - DNA, 572 bp, Homo sapiens
  Payload ID: 9450
  Gene Symbol: LMO7
  Gene Name: LIM domain 7
  ENST ID: ENST00000526528
  CDS Start-End: 150-572
agcagtggcagcactgggtttctaagggaaagacaaagcaggcgcgctgtgtgggtttcagttaggcgaataatctggagagtaaagcaaattcttgtgccttctttataggttttgaaagtgacacagattcggaatttacatttaagatgcaggattataataaagatgatatgtcgtatcgaaggatttcggctgttgagccaaagactgcgttacccttcaatcgttttttacccaacaaaagtagacagccatcctatgtaccagcacctctgagaaagaaaaagccagacaaacatgaggataacagaagaagttgggcaagcccggtttatacagaagcagatggaacattttcaagtcagtttttactgcttcaggccctccaaacatactctgatgacatcttgtcttctgaaacacataccaaaattgatcccacttctggcccaaggctcataacccgcaggaagaatctctcttatgcaccaggctatagaagagatgacctcgagatggcagccctggatcctgacttagagaatgatgatttctttgtcagaaagact

SEQ ID NO: 149154 - DNA, 589 bp, Homo sapiens
  Payload ID: 9450
  Gene Symbol: LMO7
  Gene Name: LIM domain 7
  ENST ID: ENST00000534657
  CDS Start-End: 553-589
agtcctatagtatggtttccctgcctgtcaagagccagctcaacaaccaaacccagattccaggataatataaacgttttcttgaaagcttgtgaacagattggattgaaagaagcccagcttttccatcctggagatctacaggatttatcaaatcgagtcactgtcaagcaagaagagactgacaggagagtgaaaaatgttttgataacattgtactggctgggaagaaaagcacaaagcaacccgtactataatggtccccatcttaatttgaaagcgtttgagaatcttttaggacaagcactgacgaaggcactcgaagactccagcttcctgaaaagaagtggcagggacagtggctacggtgacatctggtgtcctgaacgtggagaatttcttgctcctccaaggcaccataagagagaagattcctttgaaagcttggactctttgggctcgaggtcattgacaagctgctcctctgatatcacgttgagaggggggcgtgaaggttttgaaagtgacacagattcggaatttacatttaagatgcaggattataataaagatgatatgtcgtatcgaa

SEQ ID NO: 149155 - DNA, 536 bp, Homo sapiens
  Payload ID: 9450
  Gene Symbol: LMO7
  Gene Name: LIM domain 7
  ENST ID: ENST00000525107
  CDS Start-End: 1-536
agacgcctgggaagagtcttgactttgggtttacaataaaatgggatattcctgggatcttcgtagcatcagttgaagcaggtagcccagcagaattttctcagctacaagtagatgatgaaattattgctattaacaacaccaagttttcatataacgattcaaaagagtgggaggaagccatggctaaggctcaagaaactggacacctagtgatggatgtgaggcgctatggaaaggctggttcacctgaaacaaagtggattgatgcaacttctggaatttacaactcagaaaaatcttcaaatctatctgtaacaactgatttctccgaaagccttcagagttctaatattgaatccaaagaaatcaatggaattcatgatgaaagcaatgcttttgaatcaaaagcatctgaatccatttctttgaaaaacttaaaaaggcgatcacaattttttgaacaagggtcatcaggcttttcttacagttcatgggtctacctctgtggaagctctgattcggtggttcctgat

SEQ ID NO: 149156 - DNA, 578 bp, Homo sapiens
  Payload ID: 9450
  Gene Symbol: LMO7
  Gene Name: LIM domain 7
  ENST ID: ENST00000533809
  CDS Start-End: 282-578
catttgaaattctttttttttttttttttcctgttaggccaaactatgagatgctgcccagtttattaataaaagaaccctgaagcttcttcagaaatatccattgatcctactctaatacctagagctagggtttattttggcatctgtatcttccttttactaactttgaatttgaaagatgagtaacagatggaactgttacacctggagaaaaaaggatttactgactattgtttaaaaaaacattgtcacttagtatactggcatagagacagctaatgatagaagtttctgaaaggaattatttcatagaaatgaagacttatattgtatatttttcttccttgcccatgtgctgcaacacaggaagctctgattcggtggttcctgatcttccagttccaaccatcagtgccccgagtcgctgggtgtgggatcaagaggaggagcggaagcggcaggagaggtggcagaaggagcaggaccgcctactgcaggaaaaatatcaacgtgagcaggagaaactgagggaagagtggcaaagggccaaacaggaggcagagagagagaattcc

SEQ ID NO: 149157 - DNA, 3706 bp, Homo sapiens
  Payload ID: 9451
  Gene Symbol: LIMA1
  Gene Name: LIM domain and actin binding 1
  Uniprot ID: Q9UHB6
  ENST ID: ENST00000341247
  CDS Start-End: 151-2430
ggggtccggggcggggccgcaggagcagtaggtgttagcagcttggtcgcgacaggtgcgctaggtagagcgccgggacctgtgacagggctggtagcagcgcagaggaaaggcggcttttagccaggtatttcagtgtctgtagacaagatggaatcatctccatttaatagacggcaatggacctcactatcattgagggtaacagccaaagaactttctcttgtcaacaagaacaagtcatcggctattgtggaaatattctccaagtaccagaaagcagctgaagaaacaaacatggagaagaagagaagtaacaccgaaaatctctcccagcactttagaaaggggaccctgactgtgttaaagaagaagtgggagaacccagggctgggagcagagtctcacacagactctctacggaacagcagcactgagattaggcacagagcagaccatcctcctgctgaagtgacaagccacgctgcttctggagccaaagctgaccaagaagaacaaatccaccccagatctagactcaggtcacctcctgaagccctcgttcagggtcgatatccccacatcaaggacggtgaggatcttaaagaccactcaacagaaagtaaaaaaatggaaaattgtctaggagaatccaggcatgaagtagaaaaatcagaaatcagtgaaaacacagatgcttcgggcaaaatagagaaatataatgttccgctgaacaggcttaagatgatgtttgagaaaggtgaaccaactcaaactaagattctccgggcccaaagccgaagtgcaagtggaaggaagatctctgaaaacagctattctctagatgacctggaaataggcccaggtcagttgtcatcttctacatttgactcggagaaaaatgagagtagacgaaatctggaacttccacgcctctcagaaacctctataaaggatcgaatggccaagtaccaggcagctgtgtccaaacaaagcagctcaaccaactatacaaatgagctgaaagccagtggtggcgaaatcaaaattcataaaatggagcaaaaggagaatgtgcccccaggtcctgaggtctgcatcacccatcaggaaggggaaaagatttctgcaaatgagaatagcctggcagtccgttccacccctgccgaagatgactcccgtgactcccaggttaagagtgaggttcaacagcctgtccatcccaagccactaagtccagattccagagcctccagtctttctgaaagttctcctcccaaagcaatgaagaagtttcaggcacctgcaagagagacctgcgtggaatgtcagaagacagtctatccaatggagcgtctcttggccaaccagcaggtgtttcacatcagctgcttccgttgctcctattgcaacaacaaactcagtctaggaacatatgcatctttacatggaagaatctattgtaagcctcacttcaatcaactctttaaatctaagggcaactatgatgaaggctttgggcacagaccacacaaggatctatgggcaagcaaaaatgaaaacgaagagattttggagagaccagcccagcttgcaaatgcaagggagacccctcacagcccaggggtagaagatgcccctattgctaaggtgggtgtcctggctgcaagtatggaagccaaggcctcctctcagcaggagaaggaagacaagccagctgaaaccaagaagctgaggatcgcctggccaccccccactgaacttggaagttcaggaagtgccttggaggaagggatcaaaatgtcaaagcccaaatggcctcctgaagacgaaatcagcaagcccgaagttcctgaggatgtcgatctagatctgaagaagctaagacgatcttcttcactgaaggaaagaagccgcccattcactgtagcagcttcatttcaaagcacctctgtcaagagcccaaaaactgtgtccccacctatcaggaaaggctggagcatgtcagagcagagtgaagagtctgtgggtggaagagttgcagaaaggaaacaagtggaaaatgccaaggcttctaagaagaatgggaatgtgggaaaaacaacctggcaaaacaaagaatctaaaggagagacagggaagagaagtaaggaaggtcatagtttggagatggagaatgagaatcttgtagaaaatggtgcagactccgatgaagatgataacagcttcctcaaacaacaatctccacaagaacccaagtctctgaattggtcgagttttgtagacaacacctttgctgaagaattcactactcagaatcagaaatcccaggatgtggaactctgggagggagaagtggtcaaagagctctctgtggaagaacagataaagagaaatcggtattatgatgaggatgaggatgaagagtgacaaattgcaatgatgctgggccttaaattcatgttagtgttagcgagccactgccctttgtcaaaatgtgatgcacataagcaggtatcccagcatgaaatgtaatttacttggaagtaactttggaaaagaattccttcttaaaatcaaaaacaaaacaaaaaaacacaaaaaacacattctaaatactagagataactttacttaaattcttcattttagcagtgatgatatgcataagtgctgtaaggcttgtaactggggaaatattccacctgataatagcccagattctactgtattcccaaaaggcaatattaaggtagacagatgattagtagtatattgttacacactattttggaattagagaacatacagaaggaatttaggggcttaaacattacgactgaatgcactttagtataaagggcacagtttgtatatttttaaatgaataccaatttaattttttagtatttacctgttaagagattatttagtctttaaattttttaggttaattttcttgctgtgatatatatgaggaatttactactttatgtcctgctctctaaactacatcctgaactcgacgtcctgaggtataatacaacagagcactttttgaggcaattgaaaaaccaacctacactcttcggtgcttagagagatctgctgtctcccaaataagcttttgtatctgccagtgaatttactgtactccaaatgattgctttcttttctggtgatatctgtgcttctcataattactgaaagctgcaatattttagtaataccttcgggatcactgtcccccatcttccgtgttagagcaaagtgaagagtttaaaggaggaagaagaaagaactgtcttacaccacttgagctcagacctctaaaccctgtatttcccttatgatgtcccctttttgagacactaatttttaaatacttactagctctgaaatatattgatttttatcacagtattctcagggtgaaattaaaccaactataggcctttttcttgggatgattttctagtcttaaggtttggggacattataaacttgagtacatttgttgtacacagttgatattccaaattgtatggatgggagggagaggtgtcttaagctgtaggcttttctttgtactgcatttatagagatttagctttaatattttttagagatgtaaaacattctgctttcttagtcttacctagtctgaaacatttttattcaataaagattttaattaaaatttgaa

SEQ ID NO: 149158 - DNA, 3669 bp, Homo sapiens
  Payload ID: 9451
  Gene Symbol: LIMA1
  Gene Name: LIM domain and actin binding 1
  Uniprot ID: Q9UHB6
  ENST ID: ENST00000394943
  CDS Start-End: 111-2393
gcttggtcgcgacaggtgcgctaggtagagcgccgggacctgtgacagggctggtagcagcgcagaggaaaggcggcttttagccaggtatttcagtgtctgtagacaagatggaatcatctccatttaatagacggcaatggacctcactatcattgagggtaacagccaaagaactttctcttgtcaacaagaacaagtcatcggctattgtggaaatattctccaagtaccagaaagcagctgaagaaacaaacatggagaagaagagaagtaacaccgaaaatctctcccagcactttagaaaggggaccctgactgtgttaaagaagaagtgggagaacccagggctgggagcagagtctcacacagactctctacggaacagcagcactgagattaggcacagagcagaccatcctcctgctgaagtgacaagccacgctgcttctggagccaaagctgaccaagaagaacaaatccaccccagatctagactcaggtcacctcctgaagccctcgttcagggtcgatatccccacatcaaggacggtgaggatcttaaagaccactcaacagaaagtaaaaaaatggaaaattgtctaggagaatccaggcatgaagtagaaaaatcagaaatcagtgaaaacacagatgcttcgggcaaaatagagaaatataatgttccgctgaacaggcttaagatgatgtttgagaaaggtgaaccaactcaaactaagattctccgggcccaaagccgaagtgcaagtggaaggaagatctctgaaaacagctattctctagatgacctggaaataggcccaggtcagttgtcatcttctacatttgactcggagaaaaatgagagtagacgaaatctggaacttccacgcctctcagaaacctctataaaggatcgaatggccaagtaccaggcagctgtgtccaaacaaagcagctcaaccaactatacaaatgagctgaaagccagtggtggcgaaatcaaaattcataaaatggagcaaaaggagaatgtgcccccaggtcctgaggtctgcatcacccatcaggaaggggaaaagatttctgcaaatgagaatagcctggcagtccgttccacccctgccgaagatgactccccaggtgactcccaggttaagagtgaggttcaacagcctgtccatcccaagccactaagtccagattccagagcctccagtctttctgaaagttctcctcccaaagcaatgaagaagtttcaggcacctgcaagagagacctgcgtggaatgtcagaagacagtctatccaatggagcgtctcttggccaaccagcaggtgtttcacatcagctgcttccgttgctcctattgcaacaacaaactcagtctaggaacatatgcatctttacatggaagaatctattgtaagcctcacttcaatcaactctttaaatctaagggcaactatgatgaaggctttgggcacagaccacacaaggatctatgggcaagcaaaaatgaaaacgaagagattttggagagaccagcccagcttgcaaatgcaagggagacccctcacagcccaggggtagaagatgcccctattgctaaggtgggtgtcctggctgcaagtatggaagccaaggcctcctctcagcaggagaaggaagacaagccagctgaaaccaagaagctgaggatcgcctggccaccccccactgaacttggaagttcaggaagtgccttggaggaagggatcaaaatgtcaaagcccaaatggcctcctgaagacgaaatcagcaagcccgaagttcctgaggatgtcgatctagatctgaagaagctaagacgatcttcttcactgaaggaaagaagccgcccattcactgtagcagcttcatttcaaagcacctctgtcaagagcccaaaaactgtgtccccacctatcaggaaaggctggagcatgtcagagcagagtgaagagtctgtgggtggaagagttgcagaaaggaaacaagtggaaaatgccaaggcttctaagaagaatgggaatgtgggaaaaacaacctggcaaaacaaagaatctaaaggagagacagggaagagaagtaaggaaggtcatagtttggagatggagaatgagaatcttgtagaaaatggtgcagactccgatgaagatgataacagcttcctcaaacaacaatctccacaagaacccaagtctctgaattggtcgagttttgtagacaacacctttgctgaagaattcactactcagaatcagaaatcccaggatgtggaactctgggagggagaagtggtcaaagagctctctgtggaagaacagataaagagaaatcggtattatgatgaggatgaggatgaagagtgacaaattgcaatgatgctgggccttaaattcatgttagtgttagcgagccactgccctttgtcaaaatgtgatgcacataagcaggtatcccagcatgaaatgtaatttacttggaagtaactttggaaaagaattccttcttaaaatcaaaaacaaaacaaaaaaacacaaaaaacacattctaaatactagagataactttacttaaattcttcattttagcagtgatgatatgcataagtgctgtaaggcttgtaactggggaaatattccacctgataatagcccagattctactgtattcccaaaaggcaatattaaggtagacagatgattagtagtatattgttacacactattttggaattagagaacatacagaaggaatttaggggcttaaacattacgactgaatgcactttagtataaagggcacagtttgtatatttttaaatgaataccaatttaattttttagtatttacctgttaagagattatttagtctttaaattttttaggttaattttcttgctgtgatatatatgaggaatttactactttatgtcctgctctctaaactacatcctgaactcgacgtcctgaggtataatacaacagagcactttttgaggcaattgaaaaaccaacctacactcttcggtgcttagagagatctgctgtctcccaaataagcttttgtatctgccagtgaatttactgtactccaaatgattgctttcttttctggtgatatctgtgcttctcataattactgaaagctgcaatattttagtaataccttcgggatcactgtcccccatcttccgtgttagagcaaagtgaagagtttaaaggaggaagaagaaagaactgtcttacaccacttgagctcagacctctaaaccctgtatttcccttatgatgtcccctttttgagacactaatttttaaatacttactagctctgaaatatattgatttttatcacagtattctcagggtgaaattaaaccaactataggcctttttcttgggatgattttctagtcttaaggtttggggacattataaacttgagtacatttgttgtacacagttgatattccaaattgtatggatgggagggagaggtgtcttaagctgtaggcttttctttgtactgcatttatagagatttagctttaatattttttagagatgtaaaacattctgctttcttagtcttacctagtctgaaacatttttattcaataaagattttaattaaaatttgaa

SEQ ID NO: 149159 - DNA, 583 bp, Homo sapiens
  Payload ID: 9451
  Gene Symbol: LIMA1
  Gene Name: LIM domain and actin binding 1
  ENST ID: ENST00000551691
  CDS Start-End: 193-583
aggtagagcgccgggacctgtgacagggctggtagcagcgcagaggaaaggcggcttttagccagttttcaagactcctggatcagaaacaaagtggtactttatatttttcactcttcaaataaggaaactgttgactcatttctaatctctcgtcttctggacaaaggtatttcagtgtctgtagacaagatggaatcatctccatttaatagacggcaatggacctcactatcattgagggtaacagccaaagaactttctcttgtcaacaagaacaagtcatcggctattgtggaaatattctccaagtaccagaaagcagctgaagaaacaaacatggagaagaagagaagtaacaccgaaaatctctcccagcactttagaaaggggaccctgactgtgttaaagaagaagtgggagaacccagggctgggagcagagtctcacacagactctctacggaacagcagcactgagattaggcacagagcagaccatcctcctgctgaagtgacaagccacgctgcttctggagccaaagctgaccaagaagaacaaatccaccccagatctagactca

SEQ ID NO: 149160 - DNA, 2457 bp, Homo sapiens
  Payload ID: 9451
  Gene Symbol: LIMA1
  Gene Name: LIM domain and actin binding 1
  ENST ID: ENST00000552720
  CDS Start-End: 61-1227
ctggtagcagcgcagaggaaaggcggcttttagccaggtatttcagtgtctgtagacaagatggaatcatctccatttaatagacggcaatggacctcactatcattgagggtaacagccaaagaactttctcttgtcaacaagaacaagtcatcggctattgtggaaatattctccaagtaccagaaagcagctgaagaaacaaacatggagaagaagagaagtaacaccgaaaatctctcccagcactttagaaaggggaccctgactgtgttaaagaagaagtgggagaacccagggctgggagcagagtctcacacagactctctacggaacagcagcactgagattaggcacagagcagaccatcctcctgctgaagtgacaagccacgctgcttctggagccaaagctgaccaagaagaacaaatccaccccagatctagactcaggtcacctcctgaagccctcgttcagggtcgatatccccacatcaaggacggtgaggatcttaaagaccactcaacagaaagtaaaaaaatggaaaattgtctaggagaatccaggcatgaagtagaaaaatcagaaatcagtgaaaacacagatgcttcgggcaaaatagagaaatataatgttccgctgaacaggcttaagatgatgtttgagaaaggtgaaccaactcaaactaagattctccgggcccaaagccgaagtgcaagtggaaggaagatctctgaaaacagctattctctagatgacctggaaataggcccaggtcagttgtcatcttctacatttgactcggagaaaaatgagagtagacgaaatctggaacttccacgcctctcagaaacctctataaaggatcgaatggccaagtaccaggcagctgtgtccaaacaaagcagctcaaccaactatacaaatgagctgaaagccagtggtggcgaaatcaaaattcataaaatggagcaaaaggagaatgtgcccccaggtcctgaggtctgcatcacccatcaggaaggggaaaagatttctgcaaatgagaatagcctggcagtccgttccacccctgccgaagatgactcccgtgactcccaggttaagagtgaggttcaacagcctgtccatcccaagccactaagtccagattccagagcctccagtctttctgaaagttctcctcccaaagcaatgaagcttctgcctcctgctcctggtacctaatttctgctcctgccttccactttcctcctaataagtttcaggcacctgcaagagagacctgcgtggaatgtcagaagacagtctatccaatggagcgtctcttggccaaccagcaggtgtttcacatcagctgcttccgttgctcctattgcaacaacaaactcagtctaggaacatatgcatctttacatggaagaatctattgtaagcctcacttcaatcaactctttaaatctaagggcaactatgatgaaggctttgggcacagaccacacaaggatctatgggcaagcaaaaatgaaaacgaagagattttggagagaccagcccagcttgcaaatgcaagggagacccctcacagcccaggggtagaagatgcccctattgctaaggtgggtgtcctggctgcaagtatggaagccaaggcctcctctcagcaggagaaggaagacaagccagctgaaaccaagaagctgaggatcgcctggccaccccccactgaacttggaagttcaggaagtgccttggaggaagggatcaaaatgtcaaagcccaaatggcctcctgaagacgaaatcagcaagcccgaagttcctgaggatgtcgatctagatctgaagaagctaagacgatcttcttcactgaaggaaagaagccgcccattcactgtagcagcttcatttcaaagcacctctgtcaagagcccaaaaactgtgtccccacctatcaggaaaggctggagcatgtcagagcagagtgaagagtctgtgggtggaagagttgcagaaaggaaacaagtggaaaatgccaaggcttctaagaagaatgggaatgtgggaaaaacaacctggcaaaacaaagaatctaaaggagagacagggaagagaagtaaggaaggtcatagtttggagatggagaatgagaatcttgtagaaaatggtgcagactccgatgaagatgataacagcttcctcaaacaacaatctccacaagaacccaagtctctgaattggtcgagttttgtagacaacacctttgctgaagaattcactactcagaatcagaaatcccaggatgtggaactctgggagggagaagtggtcaaagagctctctgtggaagaacagataaagagaaatcggtattatgatgaggatgaggatgaagagtgacaaattgcaatgatgctgggccttaaattcatgttagtgttagcgagccactgccctt

SEQ ID NO: 149161 - DNA, 2652 bp, Homo sapiens
  Payload ID: 9451
  Gene Symbol: LIMA1
  Gene Name: LIM domain and actin binding 1
  ENST ID: ENST00000552491
  CDS Start-End: 6-1376
ataaaatggagcaaaaggagaatgtgcccccaggtcctgaggtctgcatcacccatcaggaaggggaaaagatttctgcaaatgagaatagcctggcagtccgttccacccctgccgaagatgactcccgtgactcccaggttaagagtgaggttcaacagcctgtccatcccaagccactaagtccagattccagagcctccagtctttctgaaagttctcctcccaaagcaatgaagtttcaggcacctgcaagagagacctgcgtggaatgtcagaagacagtctatccaatggagcgtctcttggccaaccagcaggtgtttcacatcagctgcttccgttgctcctattgcaacaacaaactcagtctaggaacatatgcatctttacatggaagaatctattgtaagcctcacttcaatcaactctttaaatctaagggcaactatgatgaaggctttgggcacagaccacacaaggatctatgggcaagcaaaaatgaaaacgaagagattttggagagaccagcccagcttgcaaatgcaagggagacccctcacagcccaggggtagaagatgcccctattgctaaggtgggtgtcctggctgcaagtatggaagccaaggcctcctctcagcaggagaaggaagacaagccagctgaaaccaagaagctgaggatcgcctggccaccccccactgaacttggaagttcaggaagtgccttggaggaagggatcaaaatgtcaaagcccaaatggcctcctgaagacgaaatcagcaagcccgaagttcctgaggatgtcgatctagatctgaagaagctaagacgatcttcttcactgaaggaaagaagccgcccattcactgtagcagcttcatttcaaagcacctctgtcaagagcccaaaaactgtgtccccacctatcaggaaaggctggagcatgtcagagcagagtgaagagtctgtgggtggaagagttgcagaaaggaaacaagtggaaaatgccaaggcttctaagaagaatgggaatgtgggaaaaacaacctggcaaaacaaagaatctaaaggagagacagggaagagaagtaaggaaggtcatagtttggagatggagaatgagaatcttgtagaaaatggtgcagactccgatgaagatgataacagcttcctcaaacaacaatctccacaagaacccaagtctctgaattggtcgagttttgtagacaacacctttgctgaagaattcactactcagaatcagaaatcccaggatgtggaactctgggagggagaagtggtcaaagagctctctgtggaagaacagataaagagaaatcggtattatgatgaggatgaggatgaagagtgacaaattgcaatgatgctgggccttaaattcatgttagtgttagcgagccactgccctttgtcaaaatgtgatgcacataagcaggtatcccagcatgaaatgtaatttacttggaagtaactttggaaaagaattccttcttaaaatcaaaaacaaaacaaaaaaacacaaaaaacacattctaaatactagagataactttacttaaattcttcattttagcagtgatgatatgcataagtgctgtaaggcttgtaactggggaaatattccacctgataatagcccagattctactgtattcccaaaaggcaatattaaggtagacagatgattagtagtatattgttacacactattttggaattagagaacatacagaaggaatttaggggcttaaacattacgactgaatgcactttagtataaagggcacagtttgtatatttttaaatgaataccaatttaattttttagtatttacctgttaagagattatttagtctttaaattttttaggttaattttcttgctgtgatatatatgaggaatttactactttatgtcctgctctctaaactacatcctgaactcgacgtcctgaggtataatacaacagagcactttttgaggcaattgaaaaaccaacctacactcttcggtgcttagagagatctgctgtctcccaaataagcttttgtatctgccagtgaatttactgtactccaaatgattgctttcttttctggtgatatctgtgcttctcataattactgaaagctgcaatattttagtaataccttcgggatcactgtcccccatcttccgtgttagagcaaagtgaagagtttaaaggaggaagaagaaagaactgtcttacaccacttgagctcagacctctaaaccctgtatttcccttatgatgtcccctttttgagacactaatttttaaatacttactagctctgaaatatattgatttttatcacagtattctcagggtgaaattaaaccaactataggcctttttcttgggatgattttctagtcttaaggtttggggacattataaacttgagtacatttgttgtacacagttgatattccaaattgtatggatgggagggagaggtgtcttaagctgtaggcttttctttgtactgcatttatagagatttagctttaatattttttagagatgtaaaacattctgctttcttagtcttacctagtctgaaacatttttattcaataaagattttaattaaaatttgaa

SEQ ID NO: 149162 - DNA, 3920 bp, Homo sapiens
  Payload ID: 9451
  Gene Symbol: LIMA1
  Gene Name: LIM domain and actin binding 1
  Uniprot ID: Q9UHB6
  ENST ID: ENST00000547825
  CDS Start-End: 1271-2644
tgggtcgtaatctagaataccatcactaggtgactaagtcatactcacattcctttcattgacctggtggccataaattgtttcctcccatgcctaaagattcacagagaacagaaaagtactagattactacattattagcagactaatggtgggaaatgtctatagtcatcgacctctatgtttattttattttattttatttttttattttgagatggagtttcactcttgttccccaggctggagtgcagtggcgtgatctcggctcactgcaacctctgcctccctgattcaagcgattctcctgcctcagcctcccaagtaactgggattacaagtgtgcaccaccacacgtggctaattttttgtatttttagtagagacaggatttcaccatgttcgccaggctggtcttgaactcctgacctcaggcgatccacccgcctcagcttcccaaagtgctgggattacaggcgtgagccactgcacccaggttctatgttgattttagatgtaatagatgagttaattgtaatattcaccccagtgtcctttgcaaggaaaaaaatgcaattatccttattccttatgacaataaaatgcatgttcttttatgttgaggctctgttttgagaagtaaaataaattatgtctttagtacaatatatgaattgtatatggaaaaacatgctttttgaaagtcccaccaaaaaggtttctttatggtatcattaaatataatttcagtttttatatgtatacatcatccctgtctctctttccaggccgggcatttatatatgtatggtcagtatattttctattattggcacttggcatctcctttcccctgctccagaatggtcttttctgataaaactcacaagctttgcattaccacaagctctgctgctagaagagtgaatcacaagaatgttgtatgcttggggtgttctgtgtgcctgtgttgatgtgtctgtattctaatgagcaatccagttttacactagcatacagatatttaactctgaggtatgtgtccacaaagctgcttttgtcatttcactagtcagtgggttttgcttgtgagagttagggggttgatttgacccgaggcttcttagaagaattttttaacattccaagtttatctaatagatgtgctatgaagagaacagaatgatgggactttaaaaaaatttttacagttatttttattttgtagaatgagctgaaagccagtggtggcgaaatcaaaattcataaaatggagcaaaaggagaatgtgcccccaggtcctgaggtctgcatcacccatcaggaaggggaaaagatttctgcaaatgagaatagcctggcagtccgttccacccctgccgaagatgactcccgtgactcccaggttaagagtgaggttcaacagcctgtccatcccaagccactaagtccagattccagagcctccagtctttctgaaagttctcctcccaaagcaatgaagaagtttcaggcacctgcaagagagacctgcgtggaatgtcagaagacagtctatccaatggagcgtctcttggccaaccagcaggtgtttcacatcagctgcttccgttgctcctattgcaacaacaaactcagtctaggaacatatgcatctttacatggaagaatctattgtaagcctcacttcaatcaactctttaaatctaagggcaactatgatgaaggctttgggcacagaccacacaaggatctatgggcaagcaaaaatgaaaacgaagagattttggagagaccagcccagcttgcaaatgcaagggagacccctcacagcccaggggtagaagatgcccctattgctaaggtgggtgtcctggctgcaagtatggaagccaaggcctcctctcagcaggagaaggaagacaagccagctgaaaccaagaagctgaggatcgcctggccaccccccactgaacttggaagttcaggaagtgccttggaggaagggatcaaaatgtcaaagcccaaatggcctcctgaagacgaaatcagcaagcccgaagttcctgaggatgtcgatctagatctgaagaagctaagacgatcttcttcactgaaggaaagaagccgcccattcactgtagcagcttcatttcaaagcacctctgtcaagagcccaaaaactgtgtccccacctatcaggaaaggctggagcatgtcagagcagagtgaagagtctgtgggtggaagagttgcagaaaggaaacaagtggaaaatgccaaggcttctaagaagaatgggaatgtgggaaaaacaacctggcaaaacaaagaatctaaaggagagacagggaagagaagtaaggaaggtcatagtttggagatggagaatgagaatcttgtagaaaatggtgcagactccgatgaagatgataacagcttcctcaaacaacaatctccacaagaacccaagtctctgaattggtcgagttttgtagacaacacctttgctgaagaattcactactcagaatcagaaatcccaggatgtggaactctgggagggagaagtggtcaaagagctctctgtggaagaacagataaagagaaatcggtattatgatgaggatgaggatgaagagtgacaaattgcaatgatgctgggccttaaattcatgttagtgttagcgagccactgccctttgtcaaaatgtgatgcacataagcaggtatcccagcatgaaatgtaatttacttggaagtaactttggaaaagaattccttcttaaaatcaaaaacaaaacaaaaaaacacaaaaaacacattctaaatactagagataactttacttaaattcttcattttagcagtgatgatatgcataagtgctgtaaggcttgtaactggggaaatattccacctgataatagcccagattctactgtattcccaaaaggcaatattaaggtagacagatgattagtagtatattgttacacactattttggaattagagaacatacagaaggaatttaggggcttaaacattacgactgaatgcactttagtataaagggcacagtttgtatatttttaaatgaataccaatttaattttttagtatttacctgttaagagattatttagtctttaaattttttaggttaattttcttgctgtgatatatatgaggaatttactactttatgtcctgctctctaaactacatcctgaactcgacgtcctgaggtataatacaacagagcactttttgaggcaattgaaaaaccaacctacactcttcggtgcttagagagatctgctgtctcccaaataagcttttgtatctgccagtgaatttactgtactccaaatgattgctttcttttctggtgatatctgtgcttctcataattactgaaagctgcaatattttagtaataccttcgggatcactgtcccccatcttccgtgttagagcaaagtgaagagtttaaaggaggaagaagaaagaactgtcttacaccacttgagctcagacctctaaaccctgtatttcccttatgatgtcccctttttgagacactaatttttaaatacttactagctctgaaatatattgatttttatcacagtattctcagggtgaaattaaaccaactataggcctttttcttgggatgattttctagtcttaaggtttggggacattataaacttgagtacatttgttgtacacagttgatattccaaattgtatggatgggagggagaggtgtcttaagctgtaggcttttctttgtactgcatttatagagatttagctttaatattttttagagatgtaaaacattctgctttcttagtcttacctagtctgaaacatttttattcaataaagattttaattaaaatttgaa

SEQ ID NO: 149163 - DNA, 3612 bp, Homo sapiens
  Payload ID: 9451
  Gene Symbol: LIMA1
  Gene Name: LIM domain and actin binding 1
  Uniprot ID: Q9UHB6
  ENST ID: ENST00000552783
  CDS Start-End: 536-2338
ttcctgcttcagctcctgagtttttctctcttcccctctccctctccctctgccgggtggatgctttctccatgtggcaaggctgtaactgttcacagctgtctgaaacagcagtggaccaggagcagcttggagttttaactttcattttacaaagaacaacatgtttgaatgtttcagcaggcaagttataactggcatctacttcttgttcttctagaacaccgaaaatctctcccagcactttagaaaggggaccctgactgtgttaaagaagaagtgggagaacccagggctgggagcagagtctcacacagactctctacggaacagcagcactgagattaggcacagagcagaccatcctcctgctgaagtgacaagccacgctgcttctggagccaaagctgaccaagaagaacaaatccaccccagatctagactcaggtcacctcctgaagccctcgttcagggtcgatatccccacatcaaggacggtgaggatcttaaagaccactcaacagaaagtaaaaaaatggaaaattgtctaggagaatccaggcatgaagtagaaaaatcagaaatcagtgaaaacacagatgcttcgggcaaaatagagaaatataatgttccgctgaacaggcttaagatgatgtttgagaaaggtgaaccaactcaaactaagattctccgggcccaaagccgaagtgcaagtggaaggaagatctctgaaaacagctattctctagatgacctggaaataggcccaggtcagttgtcatcttctacatttgactcggagaaaaatgagagtagacgaaatctggaacttccacgcctctcagaaacctctataaaggatcgaatggccaagtaccaggcagctgtgtccaaacaaagcagctcaaccaactatacaaatgagctgaaagccagtggtggcgaaatcaaaattcataaaatggagcaaaaggagaatgtgcccccaggtcctgaggtctgcatcacccatcaggaaggggaaaagatttctgcaaatgagaatagcctggcagtccgttccacccctgccgaagatgactccccaggtgactcccaggttaagagtgaggttcaacagcctgtccatcccaagccactaagtccagattccagagcctccagtctttctgaaagttctcctcccaaagcaatgaagaagtttcaggcacctgcaagagagacctgcgtggaatgtcagaagacagtctatccaatggagcgtctcttggccaaccagcaggtgtttcacatcagctgcttccgttgctcctattgcaacaacaaactcagtctaggaacatatgcatctttacatggaagaatctattgtaagcctcacttcaatcaactctttaaatctaagggcaactatgatgaaggctttgggcacagaccacacaaggatctatgggcaagcaaaaatgaaaacgaagagattttggagagaccagcccagcttgcaaatgcaagggagacccctcacagcccaggggtagaagatgcccctattgctaaggtgggtgtcctggctgcaagtatggaagccaaggcctcctctcagcaggagaaggaagacaagccagctgaaaccaagaagctgaggatcgcctggccaccccccactgaacttggaagttcaggaagtgccttggaggaagggatcaaaatgtcaaagcccaaatggcctcctgaagacgaaatcagcaagcccgaagttcctgaggatgtcgatctagatctgaagaagctaagacgatcttcttcactgaaggaaagaagccgcccattcactgtagcagcttcatttcaaagcacctctgtcaagagcccaaaaactgtgtccccacctatcaggaaaggctggagcatgtcagagcagagtgaagagtctgtgggtggaagagttgcagaaaggaaacaagtggaaaatgccaaggcttctaagaagaatgggaatgtgggaaaaacaacctggcaaaacaaagaatctaaaggagagacagggaagagaagtaaggaaggtcatagtttggagatggagaatgagaatcttgtagaaaatggtgcagactccgatgaagatgataacagcttcctcaaacaacaatctccacaagaacccaagtctctgaattggtcgagttttgtagacaacacctttgctgaagaattcactactcagaatcagaaatcccaggatgtggaactctgggagggagaagtggtcaaagagctctctgtggaagaacagataaagagaaatcggtattatgatgaggatgaggatgaagagtgacaaattgcaatgatgctgggccttaaattcatgttagtgttagcgagccactgccctttgtcaaaatgtgatgcacataagcaggtatcccagcatgaaatgtaatttacttggaagtaactttggaaaagaattccttcttaaaatcaaaaacaaaacaaaaaaacacaaaaaacacattctaaatactagagataactttacttaaattcttcattttagcagtgatgatatgcataagtgctgtaaggcttgtaactggggaaatattccacctgataatagcccagattctactgtattcccaaaaggcaatattaaggtagacagatgattagtagtatattgttacacactattttggaattagagaacatacagaaggaatttaggggcttaaacattacgactgaatgcactttagtataaagggcacagtttgtatatttttaaatgaataccaatttaattttttagtatttacctgttaagagattatttagtctttaaattttttaggttaattttcttgctgtgatatatatgaggaatttactactttatgtcctgctctctaaactacatcctgaactcgacgtcctgaggtataatacaacagagcactttttgaggcaattgaaaaaccaacctacactcttcggtgcttagagagatctgctgtctcccaaataagcttttgtatctgccagtgaatttactgtactccaaatgattgctttcttttctggtgatatctgtgcttctcataattactgaaagctgcaatattttagtaataccttcgggatcactgtcccccatcttccgtgttagagcaaagtgaagagtttaaaggaggaagaagaaagaactgtcttacaccacttgagctcagacctctaaaccctgtatttcccttatgatgtcccctttttgagacactaatttttaaatacttactagctctgaaatatattgatttttatcacagtattctcagggtgaaattaaaccaactataggcctttttcttgggatgattttctagtcttaaggtttggggacattataaacttgagtacatttgttgtacacagttgatattccaaattgtatggatgggagggagaggtgtcttaagctgtaggcttttctttgtactgcatttatagagatttagctttaatattttttagagatgtaaaacattctgctttcttagtcttacctagtctgaaacatttttattcaataaagattttaattaaaatttg

SEQ ID NO: 149164 - DNA, 567 bp, Homo sapiens
  Payload ID: 9451
  Gene Symbol: LIMA1
  Gene Name: LIM domain and actin binding 1
  ENST ID: ENST00000550592
  CDS Start-End: 235-567
agatcagttatgctcttcggttgccaagagctgcaagtagtactttatttttcttttacttctggtaagctgtgaattagcagtactttattattatttttttttagttttcaagactcctggatcagaaacaaagtggtactttatatttttcactcttcaaataaggaaactgttgactcatttctaatctctcgtcttctggacaaaggtatttcagtgtctgtagacaagatggaatcatctccatttaatagacggcaatggacctcactatcattgagggtaacagccaaagaactttctcttgtcaacaagaacaagtcatcggctattgtggaaatattctccaagtaccagaaagcagctgaagaaacaaacatggagaagaagagaagtaacaccgaaaatctctcccagcactttagaaaggggaccctgactgtgttaaagaagaagtgggagaacccagggctgggagcagagtctcacacagactctctacggaacagcagcactgagattaggcacagagcagaccatcctcctgctgaagtgacaagccac

SEQ ID NO: 149165 - DNA, 2162 bp, Homo sapiens
  Payload ID: 9451
  Gene Symbol: LIMA1
  Gene Name: LIM domain and actin binding 1
  ENST ID: ENST00000552909
  CDS Start-End: 187-1983
cacagagcagaccatcctcctgctgaagtgacaagccacgctgcttctggagccaaagctgaccaagaagaacaaatccaccccagatctagactcaggtcacctcctgaagccctcgttcagggtcgatatccccacatcaaggacggtgaggatcttaaagaccactcaacagaaagtaaaaaaatggaaaattgtctaggagaatccaggcatgaagtagaaaaatcagaaatcagtgaaaacacagatgcttcgggcaaaatagagaaatataatgttccgctgaacaggcttaagatgatgtttgagaaaggtgaaccaactcaaactaagattctccgggcccaaagccgaagtgcaagtggaaggaagatctctgaaaacagctattctctagatgacctggaaataggcccaggtcagttgtcatcttctacatttgactcggagaaaaatgagagtagacgaaatctggaacttccacgcctctcagaaacctctataaaggatcgaatggccaagtaccaggcagctgtgtccaaacaaagcagctcaaccaactatacaaatgagctgaaagccagtggtggcgaaatcaaaattcataaaatggagcaaaaggagaatgtgcccccaggtcctgaggtctgcatcacccatcaggaaggggaaaagatttctgcaaatgagaatagcctggcagtccgttccacccctgccgaagatgactcccgtgactcccaggttaagagtgaggttcaacagcctgtccatcccaagccactaagtccagattccagagcctccagtctttctgaaagttctcctcccaaagcaatgaagtttcaggcacctgcaagagagacctgcgtggaatgtcagaagacagtctatccaatggagcgtctcttggccaaccagcaggtgtttcacatcagctgcttccgttgctcctattgcaacaacaaactcagtctaggaacatatgcatctttacatggaagaatctattgtaagcctcacttcaatcaactctttaaatctaagggcaactatgatgaaggctttgggcacagaccacacaaggatctatgggcaagcaaaaatgaaaacgaagagattttggagagaccagcccagcttgcaaatgcaagggagacccctcacagcccaggggtagaagatgcccctattgctaaggtgggtgtcctggctgcaagtatggaagccaaggcctcctctcagcaggagaaggaagacaagccagctgaaaccaagaagctgaggatcgcctggccaccccccactgaacttggaagttcaggaagtgccttggaggaagggatcaaaatgtcaaagcccaaatggcctcctgaagacgaaatcagcaagcccgaagttcctgaggatgtcgatctagatctgaagaagctaagacgatcttcttcactgaaggaaagaagccgcccattcactgtagcagcttcatttcaaagcacctctgtcaagagcccaaaaactgtgtccccacctatcaggaaaggctggagcatgtcagagcagagtgaagagtctgtgggtggaagagttgcagaaaggaaacaagtggaaaatgccaaggcttctaagaagaatgggaatgtgggaaaaacaacctggcaaaacaaagaatctaaaggagagacagggaagagaagtaaggaaggtcatagtttggagatggagaatgagaatcttgtagaaaatggtgcagactccgatgaagatgataacagcttcctcaaacaacaatctccacaagaacccaagtctctgaattggtcgagttttgtagacaacacctttgctgaagaattcactactcagaatcagaaatcccaggatgtggaactctgggagggagaagtggtcaaagagctctctgtggaagaacagataaagagaaatcggtattatgatgaggatgaggatgaagagtgacaaattgcaatgatgctgggccttaaattcatgttagtgttagcgagccactgccctttgtcaaaatgtgatgcacataagcaggtatcccagcatgaaatgtaatttacttggaagtaactttggaaaagaattccttcttaaaatcaaaaacaaaacaaaaaaacacaaaaaacaca

SEQ ID NO: 149166 - DNA, 3254 bp, Homo sapiens
  Payload ID: 9451
  Gene Symbol: LIMA1
  Gene Name: LIM domain and actin binding 1
  Uniprot ID: Q9UHB6
  ENST ID: ENST00000552823
  CDS Start-End: 179-1978
agaccatcctcctgctgaagtgacaagccacgctgcttctggagccaaagctgaccaagaagaacaaatccaccccagatctagactcaggtcacctcctgaagccctcgttcagggtcgatatccccacatcaaggacggtgaggatcttaaagaccactcaacagaaagtaaaaaaatggaaaattgtctaggagaatccaggcatgaagtagaaaaatcagaaatcagtgaaaacacagatgcttcgggcaaaatagagaaatataatgttccgctgaacaggcttaagatgatgtttgagaaaggtgaaccaactcaaactaagattctccgggcccaaagccgaagtgcaagtggaaggaagatctctgaaaacagctattctctagatgacctggaaataggcccaggtcagttgtcatcttctacatttgactcggagaaaaatgagagtagacgaaatctggaacttccacgcctctcagaaacctctataaaggatcgaatggccaagtaccaggcagctgtgtccaaacaaagcagctcaaccaactatacaaatgagctgaaagccagtggtggcgaaatcaaaattcataaaatggagcaaaaggagaatgtgcccccaggtcctgaggtctgcatcacccatcaggaaggggaaaagatttctgcaaatgagaatagcctggcagtccgttccacccctgccgaagatgactcccgtgactcccaggttaagagtgaggttcaacagcctgtccatcccaagccactaagtccagattccagagcctccagtctttctgaaagttctcctcccaaagcaatgaagaagtttcaggcacctgcaagagagacctgcgtggaatgtcagaagacagtctatccaatggagcgtctcttggccaaccagcaggtgtttcacatcagctgcttccgttgctcctattgcaacaacaaactcagtctaggaacatatgcatctttacatggaagaatctattgtaagcctcacttcaatcaactctttaaatctaagggcaactatgatgaaggctttgggcacagaccacacaaggatctatgggcaagcaaaaatgaaaacgaagagattttggagagaccagcccagcttgcaaatgcaagggagacccctcacagcccaggggtagaagatgcccctattgctaaggtgggtgtcctggctgcaagtatggaagccaaggcctcctctcagcaggagaaggaagacaagccagctgaaaccaagaagctgaggatcgcctggccaccccccactgaacttggaagttcaggaagtgccttggaggaagggatcaaaatgtcaaagcccaaatggcctcctgaagacgaaatcagcaagcccgaagttcctgaggatgtcgatctagatctgaagaagctaagacgatcttcttcactgaaggaaagaagccgcccattcactgtagcagcttcatttcaaagcacctctgtcaagagcccaaaaactgtgtccccacctatcaggaaaggctggagcatgtcagagcagagtgaagagtctgtgggtggaagagttgcagaaaggaaacaagtggaaaatgccaaggcttctaagaagaatgggaatgtgggaaaaacaacctggcaaaacaaagaatctaaaggagagacagggaagagaagtaaggaaggtcatagtttggagatggagaatgagaatcttgtagaaaatggtgcagactccgatgaagatgataacagcttcctcaaacaacaatctccacaagaacccaagtctctgaattggtcgagttttgtagacaacacctttgctgaagaattcactactcagaatcagaaatcccaggatgtggaactctgggagggagaagtggtcaaagagctctctgtggaagaacagataaagagaaatcggtattatgatgaggatgaggatgaagagtgacaaattgcaatgatgctgggccttaaattcatgttagtgttagcgagccactgccctttgtcaaaatgtgatgcacataagcaggtatcccagcatgaaatgtaatttacttggaagtaactttggaaaagaattccttcttaaaatcaaaaacaaaacaaaaaaacacaaaaaacacattctaaatactagagataactttacttaaattcttcattttagcagtgatgatatgcataagtgctgtaaggcttgtaactggggaaatattccacctgataatagcccagattctactgtattcccaaaaggcaatattaaggtagacagatgattagtagtatattgttacacactattttggaattagagaacatacagaaggaatttaggggcttaaacattacgactgaatgcactttagtataaagggcacagtttgtatatttttaaatgaataccaatttaattttttagtatttacctgttaagagattatttagtctttaaattttttaggttaattttcttgctgtgatatatatgaggaatttactactttatgtcctgctctctaaactacatcctgaactcgacgtcctgaggtataatacaacagagcactttttgaggcaattgaaaaaccaacctacactcttcggtgcttagagagatctgctgtctcccaaataagcttttgtatctgccagtgaatttactgtactccaaatgattgctttcttttctggtgatatctgtgcttctcataattactgaaagctgcaatattttagtaataccttcgggatcactgtcccccatcttccgtgttagagcaaagtgaagagtttaaaggaggaagaagaaagaactgtcttacaccacttgagctcagacctctaaaccctgtatttcccttatgatgtcccctttttgagacactaatttttaaatacttactagctctgaaatatattgatttttatcacagtattctcagggtgaaattaaaccaactataggcctttttcttgggatgattttctagtcttaaggtttggggacattataaacttgagtacatttgttgtacacagttgatattccaaattgtatggatgggagggagaggtgtcttaagctgtaggcttttctttgtactgcatttatagagatttagctttaatattttttagagatgtaaaacattctgctttcttagtcttacctagtctgaaacatttttattcaataaagattttaattaaaatttgaa

SEQ ID NO: 149167 - DNA, 2285 bp, Homo sapiens
  Payload ID: 9452
  Gene Symbol: LDB1
  Gene Name: LIM domain binding 1
  Uniprot ID: Q86U70
  ENST ID: ENST00000361198
  CDS Start-End: 625-1752
gggagaaaggcaggcagccggcgggcgctgcgtgtgtgtttgagtgtgcgagtgtgagtgagtgtgagtgccgggtcctgcctctcctggtgcccccagcagaggggcccggtggcctggggagggcgggcgggctgctcggaggcagaggcagcaagaggcggcggcggggagagccgagaaggaggaggaggagagaggaaagagcggagcagccattgttgagggaaaccttgcaaacaaagaaggctccggactccccgcggccccccgccccccaggccggccccctggcccccggcccccggcccagtggccattgtaactttcccccgggacagcggccgccgcggggcgggccgaggcagtgcgtgcgagtctttgtgcggccggcggactggagctcccagtcgggcctgcccgtcccactcgggacatgagctgctgaagttgtccccccgtcagccctcacccctgccaggactcctctgggcttgcagtcgctcccccgtacctctcctggccccctcagttctcccaggttgttcctcaaagtcattcaagctgtactcgccgaaggagcccccgaacggcaacgcctttccccccttccatcccggcaccatgctggatagggatgtgggcccaactcccatgtatccgcctacatacctggagccagggattgggaggcacacaccatatggcaaccaaactgactacagaatatttgagcttaacaaacggcttcagaactggacagaggagtgtgacaatctctggtgggatgcattcacgactgagttctttgaggatgatgccatgttgaccatcactttctgcctggaggatggaccaaagagatataccattggccggaccctgatcccacgctacttccgcagcatctttgaggggggtgctacggagctgtactatgttcttaagcaccccaaggaggcattccacagcaactttgtgtccctcgactgtgaccagggcagcatggtgacccagcatggcaagcccatgttcacccaggtgtgtgtggagggccggttgtacctggagttcatgtttgacgacatgatgcggataaagacgtggcacttcagcatccggcagcaccgagagctcatcccccgcagcatccttgccatgcatgcccaagacccccagatgttggatcagctctccaaaaacatcactcggtgtgggctgtccaattccactctcaactacctccgactctgtgtgatactcgagcccatgcaagagctcatgtcacgccacaagacctacagcctcagcccccgcgactgcctcaagacctgccttttccagaagtggcagcgcatggtagcaccccctgcggagcccacacgtcagcagcccagcaaacggcggaaacggaagatgtcagggggcagcaccatgagctctggtggtggcaacaccaacaacagcaacagcaagaagaagagcccagctagcaccttcgccctctccagccaggtacctgatgtgatggtggtgggggagcccaccctgatgggcggggagttcggggacgaggacgagaggctcatcacccggctggagaacacccagtttgacgcagccaacggcattgacgacgaggacagctttaacaactcccctgcactgggcgccaacagcccctggaacagcaagcctccgtccagccaagaaagcaaatcggagaaccccacgtcacaggcctcccagtaaaaggccctgctgtggccacccagtgctctgcctacctgccccacccctcacagccccagggagcagaagacagaatgaagagactgagcatctaaaatgggcagcctccatccacccgcttcagggaggaactggactctctgggggcaggtgccaagatttgcccccccagtggccctgggctgggcctggcctctacagagccttttagggggagggggtactcatgtggatgcctacttggaacctgggcctctgagacatgtcctgaccaccccccagggcatttgcctccatcttcaccccagattgtgggtttcccatccccctgactttacccctttcaagcctggggttgtctatacccacagcccttagggacttaaagttacggggcttcgttgaatgctccttcccctaggcagctggtaatagaggggtaaagctctgggcccctcctccctgctgccacttatcccagctccaagtttttttaaaaataatattattaaaaatgtaagttaaaaaaaaaa

SEQ ID NO: 149168 - DNA, 2089 bp, Homo sapiens
  Payload ID: 9452
  Gene Symbol: LDB1
  Gene Name: LIM domain binding 1
  Uniprot ID: Q86U70
  ENST ID: ENST00000425280
  CDS Start-End: 344-1579
cgagggcggagaggggggcgctcggcgacggcggcgggagcgcacagacacgcacacgcacacgcgcacacacgcacacacggacacacactccgcggactcacacccgcgcgcacacacgcagaggccgctcgccttcctgcctggcttccttcctgtctgctccgcgcctgacaggcccctcgccgcagccaggggccgcccgcaccgggccgaggccgggccgggccggcggcgagcgcagcgggggccgcgggcggcggcggcggctcatgcccggcctgtccccgcgaggggcgggcaccgtgactcggctgggcccccagaggcgggcgatgtgaagatgtcagtgggctgtgcctgtcctggttgttcctcaaagtcattcaagctgtactcgccgaaggagcccccgaacggcaacgcctttccccccttccatcccggcaccatgctggatagggatgtgggcccaactcccatgtatccgcctacatacctggagccagggattgggaggcacacaccatatggcaaccaaactgactacagaatatttgagcttaacaaacggcttcagaactggacagaggagtgtgacaatctctggtgggatgcattcacgactgagttctttgaggatgatgccatgttgaccatcactttctgcctggaggatggaccaaagagatataccattggccggaccctgatcccacgctacttccgcagcatctttgaggggggtgctacggagctgtactatgttcttaagcaccccaaggaggcattccacagcaactttgtgtccctcgactgtgaccagggcagcatggtgacccagcatggcaagcccatgttcacccaggtgtgtgtggagggccggttgtacctggagttcatgtttgacgacatgatgcggataaagacgtggcacttcagcatccggcagcaccgagagctcatcccccgcagcatccttgccatgcatgcccaagacccccagatgttggatcagctctccaaaaacatcactcggtgtgggctgtccaattccactctcaactacctccgactctgtgtgatactcgagcccatgcaagagctcatgtcacgccacaagacctacagcctcagcccccgcgactgcctcaagacctgccttttccagaagtggcagcgcatggtagcaccccctgcggagcccacacgtcagcagcccagcaaacggcggaaacggaagatgtcagggggcagcaccatgagctctggtggtggcaacaccaacaacagcaacagcaagaagaagagcccagctagcaccttcgccctctccagccaggtacctgatgtgatggtggtgggggagcccaccctgatgggcggggagttcggggacgaggacgagaggctcatcacccggctggagaacacccagtttgacgcagccaacggcattgacgacgaggacagctttaacaactcccctgcactgggcgccaacagcccctggaacagcaagcctccgtccagccaagaaagcaaatcggagaaccccacgtcacaggcctcccagtaaaaggccctgctgtggccacccagtgctctgcctacctgccccacccctcacagccccagggagcagaagacagaatgaagagactgagcatctaaaatgggcagcctccatccacccgcttcagggaggaactggactctctgggggcaggtgccaagatttgcccccccagtggccctgggctgggcctggcctctacagagccttttagggggagggggtactcatgtggatgcctacttggaacctgggcctctgagacatgtcctgaccaccccccagggcatttgcctccatcttcaccccagattgtgggtttcccatccccctgactttacccctttcaagcctggggttgtctatacccacagcccttagggacttaaagttacggggcttcgttgaatgctccttcccctaggcagctggtaatagaggggtaaagctctgggcccctcctccctgctgccacttatcccagctccaagtttttttaaaaataatattatt

SEQ ID NO: 149169 - DNA, 2548 bp, Homo sapiens
  Payload ID: 9453
  Gene Symbol: LDB2
  Gene Name: LIM domain binding 2
  Uniprot ID: O43679
  ENST ID: ENST00000304523
  CDS Start-End: 325-1446
ccctccctcccttcttccctcccttcctccataccaacctccctccctctctggagctcctgctctctccctctccctcctctcccgtgctccctccctccctccctctttccctccctcctctcctctccctctcctctcctgctatagagggctccgacagcagttcccagccagcgtgttcagcctgcctgcctgcctgcctctgtgtgtgtgtgagcgtgtgtgcgtgcgtctactttgtactgggaagaacacagcccatgtgctctgcatggacgttactgatactctgtttagcttgattttcgaaaagcaggcaagatgtccagcacaccacatgaccccttctattcttctcctttcggcccattttataggaggcatacaccatacatggtacagccagagtaccgaatctatgagatgaacaagagactgcagtctcgcacagaggatagtgacaacctctggtgggacgcctttgccactgaattttttgaagatgacgccacattaaccctttcattttgtttggaagatggaccaaagcgatacactatcggcaggaccctcatcccccgttactttagcactgtgtttgaaggaggggtgaccgacctgtattacattctcaaacactcgaaagagtcataccacaactcatccatcacggtggactgcgaccagtgtaccatggtcacccagcacgggaagcccatgtttaccaaggtatgtacagaaggcagactgatcttggagttcacctttgatgatctcatgagaatcaaaacatggcactttaccattagacaataccgagagttagtcccgagaagcatcctagccatgcatgcacaagatcctcaggtcctggatcagctgtccaaaaacatcaccaggatggggctaacaaacttcaccctcaactacctcaggttgtgtgtaatattggagccaatgcaggaactgatgtcgagacataaaacttacaacctcagtccccgagactgcctgaagacctgcttgtttcagaagtggcagaggatggtggctccgccagcagaacccacaaggcaaccaacaaccaaacggagaaaaaggaaaaattccaccagcagcacttccaacagcagcgctgggaacaatgcaaacagcactggcagcaagaagaagaccacagctgcaaacctgagtctgtccagtcaggtacctgatgtgatggtggtaggagagccaactctgatgggaggtgagtttggggacgaggacgaaaggctaatcactagattagaaaacacgcaatatgatgcggccaacggcatggacgacgaggaggacttcaacaattcacccgcgctggggaacaacagcccgtggaacagtaaacctcccgccactcaagagaccaaatcagaaaaccccccaccccaggcttcccaataagatgatcggcaccagaatccactgtcaataggcccgtgggtgatcattacaattgcaaatctttacttacaggagaggaaacagaagagataaaaacttttccatgcaaatatctatttctaaaccacaatgatctgattttctttcttctttctttttttctaattgagaggattattcccagtaagcttccatgaccctttcttggaggccttcacaggtaatacagatactggcactgattgtaattaaaatgagagaaaactctagcgcatcttctggcacggttttaacaacgtgtttgtgttgaatttcctttttatgcatcaaacgaaggccatattgtccataaatgctcagtgctcaggatctcattaatatgccgaacctaactacagatgactttttaatattgtaaaatattttctgctttttgacttgcatctgagagtttcttgtttcagtaaaaaaagaaaagacaaaaaaatcagctttggaaagtaatttaaatgtaccttattttttttttctttatgttttctttcattgggcaacagctaagagggcccagcaaggtaatttatggttgagctgatgtcaattggttcttgtcttgagtcgactcaatttagcccaagtgctgaaacaagaaatgtcatttttttcatcaaagacaccagggcagatttttaagtaaagaaagacaattggacccttaagaatttatgcatttgtaaagttgctgttgatccaaatattttcaagccatgtaatccattggttttgtgggcagtttaataaacctgaacctttgtgtgttttctaattgtacctgagttgaccatcctttctttttatagtatatttcttgtatgatattttgtaaagctctcacctggttcttttatggggacttttcgtttttgggcaactccagtgtatttatgtgaaactttataagagaattaatttttccatttgcatattaatatgttcctccacacatgtaaaggcacagtggctccgtgtgttaaaaaacagctgtattttatgtatgctttactgataagtgtgccaataataaactgtgttaatgaccaaa

SEQ ID NO: 149170 - DNA, 2476 bp, Homo sapiens
  Payload ID: 9453
  Gene Symbol: LDB2
  Gene Name: LIM domain binding 2
  Uniprot ID: O43679
  ENST ID: ENST00000441778
  CDS Start-End: 110-1105
gtgagcgtgtgtgcgtgcgtctactttgtactgggaagaacacagcccatgtgctctgcatggacgttactgatactctgtttagcttgattttcgaaaagcaggcaagatgtccagcacaccacatgaccccttctattcttctcctttcggcccattttataggaggcatacaccatacatggtacagccagagtaccgaatctatgagatgaacaagagactgcagtctcgcacagaggatagtgacaacctctggtgggacgcctttgccactgaattttttgaagatgacgccacattaaccctttcattttgtttggaagatggaccaaagcgatacactatcggcaggaccctcatcccccgttactttagcactgtgtttgaaggaggggtgaccgacctgtattacattctcaaacactcgaaagagtcataccacaactcatccatcacggtggactgcgaccagtgtaccatggtcacccagcacgggaagcccatgtttaccaaggtatgtacagaaggcagactgatcttggagttcacctttgatgatctcatgagaatcaaaacatggcactttaccattagacaataccgagagttagtcccgagaagcatcctagccatgcatgcacaagatcctcaggtcctggatcagctgtccaaaaacatcaccaggatggggctaacaaacttcaccctcaactacctcaggttgtgtgtaatattggagccaatgcaggaactgatgtcgagacataaaacttacaacctcagtccccgagactgcctgaagacctgcttgtttcagaagtggcagaggatggtggctccgccagcagaacccacaaggcaaccaacaaccaaacggagaaaaaggaaaaattccaccagcagcacttccaacagcagcgctgggaacaatgcaaacagcactggcagcaagaagaagaccacagctgcaaacctgagtctgtccagtcaggtacctgggctaggagcgatcccgaactgcagcctcaaccctgggagggatggagacctgtgtcattcaacagcagtgaccccttctggccaatttaaggagaagcattgaggggccctgaaaggagtcacttccagtcctcctcagaggatgtgatggtggtaggagagccaactctgatgggaggtgagtttggggacgaggacgaaaggctaatcactagattagaaaacacgcaatatgatgcggccaacggcatggacgacgaggaggacttcaacaattcacccgcgctggggaacaacagcccgtggaacagtaaacctcccgccactcaagagaccaaatcagaaaaccccccaccccaggcttcccaataagatgatcggcaccagaatccactgtcaataggcccgtgggtgatcattacaattgcaaatctttacttacaggagaggaaacagaagagataaaaacttttccatgcaaatatctatttctaaaccacaatgatctgattttctttcttctttctttttttctaattgagaggattattcccagtaagcttccatgaccctttcttggaggccttcacaggtaatacagatactggcactgattgtaattaaaatgagagaaaactctagcgcatcttctggcacggttttaacaacgtgtttgtgttgaatttcctttttatgcatcaaacgaaggccatattgtccataaatgctcagtgctcaggatctcattaatatgccgaacctaactacagatgactttttaatattgtaaaatattttctgctttttgacttgcatctgagagtttcttgtttcagtaaaaaaagaaaagacaaaaaaatcagctttggaaagtaatttaaatgtaccttattttttttttctttatgttttctttcattgggcaacagctaagagggcccagcaaggtaatttatggttgagctgatgtcaattggttcttgtcttgagtcgactcaatttagcccaagtgctgaaacaagaaatgtcatttttttcatcaaagacaccagggcagatttttaagtaaagaaagacaattggacccttaagaatttatgcatttgtaaagttgctgttgatccaaatattttcaagccatgtaatccattggttttgtgggcagtttaataaacctgaacctttgtgtgttttctaattgtacctgagttgaccatcctttctttttatagtatatttcttgtatgatattttgtaaagctctcacctggttcttttatggggacttttcgtttttgggcaactccagtgtatttatgtgaaactttataagagaattaatttttccatttgcatattaatatgttcctccacacatgtaaaggcacagtggctccgtgtgttaaaaaacagctgtattttatgtatgctttactgataagtgtgccaataataaactgtgttaatgaccaaa

SEQ ID NO: 149171 - DNA, 567 bp, Homo sapiens
  Payload ID: 9453
  Gene Symbol: LDB2
  Gene Name: LIM domain binding 2
  ENST ID: ENST00000506732
  CDS Start-End: 75-567
gagggctccgacagcagttcccagccagcgtgttcagcctgcctgcctgcctgcctctgaggcatacaccatacatggtacagccagagtaccgaatctatgagatgaacaagagactgcagtctcgcacagaggatagtgacaacctctggtgggacgcctttgccactgaattttttgaagatgacgccacattaaccctttcattttgtttggaagatggaccaaagcgatacactatcggcaggaccctcatcccccgttactttagcactgtgtttgaaggaggggtgaccgacctgtattacattctcaaacactcgaaagagtcataccacaactcatccatcacggtggactgcgaccagtgtaccatggtcacccagcacgggaagcccatgtttaccaaggtatgtacagaaggcagactgatcttggagttcacctttgatgatctcatgagaatcaaaacatggcactttaccattagacaataccgagagttagtcccgagaagcatcctagccatgcatgcacaagatcctcaggtcctggatcagctgtcca

SEQ ID NO: 149172 - DNA, 2295 bp, Homo sapiens
  Payload ID: 9453
  Gene Symbol: LDB2
  Gene Name: LIM domain binding 2
  ENST ID: ENST00000515064
  CDS Start-End: 78-1193
gggaagaacacagcccatgtgctctgcatggacgttactgatactctgtttagcttgattttcgaaaagcaggcaagatgtccagcacaccacatgaccccttctattcttctcctttcggcccattttataggaggcatacaccatacatggtacagccagagtaccgaatctatgagatgaacaagagactgcagtctcgcacagaggatagtgacaacctctggtgggacgcctttgccactgaattttttgaagatgacgccacattaaccctttcattttgtttggaagatggaccaaagcgatacactatcggcaggaccctcatcccccgttactttagcactgtgtttgaaggaggggtgaccgacctgtattacattctcaaacactcgaaagagtcataccacaactcatccatcacggtggactgcgaccagtgtaccatggtcacccagcacgggaagcccatgtttaccaaggtatgtacagaaggcagactgatcttggagttcacctttgatgatctcatgagaatcaaaacatggcactttaccattagacaataccgagagttagtcccgagaagcatcctagccatgcatgcacaagatcctcaggtcctggatcagctgtccaaaaacatcaccaggatggggctaacaaacttcaccctcaactacctcaggttgtgtgtaatattggagccaatgcaggaactgatgtcgagacataaaacttacaacctcagtccccgagactgcctgaagacctgcttgtttcagaagtggcagaggatggtggctccgccagcagaacccacaaggcaaccaacaaccaaacggagaaaaaggaaaaattccaccagcagcacttccaacagcagcgctgggaacaatgcaaacagcactggcagcaagaagaagaccacagctgcaaacctgagtctgtccagtcaggatgtgatggtggtaggagagccaactctgatgggaggtgagtttggggacgaggacgaaaggctaatcactagattagaaaacacgcaatatgatgcggccaacggcatggacgacgaggaggacttcaacaattcacccgcgctggggaacaacagcccgtggaacagtaaacctcccgccactcaagagaccaaatcagaaaaccccccaccccaggcttcccaataagatgatcggcaccagaatccactgtcaataggcccgtgggtgatcattacaattgcaaatctttacttacaggagaggaaacagaagagataaaaacttttccatgcaaatatctatttctaaaccacaatgatctgattttctttcttctttctttttttctaattgagaggattattcccagtaagcttccatgaccctttcttggaggccttcacaggtaatacagatactggcactgattgtaattaaaatgagagaaaactctagcgcatcttctggcacggttttaacaacgtgtttgtgttgaatttcctttttatgcatcaaacgaaggccatattgtccataaatgctcagtgctcaggatctcattaatatgccgaacctaactacagatgactttttaatattgtaaaatattttctgctttttgacttgcatctgagagtttcttgtttcagtaaaaaaagaaaagacaaaaaaatcagctttggaaagtaatttaaatgtaccttattttttttttctttatgttttctttcattgggcaacagctaagagggcccagcaaggtaatttatggttgagctgatgtcaattggttcttgtcttgagtcgactcaatttagcccaagtgctgaaacaagaaatgtcatttttttcatcaaagacaccagggcagatttttaagtaaagaaagacaattggacccttaagaatttatgcatttgtaaagttgctgttgatccaaatattttcaagccatgtaatccattggttttgtgggcagtttaataaacctgaacctttgtgtgttttctaattgtacctgagttgaccatcctttctttttatagtatatttcttgtatgatattttgtaaagctctcacctggttcttttatggggacttttcgtttttgggcaactccagtgtatttatgtgaaactttataagagaattaatttttccatttgcatattaatatgttcctccacacatgtaaaggcacagtggctccgtgtgttaaaaaacagctgtattttatgtatgctttactgataagtgtgccaataataaactgtgttaatgaccaaa

SEQ ID NO: 149173 - DNA, 2626 bp, Homo sapiens
  Payload ID: 9453
  Gene Symbol: LDB2
  Gene Name: LIM domain binding 2
  ENST ID: ENST00000502640
  CDS Start-End: 150-1091
agcgtgttcagcctgcctgcctgcctgcctctgtgtgtgtgtgagcgtgtgtgcgtgcgtctactttgtactgggaagaacacagcccatgtgctctgcatggacgttactgatactctgtttagcttgattttcgaaaagcaggcaagatgtccagcacaccacatgaccccttctattcttctcctttcggcccattttataggaggcatacaccatacatggtacagccagagtaccgaatctatgagatgaacaagagactgcagtctcgcacagaggatagtgacaacctctggtgggacgcctttgccactgaattttttgaagatgacgccacattaaccctttcattttgtttggaagatggaccaaagcgatacactatcggcaggaccctcatcccccgttactttagcactgtgtttgaaggaggggtgaccgacctgtattacattctcaaacactcgaaagagtcataccacaactcatccatcacggtggactgcgaccagtgtaccatggtcacccagcacgggaagcccatgtttaccaaggtatgtacagaaggcagactgatcttggagttcacctttgatgatctcatgagaatcaaaacatggcactttaccattagacaataccgagagttagtcccgagaagcatcctagccatgcatgcacaagatcctcaggtcctggatcagctgtccaaaaacatcaccaggatggggctaacaaacttcaccctcaactacctcaggttgtgtgtaatattggagccaatgcaggaactgatgtcgagacataaaacttacaacctcagtccccgagactgcctgaagacctgcttgtttcagaagtggcagaggatggtggctccgccagcagaacccacaaggcaaccaacaaccaaacggagaaaaaggaaaaattccaccagcagcacttccaacagcagcgctgggaacaatgcaaacagcactggcagcaagaagaagaccacagctgcaaacctgagtctgtccagtcaggtacctattgctagcattgctcgttctccagtgtcaggctgcgcactaaggacataaactcgcgtggttgttacacatcaggaggcgatgtttatttcctgtagaaatcaaatatgcgtctcggcccccgacattgagacttgaccccgttgtacagtacacgagtgtgtctgtcctagattccccgactcctcccactgttattttaagctgagcttctctctcccaaggtttccctgtaataatgtcagctgctgttcacaggatgtgatggtggtaggagagccaactctgatgggaggtgagtttggggacgaggacgaaaggctaatcactagattagaaaacacgcaatatgatgcggccaacggcatggacgacgaggaggacttcaacaattcacccgcgctggggaacaacagcccgtggaacagtaaacctcccgccactcaagagaccaaatcagaaaaccccccaccccaggcttcccaataagatgatcggcaccagaatccactgtcaataggcccgtgggtgatcattacaattgcaaatctttacttacaggagaggaaacagaagagataaaaacttttccatgcaaatatctatttctaaaccacaatgatctgattttctttcttctttctttttttctaattgagaggattattcccagtaagcttccatgaccctttcttggaggccttcacaggtaatacagatactggcactgattgtaattaaaatgagagaaaactctagcgcatcttctggcacggttttaacaacgtgtttgtgttgaatttcctttttatgcatcaaacgaaggccatattgtccataaatgctcagtgctcaggatctcattaatatgccgaacctaactacagatgactttttaatattgtaaaatattttctgctttttgacttgcatctgagagtttcttgtttcagtaaaaaaagaaaagacaaaaaaatcagctttggaaagtaatttaaatgtaccttattttttttttctttatgttttctttcattgggcaacagctaagagggcccagcaaggtaatttatggttgagctgatgtcaattggttcttgtcttgagtcgactcaatttagcccaagtgctgaaacaagaaatgtcatttttttcatcaaagacaccagggcagatttttaagtaaagaaagacaattggacccttaagaatttatgcatttgtaaagttgctgttgatccaaatattttcaagccatgtaatccattggttttgtgggcagtttaataaacctgaacctttgtgtgttttctaattgtacctgagttgaccatcctttctttttatagtatatttcttgtatgatattttgtaaagctctcacctggttcttttatggggacttttcgtttttgggcaactccagtgtatttatgtgaaactttataagagaattaatttttccatttgcatattaatatgttcctccacacatgtaaaggcacagtggctccgtgtgttaaaaaacagctgtattttatgtatgctttactgataagtgtgccaataataaactgtgttaatga

SEQ ID NO: 149174 - DNA, 923 bp, Homo sapiens
  Payload ID: 9453
  Gene Symbol: LDB2
  Gene Name: LIM domain binding 2
  ENST ID: ENST00000512345
  CDS Start-End: 137-457
tgcctgcctgcctgcctctgtgtgtgtgtgagcgtgtgtgcgtgcgtctactttgtactgggaagaacacagcccatgtgctctgcatggacgttactgatactctgtttagcttgattttcgaaaagcaggcaagatgtccagcacaccacatgaccccttctattcttctcctttcggcccattttataggaggcatacaccatacatggtacagccagagtaccgaatctatgagatgaacaagagactgcagtctcgcacagaggatagtgacaacctctggtgggacgcctttgccactgaattttttgaagatgacgccacattaaccctttcattttgtttggaagatggaccaaagcgatacagaaccaagaatttaagaccaattggggaaaaaatgaatattaatggaaaatgctatcggcaggaccctcatcccccgttactttagcactgtgtttgaaggaggggtgaccgacctgtattacattctcaaacactcgaaagagtcataccacaactcatccatcacggtggactgcgaccagtgtaccatggtcacccagcacgggaagcccatgtttaccaaggtatgtacagaaggcagactgatcttggagttcacctttgatgatctcatgagaatcaaaacatggcactttaccattagacaataccgagagttagtcccgagaagcatcctagccatgcatgcacaagatcctcaggtcctggatcagctgtccaaaaacatcaccaggatggggctaacaaacttcaccctcaactacctcaggttgtgtgtaatattggagccaatgcaggaactgatgtcgagacataaaacttacaacctcagtccccgagactgcctgaagacctgcttgtttcagaagtggcagaggatggtggctccg

SEQ ID NO: 149175 - DNA, 1498 bp, Homo sapiens
  Payload ID: 9453
  Gene Symbol: LDB2
  Gene Name: LIM domain binding 2
  ENST ID: ENST00000508918
  CDS Start-End: 150-482
agcgtgttcagcctgcctgcctgcctgcctctgtgtgtgtgtgagcgtgtgtgcgtgcgtctactttgtactgggaagaacacagcccatgtgctctgcatggacgttactgatactctgtttagcttgattttcgaaaagcaggcaagatgtccagcacaccacatgaccccttctattcttctcctttcggcccattttataggaggcatacaccatacatggtacagccagagtaccgaatctatgagatgaacaagagactgcagtctcgcacagaggatagtgacaacctctggtgggacgcctttgccactgaattttttgaagatgacgccacattaaccctttcattttgtttggaagatggaccaaagcgatacattgtgcattcagcggcagatgccagaggaaactgcaaccagctcggggattcggaaccagatgcctgtgatggattattacaatttcctatcatgtaattgcttttctgtttgaccaaagctatcggcaggaccctcatcccccgttactttagcactgtgtttgaaggaggggtgaccgacctgtattacattctcaaacactcgaaagagtcataccacaactcatccatcacggtggactgcgaccagtgtaccatggtcacccagcacgggaagcccatgtttaccaaggtatgtacagaaggcagactgatcttggagttcacctttgatgatctcatgagaatcaaaacatggcactttaccattagacaataccgagagttagtcccgagaagcatcctagccatgcatgcacaagatcctcaggtcctggatcagctgtccaaaaacatcaccaggatggggctaacaaacttcaccctcaactacctcaggttgtgtgtaatattggagccaatgcaggaactgatgtcgagacataaaacttacaacctcagtccccgagactgcctgaagacctgcttgtttcagaagtggcagaggatggtggctccgccagcagaacccacaaggcaaccaacaaccaaacggagaaaaaggaaaaattccaccagcagcacttccaacagcagcgctgggaacaatgcaaacagcactggcagcaagaagaagaccacagctgcaaacctgagtctgtccagtcaggtacctattgctagcattgctcgttctccagtgtcaggctgcgcactaaggacataaactcgcgtggttgttacacatcaggaggcgatgtttatttcctgtagaaatcaaatatgcgtctcggcccccgacattgagacttgaccccgttgtacagtacacgagtgtgtctgtcctagattccccgactcctcccactgttattttaagctgagcttctctctcccaaggtttccctgtaataatgtcagctgctgttcacaggatgtgatggtggtaggagagccaactctgatgggaggtgagtttggggacgaggacgaaaggctaatcactagattaga

SEQ ID NO: 149176 - DNA, 1485 bp, Homo sapiens
  Payload ID: 9453
  Gene Symbol: LDB2
  Gene Name: LIM domain binding 2
  ENST ID: ENST00000507464
  CDS Start-End: 1-884
ctatcggcaggaccctcatcccccgttactttagcactgtgtttgaaggaggggtgaccgacctgtattacattctcaaacactcgaaagagtcataccacaactcatccatcacggtggactgcgaccagtgtaccatggtcacccagcacgggaagcccatgtttaccaaggtatgtacagaaggcagactgatcttggagttcacctttgatgatctcatgagaatcaaaacatggcactttaccattagacaataccgagagttagtcccgagaagcatcctagccatgcatgcacaagatcctcaggtcctggatcagctgtccaaaaacatcaccaggatggggctaacaaacttcaccctcaactacctcaggttgtgtgtaatattggagccaatgcaggaactgatgtcgagacataaaacttacaacctcagtccccgagactgcctgaagacctgcttgtttcagaagtggcagaggatggtggctccgccagaacccacaaggcaaccaacaaccaaacggagaaaaaggaaaaattccaccagcagcacttccaacagcagcgctgggaacaatgcaaacagcactggcagcaagaagaagaccacagctgcaaacctgagtctgtccagtcaggtacctgatgtgatggtggtaggagagccaactctgatgggaggtgagtttggggacgaggacgaaaggctaatcactagattagaaaacacgcaatatgatgcggccaacggcatggacgacgaggaggacttcaacaattcacccgcgctggggaacaacagcccgtggaacagtaaacctcccgccactcaagagaccaaatcagaaaaccccccaccccaggcttcccaataagatgatcggcaccagaatccactgtcaataggcccgtgggtgatcattacaattgcaaatctttacttacaggagaggaaacagaagagataaaaacttttccatgcaaatatctatttctaaaccacaatgatctgattttctttcttctttctttttttctaattgagaggattattcccagtaagcttccatgaccctttcttggaggccttcacaggtaatacagatactggcactgattgtaattaaaatgagagaaaactctagcgcatcttctggcacggttttaacaacgtgtttgtgttgaatttcctttttatgcatcaaacgaaggccatattgtccataaatgctcagtgctcaggatctcattaatatgccgaacctaactacagatgactttttaatattgtaaaatattttctgctttttgacttgcatctgagagtttcttgtttcagtaaaaaaagaaaagacaaaaaaatcagctttggaaagtaatttaaatgtaccttattttttttttctttatgttttctttcattgggcaacagctaagagggcccagcaaggtaatttatggttgagctgatgtcaa

SEQ ID NO: 149177 - DNA, 3873 bp, Homo sapiens
  Payload ID: 9454
  Gene Symbol: LDB3
  Gene Name: LIM domain binding 3
  Uniprot ID: O75112
  ENST ID: ENST00000263066
  CDS Start-End: 1-1854
atgtcttacagtgtgaccctgactgggcccgggccctggggcttccgtctgcaggggggcaaggacttcaacatgcccctcactatctcccggatcacaccaggcagcaaggcagcccagtcccagctcagccagggtgacctcgtggtggccattgacggcgtcaacacagacaccatgacccacctggaagcccagaacaagatcaagtctgccagctacaacttgagcctcaccctgcagaaatcaaagcgtcccattcccatctccacgacagcacctccagtccagacccctctgccggtgatccctcaccagaaggtggtagtcaactctccagccaacgccgactaccaggaacgcttcaaccccagtgccctgaaggactcggccctgtccacccacaagcccatcgaggtgaaggggctgggcggcaaggccaccatcatccatgcgcagtacaacacgcccatcagcatgtattcccaggatgccatcatggatgccatcgctgggcaggcccaagcccaaggcagtgacttcagtgggagcctccctattaaggaccttgccgtagacagcgcctctcccgtctaccaggctgtgattaagagccagaacaagccagaagatgaggctgacgagtgggcacgccgttcctccaacctgcagtctcgctccttccgcatcctggcccagatgacggggacagaattcatgcaagaccctgatgaagaagctctgcgaaggtcaaggccccaggcctcttcctacagccccgcagtggccgcctcttcagcacctgccacccacaccagctacagtgagggccccgccgcccctgcacccaagccccgggttgtcaccactgccagcatccggccttctgtctaccagccagtgcctgcatctacctacagcccgtccccaggggccaattacagtcccactccctacaccccctcccctgcccctgcctacaccccctcccctgcccctgcctacaccccctcacctgtccccacctacactccatccccagcaccagcctataccccctcacctgcccccaactataaccctgcaccctcggtggcctacagcgggggccctgcggagcctgccagccgtccaccctgggtgacagatgatagcttctcccagaagtttgccccgggcaagagcaccacctccatcagcaagcagaccctgccccggggaggcccagcctacaccccagcgggtcctcaggtgccaccacttgccagggggaccgtccagagggctgagcgattcccagccagcagccggactccactctgcggtcactgcaacaatgtcatccggggcccatttctggtagccatgggccgttcttggcaccctgaagagttcacctgtgcctactgcaagacttccctggcagatgtgtgctttgtggaagagcagaacaacgtttactgtgagcgatgttatgagcaattctttgccccgctgtgtgccaagtgcaacaccaaaattatgggggaagtaatgcatgccttgagacagacatggcacaccacctgcttcgtctgtgcggcctgcaagaagccttttgggaacagcctcttccacatggaagacggggagccctactgcgagaaagactacatcaatctgttcagcaccaagtgccatggctgcgatttccccgtggaggctggcgacaagtttatcgaagccctgggccacacttggcacgacacctgcttcatttgcgcagtctgccatgtgaatctggaggggcagccgttctactccaagaaggacagacccctgtgcaagaagcacgcacacaccatcaacttgtaggcggccaaggccgcctgtgctgacgaggcccggagctgctcctgctgctggcaacaaaggattcgggaggctgatgtttcttctgaggggaatggggagagagaggaagcgactgagccctttggaagtataattttaggttttttcttctgtacacagatcgtgcatttgcatagttcagactaggagccaaatgaagactcaaaaccaagctagttattaatccaagactggaattgtacttcagacatttagagcagaattccaagaactcaaaagtgaaaagcaacaagcagctttcccaaagcgatacacttgctttggtcaccagaggaggacagagcttagagcagctgtggagaatctgaagcattctgcggagttcttaagcgctcccctggcaaacaaattgaagtgccaaacagcactcgctgcagggtatttttagagtcatagctgagagcttgttagctaagacccattgggctttcctcaccaaaaaaggaagtgttattccattactagcgtcatggagctacctctgcgcatcagacttcagaccttgaacaaacttaaaaccttcttgggagcccggacgtccaaagagatgtcttctgggagccactgggcaattgccagggctccaggaagggctctggctcaggttgcagacagctgagaaaagatggccctgtcagccaccctctctcagtctgaaacatccaacatccccagaaggcttagctcctttttgaattgtgatgggaaagtagagttgggtttttccagttttgctctgtggtgtgtgagagatttttttaaaggctttgggttgtctttggcctttgtttagctttaagggttcgttagcatgagtgtccagtcgtgtgcatgaatttcaccccaacttgtgactgctcacttatgacgtctcccccagtaccctccatctcaaataggcttggtggcctgtggaaaagaagagagacagagagacagtgtctgaaacaggatggcagaataggctcacatgcccaaactctgggtggggaagaggaaacttactttctgccaccctcagtaagaacacacgaggaggcaggacctcccaccttcaggtctgcatcatccttttcaaatgttcctttaaatgcagcacactgagtttgtacaattgtgttaactgctggaagggacagatgcactgatatatatgcatttgctgttttggccaatattttgaaaatgtatgagctgagttgatctagctattatttaagtatttattgaagtagaggggccttcaaactactttatactagtgatagtttgagttaggtaagcatcttaaagctgtttggtgataaagaaggcagcttagattctgtggttggaaacagtgtagtcgcttccctttttaggaagccctgttaatatgctcattgaaaacatggcattgaagcaggcacttgcgtggatgtttctcacttgagcacgatatttaggctctcttccaactcactctattctgtcctcactcctgttttggatttttctctttgcatgtttgaaatgttttatgggaatgtattagaactcttttcttctaaggactgagacttccaggggattgccatcttacctgtctcttctccatgagggagaaggaagcagctagctatgtccctagctgcaggaagcccctattttttccaagcacgaagccaccagtctcccccagggagcatcaggaagggacatggatgtgctcctgccacagggcccttcctacctttggatctgtgagaaggtgaatacaaagcagcaggcagagtaaaatctgctgggactgcctggagatttgtcaggagctgcagacaagtaccttggagcattctgttatttttggaaagttcaaatatgcagggacaaggaggttgctgactgtactgacaggctctaagtcattttctccaaaaactatctattcaattatcaggggctggtcttgaggaagga

SEQ ID NO: 149178 - DNA, 5297 bp, Homo sapiens
  Payload ID: 9454
  Gene Symbol: LDB3
  Gene Name: LIM domain binding 3
  Uniprot ID: O75112
  ENST ID: ENST00000361373
  CDS Start-End: 22-2205
gcggccgctgacagcaccagcatgtcttacagtgtgaccctgactgggcccgggccctggggcttccgtctgcaggggggcaaggacttcaacatgcccctcactatctcccggatcacaccaggcagcaaggcagcccagtcccagctcagccagggtgacctcgtggtggccattgacggcgtcaacacagacaccatgacccacctggaagcccagaacaagatcaagtctgccagctacaacttgagcctcaccctgcagaaatcaaagcgtcccattcccatctccacgacagcacctccagtccagacccctctgccggtgatccctcaccagaaggaccccgctctggacacgaacggcagcctggtggcacccagccccagccctgaggcgagggccagcccaggcaccccaggcaccccggagctcaggcccacctttagccctgccttctcccggccctccgccttctcctcactcgccgaggcctctgaccctggccctccgcgggccagcctgagggccaagaccagcccagagggggcccgggacctactcggcccaaaagccctgccgggctcgagccagccgaggcaatataacaaccccattggcctgtactcggcagagaccctgagggagatggctcagatgtaccagatgagcctccgagggaaggcctcgggtgtcggactcccaggagggagcctccctattaaggaccttgccgtagacagcgcctctcccgtctaccaggctgtgattaagagccagaacaagccagaagatgaggctgacgagtgggcacgccgttcctccaacctgcagtctcgctccttccgcatcctggcccagatgacggggacagaattcatgcaagaccctgatgaagaagctctgcgaaggtcaagcacccctattgagcatgcgccggtgtgcaccagccaggccaccaccccgctgctgcccgcttctgcccagccacctgctgctgcctctcccagtgcggcttcgccacccctggccacagctgctgcccacactgccatcgcctccgcctccaccacagcccctgcttcaagtcctgccgacagcccaaggccccaggcctcttcctacagccccgcagtggccgcctcttcagcacctgccacccacaccagctacagtgagggccccgccgcccctgcacccaagccccgggttgtcaccactgccagcatccggccttctgtctaccagccagtgcctgcatctacctacagcccgtccccaggggccaattacagtcccactccctacaccccctcccctgcccctgcctacaccccctcccctgcccctgcctacaccccctcacctgtccccacctacactccatccccagcaccagcctataccccctcacctgcccccaactataaccctgcaccctcggtggcctacagcgggggccctgcggagcctgccagccgtccaccctgggtgacagatgatagcttctcccagaagtttgccccgggcaagagcaccacctccatcagcaagcagaccctgccccggggaggcccagcctacaccccagcgggtcctcaggtgccaccacttgccagggggaccgtccagagggctgagcgattcccagccagcagccggactccactctgcggtcactgcaacaatgtcatccggggcccatttctggtagccatgggccgttcttggcaccctgaagagttcacctgtgcctactgcaagacttccctggcagatgtgtgctttgtggaagagcagaacaacgtttactgtgagcgatgttatgagcaattctttgccccgctgtgtgccaagtgcaacaccaaaattatgggggaagtaatgcatgccttgagacagacatggcacaccacctgcttcgtctgtgcggcctgcaagaagccttttgggaacagcctcttccacatggaagacggggagccctactgcgagaaagactacatcaatctgttcagcaccaagtgccatggctgcgatttccccgtggaggctggcgacaagtttatcgaagccctgggccacacttggcacgacacctgcttcatttgcgcagtctgccatgtgaatctggaggggcagccgttctactccaagaaggacagacccctgtgcaagaagcacgcacacaccatcaacttgtaggcggccaaggccgcctgtgctgacgaggcccggagctgctcctgctgctggcaacaaaggattcgggaggctgatgtttcttctgaggggaatggggagagagaggaagcgactgagccctttggaagtataattttaggttttttcttctgtacacagatcgtgcatttgcatagttcagactaggagccaaatgaagactcaaaaccaagctagttattaatccaagactggaattgtacttcagacatttagagcagaattccaagaactcaaaagtgaaaagcaacaagcagctttcccaaagcgatacacttgctttggtcaccagaggaggacagagcttagagcagctgtggagaatctgaagcattctgcggagttcttaagcgctcccctggcaaacaaattgaagtgccaaacagcactcgctgcagggtatttttagagtcatagctgagagcttgttagctaagacccattgggctttcctcaccaaaaaaggaagtgttattccattactagcgtcatggagctacctctgcgcatcagacttcagaccttgaacaaacttaaaaccttcttgggagcccggacgtccaaagagatgtcttctgggagccactgggcaattgccagggctccaggaagggctctggctcaggttgcagacagctgagaaaagatggccctgtcagccaccctctctcagtctgaaacatccaacatccccagaaggcttagctcctttttgaattgtgatgggaaagtagagttgggtttttccagttttgctctgtggtgtgtgagagatttttttaaaggctttgggttgtctttggcctttgtttagctttaagggttcgttagcatgagtgtccagtcgtgtgcatgaatttcaccccaacttgtgactgctcacttatgacgtctcccccagtaccctccatctcaaataggcttggtggcctgtggaaaagaagagagacagagagacagtgtctgaaacaggatggcagaataggctcacatgcccaaactctgggtggggaagaggaaacttactttctgccaccctcagtaagaacacacgaggaggcaggacctcccaccttcaggtctgcatcatccttttcaaatgttcctttaaatgcagcacactgagtttgtacaattgtgttaactgctggaagggacagatgcactgatatatatgcatttgctgttttggccaatattttgaaaatgtatgagctgagttgatctagctattatttaagtatttattgaagtagaggggccttcaaactactttatactagtgatagtttgagttaggtaagcatcttaaagctgtttggtgataaagaaggcagcttagattctgtggttggaaacagtgtagtcgcttccctttttaggaagccctgttaatatgctcattgaaaacatggcattgaagcaggcacttgcgtggatgtttctcacttgagcacgatatttaggctctcttccaactcactctattctgtcctcactcctgttttggatttttctctttgcatgtttgaaatgttttatgggaatgtattagaactcttttcttctaaggactgagacttccaggggattgccatcttacctgtctcttctccatgagggagaaggaagcagctagctatgtccctagctgcaggaagcccctattttttccaagcacgaagccaccagtctcccccagggagcatcaggaagggacatggatgtgctcctgccacagggcccttcctacctttggatctgtgagaaggtgaatacaaagcagcaggcagagtaaaatctgctgggactgcctggagatttgtcaggagctgcagacaagtaccttggagcattctgttatttttggaaagttcaaatatgcagggacaaggaggttgctgactgtactgacaggctctaagtcattttctccaaaaactatctattcaattatcaggggctggtcttgaggaaggaaaaaaaaaaaaaaacgttcccagaattcagtttccaaaatctctttttaaagggtttacacacacacacacacacacacacacacacacacacacacacacacacgatcattaaaaagtgtatgctctttaagaagaaaagtaaaatatctcaaaggacggtttcaccaccgtcctttattgaatcaatttttctacatttcagagcaagtgtagattctgagggactcctatttgccaaaaagacaaaactagcaaaaaaaaaacaaaaaaacaaaaaaaaaaccacttaaaaggtagcaggaaaagaaggtagttttgagtgtggttcactcagtgtctgtgagtctggtgtagtgtcaggagtaaggccgtgtctagctcaagtttacatttggatgtcctacaacactaaacaaaatttttcataatccatggtggggagcacactttggagctacatttcttgtctcctcattgttgacattaattaaacatttataggccaggcacagtggctcacgcctgttatcccagcactttgggaggccgaggcaggtgaatcacctgaggtcaggagtttgaaaccagcctggccaatatggtgaaaccccatctctactaaaaatacacaaaattagccaggtgtggtggcaggcgcctgtagttccagctacttgggaggctgaggcaggaatctcctgaatcctggaggcggaggttgcagtgagccgagattatgccattgcactccagcctgggcaacaggagcgaaactccgttgcaaaaaaaaaaaaaaaaaaaaaattataatcacaactttttgcaatggagtgacttatatctgcagcttatatctgcagtgtttgtgttaggaacctagcttttataatgtgttaactttttaactcagtattctggctttgggattttttgttttgtttttggaaacatttcagaagtggaatgtagcctgttaaaggtgtgcacaaaaatattttgcatgtgtttttttttttgcctgtgtgaattctactttttagcaaaaataaagccccccaaaggatgtgcaaa

SEQ ID NO: 149179 - DNA, 1868 bp, Homo sapiens
  Payload ID: 9454
  Gene Symbol: LDB3
  Gene Name: LIM domain binding 3
  Uniprot ID: O75112
  ENST ID: ENST00000372056
  CDS Start-End: 1-1197
atgtcttacagtgtgaccctgactgggcccgggccctggggcttccgtctgcaggggggcaaggacttcaacatgcccctcactatctcccggatcacaccaggcagcaaggcagcccagtcccagctcagccagggtgacctcgtggtggccattgacggcgtcaacacagacaccatgacccacctggaagcccagaacaagatcaagtctgccagctacaacttgagcctcaccctgcagaaatcaaagcgtcccattcccatctccacgacagcacctccagtccagacccctctgccggtgatccctcaccagaaggaccccgctctggacacgaacggcagcctggtggcacccagccccagccctgaggcgagggccagcccaggcaccccaggcaccccggagctcaggcccacctttagccctgccttctcccggccctccgccttctcctcactcgccgaggcctctgaccctggccctccgcgggccagcctgagggccaagaccagcccagagggggcccgggacctactcggcccaaaagccctgccgggctcgagccagccgaggcaatataacaaccccattggcctgtactcggcagagaccctgagggagatggctcagatgtaccagatgagcctccgagggaaggcctcgggtgtcggactcccaggaggcgccgactaccaggaacgcttcaaccccagtgccctgaaggactcggccctgtccacccacaagcccatcgaggtgaaggggctgggcggcaaggccaccatcatccatgcgcagtacaacacgcccatcagcatgtattcccaggatgccatcatggatgccatcgctgggcaggcccaagcccaaggcagtgacttcagtgggagcctccctattaaggaccttgccgtagacagcgcctctcccgtctaccaggctgtgattaagagccagaacaagccagaagatgaggctgacgagtgggcacgccgttcctccaacctgcagtctcgctccttccgcatcctggcccagatgacggggacagaattcatgcaagaccctgatgaagaagctctgcgaaggtcaagggaaaggtttgaaacggaacgtaacagcccacgttttgccaaattgcgcaactggcaccatggcctttcagcccaaatccttaatgttaaaagctaaaaggctgcctggaatccccccaccccaacaggctggactccctccatccttacccccacacagatctggcatgtgagccccacggtgatgcttgacaatgtataactctgctgggggcacctctgatggccaaccgcagcatttctgtcctctgcccaccccagagctgatgctggggcccagccccctgcagctctgtacccaccaaacctccccagggcaaccctcgccaccccccaaatagcccgtagcccaatcccctgccctctgcacagggccttagctgtagaccagagagggcaggaggggtttgctggcataacaccccagaaccaagggaaatggatgggccgctgctcagtttcccaccatcctcagctcctggcctcatcccctcctagaatgagtcacccgtagatcagggtctggggaagaggctgatccctggcgctgcccggctccctcgctgccctctggagctcagggcagcccggaatagggctctttgaagaggaagtagaagccccagggtaatgaggcagagacccctcctggcagtggtgaggtgggggcatgcaccctcctttctgtaccgtgtgtgctggctccatagttctctcttctgtacatataagcatgcttgttctgaaataaagaagatttgaagtgaa

SEQ ID NO: 149180 - DNA, 1598 bp, Homo sapiens
  Payload ID: 9454
  Gene Symbol: LDB3
  Gene Name: LIM domain binding 3
  Uniprot ID: O75112
  ENST ID: ENST00000372066
  CDS Start-End: 80-931
gcaggcggagtgcctgagtgccctctcactcaaccctctctaccctttgtctgcagaggcggccgctgacagcaccagcatgtcttacagtgtgaccctgactgggcccgggccctggggcttccgtctgcaggggggcaaggacttcaacatgcccctcactatctcccggatcacaccaggcagcaaggcagcccagtcccagctcagccagggtgacctcgtggtggccattgacggcgtcaacacagacaccatgacccacctggaagcccagaacaagatcaagtctgccagctacaacttgagcctcaccctgcagaaatcaaagcgtcccattcccatctccacgacagcacctccagtccagacccctctgccggtgatccctcaccagaaggtggtagtcaactctccagccaacgccgactaccaggaacgcttcaaccccagtgccctgaaggactcggccctgtccacccacaagcccatcgaggtgaaggggctgggcggcaaggccaccatcatccatgcgcagtacaacacgcccatcagcatgtattcccaggatgccatcatggatgccatcgctgggcaggcccaagcccaaggcagtgacttcagtgggagcctccctattaaggaccttgccgtagacagcgcctctcccgtctaccaggctgtgattaagagccagaacaagccagaagatgaggctgacgagtgggcacgccgttcctccaacctgcagtctcgctccttccgcatcctggcccagatgacggggacagaattcatgcaagaccctgatgaagaagctctgcgaaggtcaagggaaaggtttgaaacggaacgtaacagcccacgttttgccaaattgcgcaactggcaccatggcctttcagcccaaatccttaatgttaaaagctaaaaggctgcctggaatccccccaccccaacaggctggactccctccatccttacccccacacagatctggcatgtgagccccacggtgatgcttgacaatgtataactctgctgggggcacctctgatggccaaccgcagcatttctgtcctctgcccaccccagagctgatgctggggcccagccccctgcagctctgtacccaccaaacctccccagggcaaccctcgccaccccccaaatagcccgtagcccaatcccctgccctctgcacagggccttagctgtagaccagagagggcaggaggggtttgctggcataacaccccagaaccaagggaaatggatgggccgctgctcagtttcccaccatcctcagctcctggcctcatcccctcctagaatgagtcacccgtagatcagggtctggggaagaggctgatccctggcgctgcccggctccctcgctgccctctggagctcagggcagcccggaatagggctctttgaagaggaagtagaagccccagggtaatgaggcagagacccctcctggcagtggtgaggtgggggcatgcaccctcctttctgtaccgtgtgtgctggctccatagttctctcttctgtacatataagcatgcttgttctgaaataaagaagatttgaag

SEQ ID NO: 149181 - DNA, 5436 bp, Homo sapiens
  Payload ID: 9454
  Gene Symbol: LDB3
  Gene Name: LIM domain binding 3
  Uniprot ID: O75112
  ENST ID: ENST00000429277
  CDS Start-End: 146-2344
acagtccatttatgggcgcagccgaaggcagatatcagtgtcgatggcattcgctcccagctattcttaggagcctctcaagagctccacgcagcccggctgggcagcaagggacagaacagaggcggccgctgacagcaccagcatgtcttacagtgtgaccctgactgggcccgggccctggggcttccgtctgcaggggggcaaggacttcaacatgcccctcactatctcccggatcacaccaggcagcaaggcagcccagtcccagctcagccagggtgacctcgtggtggccattgacggcgtcaacacagacaccatgacccacctggaagcccagaacaagatcaagtctgccagctacaacttgagcctcaccctgcagaaatcaaagcgtcccattcccatctccacgacagcacctccagtccagacccctctgccggtgatccctcaccagaaggaccccgctctggacacgaacggcagcctggtggcacccagccccagccctgaggcgagggccagcccaggcaccccaggcaccccggagctcaggcccacctttagccctgccttctcccggccctccgccttctcctcactcgccgaggcctctgaccctggccctccgcgggccagcctgagggccaagaccagcccagagggggcccgggacctactcggcccaaaagccctgccgggctcgagccagccgaggcaatataacaaccccattggcctgtactcggcagagaccctgagggagatggctcagatgtaccagatgagcctccgagggaaggcctcgggtgtcggactcccaggaggcgccgactaccaggaacgcttcaaccccagtgccctgaaggactcggccctgtccacccacaagcccatcgaggtgaaggggctgggcggcaaggccaccatcatccatgcgcagtacaacacgcccatcagcatgtattcccaggatgccatcatggatgccatcgctgggcaggcccaagcccaaggcagtgacttcagtgggagcctccctattaaggaccttgccgtagacagcgcctctcccgtctaccaggctgtgattaagagccagaacaagccagaagatgaggctgacgagtgggcacgccgttcctccaacctgcagtctcgctccttccgcatcctggcccagatgacggggacagaattcatgcaagaccctgatgaagaagctctgcgaaggtcaaggccccaggcctcttcctacagccccgcagtggccgcctcttcagcacctgccacccacaccagctacagtgagggccccgccgcccctgcacccaagccccgggttgtcaccactgccagcatccggccttctgtctaccagccagtgcctgcatctacctacagcccgtccccaggggccaattacagtcccactccctacaccccctcccctgcccctgcctacaccccctcccctgcccctgcctacaccccctcacctgtccccacctacactccatccccagcaccagcctataccccctcacctgcccccaactataaccctgcaccctcggtggcctacagcgggggccctgcggagcctgccagccgtccaccctgggtgacagatgatagcttctcccagaagtttgccccgggcaagagcaccacctccatcagcaagcagaccctgccccggggaggcccagcctacaccccagcgggtcctcaggtgccaccacttgccagggggaccgtccagagggctgagcgattcccagccagcagccggactccactctgcggtcactgcaacaatgtcatccggggcccatttctggtagccatgggccgttcttggcaccctgaagagttcacctgtgcctactgcaagacttccctggcagatgtgtgctttgtggaagagcagaacaacgtttactgtgagcgatgttatgagcaattctttgccccgctgtgtgccaagtgcaacaccaaaattatgggggaagtaatgcatgccttgagacagacatggcacaccacctgcttcgtctgtgcggcctgcaagaagccttttgggaacagcctcttccacatggaagacggggagccctactgcgagaaagactacatcaatctgttcagcaccaagtgccatggctgcgatttccccgtggaggctggcgacaagtttatcgaagccctgggccacacttggcacgacacctgcttcatttgcgcagtctgccatgtgaatctggaggggcagccgttctactccaagaaggacagacccctgtgcaagaagcacgcacacaccatcaacttgtaggcggccaaggccgcctgtgctgacgaggcccggagctgctcctgctgctggcaacaaaggattcgggaggctgatgtttcttctgaggggaatggggagagagaggaagcgactgagccctttggaagtataattttaggttttttcttctgtacacagatcgtgcatttgcatagttcagactaggagccaaatgaagactcaaaaccaagctagttattaatccaagactggaattgtacttcagacatttagagcagaattccaagaactcaaaagtgaaaagcaacaagcagctttcccaaagcgatacacttgctttggtcaccagaggaggacagagcttagagcagctgtggagaatctgaagcattctgcggagttcttaagcgctcccctggcaaacaaattgaagtgccaaacagcactcgctgcagggtatttttagagtcatagctgagagcttgttagctaagacccattgggctttcctcaccaaaaaaggaagtgttattccattactagcgtcatggagctacctctgcgcatcagacttcagaccttgaacaaacttaaaaccttcttgggagcccggacgtccaaagagatgtcttctgggagccactgggcaattgccagggctccaggaagggctctggctcaggttgcagacagctgagaaaagatggccctgtcagccaccctctctcagtctgaaacatccaacatccccagaaggcttagctcctttttgaattgtgatgggaaagtagagttgggtttttccagttttgctctgtggtgtgtgagagatttttttaaaggctttgggttgtctttggcctttgtttagctttaagggttcgttagcatgagtgtccagtcgtgtgcatgaatttcaccccaacttgtgactgctcacttatgacgtctcccccagtaccctccatctcaaataggcttggtggcctgtggaaaagaagagagacagagagacagtgtctgaaacaggatggcagaataggctcacatgcccaaactctgggtggggaagaggaaacttactttctgccaccctcagtaagaacacacgaggaggcaggacctcccaccttcaggtctgcatcatccttttcaaatgttcctttaaatgcagcacactgagtttgtacaattgtgttaactgctggaagggacagatgcactgatatatatgcatttgctgttttggccaatattttgaaaatgtatgagctgagttgatctagctattatttaagtatttattgaagtagaggggccttcaaactactttatactagtgatagtttgagttaggtaagcatcttaaagctgtttggtgataaagaaggcagcttagattctgtggttggaaacagtgtagtcgcttccctttttaggaagccctgttaatatgctcattgaaaacatggcattgaagcaggcacttgcgtggatgtttctcacttgagcacgatatttaggctctcttccaactcactctattctgtcctcactcctgttttggatttttctctttgcatgtttgaaatgttttatgggaatgtattagaactcttttcttctaaggactgagacttccaggggattgccatcttacctgtctcttctccatgagggagaaggaagcagctagctatgtccctagctgcaggaagcccctattttttccaagcacgaagccaccagtctcccccagggagcatcaggaagggacatggatgtgctcctgccacagggcccttcctacctttggatctgtgagaaggtgaatacaaagcagcaggcagagtaaaatctgctgggactgcctggagatttgtcaggagctgcagacaagtaccttggagcattctgttatttttggaaagttcaaatatgcagggacaaggaggttgctgactgtactgacaggctctaagtcattttctccaaaaactatctattcaattatcaggggctggtcttgaggaaggaaaaaaaaaaaaaaacgttcccagaattcagtttccaaaatctctttttaaagggtttacacacacacacacacacacacacacacacacacacacacacacacacgatcattaaaaagtgtatgctctttaagaagaaaagtaaaatatctcaaaggacggtttcaccaccgtcctttattgaatcaatttttctacatttcagagcaagtgtagattctgagggactcctatttgccaaaaagacaaaactagcaaaaaaaaaacaaaaaaacaaaaaaaaaaccacttaaaaggtagcaggaaaagaaggtagttttgagtgtggttcactcagtgtctgtgagtctggtgtagtgtcaggagtaaggccgtgtctagctcaagtttacatttggatgtcctacaacactaaacaaaatttttcataatccatggtggggagcacactttggagctacatttcttgtctcctcattgttgacattaattaaacatttataggccaggcacagtggctcacgcctgttatcccagcactttgggaggccgaggcaggtgaatcacctgaggtcaggagtttgaaaccagcctggccaatatggtgaaaccccatctctactaaaaatacacaaaattagccaggtgtggtggcaggcgcctgtagttccagctacttgggaggctgaggcaggaatctcctgaatcctggaggcggaggttgcagtgagccgagattatgccattgcactccagcctgggcaacaggagcgaaactccgttgcaaaaaaaaaaaaaaaaaaaaaattataatcacaactttttgcaatggagtgacttatatctgcagcttatatctgcagtgtttgtgttaggaacctagcttttataatgtgttaactttttaactcagtattctggctttgggattttttgttttgtttttggaaacatttcagaagtggaatgtagcctgttaaaggtgtgcacaaaaatattttgcatgtgtttttttttttgcctgtgtgaattctactttttagcaaaaataaagccccccaaaggatgtgcaaa

SEQ ID NO: 149182 - DNA, 1889 bp, Homo sapiens
  Payload ID: 9454
  Gene Symbol: LDB3
  Gene Name: LIM domain binding 3
  ENST ID: ENST00000542786
  CDS Start-End: 1-696
atgtcttacagtgtgaccctgactgggcccgggccctggggcttccgtctgcaggggggcaaggacttcaacatgcccctcactatctcccggatcacaccaggcagcaaggcagcccagtcccagctcagccagggtgacctcgtggtggccattgacggcgtcaacacagacaccatgacccacctggaagcccagaacaagatcaagtctgccagctacaacttgagcctcaccctgcagaaatcaaagcgtcccattcccatctccacgacagcacctccagtccagacccctctgccggtgatccctcaccagaaggaccccgctctggacacgaacggcagcctggtggcacccagccccagccctgaggcgagggccagcccaggcaccccaggcaccccggagctcaggcccacctttagccctgccttctcccggccctccgccttctcctcactcgccgaggcctctgaccctggccctccgcgggccagcctgagggccaagaccagcccagagggggcccgggacctactcggcccaaaagccctgccgggctcgagccagccgaggcaatataacaaccccattggcctgtactcggcagagaccctgagggagatggctcagatgtaccagatgagcctccgagggaaggcctcgggtgtcggactcccaggagggtggtagtcaactctccagccaacgccgactaccaggaacgcttcaaccccagtgccctgaaggactcggccctgtccacccacaagcccatcgaggtgaaggggctgggcggcaaggccaccatcatccatgcgcagtacaacacgcccatcagcatgtattcccaggatgccatcatggatgccatcgctgggcaggcccaagcccaaggcagtgacttcagtgggagcctccctattaaggaccttgccgtagacagcgcctctcccgtctaccaggctgtgattaagagccagaacaagccagaagatgaggctgacgagtgggcacgccgttcctccaacctgcagtctcgctccttccgcatcctggcccagatgacggggacagaattcatgcaagaccctgatgaagaagctctgcgaaggtcaagggaaaggtttgaaacggaacgtaacagcccacgttttgccaaattgcgcaactggcaccatggcctttcagcccaaatccttaatgttaaaagctaaaaggctgcctggaatccccccaccccaacaggctggactccctccatccttacccccacacagatctggcatgtgagccccacggtgatgcttgacaatgtataactctgctgggggcacctctgatggccaaccgcagcatttctgtcctctgcccaccccagagctgatgctggggcccagccccctgcagctctgtacccaccaaacctccccagggcaaccctcgccaccccccaaatagcccgtagcccaatcccctgccctctgcacagggccttagctgtagaccagagagggcaggaggggtttgctggcataacaccccagaaccaagggaaatggatgggccgctgctcagtttcccaccatcctcagctcctggcctcatcccctcctagaatgagtcacccgtagatcagggtctggggaagaggctgatccctggcgctgcccggctccctcgctgccctctggagctcagggcagcccggaatagggctctttgaagaggaagtagaagccccagggtaatgaggcagagacccctcctggcagtggtgaggtgggggcatgcaccctcctttctgtaccgtgtgtgctggctccatagttctctcttctgtacatataagcatgcttgttctgaaataaagaagatttgaagtg

SEQ ID NO: 149183 - DNA, 1664 bp, Homo sapiens
  Payload ID: 9454
  Gene Symbol: LDB3
  Gene Name: LIM domain binding 3
  Uniprot ID: O75112
  ENST ID: ENST00000623007
  CDS Start-End: 1-993
atgtcttacagtgtgaccctgactgggcccgggccctggggcttccgtctgcaggggggcaaggacttcaacatgcccctcactatctcccggatcacaccaggcagcaaggcagcccagtcccagctcagccagggtgacctcgtggtggccattgacggcgtcaacacagacaccatgacccacctggaagcccagaacaagatcaagtctgccagctacaacttgagcctcaccctgcagaaatcaaagcgtcccattcccatctccacgacagcacctccagtccagacccctctgccggtgatccctcaccagaaggaccccgctctggacacgaacggcagcctggtggcacccagccccagccctgaggcgagggccagcccaggcaccccaggcaccccggagctcaggcccacctttagccctgccttctcccggccctccgccttctcctcactcgccgaggcctctgaccctggccctccgcgggccagcctgagggccaagaccagcccagagggggcccgggacctactcggcccaaaagccctgccgggctcgagccagccgaggcaatataacaaccccattggcctgtactcggcagagaccctgagggagatggctcagatgtaccagatgagcctccgagggaaggcctcgggtgtcggactcccaggagggagcctccctattaaggaccttgccgtagacagcgcctctcccgtctaccaggctgtgattaagagccagaacaagccagaagatgaggctgacgagtgggcacgccgttcctccaacctgcagtctcgctccttccgcatcctggcccagatgacggggacagaattcatgcaagaccctgatgaagaagctctgcgaaggtcaagggaaaggtttgaaacggaacgtaacagcccacgttttgccaaattgcgcaactggcaccatggcctttcagcccaaatccttaatgttaaaagctaaaaggctgcctggaatccccccaccccaacaggctggactccctccatccttacccccacacagatctggcatgtgagccccacggtgatgcttgacaatgtataactctgctgggggcacctctgatggccaaccgcagcatttctgtcctctgcccaccccagagctgatgctggggcccagccccctgcagctctgtacccaccaaacctccccagggcaaccctcgccaccccccaaatagcccgtagcccaatcccctgccctctgcacagggccttagctgtagaccagagagggcaggaggggtttgctggcataacaccccagaaccaagggaaatggatgggccgctgctcagtttcccaccatcctcagctcctggcctcatcccctcctagaatgagtcacccgtagatcagggtctggggaagaggctgatccctggcgctgcccggctccctcgctgccctctggagctcagggcagcccggaatagggctctttgaagaggaagtagaagccccagggtaatgaggcagagacccctcctggcagtggtgaggtgggggcatgcaccctcctttctgtaccgtgtgtgctggctccatagttctctcttctgtacatataagcatgcttgttctgaaataaagaagatttgaagtgaa

SEQ ID NO: 149184 - DNA, 2314 bp, Homo sapiens
  Payload ID: 9454
  Gene Symbol: LDB3
  Gene Name: LIM domain binding 3
  Uniprot ID: O75112
  ENST ID: ENST00000623056
  CDS Start-End: 91-2289
agctattcttaggagcctctcaagagctccacgcagcccggctgggcagcaagggacagaacaggcaaggcggccgctgacagcaccagcatgtcttacagtgtgaccctgactgggcccgggccctggggcttccgtctgcaggggggcaaggacttcaacatgcccctcactatctcccggatcacaccaggcagcaaggcagcccagtcccagctcagccagggtgacctcgtggtggccattgacggcgtcaacacagacaccatgacccacctggaagcccagaacaagatcaagtctgccagctacaacttgagcctcaccctgcagaaatcaaagcgtcccattcccatctccacgacagcacctccagtccagacccctctgccggtgatccctcaccagaaggaccccgctctggacacgaacggcagcctggtggcacccagccccagccctgaggcgagggccagcccaggcaccccaggcaccccggagctcaggcccacctttagccctgccttctcccggccctccgccttctcctcactcgccgaggcctctgaccctggccctccgcgggccagcctgagggccaagaccagcccagagggggcccgggacctactcggcccaaaagccctgccgggctcgagccagccgaggcaatataacaaccccattggcctgtactcggcagagaccctgagggagatggctcagatgtaccagatgagcctccgagggaaggcctcgggtgtcggactcccaggaggcgccgactaccaggaacgcttcaaccccagtgccctgaaggactcggccctgtccacccacaagcccatcgaggtgaaggggctgggcggcaaggccaccatcatccatgcgcagtacaacacgcccatcagcatgtattcccaggatgccatcatggatgccatcgctgggcaggcccaagcccaaggcagtgacttcagtgggagcctccctattaaggaccttgccgtagacagcgcctctcccgtctaccaggctgtgattaagagccagaacaagccagaagatgaggctgacgagtgggcacgccgttcctccaacctgcagtctcgctccttccgcatcctggcccagatgacggggacagaattcatgcaagaccctgatgaagaagctctgcgaaggtcaaggccccaggcctcttcctacagccccgcagtggccgcctcttcagcacctgccacccacaccagctacagtgagggccccgccgcccctgcacccaagccccgggttgtcaccactgccagcatccggccttctgtctaccagccagtgcctgcatctacctacagcccgtccccaggggccaattacagtcccactccctacaccccctcccctgcccctgcctacaccccctcccctgcccctgcctacaccccctcacctgtccccacctacactccatccccagcaccagcctataccccctcacctgcccccaactataaccctgcaccctcggtggcctacagcgggggccctgcggagcctgccagccgtccaccctgggtgacagatgatagcttctcccagaagtttgccccgggcaagagcaccacctccatcagcaagcagaccctgccccggggaggcccagcctacaccccagcgggtcctcaggtgccaccacttgccagggggaccgtccagagggctgagcgattcccagccagcagccggactccactctgcggtcactgcaacaatgtcatccggggcccatttctggtagccatgggccgttcttggcaccctgaagagttcacctgtgcctactgcaagacttccctggcagatgtgtgctttgtggaagagcagaacaacgtttactgtgagcgatgttatgagcaattctttgccccgctgtgtgccaagtgcaacaccaaaattatgggggaagtaatgcatgccttgagacagacatggcacaccacctgcttcgtctgtgcggcctgcaagaagccttttgggaacagcctcttccacatggaagacggggagccctactgcgagaaagactacatcaatctgttcagcaccaagtgccatggctgcgatttccccgtggaggctggcgacaagtttatcgaagccctgggccacacttggcacgacacctgcttcatttgcgcagtctgccatgtgaatctggaggggcagccgttctactccaagaaggacagacccctgtgcaagaagcacgcacacaccatcaacttgtaggcggccaaggccgcctgtgctgacg

SEQ ID NO: 149185 - DNA, 433 bp, Homo sapiens
  Payload ID: 9454
  Gene Symbol: LDB3
  Gene Name: LIM domain binding 3
  ENST ID: ENST00000477489
  CDS Start-End: 1-246
gtaatgcatgccttgagacagacatggcacaccacctgcttcgtctgtgcggcctgcaagaagccttttgggaacagcctcttccacatggaagacggggagccctactgcgagaaagactacatcaatctgttcagcaccaagtgccatggctgcgatttccccgtggaggctggcgacaagtttatcgaagccctgggccacacttggcacgacacctgcttcatttgcgcagtatgtctctagcttggggctctggctttctgagaagaggcaggagggaggaagtgggagccagatgaccaacctctacataccttgccacgctagctttctgacatcctgatcatttttaaaagctggcaaacaccatgatgcctcgatacatcacagtcgaacaaagtttcattcctaataattatttataaaccaa

SEQ ID NO: 149186 - DNA, 3193 bp, Homo sapiens
  Payload ID: 9455
  Gene Symbol: LIMD2
  Gene Name: LIM domain containing 2
  Uniprot ID: Q9BT23
  ENST ID: ENST00000259006
  CDS Start-End: 160-543
cggcggtggctcggggaccactggtagcggcagcagctcgcgcccgcgccctcctcgtacccgtgcgcccccggagaccgatcccgccccgcggcccaggccgggcctgaacccagcgggtgccgcttctccacccgaggcttccacctccaacgagccatgttccaggctgcaggagccgcccaggccaccccctctcatgacgccaaaggcggcggcagcagcacggtgcagcgctccaagtccttcagcctgcgggcccaggtgaaggagacctgcgccgcctgccagaagaccgtgtaccccatggagcggctggtggccgacaagctcattttccacaactcttgcttctgctgcaagcactgtcacaccaagctcagcctgggcagctacgccgcgctgcacggggagttctactgcaaaccccacttccagcagctgtttaagagcaaaggcaactacgacgaggggtttggccgcaagcagcacaaggagctctgggcccacaaggaggtggaccccggcaccaagacggcctgaggcctctgtaaccttccaccccctctgcggaaggcctggagccggcagggggaaggtgggaaggaggtcgagctgggcttgcgtgggggccaggtgggaaggggatgaggcttgctcaggcgtaggggaccagggcagggctctgctccaggactccttccttcttccttctcccgcagccggtgagggtttggaaaccaggattggggtctgcccaccaccctgcttcctgcttcgttcagcctccctccccacctcaccccaggaccccctgggaggcccccaagcccagctcccctatctaggtgccttttctccagcaaggagtcagcatgcccccctcagggtcccaagctccctcactgccaccggagactgtgtggcccccacgtctccccatctacctctacccttaacctgtttctgagccacggagacagggaggaaggagcgcgacagtgccacctgttgggcatcataaatgcccctgcagcccatgggggaggagatggggaagtggagccaccctgcctctgcagggcaaggcagggcctgccccagtggggcttgggaccatctcgaaccaccagcgtggagaagcagaagcaaaagcactcgccaggctgcagcctcaggcactggcaggggctggtgcggccccactcccctcccccgctcccatttgtgcccatcctgttgtgaccaaccccgttttaaacatgtttcaatagatccagattctctattgtgtggcctgctgggggatctgtcacaggaagggtgcagactcaccatggggcgggcatggggggacagggccagccccgactacctcggccctgatgggggcagggagctagaagtgggtgtcagttccctgacacaccattgagaaatgggagggctcctcttcacagcgagggcttcatgctgtcacacccacagtggttttggaactgaaactccacctcacccctcagttctgggttggttcagacccaccaacttaccatatgcaccccattgtgaagaggcctgagagcgggagggccaggctgccagtgggtgatggcgcctgtcctcgctgcacttcagtgcctggggtgcaagctgccgcgttccctggctggttccagctgtctagctccctcccttcttcccagccctttgacctggaagtaagttagcgaagaatggcggtaaccagcagacccagcaagtgctgcccaaggttttagtgacccctggattgtcccccctcatcattacccctcgctgctgtcatcatccccttgccttttcaagctctgcggaggtgcagtcacagctactgtctcaggaaatccaaagagaaactacctctgcttctctgaaaacccagggacaatgagggatgagttcacagcagagcaaaccaggcaagttgggaggacctgagggcgccccggtgggacacaggcagaagtctgggttgtcctgctccagattcaacttcctgatgtctccagacatgggatcgatgagaacagagactcctggagggtttgctgccaccacaccatacaactgcctgagttcctaagtggcctccccgtggaacagggcagggagctgggccacaggctccagtgtcacataagtcactatgctgaggcaggcactgctcctcgagggagcagagcgaatactcagcagagatggtgccccggcctggatcctcccaagtgtgaagtgagcgcctcagagcctctcagggcaggccaacttcctgcaccagaggtctcagatggcaaggatcatcttggttcggttaagcaacagtagcagatgaccacaagggggtactggagaggtggctcttggagacacctgacccctgccctgcaaagatgggactgaaggaagtcctctgggccaggaagaccctaccaaatatcatgaaagctccgggaactcagccactggtgacgttcaggttgtgagggccagcagtgccaccctggtaaatcagccctgttgggaccaccccagtggagctcctggaggggcaactggaggaaaggggcagacacctctggactgacaatggtatcagccagatcaccccaggacccctctacttggagtcaagttctcttctgcttgaaaggcccaggctcgttgccaggcaccatacctggcccctgctaagcaaaaacctacctccaccccccacaactgaaagcactgccacaggacccctctgatataaatgatcccttttattgtaagtaatgcgcaacactggcctggctttgcactgcaagccctcggtcaagatatagtcaaataactatggctgcaggttccacagttccacaataaccatggctgcacgatccacaattcagacacagacatagagctggggtgggtggaaggggcaggagggtggcagagtgcggactgtccccagccctggcctctccatgcagagttggcccaggcagacacaccccatggaatgatgagaaagtgacggcacggccccttcccacagcaagcctggggctgccaggaactgcccttcagaacctttgggcccaggtcaccctgaagccccacaactttttatctggattagttattaaaaaacaataaattaagcaac

SEQ ID NO: 149187 - DNA, 602 bp, Homo sapiens
  Payload ID: 9455
  Gene Symbol: LIMD2
  Gene Name: LIM domain containing 2
  ENST ID: ENST00000578993
  CDS Start-End: 122-385
cgcgcccgcgccctcctcgtacccgtgcgcccccggagaccgatcccgccccgcggcccaggccgggcctgaacccagcgggtgccgcttctccacccgaggcttccacctccaacgagccatgttccaggctgcaggagccgcccaggccaccccctctcatgacgccaaaggcggcggcagcagcacggtgcagcgctccaagcactgtcacaccaagctcagcctgggcagctacgccgcgctgcacggggagttctactgcaaaccccacttccagcagctgtttaagagcaaaggcaactacgacgaggggtttggccgcaagcagcacaaggagctctgggcccacaaggaggtggaccccggcaccaagacggcctgaggcctctgtaaccttccaccccctctgcggaaggcctggagccggcagggggaaggtgggaaggaggtcgagctgggcttgcgtgggggccaggtgggaaggggatgaggcttgctcaggcgtaggggaccagggcagggctctgctccaggactccttccttcttccttctcccgcagccggtgagggtttggaaaccaggattggggtctgccca

SEQ ID NO: 149188 - DNA, 1534 bp, Homo sapiens
  Payload ID: 9455
  Gene Symbol: LIMD2
  Gene Name: LIM domain containing 2
  Uniprot ID: Q9BT23
  ENST ID: ENST00000578402
  CDS Start-End: 415-798
gccgcccgagggaccccgggccaggctccggggtcgccccggctgggtctctgcggccccacagctctgggcggggatgggggcgccggcgcctacgcgcgaggccaaccgggggaaaccgaggcagtgaatggcccaggccccgcccggttatcccggagccaggccgggagcgcccagtgtcccgcgaccgcagccgccgcagcctgaactcgtcccctcccagtaggatgcggagcgcggcccttccatcctgtccctgccaccgttgcttccccacgccgggccgccgtcgggatgggcagacggcgcggccggctggggccgggctggcggggccctcccgactgacttccccttgcagaacccagcgggtgccgcttctccacccgaggcttccacctccaacgagccatgttccaggctgcaggagccgcccaggccaccccctctcatgacgccaaaggcggcggcagcagcacggtgcagcgctccaagtccttcagcctgcgggcccaggtgaaggagacctgcgccgcctgccagaagaccgtgtaccccatggagcggctggtggccgacaagctcattttccacaactcttgcttctgctgcaagcactgtcacaccaagctcagcctgggcagctacgccgcgctgcacggggagttctactgcaaaccccacttccagcagctgtttaagagcaaaggcaactacgacgaggggtttggccgcaagcagcacaaggagctctgggcccacaaggaggtggaccccggcaccaagacggcctgaggcctctgtaaccttccaccccctctgcggaaggcctggagccggcagggggaaggtgggaaggaggtcgagctgggcttgcgtgggggccaggtgggaaggggatgaggcttgctcaggcgtaggggaccagggcagggctctgctccaggactccttccttcttccttctcccgcagccggtgagggtttggaaaccaggattggggtctgcccaccaccctgcttcctgcttcgttcagcctccctccccacctcaccccaggaccccctgggaggcccccaagcccagctcccctatctaggtgccttttctccagcaaggagtcagcatgcccccctcagggtcccaagctccctcactgccaccggagactgtgtggcccccacgtctccccatctacctctacccttaacctgtttctgagccacggagacagggaggaaggagcgcgacagtgccacctgttgggcatcataaatgcccctgcagcccatgggggaggagatggggaagtggagccaccctgcctctgcagggcaaggcagggcctgccccagtggggcttgggaccatctcgaaccaccagcgtggagaagcagaagcaaaagcactcgccaggctgcagcctcaggcactggcaggggctggtgcggccccactcccctcccccgctcccatttgtgcccatcctgttgtgaccaaccccgttttaaacatgtttcaatagatcca

SEQ ID NO: 149189 - DNA, 1298 bp, Homo sapiens
  Payload ID: 9455
  Gene Symbol: LIMD2
  Gene Name: LIM domain containing 2
  ENST ID: ENST00000583211
  CDS Start-End: 343-579
gctcggggaccactggtagcggcagcagctcgcgcccgcgccctcctcgtacccgtgcgcccccggagaccgatcccgccccgcggcccaggccgggcctgaacccagcgggtgccgcttctccacccgaggcttccacctccaacgagccatgttccaggctgcaggagccgcccaggccaccccctctcatggcctcccggagctgcccctgccctgaccgcccctctccctcaggacgccaaaggcggcggcagcagcacggtgcagcgctccaagtccttcagcctgcgggcccaggtgaaggagacctgcgccgcctgccagaagaccgtgtaccccatggagcggctggtggccgacaagctcattttccacaactcttgcttctgctgcaagcactgtcacaccaagctcagcctgggcagctacgccgcgctgcacggggagttctactgcaaaccccacttccagcagctgtttaagagcaaaggcaactacgacgaggggtttggccgcaagcagcacaaggagctctgggcccacaaggaggtggaccccggcaccaagacggcctgaggcctctgtaaccttccaccccctctgcggaaggcctggagccggcagggggaaggtgggaaggaggtcgagctgggcttgcgtgggggccaggtgggaaggggatgaggcttgctcaggcgtaggggaccagggcagggctctgctccaggactccttccttcttccttctcccgcagccggtgagggtttggaaaccaggattggggtctgcccaccaccctgcttcctgcttcgttcagcctccctccccacctcaccccaggaccccctgggaggcccccaagcccagctcccctatctaggtgccttttctccagcaaggagtcagcatgcccccctcagggtcccaagctccctcactgccaccggagactgtgtggcccccacgtctccccatctacctctacccttaacctgtttctgagccacggagacagggaggaaggagcgcgacagtgccacctgttgggcatcataaatgcccctgcagcccatgggggaggagatggggaagtggagccaccctgcctctgcagggcaaggcagggcctgccccagtggggcttgggaccatctcgaaccaccagcgtggagaagcagaagcaaaagcactcgccaggctgcagcctcaggcactggcaggggctggtgcggccccactcccctcccccgctcccatttgtgcccatcctgttgtgaccaaccccgttttaaac

SEQ ID NO: 149190 - DNA, 846 bp, Homo sapiens
  Payload ID: 9455
  Gene Symbol: LIMD2
  Gene Name: LIM domain containing 2
  ENST ID: ENST00000580222
  CDS Start-End: 371-607
cggcagcagctcgcgcccgcgccctcctcgtacccgtgcgcccccggagaccgatcccgccccgcggcccaggccgggcctggctggggccgggctggcggggccctcccgactgacttccccttgcagaacccagcgggtgccgcttctccacccgaggcttccacctccaacgagccatgttccaggctgcaggagccgcccaggccaccccctctcatggcctcccggagctgcccctgccctgaccgcccctctccctcaggacgccaaaggcggcggcagcagcacggtgcagcgctccaagtccttcagcctgcgggcccaggtgaaggagacctgcgccgcctgccagaagaccgtgtaccccatggagcggctggtggccgacaagctcattttccacaactcttgcttctgctgcaagcactgtcacaccaagctcagcctgggcagctacgccgcgctgcacggggagttctactgcaaaccccacttccagcagctgtttaagagcaaaggcaactacgacgaggggtttggccgcaagcagcacaaggagctctgggcccacaaggaggtggaccccggcaccaagacggcctgaggcctctgtaaccttccaccccctctgcggaaggcctggagccggcagggggaagccggtgagggtttggaaaccaggattggggtctgcccaccaccctgcttcctgcttcgttcagcctccctccccacctcaccccaggaccccctgggaggcccccaagcccagctcccctatctaggtgccttttctccagcaaggagtcagcatgcccccctcagggtcccaagctccctcac

SEQ ID NO: 149191 - DNA, 509 bp, Homo sapiens
  Payload ID: 9455
  Gene Symbol: LIMD2
  Gene Name: LIM domain containing 2
  ENST ID: ENST00000582055
  CDS Start-End: 199-435
ctgcggcgcgcccctgggccttgggctgatggctgcagccctgatccagggcctcccggagctgcccctgccctgaccgcccctctccctcaggacgccaaaggcggcggcagcagcacggtgcagcgctccaagtccttcagcctgcgggcccaggtgaaggagacctgcgccgcctgccagaagaccgtgtaccccatggagcggctggtggccgacaagctcattttccacaactcttgcttctgctgcaagcactgtcacaccaagctcagcctgggcagctacgccgcgctgcacggggagttctactgcaaaccccacttccagcagctgtttaagagcaaaggcaactacgacgaggggtttggccgcaagcagcacaaggagctctgggcccacaaggaggtggaccccggcaccaagacggcctgaggcctctgtaaccttccaccccctctgcggaaggcctggagccggcagggggaaggtgggaaggaggtcgagct

SEQ ID NO: 149192 - DNA, 566 bp, Homo sapiens
  Payload ID: 9455
  Gene Symbol: LIMD2
  Gene Name: LIM domain containing 2
  ENST ID: ENST00000584645
  CDS Start-End: 240-566
atttccggccaagccacgcagtccctggtgcccgggaaggcgccggcctcgccgccgctccaaagcgagtggccgtctctcgccggctgtgcctccggcctgctgtgcggctgcagggagggagcagctctgcggcccaagctctgtcacctcagctctctgggccgcggctcccacgtgagaaatgagaacccagcgggtgccgcttctccacccgaggcttccacctccaacgagccatgttccaggctgcaggagccgcccaggccaccccctctcatgacgccaaaggcggcggcagcagcacggtgcagcgctccaagtccttcagcctgcgggcccaggtgaaggagacctgcgccgcctgccagaagaccgtgtaccccatggagcggctggtggccgacaagctcattttccacaactcttgcttctgctgcaagcactgtcacaccaagctcagcctgggcagctacgccgcgctgcacggggagttctactgcaaaccccacttccagcagctgtttaagagcaaaggcaactacgacgaggggtttggccgcaag

SEQ ID NO: 149193 - DNA, 756 bp, Homo sapiens
  Payload ID: 9455
  Gene Symbol: LIMD2
  Gene Name: LIM domain containing 2
  Uniprot ID: Q9BT23
  ENST ID: ENST00000578061
  CDS Start-End: 110-493
gagacccgctggcggggctcgcggcgtcggggtctggggtccggtcctcgcggggccagaacccagcgggtgccgcttctccacccgaggcttccacctccaacgagccatgttccaggctgcaggagccgcccaggccaccccctctcatgacgccaaaggcggcggcagcagcacggtgcagcgctccaagtccttcagcctgcgggcccaggtgaaggagacctgcgccgcctgccagaagaccgtgtaccccatggagcggctggtggccgacaagctcattttccacaactcttgcttctgctgcaagcactgtcacaccaagctcagcctgggcagctacgccgcgctgcacggggagttctactgcaaaccccacttccagcagctgtttaagagcaaaggcaactacgacgaggggtttggccgcaagcagcacaaggagctctgggcccacaaggaggtggaccccggcaccaagacggcctgaggcctctgtaaccttccaccccctctgcggaaggcctggagccggcagggggaaggtgggaaggaggtcgagctgggcttgcgtgggggccaggtgggaaggggatgaggcttgctcaggcgtaggggaccagggcagggctctgctccaggactccttccttcttccttctcccgcagccggtgagggtttggaaaccaggattggggtctgcccaccaccctgcttcctgcttcgttcagcctccctccccacctcacccc

SEQ ID NO: 149194 - DNA, 502 bp, Homo sapiens
  Payload ID: 9456
  Gene Symbol: LPP
  Gene Name: LIM domain containing preferred translocation partner in lipoma
  ENST ID: ENST00000414139
  CDS Start-End: 224-502
actttttgtctgtgggttcgttcccgggtcccgcgcgagctttcccgggataagtagctttagcgatcgggagacagccgggcgctgcaaggtgggaactttgaggctcagagacagagcagaagacagaacctggtcttctgattccctgtgttctgcttttttcattgttccactggacgctcatcagagggaagatctttttcctcaattgattccaacaatgtctcacccatcttggctgccacccaaaagcactggtgagcccctcggccatgtgcctgcacggatggagaccacccattcctttgggaaccccagcatttcagtgtctacacaacagccacccaaaaagtttgccccggtagttgctccaaaacctaagtacaacccatacaaacaacctggaggtgagggtgattttcttccacccccacctccacctctagatgattccagtgcccttccatctatctctggaaactttcctcctccaccacct

SEQ ID NO: 149195 - DNA, 888 bp, Homo sapiens
  Payload ID: 9456
  Gene Symbol: LPP
  Gene Name: LIM domain containing preferred translocation partner in lipoma
  ENST ID: ENST00000415906
  CDS Start-End: 1-759
atggtcatcccgaaccaaccccctctaacagcaaccaagaagtctacattgaaaccacagcctgcaccccaggctggacccatccctgtggctccaatcggaacactcaaaccccagcctcagccagtcccagcctcctacaccacggcctccacttcttcaaggcctacctttaatgtgcaggtgaagtcagcccagcccagccctcattatatggctgccccttcatcaggacaaatttatggctcagggccccagggctataacactcagccagttcctgtctctgggcagtgtccacctccttcaacacggggaggcatggattatgcctacattccaccaccaggacttcagccggagcctgggtatgggtatgcccccaaccagggacgctattatgaaggctactatgcagcagggccaggctatgggggcagaaatgactctgaccctacctatggtcaacaaggtcacccaaatacctggaaacgggaaccagggtacactcctcctggagcagggaaccagaaccctcctgggatgtatccagtcactggtcccaagaagacctatatcacagatcctgtttcagccccctgtgcgccaccattgcagccaaagggtggccattcagggcaactggggccttcgtcagttgccccttcattccgcccagaggatgagcttgagcacctgaccaaaaagatgctgtatgacatggaaaatccacctgctgacgaatactttgaatgctgataatgccaagctgtgtttacagtccaaatttttgctgaagaccttcaactttgcactctccctgtgtggtatctcttgcccaagacagaacttcaaataaaatcacatagctgatgcaagaaaccgtta

SEQ ID NO: 149196 - DNA, 5835 bp, Homo sapiens
  Payload ID: 9456
  Gene Symbol: LPP
  Gene Name: LIM domain containing preferred translocation partner in lipoma
  ENST ID: ENST00000448637
  CDS Start-End: 147-1433
atttctcttccgagagcttcagtttcctcacgtgccaagcggacgggttggaagttggtctttgccagctctgacaccttcattgcagttggctgaaccttgtgtcaaccatccattccaggagccagctatctgagattccaacaatgtctcacccatcttggctgccacccaaaagcactggtgagcccctcggccatgtgcctgcacggatggagaccacccattcctttgggaaccccagcatttcagtgtctacacaacagccacccaaaaagtttgccccggtagttgctccaaaacctaagtacaacccatacaaacaacctggaggtgagggtgattttcttccacccccacctccacctctagatgattccagtgcccttccatctatctctggaaactttcctcctccaccacctcttgatgaagaggctttcaaagtacaggggaatcccggaggcaagacacttgaggagaggcgctccagcctggacgctgagattgactccttgaccagcatcttggctgaccttgagtgcagctccccctataagcctcggcctccacagagctccactggttcaacagcctctcctccagtttcgaccccagtcacaggacacaagagaatggtcatcccgaaccaaccccctctaacagcaaccaagaagtctacattgaaaccacagcctgcaccccaggctggacccatccctgtggctccaatcggaacactcaaaccccagcctcagccagtcccagcctcctacaccacggcctccacttcttcaaggcctacctttaatgtgcaggtgaagtcagcccagcccagccctcattatatggctgccccttcatcaggacaaatttatggctcagggccccagggctataacactcagccagttcctgtctctgggcagtgtccacctccttcaacacggggaggcatggattatgcctacattccaccaccaggacttcagccggagcctgggtatgggtatgcccccaaccagggacgctattatgaaggctactatgcagcagggccaggctatgggggcagaaatgactctgaccctacctatggtcaacaaggtcacccaaatacctggaaacgggaaccagggtacactcctcctggagcagggaaccagaaccctcctgggatgtatccagtcactggtcccaagaagacctatatcacagatcctgtttcagccccctgtgcgccaccattgcagccaaagggtggccattcagggcaactggggccttcgtcagttgccccttcattccgcccagaggatgagcttgagcacctgaccaaaaagatgctgtatgacatggaaaatccacctgctgacgaatactttggtgagtggggcctagagctgacttctgaagtaactatcttgctctgatttccttccttagtaattggaactattatcagctccactggtaaagtatttgagtccagatgcatgagagttgatatacatccccgcacaactaagtaattgtaggatttgcatttgcaagactgccatagatgtgatgtctacttagcttatactaaaatttcagtggtccttagagtttccttagatacaaattttattgttgagacttattttttaccagtctaggcaacatggggagaccctgtctccattaaaaatacaaaaattagctgagtgtggtggcatgtgcctgcagtcccagctactcagaaggctgaggctggagaatcacctgagcctgggaggtcgaggctgcagtgagctgtggctcagtgagctgtggttgtgccactgcactccagcctggacaacagagtgagaccctgtttttttgttttttgtttttgtttttgttttttgttttaaaaaagaagacattttttgacaacttattagcttcccattaggcagaaataggatttctgtgtatgttcccatttctcactggtctaaagattcaagtaaaaaatgtggaattggatattgtctgatatccaatttccagattgtactcttaatttttttttctatctcagttgaagaaatgatgttttctttgtagttttaattttcccctcttcaaacttgttaataactaggaatggttaatccttccaatccatgaatataatgcaaatttatgaattatatgccgattgtgaggttctgtggacgcataacctgtcctcagtgaggttaaaattgttcagaaagaggtaagacaagcatacaaataattactagtctaggtagaaagtgataaaagacatgagaaggcttaggtcaattgttgcaaattttatttttattttattttattttatttatttttgagacagagccttgctctgtcacccaggctagagtatactggcgtgatcttggctcactgcaacctccacctccggattttgagcaattctcctgcctcagcctcccgagtagctgggattacaggtgcccaccgccacacctggctagtttttgtatttttagtagagacgaggtttcgccatgttggccaggctggtcttgaactcctgacctcaggtgatccacccgcctcagcctcccaaagtgctgggattacaggtgtgagccactgcgcccggccagaagttttaaaagctccatttattaggagcatccggaatactttggtaaagaattggtggcacttgaatctgagccctttaaaccagtgcctttcacattttctgtggtagaagaccattttcctcccaatctgttggagaccagtatttttgttgagtcagttaaaattaattactagggaaataaaagacacaaaataaaatggaagatgaaattttatcattattagagttaactgttaacgaattactcttttaaatttttatactagtttctaaatattaatcctttgttcctgtatttatctcatccagggtgataagcatttcttagacacccatccatggaccactttttgagtggcactgctttaaggacaaatagagaaacgacatttggggaacagtattagtaaaggcacaaagatggggaaattgcacaggatttttgcttcttcaaatattttctattttcatgtcttttttgctcctatatgggaatatgtaatgacaggtcaactgaccacaccagtccaaaaacacacagtagatgaagtaggaggtattaggatatgaaaaccctggcttttatttgtgttggggtggcagtttagcttagctaaaagagcaaaaagagtgggaatgaaacatctggttgtggtctcttctctgtccctcgctggccaagcaatactggcatgtcacccatctgcctgagccccatttcccacctcactatatcaacggttggggcaaatgttctctagcatttctttcaacagtaataagttcaatgtacaaacatccttaatctaaagtataacaataaagctaaacataaattgatggagattaacaacaatgcatggagaacagtaaaacaaaacatagaaaatccacgaaggtttctagttacatcaaaatacacaaaaagtttattaatgctcttgtcattgccatgtgaggagggtttataatggggtctaaaatacattttttaaaagtgaaaaataaggtctctgtatttaggtcctattaaaaaggaaaagctgacttaccaagtatatatgcttcaaatatcatagcaacaaaatatattgccacaaaaaaaaaactgaacatagatgctaattgcatgaatgaatatatattgaacactctgggaaacagatataaattattacctttcccttcaagaactgtccaagctctactacttagtagcttagaaaacttgaacaagtattattccctctaaaccttcatttttgttttgttttatctgtaatatgggaataataactagcttatactgttgttttaagaaatggatgaaatatttatacaaagcacttagccaagttcttggcatgtagaatatgctcaatacaatactcaaggttctcccatgctcttggggcttatagtttatttaagacataagatatgctcgttaaaaatccattaataatgctcaatttaagtttaagttcctagcaacaatagaacgtatgtcactggtaagtaatcattgccaaatggggatgaataaccatttgagaatttggaaaaatggctaacttttattgagtgcttatgatatggcagcactatattttatttacattataggaattaactcatttcactcttataggaaaacataaccctgtgaaatagatactattatcattttcagattttgaaattaaggcacagaaatattaatttgcctaatgtcaacagctaatacattgcagaactgaattagaatgcagatctgtacatttacacaccacactgtaaaagatggggaaagctagccaggctacatatttagaagagtgtttatggtggagattagctttggacagatgggaaataagagatgagcattctcttctaggtacacagaattaacaaaatataagttgaggccaggattatttaaagaaaatttacgttatgtagaaaacaaaaaaaaaagtgcctatggtaatattcaggctgctctgctaggtggtggtgggggtagatgtgggtcttacctttgaagttcttatagtctaataggatatgtgtacagagttatggtgttataagcacaaggcagaaagtgacaagtgacttaatcaatgttcaccaagtgttctttgagaattcagaaaaaggaaagagaaaatcaagagagagaaatggaaaagtatttatggaatacttagcctttgagtaagtctttaaaattgtgctaattgagatttggaagtaggaagatagtagagaagtgaagtcatttctcatgaggggagtttttgacataacagggaataaaaccactggagtgaagtgtccacgtgagaagtagcaaatattgggaaataaggttcaagtagtaggttaggaccaatctagggaaggctgtcaatgtccggctaaaggctaagaacgttattgtctataatgagcccttgcacattgagatcacatgccatgagaactgctctgtggatagtggttaaaaacatgcactccagagccaggatgcacttcttaccagcaagatgaaatcaagaggcaaaggactagtgaaaagaactgtcctttattgttccgtgctttaaacatttctcaagcaccttctctgtgcctgctactgtgctgggtgttcaggacacccaaatgcagaggctctgccctcatggggctcacgggttcctaggaaggacaagagagtcacagatgtcaaggattttagtgcagatattagcactgtgttgggtgtgactgagctgctatgtgagagtccataagtctgcctgaggatgagcggaaagaatacatagcagtgtgtttgcatcagcagggcctgacccaagagcgataaagtcttctcttcctttctgtcagagttttacctttggcctattctggactgcaaatagcattgccaagcacttcccttaaataacttctcttttttgcaggactatcctctcagccctgccaaaaccccatcacctactctttctttactactttgcctatttaatgctggaatttttatttaaactgtagctgatttactgaaggtaattaagtgctttcatgctgtagatctcctgctagactacaggctgtacttgggagtgagagtgaacaaaatgtaaataaatgatgtcaacaga

SEQ ID NO: 149197 - DNA, 343 bp, Homo sapiens
  Payload ID: 9456
  Gene Symbol: LPP
  Gene Name: LIM domain containing preferred translocation partner in lipoma
  ENST ID: ENST00000454789
  CDS Start-End: 147-343
gtgggttcgttcccgggtcccgcgcgagctttcccgggataagtagctttagcgatcgggagacagccgggcgctgcaagcattgcagttggctgaaccttgtgtcaaccatccattccaggagccagctatctgagattccaacaatgtctcacccatcttggctgccacccaaaagcactggtgagcccctcggccatgtgcctgcacggatggagaccacccattcctttgggaaccccagcatttcagtgtctacacaacagccacccaaaaagtttgccccggtagttgctccaaaacctaagtacaacccatacaaacaacctggaggtgagggtga

SEQ ID NO: 149198 - DNA, 386 bp, Homo sapiens
  Payload ID: 9456
  Gene Symbol: LPP
  Gene Name: LIM domain containing preferred translocation partner in lipoma
  ENST ID: ENST00000426274
  CDS Start-End: 188-386
aggaattgaagagaatcctgacaagtggcatgttgggaaaggcctgaaggaagccagaccagcttgctctcagagctccttgggtcccctgcggcccccaggtgatcttcagcaagacctgcattgcagttggctgaaccttgtgtcaaccatccattccaggagccagctatctgagattccaacaatgtctcacccatcttggctgccacccaaaagcactggtgagcccctcggccatgtgcctgcacggatggagaccacccattcctttgggaaccccagcatttcagtgtctacacaacagccacccaaaaagtttgccccggtagttgctccaaaacctaagtacaacccatacaaacaacctggaggtgagggtgatt

SEQ ID NO: 149199 - DNA, 521 bp, Homo sapiens
  Payload ID: 9456
  Gene Symbol: LPP
  Gene Name: LIM domain containing preferred translocation partner in lipoma
  ENST ID: ENST00000430340
  CDS Start-End: 364-521
gaggaaggagggggaaaggcaccaaccagcagccgctccagccctgccgaagtttcactttttgtctgtgggttcgttcccgggtcccgcgcgagctttcccgggataagtagctttagcgatcgggagacagccgggcgctgcaaggtgggaactttgaggctcagagacagagcagaagacagaacctggtcttctgattccctgtgttctgcttttttcattgttccactggacgctcatcagagggaagatctttttcctcaattgggacatggatgaacctggaaaccatcattctcagcaaactatcgcaaggacagaaaaccaaagaccgcatgttcttactcacagattccaacaatgtctcacccatcttggctgccacccaaaagcactggtgagcccctcggccatgtgcctgcacggatggagaccacccattcctttgggaaccccagcatttcagtgtctacacaacagccacccaaaaagtttgccccggtagttgctccaaaacc

SEQ ID NO: 149200 - DNA, 479 bp, Homo sapiens
  Payload ID: 9456
  Gene Symbol: LPP
  Gene Name: LIM domain containing preferred translocation partner in lipoma
  ENST ID: ENST00000457242
  CDS Start-End: 309-479
gatgggtatttgctttcatttctaatgaaatttcaggcctctagggtaggatatcaaaattggtagatcatttgcaatttattttatcccaaacacctcactttacagtcagagaaactgaggcccagagaagtaaaatgagttgctcaaggtctcagagagcaagaaatagagatgggacttgagcacctagatctctggtattgctgtcctgtagttcatggagctggcagatggatacatctgtgacctgggatgatggagagactgctggacccttcagaggatctcatctcaagattccaacaatgtctcacccatcttggctgccacccaaaagcactggtgagcccctcggccatgtgcctgcacggatggagaccacccattcctttgggaaccccagcatttcagtgtctacacaacagccacccaaaaagtttgccccggtagttgctccaaaacctaagtacaaccca

SEQ ID NO: 149201 - DNA, 400 bp, Homo sapiens
  Payload ID: 9456
  Gene Symbol: LPP
  Gene Name: LIM domain containing preferred translocation partner in lipoma
  ENST ID: ENST00000443217
  CDS Start-End: 261-400
aatgtctcagttctgttcccttcaggcttcgagaccaccgccttgctgtgtcccgtagtggactgagggcctgcaagagggagtgagggctagtggagggccagctgcctgtgggggctggacatcgtgtgggaactttgaggctcagagacagagcagaagacagaacctggtcttctgattccctgtgttctgcttttttcattgttccactggacgctcatcagagggaagatctttttcctcaattgattccaacaatgtctcacccatcttggctgccacccaaaagcactggtgagcccctcggccatgtgcctgcacggatggagaccacccattcctttgggaaccccagcatttcagtgtctacacaacagccacccaaaaagtttgcccc

SEQ ID NO: 149202 - DNA, 535 bp, Homo sapiens
  Payload ID: 9456
  Gene Symbol: LPP
  Gene Name: LIM domain containing preferred translocation partner in lipoma
  ENST ID: ENST00000420410
  CDS Start-End: 201-535
cccaccctgcccccacccttcccccttcattcctctgtcccttgttctggaagctgaggcgagaatgtctcagttctgttcccttcaggcttcgagaccaccgccttgctgtgtcccgtagtggactgagggcctgcaagagggagtgagggctagtggagggccagctgcctgtgggggctggacatcgtattccaacaatgtctcacccatcttggctgccacccaaaagcactggtgagcccctcggccatgtgcctgcacggatggagaccacccattcctttgggaaccccagcatttcagtgtctacacaacagccacccaaaaagtttgccccggtagttgctccaaaacctaagtacaacccatacaaacaacctggaggtgagggtgattttcttccacccccacctccacctctagatgattccagtgcccttccatctatctctggaaactttcctcctccaccacctcttgatgaagaggctttcaaagtacaggggaatcccggaggcaagacacttgagga

SEQ ID NO: 149203 - DNA, 612 bp, Homo sapiens
  Payload ID: 9456
  Gene Symbol: LPP
  Gene Name: LIM domain containing preferred translocation partner in lipoma
  ENST ID: ENST00000416784
  CDS Start-End: 160-612
ggggaggaaggagggggaaaggcaccaaccagcagccgctccagccctgccgaagtttcactttttgtctgtgggttcgttcccgggtcccgcgcgagctttcccgggataagtagctttagcgatcgggagacagccgggcgctgcaagattccaacaatgtctcacccatcttggctgccacccaaaagcactggtgagcccctcggccatgtgcctgcacggatggagaccacccattcctttgggaaccccagcatttcagtgtctacacaacagccacccaaaaagtttgccccggtagttgctccaaaacctaagtacaacccatacaaacaacctggaggtgagggtgattttcttccacccccacctccacctctagatgattccagtgcccttccatctatctctggaaactttcctcctccaccacctcttgatgaagaggctttcaaagtacaggggaatcccggaggcaagacacttgaggagaggcgctccagcctggacgctgagattgactccttgaccagcatcttggctgaccttgagtgcagctccccctataagcctcggcctccacagagctccactggttcaacagcctct

SEQ ID NO: 149204 - DNA, 18220 bp, Homo sapiens
  Payload ID: 9456
  Gene Symbol: LPP
  Gene Name: LIM domain containing preferred translocation partner in lipoma
  Uniprot ID: Q93052
  ENST ID: ENST00000617246
  CDS Start-End: 190-2028
gtgggaactttgaggctcagagacagagcagaagacagaacctggtcttctgattccctgtgttctgcttttttcattgttccactggacgctcatcagagggaagatctttttcctcaattgcattgcagttggctgaaccttgtgtcaaccatccattccaggagccagctatctgagattccaacaatgtctcacccatcttggctgccacccaaaagcactggtgagcccctcggccatgtgcctgcacggatggagaccacccattcctttgggaaccccagcatttcagtgtctacacaacagccacccaaaaagtttgccccggtagttgctccaaaacctaagtacaacccatacaaacaacctggaggtgagggtgattttcttccacccccacctccacctctagatgattccagtgcccttccatctatctctggaaactttcctcctccaccacctcttgatgaagaggctttcaaagtacaggggaatcccggaggcaagacacttgaggagaggcgctccagcctggacgctgagattgactccttgaccagcatcttggctgaccttgagtgcagctccccctataagcctcggcctccacagagctccactggttcaacagcctctcctccagtttcgaccccagtcacaggacacaagagaatggtcatcccgaaccaaccccctctaacagcaaccaagaagtctacattgaaaccacagcctgcaccccaggctggacccatccctgtggctccaatcggaacactcaaaccccagcctcagccagtcccagcctcctacaccacggcctccacttcttcaaggcctacctttaatgtgcaggtgaagtcagcccagcccagccctcattatatggctgccccttcatcaggacaaatttatggctcagggccccagggctataacactcagccagttcctgtctctgggcagtgtccacctccttcaacacggggaggcatggattatgcctacattccaccaccaggacttcagccggagcctgggtatgggtatgcccccaaccagggacgctattatgaaggctactatgcagcagggccaggctatgggggcagaaatgactctgaccctacctatggtcaacaaggtcacccaaatacctggaaacgggaaccagggtacactcctcctggagcagggaaccagaaccctcctgggatgtatccagtcactggtcccaagaagacctatatcacagatcctgtttcagccccctgtgcgccaccattgcagccaaagggtggccattcagggcaactggggccttcgtcagttgccccttcattccgcccagaggatgagcttgagcacctgaccaaaaagatgctgtatgacatggaaaatccacctgctgacgaatactttggccgctgtgctcgctgtggagaaaacgtagttggggaaggtacaggatgcactgccatggatcaggtcttccacgtggattgttttacctgcatcatctgcaacaacaagctccgagggcagccattctatgctgtggaaaagaaagcatactgcgagccctgctacattaatactctggagcagtgcaatgtgtgttccaagcccatcatggagcggattctccgagccaccgggaaggcctatcatcctcactgtttcacctgcgtgatgtgccaccgcagcctggatgggatcccattcactgtggatgctggcgggctcattcactgcattgaggacttccacaagaaatttgccccgcgatgttctgtgtgcaaggagcctattatgccagccccgggccaggaggagactgtccgtattgtggctttggatcgagatttccatgttcactgctaccgatgcgaggattgcggtggtctcctgtctgaaggagataaccaaggctgctaccccttggatgggcacatcctctgcaagacctgcaactctgcccgcatcagggtgttgaccgccaaggcgagcactgacctttagattcagtcacctgttcagccggcactgagaagaacgaacacaagaaaaagataagaaatactagagtaaaggccatcaaactacgcgatagtctctgttcttcatctgctattaaccttgccttagaaacacataaattatgagattttttttaaaagttgttaccaaatacacatttcacattgaatcatgtaggatcttgatgggcctttgttcccaaggacttccacatttttgcacagattatgctccatcccattcacttctgcattcctgtaacttttaatccctatgtttgtctcacttttcatctggttgaatggcttttcttagtgtggtatttgctgtcacatagtttttcctgggtgagtctgccaactcacaggtgcttttaggcttgaaatctccatcctatcatttccgttttgcctgtgactgtaaagagtagccattcttttcccatgtattgaagaggatattcttctcttgctttatactactcacgtccttggggagggaaatgcacaatttttttttgttaggctgtaaagaatttaagctgtaaattacataagttagaacaagcccaaatttaatttgcaaccatcagaattcagaatctatagtgaccagtgatcaaggctaattggaaaagagttatcggcccatagctaataagtagtgacagacaaccaagcttcaatatttttctaaagaaattacaggtgggatatgctagaaaaggcattttggggttatgtttaaaaaaacattattgtcccacaatattaccttaagatttttcttttccgcactacctgaacattgtaatacagacaaacttgatttcttctagaagataacattttcaatactgtcccacttctcatcttaaaaatattgtcatgtttattctaatatccaacacaactatcaaaattgcctttttctctagaggatgaaggctgtgaaaaaaccgttcaaattctcttctttttcttttttattaccaggtccattttgcctgacaattgcaaatcagagcatacaaaataaaactgtgcagttttgtttggtttactttcaaaagagtagaaagcttgaaaagattctgaaaccacagtttcattattctcataatccttctgcaactgaaattacatattgcaggagacattttcatatcatcaatgtgacatttacaccacactttcaaagacaatcactgaaacaaaaattgtctttatgagctaaaaatatgcagaatctctgcctagaatctttattcaaacttttattagccagtgaaacacttgcttgccaactgccaagccatacttattaagttcgaacatgtttcacttaaggagagacacctagcttagtcatggcaagttgccattttgtaaactaaggattttggactgagatttcttaaatctttcttcaaatctcccacaagtatatacttttaaattatggagtattttaagtctacaaaaaggtataaataataatataatgaattcctatatacctaatacccagtttaagacaccaaatataacaagtataattacatcctccaatgtaccgtttccttattccacagatatctttttcattattgtgaagtgatgttcagatttctagttttttttctagtttttaattttaacatcagaactgaaataaaaaattatggatacgtgttttgaattgcaaactattcctcaggaattccaattaaatttattttacttgaataggaatgatcataaaagtgattctttttttgtgactagaaattcttaagccgatggtcactatagctcatccttaatgtatggctcatttgcttttgtcactaaacggttttgtgttagaaccaccaaaattatagcttttaagagcttcctttgaccactgtctttttcttaccctagttctcttatctttgatcgtatatttctcataatgtgaaatatgatgagattcacttaggggcagcatgttagttttgggaggcaatgtcaactgtgtctctgaattcctgtcttccaaattgaagccagaccatgctgatgacctcaagtagcactgactatttgacaatagggctgataatgtaatcggcttgaattttgacttagtaactttttatgtaatactttcggagaaattctctttaggacaaagcagagagtccaatttattgagggatagattgtatctcttaaagtggtcatattattattaattttgccaaaagaagaagaatttattgaatatttatactataaaatgcagtaacattctacttgcttattacatttaaatccttgtgtaactgaatgtttacatgtcaagaggaaaagctgtaagaaaatgctgtcacagacccatccctgtggcatcgtcagcagaatactgcttgcttacaatctttattatgcattcttataacataacctcagagtatctttaccaaaggtttttaaagtaaatctctttttaagatagacttattcttttataataatgaatgtgcactcatacatatgtagaaacatttagatttagagttttttttttctttcacaaggtataataaggaaaggatcctacaatattttattctagggtttcttaaatatatgatttatattactgtcttttctattaatcatttgatttaaacaatgccaagtcactcttttttagttgcatgaaattttgcctgcaacagagagaaaaagattgtattactttaatgattataatcatactgtctgctgatataatatcataattgttgtggtttaaatacataaatagtagaaaaatcagagtctataacagaaagtttgtaaaaatatactgattttgaaaagtatcaggaatataaatatttggtaattctgtgtaacaagagagacatggaaaaggaaaaaaatccactatatcatgggctctgcagaacatatcaaaataggatttcttaaatttttcaacccccagaccatactgactcaacatggagtctcactggccaagaaaattgcctttaaaactcgaaaataaggccaggtgtggtgactcacacttgtaatcccagcaatttgggaggctgagacaggaggattgcctgaggccaggagtttgacaccagcctgggcaacatagtgagaccttgtctctacaaaaaataaaataaaataaaaaccaaattagccagacatggtggcatgcgcttgtttaaaaaaacaaataaataaataatcgactcaaaaataagtcatgtgtcccagcataaggcatcaggttgttagatgctggcatctctgcagctcaaagatgtgggttctttttcttgtcattaacacattgttatttctgtaggagcaacttctctgatcaaaattacttttctgggtatgtgctgattaagggggtggacttatcaacactataattgttccctatgaaagattccacagagatgtttatggtgaggtttaaaggatatgaaactctacatttaaacaagtattttatatttgggtacagaggaagaaagagagggctttttccatggggctatagtagagagttagtggaatatagacaggactctgaaaacacaacttccagccatttttttagttagtaaaaatcctattaatgtgaaccagccaggaataacagtgttatttctattggatatggtttgggcttctcttgtcaaatctgtgtcggctgccccctgatccttccattatcaagttttgaagggtgttggggaaattatggcagctgctagggagatcagggaaacactgatgtaacctcaaagcctctcaccattcctcttggcttggaaaggctttattttttcatatacatttctagaaatattgctattctaccttagtatttcacatttgtagttcaaacaagcgattgtccatctgttgcctagagctatagtacatgtgtgttatgaatgaaatatgacagcatgttccatacccctgctttagccatctgtgggaaaccagcaaactgaaaaagacacctctgcaaaatgtgcctcaagtccatttcttgggatcgctcgtttggtgcactctcgtgggagacaatcagagaacaacatatacttgtgccttattttcaaagaatctatttacactactatgaatattccactgaagagtcaatgatgtaaatgataaccaccaaatctcaaaaatatactcaccaaaaagtaaaaaagtaaaaaaaaaaaaaaaagaaagaaagaaaagaaagagagagaagtcaacttttcatcttaatatattctagtagtatttattttttccttgtcttggaagtatctcataggtctttaaatgagtaaaacatttttatgccagaaggtgatataatggatgttagtgttttttatttgattttacagtagttttagtcagataatgaggacagagacttcaacttgattctttaccaccattcagcatattttttaattgtcttcattgtatttgcttaatagtggtccagacaagttcaaaacttgttctcagtgaggcattaatatggtgcaaccatgaatatttcaggccaagttattcacttgacagataactagaatgaaacttttctcatgaggctgttgtttggttagcatagccttatttcaaaccttaaaaagttacctgactgaagctactatgacttggtaaggattcttcctctcttgctttcttcctcccttcctttcttcctcttccttcctcctcttcttattttctttcctactttccatcctacctattagtgttgctgtacttggattttttgtaaattaaatcaatgcattatgattttagggaattatgattatattcataaggggaaggctaccagaaaatatatgtggcatccataaaatcttcttttataggggcatattttttaggttgtatttattcgtaaagtgaaatgagataatagagtctttctgtttcatgttaatgaattttcatcagggactgaggtcatagattcttggaaaattcatttgtgactgatctagttttctcagctgtatgcaaagtaatctttcaaagactaggttaagattttttttttaagtctgaagcaatgtaaccccaaaaaattataattttaatgatggcattttattttattccattgcagcttgataactttccttatagcaaaggaataactattgtattttcagaattttaacacagattaacacttagcctgtaagactaataatatattgtaatagttgatactaaaatatttttcagcaggttggacagcaccagtttttcttagatcacagactacaggcagaatttcccttcaatccagaaaaaaggacactaatttccttttctatttaattttcctggcccttgtgcaaaaaattgtggactctatcttagttacaacatgcatgtcccttattttgtggagagctgtgtgaaagatgcgttttttttctttttttcttttttttttttttgagacggagtctggctctgtcacccaggctggagtgcaatggcacgatctcctctcactgcaagctccgcctcccaggttcacgccattctcctgtctcagcctcccgagtagctgggactacaggcgcctgccaccacgcccggctaatttttttgtatttttagtagagatggagtttcacagtgttagccaggatggcctcgatctcctgacctcgtgatccacccgcctcggcctcccaaagtgctgggattacaggcgtgagccaccgtgccccgcgtgtttttttctttagctgattgacaggtccccttcaaagttacaaaaaaaagtgctaatttttgctgttaaattctggttgttatttaattgacagaagtctcttgatgcacgaataaatatctctacatctagcctttgttaaaaataaaaattaatattctacaaacacctacatatactagagaggggtgaaacactgcagctaattcctttataatactttcagatgattgcattaagcctttcatgttatgtggcattgttaatttttcctagatacccatccacttaagggccagagaaatccttattcatttaactctggtgggcatttatgtaacatacccaaataaaaacgttattaaacagccacaatcgcattcagtcaacttggcactgaatgtagcttctaaaatcagttctctaccctacgaatggaatgttctaccaagaaagagaagcatcaccatgtcatcttgtgttctacaccactatagagagttacagttgcccccaaacacgaatgctattcccaaataaaatagaatcatgctttgggaggccaaggcgggccgatcacgaggtcaggagatcgagaccatcctggctaacacggtgaaaccccgtctctactaaaaaaaaaaaaaaatacaaaaaattagcctggctcagtggcgggcgcctgtagtcccagctactcaggaggctgaggcaggagaatggcgtgaacccgggaagcggagctttcagtgagccgagatagcgccactgcagtccggcctgggcgaaagagcgagactccgtctcaaaaaaaaaaaaaaaaaaataggatcatggcccttttaaagatctgaatcttctctgttattttcctgatgaatcaccatcccatatcttcttagtcctggccagtatgtagttgcgctcacatacgtctattctagctctgtagctccacaaaacaagtcttaagtccaaatctttgcctcttcatgtctgatatcaccaactcattcagcttttcttcacttattgacatagtgtcatgtcctatcactctctgctgcttctttaaacagtggacacaaacatattttctaattttcagtgtactcagtgaaacttggcagttcaccatgagtcaggctaggttgaaaggctttctttagggttgaaagtaaacgaaattggaatcacccaaagagaatttccccaaaaaacctcagacccagaagtgtaaaagctacagaaggatagaactcccatgtctacagacagttctgttactttttgttctgtactattttggatgttgccaaaatcaaattcatcctgaaaacaggaagcaagctaatgcatatgccatccatgagattcccacttctgggtcagttcatattccattcaaccttttccttttatccttgtcttcttcagaataagacatttttcctccatattttcatattaaatattaacactttataggttctactttaatatatggacactttacaggttatacataaatatttgctggttgattgatttcgagattcattcattctgtgctcaaatatttgtacctagagacgttacatgttagaaaaagtgagcagcttctttctctaatcatttaggagtccatatttttcttttctttttgttctcccaacatccttatctcttactcagctcttcaatttataattaccaaataatcactgttagagaatcagcccctaagtaactttgattctggccaactgtaataagatccaaccacttaaatctgtacttactcaataggaaggaatgtgacatcaggaagagtcattccagtgacattagtaagactttatggagtacataaaatttgataagaaatcttgagctgattctttgacttgatttagaagttgagaaaagagtatttaaggcacaacagggaaacatgggctatactcagagaagaccctctgcattggccaaaatatcatggattctggaaattccttcttaacagaaaaaaaaggcttccaaataatcaggctgaatgggaagaaaaaggcatagaggaagcctgaggaagtatttacttgcttttcccatctctttataattggaagagaagatgatctgccaaaatataacccagcatgcacagtatggacaggaagcagccctccatgaactttattatcacagaatatgagcattcttattgatccacagctacatcttctattcttgcagcaagggtacatgtcctttgaccctccacaaaagaacaagcaggacatctctattttcctattgagtctgagtccattattagaaaggacttcccagccatcttttctacttggtattaaaattcccttacagattcattgctaagtgccaattctttttttttcttttgagacggagtcttgctctgtcgcccaggctggagtgcagtggcgcaatctcggctcactgcaagctccgcttctcgggttcacgccattctcctgcctcagcctcccgagtagctgggactacagacgcccgccaccgcgcccagctaattttttttgtacttttagtagagacggggtttcaccgtggtctcgatctcctgacctcgtgatccgcccgcctcggcctcccaaagtgccaattctgactctacttaaacatcacctgtatcagggagctcattattccttgaggtcttacatttctttcagcacattttgttccaagctacacgactttaaaacagagccagcctttggggcatatgttctctttggtgccacacaaaacctgtagtacatgatacagtgttgcttcccccctccttttccttccatatatatttgttttgttttgggcattgcattacttttttgaatttttaagaatctctaaaattagtctgaaggatgttctgagggccagacattagaatttgtgagtttttttgttgctggttgtactttcctatttagaagacagaccgttctgacagttgttgtgtagcttcatgccttccccagtaactaacccatgaacagtacaccccttttatctgacttgttgataatgaccttaaaaatgttaggaaatgggccgggcgcggtggctcgtgcctgtaatccagcactttgggaggccgaggcgagcggatcatgaggtcaagagatcgagaccatcctggtcaacatggtgaaaccccgactctactaaaaaaaatacaaaaattagccgggcgtgttggcgggcgcctgtagtcccaactacttgggaggctgaggcaggagaatcacctgaacccaggaggcagaggttgcagtgagcagagattgcgccactgcactccagcctgggcgacagaacgagactccgtctcaaaaaaaaaaaaaaaaaaaaaaggttgggaaatattggtgtataatccccatgtctaacaaggaagaagtcaaaagcaaaagatagtggtattgccgaaaactcattatttctagttagttcatctgtggaaaaggatatcgttcttgaggagaggggttctattatgctatagttttctatggaaatgtacaaatgctttcctcattgctctggatgactatttagtttaaataatatacctttgtcatggggaagaccatgattgtggcttcttctaccccaactttgaatgagagagcactgtaagcagaaactgccatcagtctcctgggcaggacctggaggtaactttctgagctgtaaaatagtaattcctaagagagcttacaaactgcttccacacagaaaatagcgcagggaggacagttattagtacccctattctagaagagaaagctgaggctcaagccattaagtgacttgccaaaagctgtgacatagctgggaagtggcagatttggggatataaccaggtcttgcaagtccagtgctgtctccaagtagccacgctcacagctgagaacaccttagaggacaatatcgacttcttacagactaccaagcccccagtcatccagggaaattcagagaccaattgactgccaggtggcaaatccacatgtgtactgcggtctttagagatcatttagagcttgcacacatctgtgtcttcttgtgggaaacctctaggtattctgtctgatcagcactgtgaggaagttggtgggaaaaggccactgataagaacaaacaatgggcagaaggaagcacattgcaataaatttccccagagagagttcctttacattccattcaccaaaaacctctctggaactgtcaggttcagaatatcaaccaagaccatatcatttagaattcattggcatgtagaggtgactcgattcctaaaagaagcctctctcccatgaaccacgatgtacgttccacagaggcagaaaccgccgtaggttagcaatgcattttagtctttctctccattcacatttactgagagcacaccacgtgcatgttgctgcaacaggcatttccgatagagccgatccatgagctaacaatgtctgaaaacaaatgttatggaactgttggcatttctgagatttggcctttgccatttgatagactttgcttcccaggatgctgtcattttgtgattttttataattacaaggaatttggtaccatgttgttttcaaaaaacctcctagaaagtctccatgtatgctctagaagttgctctacgtaacagttcagcaagcaagtgttccttctcttgagctgcgtccctcaggaagctgtacctttagggtgtgctttccactttttatttcctctcatttcactcctttcattgtttgctatatcctaaaatatgtgaagtgagagaaaaaatatcatttcttctcattaaatctcctgcattaaatctaagaatcctttaaaataatcacacctgataagtgttttatgcatttccctccctggagtgttatcatccatcaagccagtatcatcatccacctgcttattccttgggactaatgagagccaagttaaatagcaaatgacttctcaccccttcctagtcctcatgcctgaggaataagggcgacattaatgggagcgggagagtggtggctttggttgagatgcacgttcacagactagaaaagtgcctcacctccatggtgtatatgtgccaccttttcttaatccagtctatcattgttggacatttgggttggttccaagtctttgctattgtgaatagtgccgcaataaacataagtgtgcatgtgtctttatagcagcatgatttataatcctttgggtatatacccagtaatgggatggctgggtcaaatggtatttctagttctagatccctgaggaatctccacactgacttccacaatggttgaactagttcacagtcccaccaacagtgtaaaagtgttcttatttctccacatcctctccagcacctgttgtttcctgactttttaatgattgccattctaactggtgtgagatggtatctcatagtggttttgatttgcatttctctgatggccagtgatggtgagcattttttcatgtgtttcttggctgcataaatgtcttcttttgagaagtgtctgttcaatactatgcagccataaaaaatgatgagttcatgtcctttgtagggacatggatgaaattggaaatcatcattctcagtaaactatctcaaggacaaaaaaccaaacaccacatgttctcactcacaggtgggaattgaacaatgagaacacatggacacaggaaggggaacatcacactctggggactgttgtggggtggagggaggagggagggatagcattaggagatatacctaatgctaaatgacgagttaatgggtgcagcacaccagcatggcacatgtatacatatgtaactaacctgcacattgtgcacatgtaccctaaaacttaaagtataataataatgaaataaaattaaaaaaaaaaaagaaaagtgcctcacctccctgtgaggcttgatgaatattgtggccagtgagtggaaaatgattcttgtcgaatagacagagtattcccaccccaggaatggattaatagaagacacaatttgagcacttctcagaattatctagtatgcctgagtagagactcacatgggtggaatctgtgttgtctcatcagagggaataaaaagacaatgaggtggtaaatgtgaaaaaagcagccttttagaaaaacattattttcaaatacctttataaatcatctaatttatcttcacataatataaagaaaaaactaataaaaattttcgtatttcactttacataatatgttctcccatatttagggatcatacaattgtattgtcttcaaaacacacacacacacacatacacacacacacacacacacacacacaccccttccaagaaagctgatccttcagaaaataaatcttatttttaagcacttgggttttcaggccagaaaattaataaatcctaaacctgacccatttttgtaacagctaaaaaggagaagaaaaagctagttaaattttgtgtggatccatttatctcttaaaatatgccaaagcaatttgaggtgggggtggaaacaggtatttatctctcatgcgtgattctctctttatatttctatctgttgggaaaagggtaaagaactattcttggtcattattgatgtattgtgttgccactttgtatggtgcctgctgtgctttatcccgaggcatagcagtaatcgttactatcttgactctttccttcatcacaagagagtaaatatgaagtctgaatgtcgttcctcacccccaaattgtttaactctgcttccaaactagtttaagaaatgcaaaatgggaagagctagcttttcttagatacatttcttccttttttattctttcttgggagacgttaagtataaaagggaaaaagtcagttccttcttctctctctttctctttgggtgacagcaatgctcacttagtaattataaactggaaataggagagtagcttgagcaggttatgatatatctgcccaatgtgtttcattccttcaaacataaactttgagagtaaaagagatttttataatttaaatgccaacgacaggaatggcctcatgttttaactttcaaataataaatggggagttggtatttgggcagagtttgcattttactaatcctatatactttgagcttagtttttagaattgtgtcaaatacatcaacatatcaggattatagtgccaaaaatagttaaagtgccttggtcctccctctgtaggcagcaaattgaaactaacatgggaccatgccatccttctagcataatggagaagtctgaactgaggagtatctttgatgaaagacatttaggaccctagaaactaaatcttgtcaccaagactttatagtaaagtagtagcaaaattatttttaaaagactttcttccttttactacccatttcctctcttgggaaagctgatgagcaaattatccaagactcatttctttattaggcaaagtcagaatatttcccctctgaaaatctgaattatgccctcattctttttcaagaaatatctcaaagagcaaatagaattaaacatgacacttgattgtctgattatttggcatgtataaaattatcatgtggcttaatgtgccttaagtgaaaatttaaacttagacctgaaacctttacagttggatgtagcgttgagcttttgcatgttttctgtataataaaccacttttgttttgtttgttttgtcttttaacctacacctttatcattactctaacagatttagggcttctctttctctacagctaagtaagggaatatgtgcaattatgagacatacaaaaaaggaaagggaaaggactttctaagtagcaaatctgtgccatgaagtagatgtggcgtgaagatacagagcctgaggatagtaattttccctgagccacgcacacaggcttttatttcatgccttttctctttctgtgccgtcacctttgagaaaaacgattgcaccttctccaagtctgcctttttaacagctacagttaagttggcaagacttccccagctctgaatatagccatttgccgactccggcctctttgcgagactgactcaaatctgtgatcttctgttcagcatacacatcagcaaagtgagaagatgagcactaaatataggctctattaactttacttttagatttactgccttcaaaaagtgcctattctgagcaacataaacgttattccttacatatgtatgtacacacggtacccagagtcgtactgtgcagccttcaaaaacataccatcagaaagagtaggtgctgagataaggaaactttgccaaatgaaagaaagtcactcacttccaatatcccctctcaagcggctaccgtgaaacgggctgcaaacacattccctgagcatcccttgctgatacagcttctttatatttatatcctactggatggtagcatattgctaaggtttcctgtactctgcttcaagggaatgtaagctttatggcattgaaacatttagggaaaaaaaagatgtttaagagaattaatagagccgtagtctgtattaggatgtgtgtcatatgtgtgttctataaactaagcatcggtgggtttagagtgttaaagtgtcagcacattccttctccttttgtctctcaggctaacatgagagaaaatagaaaagtcttggctgtggggattggaagctcagggggccaaatgtccttgccagatccttagagcattactttgactcctaaaaatagtagtgtatgttatttgatggcttttgtttccatagttccatcactgacaaaactgtcaatactgttgatggagcagcagcatagcctagagtgatgcattcttacccagaggtggcaataggagagggtccatgtaaataggacgaggtagacagtgcatgattgtaggagaagggttgaagggaggacatgattccaaaaaagatcgttctcaatgtgtcgtctgactcaaccagctggcagattacacttgccaagtcgttccctttccttctaagtcagttggctccatattcacttgaatatgcctctgtttgggcaaagcaagatacctccacttaacctttatccaaggaagctcttggtgtcctcttggtcataaagttgtctcctacctaacccagttttaccaaatggaagtaaaaggggacaaactatggaagatggactccatgccattgcagtcagccaccattctcttttccatataaggagccccattacataagctacgggtgaggttggaacagctatgtttcataatttcaagagtgtgaccaccctgctctagtcatcatcattggatgaatccagttgactctttggcaaaagggtgatacttttcactaaaaatgcctactcttcctgttgatgttccttttctgtttttaccttgtccaatttccacactagtcattttttttattttttagaggatcagattttagcgctggaaaatgagttcaaaaatttcagtgtaatgtcataaggatgttgggatacagagattttttttttccttggaaacaaatggactgggaagaaacacagcatggctttgctctgagtttcaatctgatgattatgaccatggaagatagtcttatgtaaaggttaaatggtgtttacaagtggatagataaggcggagatggtgagaagccgggttttctctatgctaaatgtgtctactaagagcagcacttcctactagctaagcacaatcatagccccaccgtgatgagctgctagtctgaataacattccctgacttagggaaaggcacacaaaaacatataaagaatatgtctattttcatatgtgtgatactgacagagccatggtattcctaaaatataggtttctcttttttcttgtattcttagcaaattgcatttattcactacattacaaaccatcactgatgtatccaaaatagcacacatagttcagtatgaaaataagagaataaaatctgttataagcaagtgatttaggtattttcttttgtgtttatgcattatctgactatattaaaacctgtttttctatttaccttctatcagttttctctaccaattatgttttttcaatgctctataagaatgaatatggaaattatatttcttttttctgtaaaagagttgcaactactttattatatttagaaatccaataaacttcttattacattta

SEQ ID NO: 149205 - DNA, 18277 bp, Homo sapiens
  Payload ID: 9456
  Gene Symbol: LPP
  Gene Name: LIM domain containing preferred translocation partner in lipoma
  ENST ID: ENST00000618621
  CDS Start-End: 313-2085
gtcacttttatttgggggtgtggacagctgctttcccaggggagtacttcttacagtgggatttcaagacaagatcggcctgaagaaaaattatatttgtatattttttaaaaagtgggaactttgaggctcagagacagagcagaagacagaacctggtcttctgattccctgtgttctgcttttttcattgttccactggacgctcatcagagggaagatctttttcctcaattgattccaacaatgtctcacccatcttggctgccacccaaaagcactggtgagcccctcggccatgtgcctgcacggatggagaccacccattcctttgggaaccccagcatttcagtgtctacacaacagccacccaaaaagtttgccccggtagttgctccaaaacctaagtacaacccatacaaacaacctggaggtgagggtgattttcttccacccccacctccacctctagatgattccagtgcccttccatctatctctggaaactttcctcctccaccacctcttgatgaagaggctttcaaagtacaggggaatcccggaggcaagacacttgaggagaggcgctccagcctggacgctgagattgactccttgaccagcatcttggctgaccttgagtgcagctccccctataagcctcggcctccacagagctccactggttcaacagcctctcctccagtttcgaccccagtcacaggacacaagagaatggtcatcccgaaccaaccccctctaacagcaaccaagaagtctacattgaaaccacagcctgcaccccaggctggacccatccctgtggctccaatcggaacactcaaaccccagcctcagccagtcccagcctcctacaccacggcctccacttcttcaaggcctacctttaatgtgcaggtgaagtcagcccagcccagccctcattatatggctgccccttcatcaggacaaatttatggctcagggccccagggctataacactcagccagttcctgtctctgggcagtgtccacctccttcaacacggggaggcatggattatgcctacattccaccaccaggacttcagccggagcctgggtatgggtatgcccccaaccagggacgctattatgaaggctactatgcagcagggccaggctatgggggcagaaatgactctgaccctacctatggtcaacaaggtcacccaaatacctggaaacgggaaccagggtacactcctcctggagcagggaaccagaaccctcctgggatgtatccagtcactggtcccaagaagacctatatcacagatcctgtttcagccccctgtgcgccaccattgcagccaaagggtggccattcagggcaactggggccttcgtcagttgccccttcattccgcccagaggatgagcttgagcacctgaccaaaaagatgctgtatgacatggaaaatccacctgctgacgaatactttggccgctgtgctcgctgtggagaaaacgtagttggggaaggtacaggatgcactgccatggatcaggtcttccacgtggattgttttacctgcatcatctgcaacaacaagctccgagggcagccattctatgctgtggaaaagaaagcatactgcgagccctgctacattaatactctggagcagtgcaatgtgtgttccaagcccatcatggagcggattctccgagccaccgggaaggcctatcatcctcactgtttcacctgcgtgatgtgccaccgcagcctggatgggatcccattcactgtggatgctggcgggctcattcactgcattgaggacttccacaagaaatttgccccgcgatgttctgtgtgcaaggagcctattatgccagccccgggccaggaggagactgtccgtattgtggctttggatcgagatttccatgttcactgctaccgatgcgaggattgcggtggtctcctgtctgaaggagataaccaaggctgctaccccttggatgggcacatcctctgcaagacctgcaactctgcccgcatcagggtgttgaccgccaaggcgagcactgacctttagattcagtcacctgttcagccggcactgagaagaacgaacacaagaaaaagataagaaatactagagtaaaggccatcaaactacgcgatagtctctgttcttcatctgctattaaccttgccttagaaacacataaattatgagattttttttaaaagttgttaccaaatacacatttcacattgaatcatgtaggatcttgatgggcctttgttcccaaggacttccacatttttgcacagattatgctccatcccattcacttctgcattcctgtaacttttaatccctatgtttgtctcacttttcatctggttgaatggcttttcttagtgtggtatttgctgtcacatagtttttcctgggtgagtctgccaactcacaggtgcttttaggcttgaaatctccatcctatcatttccgttttgcctgtgactgtaaagagtagccattcttttcccatgtattgaagaggatattcttctcttgctttatactactcacgtccttggggagggaaatgcacaatttttttttgttaggctgtaaagaatttaagctgtaaattacataagttagaacaagcccaaatttaatttgcaaccatcagaattcagaatctatagtgaccagtgatcaaggctaattggaaaagagttatcggcccatagctaataagtagtgacagacaaccaagcttcaatatttttctaaagaaattacaggtgggatatgctagaaaaggcattttggggttatgtttaaaaaaacattattgtcccacaatattaccttaagatttttcttttccgcactacctgaacattgtaatacagacaaacttgatttcttctagaagataacattttcaatactgtcccacttctcatcttaaaaatattgtcatgtttattctaatatccaacacaactatcaaaattgcctttttctctagaggatgaaggctgtgaaaaaaccgttcaaattctcttctttttcttttttattaccaggtccattttgcctgacaattgcaaatcagagcatacaaaataaaactgtgcagttttgtttggtttactttcaaaagagtagaaagcttgaaaagattctgaaaccacagtttcattattctcataatccttctgcaactgaaattacatattgcaggagacattttcatatcatcaatgtgacatttacaccacactttcaaagacaatcactgaaacaaaaattgtctttatgagctaaaaatatgcagaatctctgcctagaatctttattcaaacttttattagccagtgaaacacttgcttgccaactgccaagccatacttattaagttcgaacatgtttcacttaaggagagacacctagcttagtcatggcaagttgccattttgtaaactaaggattttggactgagatttcttaaatctttcttcaaatctcccacaagtatatacttttaaattatggagtattttaagtctacaaaaaggtataaataataatataatgaattcctatatacctaatacccagtttaagacaccaaatataacaagtataattacatcctccaatgtaccgtttccttattccacagatatctttttcattattgtgaagtgatgttcagatttctagttttttttctagtttttaattttaacatcagaactgaaataaaaaattatggatacgtgttttgaattgcaaactattcctcaggaattccaattaaatttattttacttgaataggaatgatcataaaagtgattctttttttgtgactagaaattcttaagccgatggtcactatagctcatccttaatgtatggctcatttgcttttgtcactaaacggttttgtgttagaaccaccaaaattatagcttttaagagcttcctttgaccactgtctttttcttaccctagttctcttatctttgatcgtatatttctcataatgtgaaatatgatgagattcacttaggggcagcatgttagttttgggaggcaatgtcaactgtgtctctgaattcctgtcttccaaattgaagccagaccatgctgatgacctcaagtagcactgactatttgacaatagggctgataatgtaatcggcttgaattttgacttagtaactttttatgtaatactttcggagaaattctctttaggacaaagcagagagtccaatttattgagggatagattgtatctcttaaagtggtcatattattattaattttgccaaaagaagaagaatttattgaatatttatactataaaatgcagtaacattctacttgcttattacatttaaatccttgtgtaactgaatgtttacatgtcaagaggaaaagctgtaagaaaatgctgtcacagacccatccctgtggcatcgtcagcagaatactgcttgcttacaatctttattatgcattcttataacataacctcagagtatctttaccaaaggtttttaaagtaaatctctttttaagatagacttattcttttataataatgaatgtgcactcatacatatgtagaaacatttagatttagagttttttttttctttcacaaggtataataaggaaaggatcctacaatattttattctagggtttcttaaatatatgatttatattactgtcttttctattaatcatttgatttaaacaatgccaagtcactcttttttagttgcatgaaattttgcctgcaacagagagaaaaagattgtattactttaatgattataatcatactgtctgctgatataatatcataattgttgtggtttaaatacataaatagtagaaaaatcagagtctataacagaaagtttgtaaaaatatactgattttgaaaagtatcaggaatataaatatttggtaattctgtgtaacaagagagacatggaaaaggaaaaaaatccactatatcatgggctctgcagaacatatcaaaataggatttcttaaatttttcaacccccagaccatactgactcaacatggagtctcactggccaagaaaattgcctttaaaactcgaaaataaggccaggtgtggtgactcacacttgtaatcccagcaatttgggaggctgagacaggaggattgcctgaggccaggagtttgacaccagcctgggcaacatagtgagaccttgtctctacaaaaaataaaataaaataaaaaccaaattagccagacatggtggcatgcgcttgtttaaaaaaacaaataaataaataatcgactcaaaaataagtcatgtgtcccagcataaggcatcaggttgttagatgctggcatctctgcagctcaaagatgtgggttctttttcttgtcattaacacattgttatttctgtaggagcaacttctctgatcaaaattacttttctgggtatgtgctgattaagggggtggacttatcaacactataattgttccctatgaaagattccacagagatgtttatggtgaggtttaaaggatatgaaactctacatttaaacaagtattttatatttgggtacagaggaagaaagagagggctttttccatggggctatagtagagagttagtggaatatagacaggactctgaaaacacaacttccagccatttttttagttagtaaaaatcctattaatgtgaaccagccaggaataacagtgttatttctattggatatggtttgggcttctcttgtcaaatctgtgtcggctgccccctgatccttccattatcaagttttgaagggtgttggggaaattatggcagctgctagggagatcagggaaacactgatgtaacctcaaagcctctcaccattcctcttggcttggaaaggctttattttttcatatacatttctagaaatattgctattctaccttagtatttcacatttgtagttcaaacaagcgattgtccatctgttgcctagagctatagtacatgtgtgttatgaatgaaatatgacagcatgttccatacccctgctttagccatctgtgggaaaccagcaaactgaaaaagacacctctgcaaaatgtgcctcaagtccatttcttgggatcgctcgtttggtgcactctcgtgggagacaatcagagaacaacatatacttgtgccttattttcaaagaatctatttacactactatgaatattccactgaagagtcaatgatgtaaatgataaccaccaaatctcaaaaatatactcaccaaaaagtaaaaaagtaaaaaaaaaaaaaaaagaaagaaagaaaagaaagagagagaagtcaacttttcatcttaatatattctagtagtatttattttttccttgtcttggaagtatctcataggtctttaaatgagtaaaacatttttatgccagaaggtgatataatggatgttagtgttttttatttgattttacagtagttttagtcagataatgaggacagagacttcaacttgattctttaccaccattcagcatattttttaattgtcttcattgtatttgcttaatagtggtccagacaagttcaaaacttgttctcagtgaggcattaatatggtgcaaccatgaatatttcaggccaagttattcacttgacagataactagaatgaaacttttctcatgaggctgttgtttggttagcatagccttatttcaaaccttaaaaagttacctgactgaagctactatgacttggtaaggattcttcctctcttgctttcttcctcccttcctttcttcctcttccttcctcctcttcttattttctttcctactttccatcctacctattagtgttgctgtacttggattttttgtaaattaaatcaatgcattatgattttagggaattatgattatattcataaggggaaggctaccagaaaatatatgtggcatccataaaatcttcttttataggggcatattttttaggttgtatttattcgtaaagtgaaatgagataatagagtctttctgtttcatgttaatgaattttcatcagggactgaggtcatagattcttggaaaattcatttgtgactgatctagttttctcagctgtatgcaaagtaatctttcaaagactaggttaagattttttttttaagtctgaagcaatgtaaccccaaaaaattataattttaatgatggcattttattttattccattgcagcttgataactttccttatagcaaaggaataactattgtattttcagaattttaacacagattaacacttagcctgtaagactaataatatattgtaatagttgatactaaaatatttttcagcaggttggacagcaccagtttttcttagatcacagactacaggcagaatttcccttcaatccagaaaaaaggacactaatttccttttctatttaattttcctggcccttgtgcaaaaaattgtggactctatcttagttacaacatgcatgtcccttattttgtggagagctgtgtgaaagatgcgttttttttctttttttcttttttttttttttgagacggagtctggctctgtcacccaggctggagtgcaatggcacgatctcctctcactgcaagctccgcctcccaggttcacgccattctcctgtctcagcctcccgagtagctgggactacaggcgcctgccaccacgcccggctaatttttttgtatttttagtagagatggagtttcacagtgttagccaggatggcctcgatctcctgacctcgtgatccacccgcctcggcctcccaaagtgctgggattacaggcgtgagccaccgtgccccgcgtgtttttttctttagctgattgacaggtccccttcaaagttacaaaaaaaagtgctaatttttgctgttaaattctggttgttatttaattgacagaagtctcttgatgcacgaataaatatctctacatctagcctttgttaaaaataaaaattaatattctacaaacacctacatatactagagaggggtgaaacactgcagctaattcctttataatactttcagatgattgcattaagcctttcatgttatgtggcattgttaatttttcctagatacccatccacttaagggccagagaaatccttattcatttaactctggtgggcatttatgtaacatacccaaataaaaacgttattaaacagccacaatcgcattcagtcaacttggcactgaatgtagcttctaaaatcagttctctaccctacgaatggaatgttctaccaagaaagagaagcatcaccatgtcatcttgtgttctacaccactatagagagttacagttgcccccaaacacgaatgctattcccaaataaaatagaatcatgctttgggaggccaaggcgggccgatcacgaggtcaggagatcgagaccatcctggctaacacggtgaaaccccgtctctactaaaaaaaaaaaaaaatacaaaaaattagcctggctcagtggcgggcgcctgtagtcccagctactcaggaggctgaggcaggagaatggcgtgaacccgggaagcggagctttcagtgagccgagatagcgccactgcagtccggcctgggcgaaagagcgagactccgtctcaaaaaaaaaaaaaaaaaaataggatcatggcccttttaaagatctgaatcttctctgttattttcctgatgaatcaccatcccatatcttcttagtcctggccagtatgtagttgcgctcacatacgtctattctagctctgtagctccacaaaacaagtcttaagtccaaatctttgcctcttcatgtctgatatcaccaactcattcagcttttcttcacttattgacatagtgtcatgtcctatcactctctgctgcttctttaaacagtggacacaaacatattttctaattttcagtgtactcagtgaaacttggcagttcaccatgagtcaggctaggttgaaaggctttctttagggttgaaagtaaacgaaattggaatcacccaaagagaatttccccaaaaaacctcagacccagaagtgtaaaagctacagaaggatagaactcccatgtctacagacagttctgttactttttgttctgtactattttggatgttgccaaaatcaaattcatcctgaaaacaggaagcaagctaatgcatatgccatccatgagattcccacttctgggtcagttcatattccattcaaccttttccttttatccttgtcttcttcagaataagacatttttcctccatattttcatattaaatattaacactttataggttctactttaatatatggacactttacaggttatacataaatatttgctggttgattgatttcgagattcattcattctgtgctcaaatatttgtacctagagacgttacatgttagaaaaagtgagcagcttctttctctaatcatttaggagtccatatttttcttttctttttgttctcccaacatccttatctcttactcagctcttcaatttataattaccaaataatcactgttagagaatcagcccctaagtaactttgattctggccaactgtaataagatccaaccacttaaatctgtacttactcaataggaaggaatgtgacatcaggaagagtcattccagtgacattagtaagactttatggagtacataaaatttgataagaaatcttgagctgattctttgacttgatttagaagttgagaaaagagtatttaaggcacaacagggaaacatgggctatactcagagaagaccctctgcattggccaaaatatcatggattctggaaattccttcttaacagaaaaaaaaggcttccaaataatcaggctgaatgggaagaaaaaggcatagaggaagcctgaggaagtatttacttgcttttcccatctctttataattggaagagaagatgatctgccaaaatataacccagcatgcacagtatggacaggaagcagccctccatgaactttattatcacagaatatgagcattcttattgatccacagctacatcttctattcttgcagcaagggtacatgtcctttgaccctccacaaaagaacaagcaggacatctctattttcctattgagtctgagtccattattagaaaggacttcccagccatcttttctacttggtattaaaattcccttacagattcattgctaagtgccaattctttttttttcttttgagacggagtcttgctctgtcgcccaggctggagtgcagtggcgcaatctcggctcactgcaagctccgcttctcgggttcacgccattctcctgcctcagcctcccgagtagctgggactacagacgcccgccaccgcgcccagctaattttttttgtacttttagtagagacggggtttcaccgtggtctcgatctcctgacctcgtgatccgcccgcctcggcctcccaaagtgccaattctgactctacttaaacatcacctgtatcagggagctcattattccttgaggtcttacatttctttcagcacattttgttccaagctacacgactttaaaacagagccagcctttggggcatatgttctctttggtgccacacaaaacctgtagtacatgatacagtgttgcttcccccctccttttccttccatatatatttgttttgttttgggcattgcattacttttttgaatttttaagaatctctaaaattagtctgaaggatgttctgagggccagacattagaatttgtgagtttttttgttgctggttgtactttcctatttagaagacagaccgttctgacagttgttgtgtagcttcatgccttccccagtaactaacccatgaacagtacaccccttttatctgacttgttgataatgaccttaaaaatgttaggaaatgggccgggcgcggtggctcgtgcctgtaatccagcactttgggaggccgaggcgagcggatcatgaggtcaagagatcgagaccatcctggtcaacatggtgaaaccccgactctactaaaaaaaatacaaaaattagccgggcgtgttggcgggcgcctgtagtcccaactacttgggaggctgaggcaggagaatcacctgaacccaggaggcagaggttgcagtgagcagagattgcgccactgcactccagcctgggcgacagaacgagactccgtctcaaaaaaaaaaaaaaaaaaaaaaggttgggaaatattggtgtataatccccatgtctaacaaggaagaagtcaaaagcaaaagatagtggtattgccgaaaactcattatttctagttagttcatctgtggaaaaggatatcgttcttgaggagaggggttctattatgctatagttttctatggaaatgtacaaatgctttcctcattgctctggatgactatttagtttaaataatatacctttgtcatggggaagaccatgattgtggcttcttctaccccaactttgaatgagagagcactgtaagcagaaactgccatcagtctcctgggcaggacctggaggtaactttctgagctgtaaaatagtaattcctaagagagcttacaaactgcttccacacagaaaatagcgcagggaggacagttattagtacccctattctagaagagaaagctgaggctcaagccattaagtgacttgccaaaagctgtgacatagctgggaagtggcagatttggggatataaccaggtcttgcaagtccagtgctgtctccaagtagccacgctcacagctgagaacaccttagaggacaatatcgacttcttacagactaccaagcccccagtcatccagggaaattcagagaccaattgactgccaggtggcaaatccacatgtgtactgcggtctttagagatcatttagagcttgcacacatctgtgtcttcttgtgggaaacctctaggtattctgtctgatcagcactgtgaggaagttggtgggaaaaggccactgataagaacaaacaatgggcagaaggaagcacattgcaataaatttccccagagagagttcctttacattccattcaccaaaaacctctctggaactgtcaggttcagaatatcaaccaagaccatatcatttagaattcattggcatgtagaggtgactcgattcctaaaagaagcctctctcccatgaaccacgatgtacgttccacagaggcagaaaccgccgtaggttagcaatgcattttagtctttctctccattcacatttactgagagcacaccacgtgcatgttgctgcaacaggcatttccgatagagccgatccatgagctaacaatgtctgaaaacaaatgttatggaactgttggcatttctgagatttggcctttgccatttgatagactttgcttcccaggatgctgtcattttgtgattttttataattacaaggaatttggtaccatgttgttttcaaaaaacctcctagaaagtctccatgtatgctctagaagttgctctacgtaacagttcagcaagcaagtgttccttctcttgagctgcgtccctcaggaagctgtacctttagggtgtgctttccactttttatttcctctcatttcactcctttcattgtttgctatatcctaaaatatgtgaagtgagagaaaaaatatcatttcttctcattaaatctcctgcattaaatctaagaatcctttaaaataatcacacctgataagtgttttatgcatttccctccctggagtgttatcatccatcaagccagtatcatcatccacctgcttattccttgggactaatgagagccaagttaaatagcaaatgacttctcaccccttcctagtcctcatgcctgaggaataagggcgacattaatgggagcgggagagtggtggctttggttgagatgcacgttcacagactagaaaagtgcctcacctccatggtgtatatgtgccaccttttcttaatccagtctatcattgttggacatttgggttggttccaagtctttgctattgtgaatagtgccgcaataaacataagtgtgcatgtgtctttatagcagcatgatttataatcctttgggtatatacccagtaatgggatggctgggtcaaatggtatttctagttctagatccctgaggaatctccacactgacttccacaatggttgaactagttcacagtcccaccaacagtgtaaaagtgttcttatttctccacatcctctccagcacctgttgtttcctgactttttaatgattgccattctaactggtgtgagatggtatctcatagtggttttgatttgcatttctctgatggccagtgatggtgagcattttttcatgtgtttcttggctgcataaatgtcttcttttgagaagtgtctgttcaatactatgcagccataaaaaatgatgagttcatgtcctttgtagggacatggatgaaattggaaatcatcattctcagtaaactatctcaaggacaaaaaaccaaacaccacatgttctcactcacaggtgggaattgaacaatgagaacacatggacacaggaaggggaacatcacactctggggactgttgtggggtggagggaggagggagggatagcattaggagatatacctaatgctaaatgacgagttaatgggtgcagcacaccagcatggcacatgtatacatatgtaactaacctgcacattgtgcacatgtaccctaaaacttaaagtataataataatgaaataaaattaaaaaaaaaaaagaaaagtgcctcacctccctgtgaggcttgatgaatattgtggccagtgagtggaaaatgattcttgtcgaatagacagagtattcccaccccaggaatggattaatagaagacacaatttgagcacttctcagaattatctagtatgcctgagtagagactcacatgggtggaatctgtgttgtctcatcagagggaataaaaagacaatgaggtggtaaatgtgaaaaaagcagccttttagaaaaacattattttcaaatacctttataaatcatctaatttatcttcacataatataaagaaaaaactaataaaaattttcgtatttcactttacataatatgttctcccatatttagggatcatacaattgtattgtcttcaaaacacacacacacacacatacacacacacacacacacacacacacaccccttccaagaaagctgatccttcagaaaataaatcttatttttaagcacttgggttttcaggccagaaaattaataaatcctaaacctgacccatttttgtaacagctaaaaaggagaagaaaaagctagttaaattttgtgtggatccatttatctcttaaaatatgccaaagcaatttgaggtgggggtggaaacaggtatttatctctcatgcgtgattctctctttatatttctatctgttgggaaaagggtaaagaactattcttggtcattattgatgtattgtgttgccactttgtatggtgcctgctgtgctttatcccgaggcatagcagtaatcgttactatcttgactctttccttcatcacaagagagtaaatatgaagtctgaatgtcgttcctcacccccaaattgtttaactctgcttccaaactagtttaagaaatgcaaaatgggaagagctagcttttcttagatacatttcttccttttttattctttcttgggagacgttaagtataaaagggaaaaagtcagttccttcttctctctctttctctttgggtgacagcaatgctcacttagtaattataaactggaaataggagagtagcttgagcaggttatgatatatctgcccaatgtgtttcattccttcaaacataaactttgagagtaaaagagatttttataatttaaatgccaacgacaggaatggcctcatgttttaactttcaaataataaatggggagttggtatttgggcagagtttgcattttactaatcctatatactttgagcttagtttttagaattgtgtcaaatacatcaacatatcaggattatagtgccaaaaatagttaaagtgccttggtcctccctctgtaggcagcaaattgaaactaacatgggaccatgccatccttctagcataatggagaagtctgaactgaggagtatctttgatgaaagacatttaggaccctagaaactaaatcttgtcaccaagactttatagtaaagtagtagcaaaattatttttaaaagactttcttccttttactacccatttcctctcttgggaaagctgatgagcaaattatccaagactcatttctttattaggcaaagtcagaatatttcccctctgaaaatctgaattatgccctcattctttttcaagaaatatctcaaagagcaaatagaattaaacatgacacttgattgtctgattatttggcatgtataaaattatcatgtggcttaatgtgccttaagtgaaaatttaaacttagacctgaaacctttacagttggatgtagcgttgagcttttgcatgttttctgtataataaaccacttttgttttgtttgttttgtcttttaacctacacctttatcattactctaacagatttagggcttctctttctctacagctaagtaagggaatatgtgcaattatgagacatacaaaaaaggaaagggaaaggactttctaagtagcaaatctgtgccatgaagtagatgtggcgtgaagatacagagcctgaggatagtaattttccctgagccacgcacacaggcttttatttcatgccttttctctttctgtgccgtcacctttgagaaaaacgattgcaccttctccaagtctgcctttttaacagctacagttaagttggcaagacttccccagctctgaatatagccatttgccgactccggcctctttgcgagactgactcaaatctgtgatcttctgttcagcatacacatcagcaaagtgagaagatgagcactaaatataggctctattaactttacttttagatttactgccttcaaaaagtgcctattctgagcaacataaacgttattccttacatatgtatgtacacacggtacccagagtcgtactgtgcagccttcaaaaacataccatcagaaagagtaggtgctgagataaggaaactttgccaaatgaaagaaagtcactcacttccaatatcccctctcaagcggctaccgtgaaacgggctgcaaacacattccctgagcatcccttgctgatacagcttctttatatttatatcctactggatggtagcatattgctaaggtttcctgtactctgcttcaagggaatgtaagctttatggcattgaaacatttagggaaaaaaaagatgtttaagagaattaatagagccgtagtctgtattaggatgtgtgtcatatgtgtgttctataaactaagcatcggtgggtttagagtgttaaagtgtcagcacattccttctccttttgtctctcaggctaacatgagagaaaatagaaaagtcttggctgtggggattggaagctcagggggccaaatgtccttgccagatccttagagcattactttgactcctaaaaatagtagtgtatgttatttgatggcttttgtttccatagttccatcactgacaaaactgtcaatactgttgatggagcagcagcatagcctagagtgatgcattcttacccagaggtggcaataggagagggtccatgtaaataggacgaggtagacagtgcatgattgtaggagaagggttgaagggaggacatgattccaaaaaagatcgttctcaatgtgtcgtctgactcaaccagctggcagattacacttgccaagtcgttccctttccttctaagtcagttggctccatattcacttgaatatgcctctgtttgggcaaagcaagatacctccacttaacctttatccaaggaagctcttggtgtcctcttggtcataaagttgtctcctacctaacccagttttaccaaatggaagtaaaaggggacaaactatggaagatggactccatgccattgcagtcagccaccattctcttttccatataaggagccccattacataagctacgggtgaggttggaacagctatgtttcataatttcaagagtgtgaccaccctgctctagtcatcatcattggatgaatccagttgactctttggcaaaagggtgatacttttcactaaaaatgcctactcttcctgttgatgttccttttctgtttttaccttgtccaatttccacactagtcattttttttattttttagaggatcagattttagcgctggaaaatgagttcaaaaatttcagtgtaatgtcataaggatgttgggatacagagattttttttttccttggaaacaaatggactgggaagaaacacagcatggctttgctctgagtttcaatctgatgattatgaccatggaagatagtcttatgtaaaggttaaatggtgtttacaagtggatagataaggcggagatggtgagaagccgggttttctctatgctaaatgtgtctactaagagcagcacttcctactagctaagcacaatcatagccccaccgtgatgagctgctagtctgaataacattccctgacttagggaaaggcacacaaaaacatataaagaatatgtctattttcatatgtgtgatactgacagagccatggtattcctaaaatataggtttctcttttttcttgtattcttagcaaattgcatttattcactacattacaaaccatcactgatgtatccaaaatagcacacatagttcagtatgaaaataagagaataaaatctgttataagcaagtgatttaggtattttcttttgtgtttatgcattatctgactatattaaaacctgtttttctatttaccttctatcagttttctctaccaattatgttttttcaatgctctataagaatgaatatggaaattatatttcttttttctgtaaaagagttgcaactactttattatatttagaaatccaataaacttcttattacattta

SEQ ID NO: 149206 - DNA, 3219 bp, Homo sapiens
  Payload ID: 9457
  Gene Symbol: LIMK1
  Gene Name: LIM domain kinase 1
  Uniprot ID: P53667
  ENST ID: ENST00000336180
  CDS Start-End: 52-1995
cccggccgcccccagccccagccccgccgggccccgccccccgtcgagtgcatgaggttgacgctactttgttgcacctggagggaagaacgtatgggagaggaaggaagcgagttgcccgtgtgtgcaagctgcggccagaggatctatgatggccagtacctccaggccctgaacgcggactggcacgcagactgcttcaggtgttgtgactgcagtgcctccctgtcgcaccagtactatgagaaggatgggcagctcttctgcaagaaggactactgggcccgctatggcgagtcctgccatgggtgctctgagcaaatcaccaagggactggttatggtggctggggagctgaagtaccaccccgagtgtttcatctgcctcacgtgtgggacctttatcggtgacggggacacctacacgctggtggagcactccaagctgtactgcgggcactgctactaccagactgtggtgacccccgtcatcgagcagatcctgcctgactcccctggctcccacctgccccacaccgtcaccctggtgtccatcccagcctcatctcatggcaagcgtggactttcagtctccattgaccccccgcacggcccaccgggctgtggcaccgagcactcacacaccgtccgcgtccagggagtggatccgggctgcatgagcccagatgtgaagaattccatccacgtcggagaccggatcttggaaatcaatggcacgcccatccgaaatgtgcccctggacgagattgacctgctgattcaggaaaccagccgcctgctccagctgaccctcgagcatgaccctcacgatacactgggccacgggctggggcctgagaccagccccctgagctctccggcttatactcccagcggggaggcgggcagctctgcccggcagaaacctgtcttgaggagctgcagcatcgacaggtctccgggcgctggctcactgggctccccggcctcccagcgcaaggacctgggtcgctctgagtccctccgcgtagtctgccggccacaccgcatcttccggccgtcggacctcatccacggggaggtgctgggcaagggctgcttcggccaggctatcaaggtgacacaccgtgagacaggtgaggtgatggtgatgaaggagctgatccggttcgacgaggagacccagaggacgttcctcaaggaggtgaaggtcatgcgatgcctggaacaccccaacgtgctcaagttcatcggggtgctctacaaggacaagaggctcaacttcatcactgagtacatcaagggcggcacgctccggggcatcatcaagagcatggacagccagtacccatggagccagagagtgagctttgccaaggacatcgcatcagggatggcctacctccactccatgaacatcatccaccgagacctcaactcccacaactgcctggtccgcgagaacaagaatgtggtggtggctgacttcgggctggcgcgtctcatggtggacgagaagactcagcctgagggcctgcggagcctcaagaagccagaccgcaagaagcgctacaccgtggtgggcaacccctactggatggcacctgagatgatcaacggccgcagctatgatgagaaggtggatgtgttctcctttgggatcgtcctgtgcgagatcatcgggcgggtgaacgcagaccctgactacctgccccgcaccatggactttggcctcaacgtgcgaggattcctggaccgctactgccccccaaactgccccccgagcttcttccccatcaccgtgcgctgttgcgatctggaccccgagaagaggccatcctttgtgaagctggaacactggctggagaccctccgcatgcacctggccggccacctgccactgggcccacagctggagcagctggacagaggtttctgggagacctaccggcgcggcgagagcggactgcctgcccaccctgaggtccccgactgagccagggccactcagctgcccctgtccccacctctggagaatccacccccaccagattcctccgcgggaggtggccctcagctgggacagtggggacccaggcttctcctcagagccaggccctgacttgccttctcccaccccgtggaccgcttcccctgccttctctctgccgtggcccagagccggcccagctgcacacacacaccatgctctcgccctgctgtaacctctgtcttggcagggctgtcccctcttgcttctccttgcatgagctggagggcctgtgtgagttacgcccctttccacacgccgctgccccagcaaccctgttcacgctccacctgtctggtccatagctccctggaggctgggccaggaggcagcctccgaaccatgccccatataacgcttgggtgcgtgggagggcgcacatcagggcagaggccaagttccaggtgtctgtgttcccaggaaccaaatggggagtctggggcccgttttccccccagggggtgtctaggtagcaacaggtatcgaggactctccaaacccccaaagcagagagagggctgatcccatggggcggaggtccccagtggctgagcaaacagccccttctctcgctttgggtcttttttttgtttctttcttaaagccactttagtgagaagcaggtaccaagcctcagggtgaagggggtcccttgagggagcgtggagctgcggtgccctggccggcgatggggaggagccggctccggcagtgagaggataggcacagtggaccgggcaggtgtccaccagcagctcagcccctgcagtcatctcagagccccttcccgggcctctcccccaaggctccctgcccctcctcatgcccctctgtcctctgcgttttttctgtgtaatctattttttaagaagagtttgtattattttttcatacggctgcagcagcagctgccaggggcttgggattttatttttgtggcgggcgggggtgggagggccattttgtcactttgcctcagttgagcatctaggaagtattaaaactgtgaagctttctcagtgcactttgaacctggaaaacaatcccaacaggcccgtgggaccatgacttagggaggtgggacccacccacccccatccaggaaccgtgacgtccaaggaaccaaacccagacgcagaacaataaaataaattccgtactccccaccca

SEQ ID NO: 149207 - DNA, 3360 bp, Homo sapiens
  Payload ID: 9457
  Gene Symbol: LIMK1
  Gene Name: LIM domain kinase 1
  ENST ID: ENST00000418310
  CDS Start-End: 103-2136
actgggttcacgtgggcacgtggctccactccggtcactgcttcctgggcagagggatgacgtggaaggtagacctaggggggacagggttgcttcctgcccatgtccagcattctagaattgtccacatctaggcagggcgttccaccatcagtgctggactggaccacccaattcctttggacgcttgactcagcccaaacccgtgctccctccaggaccctgggcagggcagccccagctccaggaagcgagttgcccgtgtgtgcaagctgcggccagaggatctatgatggccagtacctccaggccctgaacgcggactggcacgcagactgcttcaggtgttgtgactgcagtgcctccctgtcgcaccagtactatgagaaggatgggcagctcttctgcaagaaggactactgggcccgctatggcgagtcctgccatgggtgctctgagcaaatcaccaagggactggttatggtggctggggagctgaagtaccaccccgagtgtttcatctgcctcacgtgtgggacctttatcggtgacggggacacctacacgctggtggagcactccaagctgtactgcgggcactgctactaccagactgtggtgacccccgtcatcgagcagatcctgcctgactcccctggctcccacctgccccacaccgtcaccctggtgtccatcccagcctcatctcatggcaagcgtggactttcagtctccattgaccccccgcacggcccaccgggctgtggcaccgagcactcacacaccgtccgcgtccagggagtggatccgggctgcatgagcccagatgtgaagaattccatccacgtcggagaccggatcttggaaatcaatggcacgcccatccgaaatgtgcccctggacgagattgacctgctgattcaggaaaccagccgcctgctccagctgaccctcgagcatgaccctcacgatacactgggccacgggctggggcctgagaccagccccctgagctctccggcttatactcccagcggggaggcgggcagctctgcccggcagaaacctgtcttgaggagctgcagcatcgacaggtctccgggcgctggctcactgggctccccggcctcccagcgcaaggacctgggtcgctctgagtccctccgcgtagtctgccggccacaccgcatcttccggccgtcggacctcatccacggggaggtgctgggcaagggctgcttcggccaggctatcaaggtgacacaccgtgagacaggtgaggtgatggtgatgaaggagctgatccggttcgacgaggagacccagaggacgttcctcaaggaggtgaaggtcatgcgatgcctggaacaccccaacgtgctcaagttcatcggggtgctctacaaggacaagaggctcaacttcatcactgagtacatcaagggcggcacgctccggggcatcatcaagagcatggacagccagtacccatggagccagagagtgagctttgccaaggacatcgcatcagggatggcctacctccactccatgaacatcatccaccgagacctcaactcccacaactgcctggtccgcgagaacaagaatgtggtggtggctgacttcgggctggcgcgtctcatggtggacgagaagactcagcctgagggcctgcggagcctcaagaagccagaccgcaagaagcgctacaccgtggtgggcaacccctactggatggcacctgagatgatcaacggccgcagctatgatgagaaggtggatgtgttctcctttgggatcgtcctgtgcgagatcatcgggcgggtgaacgcagaccctgactacctgccccgcaccatggactttggcctcaacgtgcgaggattcctggaccgctactgccccccaaactgccccccgagcttcttccccatcaccgtgcgctgttgcgatctggaccccgagaagaggccatcctttgtgaagctggaacactggctggagaccctccgcatgcacctggccggccacctgccactgggcccacagctggagcagctggacagaggtttctgggagacctaccggcgcggcgagagcggactgcctgcccaccctgaggtccccgactgagccagggccactcagctgcccctgtccccacctctggagaatccacccccaccagattcctccgcgggaggtggccctcagctgggacagtggggacccaggcttctcctcagagccaggccctgacttgccttctcccaccccgtggaccgcttcccctgccttctctctgccgtggcccagagccggcccagctgcacacacacaccatgctctcgccctgctgtaacctctgtcttggcagggctgtcccctcttgcttctccttgcatgagctggagggcctgtgtgagttacgcccctttccacacgccgctgccccagcaaccctgttcacgctccacctgtctggtccatagctccctggaggctgggccaggaggcagcctccgaaccatgccccatataacgcttgggtgcgtgggagggcgcacatcagggcagaggccaagttccaggtgtctgtgttcccaggaaccaaatggggagtctggggcccgttttccccccagggggtgtctaggtagcaacaggtatcgaggactctccaaacccccaaagcagagagagggctgatcccatggggcggaggtccccagtggctgagcaaacagccccttctctcgctttgggtcttttttttgtttctttcttaaagccactttagtgagaagcaggtaccaagcctcagggtgaagggggtcccttgagggagcgtggagctgcggtgccctggccggcgatggggaggagccggctccggcagtgagaggataggcacagtggaccgggcaggtgtccaccagcagctcagcccctgcagtcatctcagagccccttcccgggcctctcccccaaggctccctgcccctcctcatgcccctctgtcctctgcgttttttctgtgtaatctattttttaagaagagtttgtattattttttcatacggctgcagcagcagctgccaggggcttgggattttatttttgtggcgggcgggggtgggagggccattttgtcactttgcctcagttgagcatctaggaagtattaaaactgtgaagctttctcagtgcactttgaacctggaaaacaatcccaacaggcccgtgggaccatgacttagggaggtgggacccacccacccccatccaggaaccgtgacgtccaaggaaccaaacccagacgcagaacaataaaataaattccgtactccccaccca

SEQ ID NO: 149208 - DNA, 1883 bp, Homo sapiens
  Payload ID: 9457
  Gene Symbol: LIMK1
  Gene Name: LIM domain kinase 1
  Uniprot ID: P53667
  ENST ID: ENST00000435201
  CDS Start-End: 1-918
atgaggttgacgctactttgttgcacctggagggaagaacgtatgggagaggaaggaagcgagttgcccgtgtgtgcaagctgcggccagaggatctatgatggccagtacctccaggccctgaacgcggactggcacgcagactgcttcaggtgttgtgactgcagtgcctccctgtcgcaccagtactatgagaaggatgggcagctcttctgcaagaaggactactgggcccgctatggcgagtcctgccatgggtgctctgagcaaatcaccaagggactggttatggtggctggggagctgaagtaccaccccgagtgtttcatctgcctcacgtgtgggacctttatcggtgacggggacacctacacgctggtggagcactccaagctgtactgcgggcactgctactaccagactgtggtgacccccgtcatcgagcagatcctgcctgactcccctggctcccacctgccccacaccgtcaccctggtgtccatcccagcctcatctcatggcaagcgtggactttcagtctccattgaccccccgcacggcccaccgggctgtggcaccgagcactcacacaccgtccgcgtccagggagtggatccgggctgcatgagcccagatgtgaagaattccatccacgtcggagaccggatcttggaaatcaatggcacgcccatccgaaatgtgcccctggacgagattgacctgctgattcaggaaaccagccgcctgctccagctgaccctcgagcatgaccctcacgatacactgggccacgggctggggcctgagaccagccccctgagctctccggcttatactcccagcggggaggcgggcagctctgcccggcagaaacctgtcttcgcaaggacctgggtcgctctgagtccctccgcgtagtctgccggccacaccgcatcttccggccgtcggacctcatccacggggaggtgctgggcaagggctgcttcggccaggctatcaaggtgacacaccgtgagacaggtgaggtgatggtgatgaaggagctgatccggttcgacgaggagacccagaggacgttcctcaaggaggtgaaggtcatgcgatgcctggaacaccccaacgtgctcaagttcatcggggtgctctacaaggacaagaggctcaacttcatcactgagtacatcaagggcggcacgctccggggcatcatcaagagcatggacagccagtacccatggagccagagagtgagctttgccaaggacatcgcatcagggatggcctacctccactccatgaacatcatccaccgagacctcaactcccacaactgcctggtccgcgagaacaagaatgtggtggtggctgacttcgggctggcgcgtctcatggtggacgagaagactcagcctgagggcctgcggagcctcaagaagccagaccgcaagaagcgctacaccgtggtgggcaacccctactggatggcacctgagatgatcaacggccgcagctatgatgagaaggtggatgtgttctcctttgggatcgtcctgtgcgagatcatcgggcgggtgaacgcagaccctgactacctgccccgcaccatggactttggcctcaacgtgcgaggattcctggaccgctactgccccccaaactgccccccgagcttcttccccatcaccgtgcgctgttgcgatctggaccccgagaagaggccatcctttgtgaagctggaacactggctggagaccctccgcatgcacctggccggccacctgccactgggcccacagctggagcagctggacagaggtttctgggagacctaccggcgcggcgagagcggactgcctgcccaccctgaggtccccgactga

SEQ ID NO: 149209 - DNA, 2170 bp, Homo sapiens
  Payload ID: 9457
  Gene Symbol: LIMK1
  Gene Name: LIM domain kinase 1
  Uniprot ID: P53667
  ENST ID: ENST00000538333
  CDS Start-End: 172-2013
aagtcccctggcacccacgcggctgcagcctcctcctgtgcgctgcagccacgctggccccaccctctgcagcctccaatcctgagcccctgagggaggatggggaagcagctggtctggccacccctgccctcccttagacctccagagcccccagtgtagccacagaggatgctgttggcttcagccccaagaagacgccgcttcctccagagggctaagtgttgtgactgcagtgcctccctgtcgcaccagtactatgagaaggatgggcagctcttctgcaagaaggactactgggcccgctatggcgagtcctgccatgggtgctctgagcaaatcaccaagggactggttatggtggctggggagctgaagtaccaccccgagtgtttcatctgcctcacgtgtgggacctttatcggtgacggggacacctacacgctggtggagcactccaagctgtactgcgggcactgctactaccagactgtggtgacccccgtcatcgagcagatcctgcctgactcccctggctcccacctgccccacaccgtcaccctggtgtccatcccagcctcatctcatggcaagcgtggactttcagtctccattgaccccccgcacggcccaccgggctgtggcaccgagcactcacacaccgtccgcgtccagggagtggatccgggctgcatgagcccagatgtgaagaattccatccacgtcggagaccggatcttggaaatcaatggcacgcccatccgaaatgtgcccctggacgagattgacctgctgattcaggaaaccagccgcctgctccagctgaccctcgagcatgaccctcacgatacactgggccacgggctggggcctgagaccagccccctgagctctccggcttatactcccagcggggaggcgggcagctctgcccggcagaaacctgtcttgaggagctgcagcatcgacaggtctccgggcgctggctcactgggctccccggcctcccagcgcaaggacctgggtcgctctgagtccctccgcgtagtctgccggccacaccgcatcttccggccgtcggacctcatccacggggaggtgctgggcaagggctgcttcggccaggctatcaaggtgacacaccgtgagacaggtgaggtgatggtgatgaaggagctgatccggttcgacgaggagacccagaggacgttcctcaaggaggtgaaggtcatgcgatgcctggaacaccccaacgtgctcaagttcatcggggtgctctacaaggacaagaggctcaacttcatcactgagtacatcaagggcggcacgctccggggcatcatcaagagcatggacagccagtacccatggagccagagagtgagctttgccaaggacatcgcatcagggatggcctacctccactccatgaacatcatccaccgagacctcaactcccacaactgcctggtccgcgagaacaagaatgtggtggtggctgacttcgggctggcgcgtctcatggtggacgagaagactcagcctgagggcctgcggagcctcaagaagccagaccgcaagaagcgctacaccgtggtgggcaacccctactggatggcacctgagatgatcaacggccgcagctatgatgagaaggtggatgtgttctcctttgggatcgtcctgtgcgagatcatcgggcgggtgaacgcagaccctgactacctgccccgcaccatggactttggcctcaacgtgcgaggattcctggaccgctactgccccccaaactgccccccgagcttcttccccatcaccgtgcgctgttgcgatctggaccccgagaagaggccatcctttgtgaagctggaacactggctggagaccctccgcatgcacctggccggccacctgccactgggcccacagctggagcagctggacagaggtttctgggagacctaccggcgcggcgagagcggactgcctgcccaccctgaggtccccgactgagccagggccactcagctgcccctgtccccacctctggagaatccacccccaccagattcctccgcgggaggtggccctcagctgggacagtggggacccaggcttctcctcagagccaggccctgacttgccttctcccaccccgtggaccgcttcc

SEQ ID NO: 149210 - DNA, 3462 bp, Homo sapiens
  Payload ID: 9458
  Gene Symbol: LIMK2
  Gene Name: LIM domain kinase 2
  Uniprot ID: P53671
  ENST ID: ENST00000333611
  CDS Start-End: 316-2169
ctcaagaatgccagtgtgtgtgtagcctccacagagaggtcgttttctcggagtccagaggggccgcctgagcttctgagaactagggaggagccatcccagccatgagcccctgtgggaatctgctgggggccaagtggcctggagtcctcaggctcccgcagctgctccggagggagaggtgagctcagggcagcctgcctgcagccagaggtgccgggagccccgggcctgtcatggtggccatctacagccggcctgaggcagtcacagacggatttgcagctgagcctgtctatctggtgtgggaagaagatggggagttacttgtcagtcccggcttacttcacctccagagacctgtttcggtgttcagaatgccaggattccctcaccaactggtactatgagaaggatgggaagctctactgccccaaggactactgggggaagtttggggagttctgtcatgggtgctccctgctgatgacagggccttttatggtggctggggagttcaagtaccacccagagtgctttgcctgtatgagctgcaaggtgatcattgaggatggggatgcatatgcactggtgcagcatgccaccctctactgtgggaagtgccacaatgaggtggtgctggcacccatgtttgagagactctccacagagtctgttcaggagcagctgccctactctgtcacgctcatctccatgccggccaccactgaaggcaggcggggcttctccgtgtccgtggagagtgcctgctccaactacgccaccactgtgcaagtgaaagaggtcaaccggatgcacatcagtcccaacaatcgaaacgccatccaccctggggaccgcatcctggagatcaatgggacccccgtccgcacacttcgagtggaggaggtggaggatgcaattagccagacgagccagacacttcagctgttgattgaacatgaccccgtctcccaacgcctggaccagctgcggctggaggcccggctcgctcctcacatgcagaatgccggacacccccacgccctcagcaccctggacaccaaggagaatctggaggggacactgaggagacgttccctaaggcgcagtaacagtatctccaagtcccctggccccagctccccaaaggagcccctgctgttcagccgtgacatcagccgctcagaatcccttcgttgttccagcagctattcacagcagatcttccggccctgtgacctaatccatggggaggtcctggggaagggcttctttgggcaggctatcaaggtgacacacaaagccacgggcaaagtgatggtcatgaaagagttaattcgatgtgatgaggagacccagaaaacttttctgactgaggtgaaagtgatgcgcagcctggaccaccccaatgtgctcaagttcattggtgtgctgtacaaggataagaagctgaacctcctgacagagtacattgaggggggcacactgaaggactttctgcgcagtatggatccgttcccctggcagcagaaggtcaggtttgccaaaggaatcgcctccggaatggcctatttgcactctatgtgcatcatccaccgggatctgaactcgcacaactgcctcatcaagttggacaagactgtggtggtggcagactttgggctgtcacggctcatagtggaagagaggaaaagggcccccatggagaaggccaccaccaagaaacgcaccttgcgcaagaacgaccgcaagaagcgctacacggtggtgggaaacccctactggatggcccctgagatgctgaacggaaagagctatgatgagacggtggatatcttctcctttgggatcgttctctgtgagatcattgggcaggtgtatgcagatcctgactgccttccccgaacactggactttggcctcaacgtgaagcttttctgggagaagtttgttcccacagattgtcccccggccttcttcccgctggccgccatctgctgcagactggagcctgagagcagaccagcattctcgaaattggaggactcctttgaggccctctccctgtacctgggggagctgggcatcccgctgcctgcagagctggaggagttggaccacactgtgagcatgcagtacggcctgacccgggactcacctccctagccctggcccagccccctgcaggggggtgttctacagccagcattgcccctctgtgccccattcctgctgtgagcagggccgtccgggcttcctgtggattggcggaatgtttagaagcagaacaagccattcctattacctccccaggaggcaagtgggcgcagcaccagggaaatgtatctccacaggttctggggcctagttactgtctgtaaatccaatacttgcctgaaagctgtgaagaagaaaaaaacccctggcctttgggccaggaggaatctgttactcgaatccacccaggaactccctggcagtggattgtgggaggctcttgcttacactaatcagcgtgacctggacctgctgggcaggatcccagggtgaacctgcctgtgaactctgaagtcactagtccagctgggtgcaggaggacttcaagtgtgtggacgaaagaaagactgatggctcaaagggtgtgaaaaagtcagtgatgctccccctttctactccagatcctgtccttcctggagcaaggttgagggagtaggttttgaagagtcccttaatatgtggtggaacaggccaggagttagagaaagggctggcttctgtttacctgctcactggctctagccagcccagggaccacatcaatgtgagaggaagcctccacctcatgttttcaaacttaatactggagactggctgagaacttacggacaacatcctttctgtctgaaacaaacagtcacaagcaaaggaagaggctgggggactagaaagaggccctgccctctagaaagctcagatcttggcttctgttactcatactcgggtgggctccttagtcagatgcctaaaacattttgcctaaagctcgatgggttctggaggacagtgtggcttgtcacaggcctagagtctgagggaggggagtgggagtctcagcaatctcttggtcttggcttcatggcaaccactgctcacccttcaacatgcctggtttaggcagcagcttgggctgggaagaggtggtggcagagtctcaaagctgagatgctgagagagatagctccctgagctgggccatctgacttctacctcccatgtttgctctcccaactcattagctcctgggcagcatcctcctgagccacatgtgcaggtactggaaaacctccatcttggctcccagagctctaggaactcttcatcacaactagatttgcctcttctaagtgtctatgagcttgcaccatatttaataaattgggaatgggtttggggtattaa

SEQ ID NO: 149211 - DNA, 3670 bp, Homo sapiens
  Payload ID: 9458
  Gene Symbol: LIMK2
  Gene Name: LIM domain kinase 2
  Uniprot ID: P53671
  ENST ID: ENST00000331728
  CDS Start-End: 115-2031
gtggtcttcccgcgcctgaggcggcggcggcaggagctgaggggagttgtagggaactgaggggagctgctgtgtcccccgcctcctcctccccatttccgcgctcccgggaccatgtccgcgctggcgggtgaagatgtctggaggtgtccaggctgtggggaccacattgctccaagccagatatggtacaggactgtcaacgaaacctggcacggctcttgcttccggtgttcagaatgccaggattccctcaccaactggtactatgagaaggatgggaagctctactgccccaaggactactgggggaagtttggggagttctgtcatgggtgctccctgctgatgacagggccttttatggtggctggggagttcaagtaccacccagagtgctttgcctgtatgagctgcaaggtgatcattgaggatggggatgcatatgcactggtgcagcatgccaccctctactgtgggaagtgccacaatgaggtggtgctggcacccatgtttgagagactctccacagagtctgttcaggagcagctgccctactctgtcacgctcatctccatgccggccaccactgaaggcaggcggggcttctccgtgtccgtggagagtgcctgctccaactacgccaccactgtgcaagtgaaagaggtcaaccggatgcacatcagtcccaacaatcgaaacgccatccaccctggggaccgcatcctggagatcaatgggacccccgtccgcacacttcgagtggaggaggtggaggatgcaattagccagacgagccagacacttcagctgttgattgaacatgaccccgtctcccaacgcctggaccagctgcggctggaggcccggctcgctcctcacatgcagaatgccggacacccccacgccctcagcaccctggacaccaaggagaatctggaggggacactgaggagacgttccctaaggcgcagtaacagtatctccaagtcccctggccccagctccccaaaggagcccctgctgttcagccgtgacatcagccgctcagaatcccttcgttgttccagcagctattcacagcagatcttccggccctgtgacctaatccatggggaggtcctggggaagggcttctttgggcaggctatcaaggtgacacacaaagccacgggcaaagtgatggtcatgaaagagttaattcgatgtgatgaggagacccagaaaacttttctgactgaggtgaaagtgatgcgcagcctggaccaccccaatgtgctcaagttcattggtgtgctgtacaaggataagaagctgaacctcctgacagagtacattgaggggggcacactgaaggactttctgcgcagtatggatccgttcccctggcagcagaaggtcaggtttgccaaaggaatcgcctccggaatggcctatttgcactctatgtgcatcatccaccgggatctgaactcgcacaactgcctcatcaagttggacaagactgtggtggtggcagactttgggctgtcacggctcatagtggaagagaggaaaagggcccccatggagaaggccaccaccaagaaacgcaccttgcgcaagaacgaccgcaagaagcgctacacggtggtgggaaacccctactggatggcccctgagatgctgaacggaaagagctatgatgagacggtggatatcttctcctttgggatcgttctctgtgagatcattgggcaggtgtatgcagatcctgactgccttccccgaacactggactttggcctcaacgtgaagcttttctgggagaagtttgttcccacagattgtcccccggccttcttcccgctggccgccatctgctgcagactggagcctgagagcagaccagcattctcgaaattggaggactcctttgaggccctctccctgtacctgggggagctgggcatcccgctgcctgcagagctggaggagttggaccacactgtgagcatgcagtacggcctgacccgggactcacctccctagccctggcccagccccctgcaggggggtgttctacagccagcattgcccctctgtgccccattcctgctgtgagcagggccgtccgggcttcctgtggattggcggaatgtttagaagcagaacaagccattcctattacctccccaggaggcaagtgggcgcagcaccagggaaatgtatctccacaggttctggggcctagttactgtctgtaaatccaatacttgcctgaaagctgtgaagaagaaaaaaacccctggcctttgggccaggaggaatctgttactcgaatccacccaggaactccctggcagtggattgtgggaggctcttgcttacactaatcagcgtgacctggacctgctgggcaggatcccagggtgaacctgcctgtgaactctgaagtcactagtccagctgggtgcaggaggacttcaagtgtgtggacgaaagaaagactgatggctcaaagggtgtgaaaaagtcagtgatgctccccctttctactccagatcctgtccttcctggagcaaggttgagggagtaggttttgaagagtcccttaatatgtggtggaacaggccaggagttagagaaagggctggcttctgtttacctgctcactggctctagccagcccagggaccacatcaatgtgagaggaagcctccacctcatgttttcaaacttaatactggagactggctgagaacttacggacaacatcctttctgtctgaaacaaacagtcacaagcaaaggaagaggctgggggactagaaagaggccctgccctctagaaagctcagatcttggcttctgttactcatactcgggtgggctccttagtcagatgcctaaaacattttgcctaaagctcgatgggttctggaggacagtgtggcttgtcacaggcctagagtctgagggaggggagtgggagtctcagcaatctcttggtcttggcttcatggcaaccactgctcacccttcaacatgcctggtttaggcagcagcttgggctgggaagaggtggtggcagagtctcaaagctgagatgctgagagagatagctccctgagctgggccatctgacttctacctcccatgtttgctctcccaactcattagctcctgggcagcatcctcctgagccacatgtgcaggtactggaaaacctccatcttggctcccagagctctaggaactcttcatcacaactagatttgcctcttctaagtgtctatgagcttgcaccatatttaataaattgggaatgggtttggggtattaatgcaatgtgtggtggttgtattggagcagggggaattgataaaggagagtggttgctgttaatattatcttatctattgggtggtatgtgaaatattgtacatagacctgatgagttgtgggaccagatgtcatctctggtcagagtttacttgctatatagactgtacttatgtgtgaagtttgcaagcttgctttagggctgagccctggactcccagcagcagcacagttcagcattgtgtggctggttgtttcctggctgtccccagcaagtgtaggagtggtgggcctgaactgggccattgatcagactaaataaattaagcagttaacataactggcaa

SEQ ID NO: 149212 - DNA, 2789 bp, Homo sapiens
  Payload ID: 9458
  Gene Symbol: LIMK2
  Gene Name: LIM domain kinase 2
  Uniprot ID: P53671
  ENST ID: ENST00000340552
  CDS Start-End: 231-2291
gggaggagccatcccagccatgagcccctgtgggaatctgctgggggccaagtggcctggagtcctcaggctcccgcagctgctccggagggagaggtgagctcagggcagcctgcctgcagccagaggtgccgggagccccgggcctgtcatggtggccatctacagccggcctgaggcagtcacagacggatttgcagctgagcctgtctatctggtgtgggaagaagatggggagttacttgtcagtcccggcttacttcacctccagagacctgtttcggtgttcagaatgccaggattccctcaccaactggtactatgagaaggatgggaagctctactgccccaaggactactgggggaagtttggggagttctgtcatgggtgctccctgctgatgacagggccttttatggtggctggggagttcaagtaccacccagagtgctttgcctgtatgagctgcaaggtgatcattgaggatggggatgcatatgcactggtgcagcatgccaccctctactgtgggaagtgccacaatgaggtggtgctggcacccatgtttgagagactctccacagagtctgttcaggagcagctgccctactctgtcacgctcatctccatgccggccaccactgaaggcaggcggggcttctccgtgtccgtggagagtgcctgctccaactacgccaccactgtgcaagtgaaagaggtcaaccggatgcacatcagtcccaacaatcgaaacgccatccaccctggggaccgcatcctggagatcaatgggacccccgtccgcacacttcgagtggaggaggtggaggatgcaattagccagacgagccagacacttcagctgttgattgaacatgaccccgtctcccaacgcctggaccagctgcggctggaggcccggctcgctcctcacatgcagaatgccggacacccccacgccctcagcaccctggacaccaaggagaatctggaggggacactgaggagacgttccctaaggcgcagtaacagtatctccaagtcccctggccccagctccccaaaggagcccctgctgttcagccgtgacatcagccgctcagaatcccttcgttgttccagcagctattcacagcagatcttccggccctgtgacctaatccatggggaggtcctggggaagggcttctttgggcaggctatcaaggtgacacacaaagccacgggcaaagtgatggtcatgaaagagttaattcgatgtgatgaggagacccagaaaacttttctgactgaggtgaaagtgatgcgcagcctggaccaccccaatgtgctcaagttcattggtgtgctgtacaaggataagaagctgaacctcctgacagagtacattgaggggggcacactgaaggactttctgcgcagtatggatccgttcccctggcagcagaaggtcaggtttgccaaaggaatcgcctccggaatggcctatttgcactctatgtgcatcatccaccgggatctgaactcgcacaactgcctcatcaagttggacaagactgtggtggtggcagactttgggctgtcacggctcatagtggaagagaggaaaagggcccccatggagaaggccaccaccaagaaacgcaccttgcgcaagaacgaccgcaagaagcgctacacggtggtgggaaacccctactggatggcccctgagatgctgaacggaaagagctatgatgagacggtggatatcttctcctttgggatcgttctctgtgagatcattgggcaggtgtatgcagatcctgactgccttccccgaacactggactttggcctcaacgtgaagcttttctgggagaagtttgttcccacagattgtcccccggccttcttcccgctggccgccatctgctgcagactggagcctgagagcagagccccccccggggccgcaggagagggcccgggctgcgcggatgatgagggcccagtgaggcgccaagggaaggtcaccatcaagtatgaccccaaggagctacggaagcacctcaacctagaggagtggatcctggagcagctcacgcgcctctacgactgccaggaagaggagatctcagaactagagattgacgtggatgagctcctggacatggagagtgacgatgcctgggcttccagggtcaaggagctgctggttgactgttacaaacccacagaggccttcatctctggcctgctggacaagatccgggccatgcagaagctgagcacaccccagaagaagtgagggtccccgacccaggcgaacggtggctcccataggacaatcgctaccccccgacctcgtagcaacagcaataccgggggaccctgcggccaggcctggttccatgagcagggctcctcgtgcccctggcccaggggtctcttcccctgccccctcagttttccacttttggatttttttattgttattaaactgatgggactttgtgtttttatattgactctgcggcacgggccctttaataaagcgaggtagggtacgcctttggtgcagctcaaaaaaaaaaaaaaaaatgatttccagcggtccacattagagttgaaattttctggtgggagaatctataccttgttcctttataggccaaggaccgcagtccttcagtaacaccagtgtaaaagcttgaggagaaattgtgaagctacacagtatttgttttctaatacctcttgtcattctaaatatctttaatttattaaaaaatatatatatacagta

SEQ ID NO: 149213 - DNA, 2657 bp, Homo sapiens
  Payload ID: 9458
  Gene Symbol: LIMK2
  Gene Name: LIM domain kinase 2
  ENST ID: ENST00000406516
  CDS Start-End: 270-2159
atcccgttcgcgcctggggctgtggtcttcccgcgcctgaggcggcggcggcaggagctgaggggagttgtagggaactgaggggagctgctgtgtcccccgcctcctcctccccatttccgcgctcccgggaccatgtccgcgctggcgggtgttcagaatgccaggattccctcaccaactggtactatgagaaggatgggaagctctactgccccaaggactactgggggaagtttggggagttctgtcatgggtgctccctgctgatgacagggccttttatggtggctggggagttcaagtaccacccagagtgctttgcctgtatgagctgcaaggtgatcattgaggatggggatgcatatgcactggtgcagcatgccaccctctactgtgggaagtgccacaatgaggtggtgctggcacccatgtttgagagactctccacagagtctgttcaggagcagctgccctactctgtcacgctcatctccatgccggccaccactgaaggcaggcggggcttctccgtgtccgtggagagtgcctgctccaactacgccaccactgtgcaagtgaaagaggtcaaccggatgcacatcagtcccaacaatcgaaacgccatccaccctggggaccgcatcctggagatcaatgggacccccgtccgcacacttcgagtggaggaggtggaggatgcaattagccagacgagccagacacttcagctgttgattgaacatgaccccgtctcccaacgcctggaccagctgcggctggaggcccggctcgctcctcacatgcagaatgccggacacccccacgccctcagcaccctggacaccaaggagaatctggaggggacactgaggagacgttccctaaggcgcagtaacagtatctccaagtcccctggccccagctccccaaaggagcccctgctgttcagccgtgacatcagccgctcagaatcccttcgttgttccagcagctattcacagcagatcttccggccctgtgacctaatccatggggaggtcctggggaagggcttctttgggcaggctatcaaggtgacacacaaagccacgggcaaagtgatggtcatgaaagagttaattcgatgtgatgaggagacccagaaaacttttctgactgaggtgaaagtgatgcgcagcctggaccaccccaatgtgctcaagttcattggtgtgctgtacaaggataagaagctgaacctcctgacagagtacattgaggggggcacactgaaggactttctgcgcagtatggatccgttcccctggcagcagaaggtcaggtttgccaaaggaatcgcctccggaatggcctatttgcactctatgtgcatcatccaccgggatctgaactcgcacaactgcctcatcaagttggacaagactgtggtggtggcagactttgggctgtcacggctcatagtggaagagaggaaaagggcccccatggagaaggccaccaccaagaaacgcaccttgcgcaagaacgaccgcaagaagcgctacacggtggtgggaaacccctactggatggcccctgagatgctgaacggaaagagctatgatgagacggtggatatcttctcctttgggatcgttctctgtgagatcattgggcaggtgtatgcagatcctgactgccttccccgaacactggactttggcctcaacgtgaagcttttctgggagaagtttgttcccacagattgtcccccggccttcttcccgctggccgccatctgctgcagactggagcctgagagcagagccccccccggggccgcaggagagggcccgggctgcgcggatgatgagggcccagtgaggcgccaagggaaggtcaccatcaagtatgaccccaaggagctacggaagcacctcaacctagaggagtggatcctggagcagctcacgcgcctctacgactgccaggaagaggagatctcagaactagagattgacgtggatgagctcctggacatggagagtgacgatgcctgggcttccagggtcaaggagctgctggttgactgttacaaacccacagaggccttcatctctggcctgctggacaagatccgggccatgcagaagctgagcacaccccagaagaagtgagggtccccgacccaggcgaacggtggctcccataggacaatcgctaccccccgacctcgtagcaacagcaataccgggggaccctgcggccaggcctggttccatgagcagggctcctcgtgcccctggcccaggggtctcttcccctgccccctcagttttccacttttggatttttttattgttattaaactgatgggactttgtgtttttatattgactctgcggcacgggccctttaataaagcgaggtagggtacgcctttggtgcagctcaaaaaaaaaaaaaaaaatgatttccagcggtccacattagagttgaaattttctggtgggagaatctataccttgttcctttataggccaaggaccgcagtccttcagtaacaccagtgtaaaagcttgaggagaaattgtgaagctacacagtatttgttttctaatacctcttgtcattctaaatatctttaatttattaaaaaatatatatatacagta

SEQ ID NO: 149214 - DNA, 606 bp, Homo sapiens
  Payload ID: 9458
  Gene Symbol: LIMK2
  Gene Name: LIM domain kinase 2
  ENST ID: ENST00000425203
  CDS Start-End: 360-606
aacttgacagcagcgcttctttcttagctagtcaccggcccctgctcaagaatgccagtgtgtgtgtagcctccacagagaggtcgttttctcggagtccagaggggccgcctgagcttctgagaactagggaggagccatcccagccatgagcccctgtgggaatctgctgggggccaagtggcctggagtcctcaggctcccgcagctgctccggagggagaggtgagctcagggcagcctgcctgcagccagaggtgccgggagccccgggcctgtcatggtggccatctacagccggcctgaggcagtcacagacggatttgcagctgagcctgtctatctggtgtgggaagaagatggggagttacttgtcagtcccggcttacttcacctccagagacctgtttcggtgttcagaatgccaggattccctcaccaactggtactatgagaaggatgggaagctctactgccccaaggactactgggggaagtttggggagttctgtcatgggtgctccctgctgatgacagggccttttatggtgagtgaatcccttcatatctgcccctcttggtcttcagagtccattgacagtgctt

SEQ ID NO: 149215 - DNA, 1279 bp, Homo sapiens
  Payload ID: 9459
  Gene Symbol: LMO1
  Gene Name: LIM domain only 1 (rhombotin 1)
  Uniprot ID: P25800
  ENST ID: ENST00000335790
  CDS Start-End: 497-967
agcgggagacggccacgagattcccccatctctttgaatataattttagattgagattcagattaaatccgaggggaaaacactttatgaggctgaaagctgtgtcgttgccagagacagggttatgagctatcaaatgcaattacattaagacagattatactgggcaaattgagccatttagaaggtgagaatcaaagaaacggctctgatcctcttttcccccttctctctccctctccctctctctctaaattgcagttcgtagttccttccaattctgaggcacaaaagtaggtgagactgcttttgtatctgcgaagtgcttcactcctgaatgtaattctagctgagtgcaatctaggttaagagccggacaagcgggtaattagagcccgctagctgcccgaagaccggccgcccctccaaagcgcgccccgagtcggcgcccttctcccggccgagcctagctgcggctggacacggagcgcccgagatgatggtgctggacaaggaggacggcgtgccgatgctctccgtccagcccaaagggaagcagaagggctgtgcgggctgtaaccgcaagatcaaggaccgctatctgctgaaggcattggacaagtactggcacgaagactgcctcaagtgtgcctgctgtgactgccgcctgggcgaggtgggctccaccctctacaccaaggccaacctcatcctgtgccgacgcgactacctgaggctctttggcaccacagggaactgtgctgcttgcagcaagctgatcccagccttcgagatggtgatgcgggcccgggacaacgtgtatcacctcgactgcttcgcctgccagctctgcaaccagagattttgtgtgggagacaaattcttcctgaagaacaacatgatcttgtgtcagatggactatgaggaagggcagctcaatggcacctttgaatcccaagttcagtaacgcccggcgcctggcctccaggcccgtctgtccatctgcccgcctgcccacctgcctggccggccagccagccactctaccagtgcaggctggccagccgctctcctgccacattagaacttctccgtcctcgatgggagggatggcccttcctcctccaccaccgcccgtctgtgtgtgacccctcctggggccaggccgggcctgtacagtctgtcttctgtatataaatgggaacatttattttatgagaaatgtaatgcgattttattactggcgtggattaaacttatgaatgtttccgggaggtta

SEQ ID NO: 149216 - DNA, 1038 bp, Homo sapiens
  Payload ID: 9459
  Gene Symbol: LMO1
  Gene Name: LIM domain only 1 (rhombotin 1)
  Uniprot ID: P25800
  ENST ID: ENST00000428101
  CDS Start-End: 269-736
gcccgggcagctgctgctcgcgaggctcccgcgatcccggcctggccgtctcgcccccgcgccttccccccagtccctcctcctgcgctccctgcccgcggggctgcgctccggactccggtccgtctgcccccgtcggcggtcgcggctctccggactcggcgcccgcgcggggccggcgggagcagcgcaggcggccggcggcgggagtcggagccacgcgcccctccgtatcctcggcgctagtccggctggagccgtcgggaccatggtgttggaccaggaggacggcgtgccgatgctctccgtccagcccaaagggaagcagaagggctgtgcgggctgtaaccgcaagatcaaggaccgctatctgctgaaggcattggacaagtactggcacgaagactgcctcaagtgtgcctgctgtgactgccgcctgggcgaggtgggctccaccctctacaccaaggccaacctcatcctgtgccgacgcgactacctgaggctctttggcaccacagggaactgtgctgcttgcagcaagctgatcccagccttcgagatggtgatgcgggcccgggacaacgtgtatcacctcgactgcttcgcctgccagctctgcaaccagagattttgtgtgggagacaaattcttcctgaagaacaacatgatcttgtgtcagatggactatgaggaagggcagctcaatggcacctttgaatcccaagttcagtaacgcccggcgcctggcctccaggcccgtctgtccatctgcccgcctgcccacctgcctggccggccagccagccactctaccagtgcaggctggccagccgctctcctgccacattagaacttctccgtcctcgatgggagggatggcccttcctcctccaccaccgcccgtctgtgtgtgacccctcctggggccaggccgggcctgtacagtctgtcttctgtatataaatgggaacatttattttatgagaaatgtaatgcgattttattactggcgtggattaaacttatgaatgtttc

SEQ ID NO: 149217 - DNA, 770 bp, Homo sapiens
  Payload ID: 9459
  Gene Symbol: LMO1
  Gene Name: LIM domain only 1 (rhombotin 1)
  ENST ID: ENST00000534484
  CDS Start-End: 196-633
agcgggagacggccacgagattcccccatctctttgaatataattttagattgagattcagattaaatccgaggggaaaacactttatgaggctgaaagctgtgtcgttgccagagacagggttatgagctatcaaatgcaattacattaagacagattatactgggcaaattgagccatttagaaggcgtgccgatgctctccgtccagcccaaagggaagcagaagggctgtgcgggctgtaaccgcaagatcaaggaccgctatctgctgaaggcattggacaagtactggcacgaagactgcctcaagtgtgcctgctgtgactgccgcctgggcgaggtgggctccaccctctacaccaaggccaacctcatcctgtgccgacgcgactacctgaggctctttggcaccacagggaactgtgctgcttgcagcaagctgatcccagccttcgagatggtgatgcgggcccgggacaacgtgtatcacctcgactgcttcgcctgccagctctgcaaccagagattttgtgtgggagacaaattcttcctgaagaacaacatgatcttgtgtcagatggactatgaggaagggcagctcaatggcacctttgaatcccaagttcagtaacgcccggcgcctggcctccaggcccgtctgtccatctgcccgcctgcccacctgcctggccggccagccagccactctaccagtgcaggctggccagccgctctcctgccacattagaacttctccgtcctcgatgg

SEQ ID NO: 149218 - DNA, 2294 bp, Homo sapiens
  Payload ID: 9460
  Gene Symbol: LMO2
  Gene Name: LIM domain only 2 (rhombotin-like 1)
  Uniprot ID: P25791
  ENST ID: ENST00000257818
  CDS Start-End: 831-1514
gaattcgtccaaactgaggatcacaagtctccacattctgagtaggaggatgagggtctgagttaggatttgggtcctgcagggcttgctaaggaatcccctgatggcctaggattccacgcagagcacatctggtgtgagagagctcgctgcaagggtgaaggctccgccctatcagatagacaaccaggccaccaagaggcccagccctccaaaccctggatttgcaacatcctcaaagaacagcaacgggccttgagcagaattgagaaggaaatacccccacctgccctcagccgttaagtgggctttgctattcacaagggcctctgggtgtcctggcagagaggggagatggcacaggcaccaggtgctagggtgccagggcctcccgagaaggaacaggtgcaaagcaggcaattagcccagaaggtatccgtggggcaggcagcctagatctgatgggggaagccaccaggattacatcatctgctgtaacaactgctctgaaaagaagatatttttcaacctgaacttgcagtagctagtggagaggcaggaaaaaggaaatgaaaccagagacagagggaagctgagcgaaaatagaccttcccgagagaggaggaagcccggagagagacgcacggtcccctccccgcccctaggccgccgccccctctctgccctcggcggcgagcagcgcgccgcgacccgggccgaaggtgcgaggggctccgggcggccgggcgggcgcacaccatccccgcgggcggcgcggagccggcgacagcgcgcgagagggaccgggcggtggcggcggcgggaccgggatggaagggagcgcggtgactgtccttgagcgcggaggggcgagctcgccggcggagcgccggagcaagcggaggcgcaggagcggcggcgacggcggcggcggcggcggcgcccgagcacccgagggggtccgagccccggcagccggccagccccgcgccacaaagggagcgcccccgccgcccggcaccccgcctccctccccaatgtcctcggccatcgaaaggaagagcctggacccttcagaggaaccagtggatgaggtgctgcagatccccccatccctgctgacatgcggcggctgccagcagaacattggggaccgctacttcctgaaggccatcgaccagtactggcacgaggactgcctgagctgcgacctctgtggctgccggctgggtgaggtggggcggcgcctctactacaaactgggccggaagctctgccggagagactatctcaggctttttgggcaagacggtctctgcgcatcctgtgacaagcggattcgtgcctatgagatgacaatgcgggtgaaagacaaagtgtatcacctggaatgtttcaaatgcgccgcctgtcagaagcatttctgtgtaggtgacagatacctcctcatcaactctgacatagtgtgcgaacaggacatctacgagtggactaagatcaatgggatgatataggcccgagtccccgggcatctttggggaggtgttcactgaagacgccgtctccatggcatcttcgtcttcactcttaggcactttgggggtttgagggtggggtaagggatttcttaggggatggtagacctttattgggtatcaagacatagcatccaagtggcataattcaggggctgacacttcaaggtgacagaaggaccagcccttgagggagaacttatggccacagcccatccatagtaactgacatgattagcagaagaaaggaacatttaggggcaagcaggcgctgtgctatcatgatggaatttcatatctacagatagagagttgttgtgtacagacttgttgtgactttgacgcttgcgaactagagatgtgcaattgatttcttttcttcctggctttttaactcccctgtttcaatcactgtcctccacacaagggaaggacagaaaggagagtggccattctttttttcttggcccccttcccaaggccttaagctttggacccaaggaaaactgcatggagacgcatttcggttgagaatggaaaccacaacttttaaccaaacaattatttaaagcaatgctgatgaatcactgtttttagacaccttcattttgaggggaggagttccacagattgtttctatacaaatataaatcttaaaaagttgttcaactattttattatcctagattatatcaaagtatttgtcgtgtgtagaaaaaaaaacagctctgcaggcttaataaaaatgacagactgaaa

SEQ ID NO: 149219 - DNA, 1687 bp, Homo sapiens
  Payload ID: 9460
  Gene Symbol: LMO2
  Gene Name: LIM domain only 2 (rhombotin-like 1)
  Uniprot ID: P25791
  ENST ID: ENST00000395833
  CDS Start-End: 431-907
ggctccgggcggccgggcgggcgcacaccatccccgcgggcggcgcggagccggcgacagcgcgcgagagggaccgggcggtggcggcggcgggaccgggatggaaggttaagtcctgagcagcagcagcagctgcagccgcctggagccaggctgcgcgccccggcccccgcctcggccgcggcgcgcccgcagcccggtgattcgctctctctctttggcgtttgaagggagcgcggtgactgtccttgagcgcggaggggcgagctcgccggcggagcgccggagcaagcggaggcgcaggagcggcggcgacggcggcggcggcggcggcgcccgagcacccgagggggtccgagccccggcagccggccagccccgcgccacaaagggagcgcccccgccgcccggcaccccgcctccctccccaatgtcctcggccatcgaaaggaagagcctggacccttcagaggaaccagtggatgaggtgctgcagatccccccatccctgctgacatgcggcggctgccagcagaacattggggaccgctacttcctgaaggccatcgaccagtactggcacgaggactgcctgagctgcgacctctgtggctgccggctgggtgaggtggggcggcgcctctactacaaactgggccggaagctctgccggagagactatctcaggctttttgggcaagacggtctctgcgcatcctgtgacaagcggattcgtgcctatgagatgacaatgcgggtgaaagacaaagtgtatcacctggaatgtttcaaatgcgccgcctgtcagaagcatttctgtgtaggtgacagatacctcctcatcaactctgacatagtgtgcgaacaggacatctacgagtggactaagatcaatgggatgatataggcccgagtccccgggcatctttggggaggtgttcactgaagacgccgtctccatggcatcttcgtcttcactcttaggcactttgggggtttgagggtggggtaagggatttcttaggggatggtagacctttattgggtatcaagacatagcatccaagtggcataattcaggggctgacacttcaaggtgacagaaggaccagcccttgagggagaacttatggccacagcccatccatagtaactgacatgattagcagaagaaaggaacatttaggggcaagcaggcgctgtgctatcatgatggaatttcatatctacagatagagagttgttgtgtacagacttgttgtgactttgacgcttgcgaactagagatgtgcaattgatttcttttcttcctggctttttaactcccctgtttcaatcactgtcctccacacaagggaaggacagaaaggagagtggccattctttttttcttggcccccttcccaaggccttaagctttggacccaaggaaaactgcatggagacgcatttcggttgagaatggaaaccacaacttttaaccaaacaattatttaaagcaatgctgatgaatcactgtttttagacaccttcattttgaggggaggagttccacagattgtttctatacaaatataaatcttaaaaagttgttcaactattttattatcctagattatatcaaagtatttgtcgtgtgtagaaaaaaaaacagctctgcaggcttaataaaaatgacagactgaaa

SEQ ID NO: 149220 - DNA, 1519 bp, Homo sapiens
  Payload ID: 9460
  Gene Symbol: LMO2
  Gene Name: LIM domain only 2 (rhombotin-like 1)
  Uniprot ID: P25791
  ENST ID: ENST00000411482
  CDS Start-End: 151-318
cgccggagcaagcggaggcgcaggagcggcggcgacggcggcggcggcggcggcgcccgagcacccgagggggtccgagccccggcagccggccagccccgcgccacaaagggagcgcccccgccgcccggcaccccgcctccctccccaatgtcctcggccatcgaaaggaagagcctggacccttcagagtcactgaaaggcagtcaggtgagatgccctgtctggcccaaaacgatctcggaccctcggtgctggtctcactctggtgaggctgtccctgatgcttggccttctctccagggaaccagtggatgaggtgctgcagatccccccatccctgctgacatgcggcggctgccagcagaacattggggaccgctacttcctgaaggccatcgaccagtactggcacgaggactgcctgagctgcgacctctgtggctgccggctgggtgaggtggggcggcgcctctactacaaactgggccggaagctctgccggagagactatctcaggctttttgggcaagacggtctctgcgcatcctgtgacaagcggattcgtgcctatgagatgacaatgcgggtgaaagacaaagtgtatcacctggaatgtttcaaatgcgccgcctgtcagaagcatttctgtgtaggtgacagatacctcctcatcaactctgacatagtgtgcgaacaggacatctacgagtggactaagatcaatgggatgatataggcccgagtccccgggcatctttggggaggtgttcactgaagacgccgtctccatggcatcttcgtcttcactcttaggcactttgggggtttgagggtggggtaagggatttcttaggggatggtagacctttattgggtatcaagacatagcatccaagtggcataattcaggggctgacacttcaaggtgacagaaggaccagcccttgagggagaacttatggccacagcccatccatagtaactgacatgattagcagaagaaaggaacatttaggggcaagcaggcgctgtgctatcatgatggaatttcatatctacagatagagagttgttgtgtacagacttgttgtgactttgacgcttgcgaactagagatgtgcaattgatttcttttcttcctggctttttaactcccctgtttcaatcactgtcctccacacaagggaaggacagaaaggagagtggccattctttttttcttggcccccttcccaaggccttaagctttggacccaaggaaaactgcatggagacgcatttcggttgagaatggaaaccacaacttttaaccaaacaattatttaaagcaatgctgatgaatcactgtttttagacaccttcattttgaggggaggagttccacagattgtttctatacaaatataaatcttaaaaagttgttcaactattttattatcctagattatatcaaagtatttgtcgtgtgtagaaaaaaaaacagctctgcaggcttaataaaaatgacagactgaaa

SEQ ID NO: 149221 - DNA, 3810 bp, Homo sapiens
  Payload ID: 9461
  Gene Symbol: LMO3
  Gene Name: LIM domain only 3 (rhombotin-like 2)
  Uniprot ID: Q8TAP4
  ENST ID: ENST00000261169
  CDS Start-End: 491-961
atatcctaatagattgagattcaaactgatgcagcacattttttacggggactactcagattgctgttatgaaatacaagtcagatttatgatctttttcatattgaacatgatatgctatgctaacgctgcatgtgacagtttaatcaaatccatttgttaccaggaagctaaaaggggccgctgggattttaggattacgggcagagttagggaagcatgtggctttgtcattcgccatcattttgcacactgcgaggggctccgtgtgtgcgccctgtcttgtctggccgtcctcatcccttcccccaccccctgccgccactccgacccgctcccaaagtggcttcacaatagtcggtcctcggcggtgtaggctgcgcaccaggtccacacttaagcgaaatcaaggagacccccttctacttctacctttgggtttggtgctcaatgcgaagctgctgcaactcagacacgcctaagtcaactcatgcagaaaaaggagaaaagttttggtatacaaatgctctcagtccagccagacaccaagccgaaaggttgtgctggctgcaaccgaaagatcaaggaccggtatcttctaaaggcactggacaaatactggcatgaagactgcctgaagtgtgcctgctgtgactgtcgcttgggagaggtgggctccaccctgtacactaaagctaatcttatcctttgtcgcagagactatctgaggctctttggtgtaacgggaaactgcgctgcctgtagtaagctcatccctgcctttgagatggtgatgcgtgccaaggacaatgtttaccacctggactgctttgcatgtcagctttgtaatcagagattttgtgttggagacaaatttttcctaaagaataacatgatcctttgccagacggactacgaggaaggtttaatgaaagaaggttatgcaccccaggttcgctgatctatcaacatcaccccattaagaatacaaagcactacattcttttatcttttttgctccacatgtacataagaattgacacaggaacctactgaatagcgtagatataggaaggcaggatggttatatggaataaaaggcggactgcatctgtatgtagtgaaattgccccagttcagagttgaatgtttattattaaagaaaaaagtaatgtacatatggctggatttttttgcttgctattcgtttttgtgtcacttggcatgagatgtttattttggactattgtatataatgtattgtaatatttgaagcacaaatgtaatacagttttattgtgttaccatttgtgttccatttgcttctttgtattgttgcatttagtacaatcagtgtttaaacttactgtatatttatgctttctgtatttaccagctattttaaatgagctgtaactttctagtaaagaattgaaaagcaaatctcactaatgatacacagatagataaagcaagtctatcaacattaaaaatactaaaaaataaagacacacacagagcattttagtgacatccactacttattgccgctatgagttagagtctatcagtgttcttgttataaccccctattttcagggggttaaaaatcagctttaaaaaaatacataaaaatttcatcttaaagcactttcattttataccaacgtgaaaagtgccatttttagaataactttaaagcttaacaggtttccttttaatatcctttttttgtgtgctctttacttacacaatggctttgttttgctttttcagccacaccccttatgtgaactagtgcctttgggtatcacgtaaaattttttccaaagggttactttaaaaatctgttaccacaattatgagatgatttttaagtgataaattaaacttcttcttgtataaattctgcccagatctctccacaagagctgagggtttcataactttatggcttaataaatgtatgacactgaaaagatttgagtgtgaatctactgaaatcactataatgcacattgaagctatgatggtatttgagtagtgaggttacttttgatcggagcaacataatgctcatagaatcttctagaagaagagaaacaaagggattgataaaatgctgagaactagtgattatatatttttctgtatttacctgacatttattttaatgttcaaaaagtaaacactttaagtttgatgtgttttactctctcattgttttaagtaattgccaactcagaatacatcattcttaggctgaaatttgtctttccattttttaaggtgaaatagtactaccttacgtgatagcatacaaagaagaaagctctagaaagagaaattatggagaatgattatttaaattacaattaaggaaatgagaatatgatcccctcttccgagttgcccacaaacttgcttctttgcttttgctccctgtaatagaactacttttcaacaaatctaattttgcacggcaccgttaaccatattttcactacagcaaacttagtgctatgggttttctttttctttgtttttttcttgatcacttgtataggaaacaatattttccagtgttatttgcatatatattttgtccttccaatatatgcattacagatgaaaattaaatgttatacctgaattcttgggttggggccaaaatattaagctgaaaataatgctggtgtggatttgttttaaaacaaagctttattatgaacatgcatgtgaatctggatattgcctcttatttttaagaaaatggttctgtgaaaagtgaatgatatgtatttttccaaatgcttcatggttaggagtcttcaagttccatgttccccagatttgagatatactaaagaaagaaattcaaaagtagctatttggggcccacaaaaataactattattttagccttagagccttacacttgtttcatgaagagaaaggacttgcataaccaaaataaacaaagcaagacaaattaaaaatatgtgggggagagatcagtgaaaagtggttttcttaatgcagccctgctggtccccattaacaattgcttgaaattcacatggatgtaaaattataattgtcaggatcttattcagatgatcttttaaggtttaactggttttgcttttgtttatctatatgtcaaaatacttgtaaattgggaacaaacttctctcagcttcttgaagttgttcaactatccttgccactggaagaccaaacaaggttttcactgctttttcttttacataatatgctgagaattatttcttatgctttttactacaaacaaaattactcacctggattaaagattaaggccttaatctgtttagattatctttaatctccatgaaatcgtgaaataagacaagaatagtgtttcagctgtaggccattttacagctaattgcccataaattgtagcatttattgacctgaagtactaagctaattgtcttgactactcaaagcccctgaattgttgtcaactttcccctttgtgttgtgtagccctaacgtcatttagcttgttgtctgatgcctccagtaggacacctccgatggagctttgatttctgagcagcgaaagctcccttcctaagatgcatctcgcataggctgcctatgatgaaggaccgtgcacctccactccaacagagtgctgagtttaaaagttgacctgtgtttgtaatttcactttcatcttgcttaataaatatctgctggattctttcattcacttttttacatttggatttatgtttttaataaaaggggtgttacact

SEQ ID NO: 149222 - DNA, 3759 bp, Homo sapiens
  Payload ID: 9461
  Gene Symbol: LMO3
  Gene Name: LIM domain only 3 (rhombotin-like 2)
  Uniprot ID: Q8TAP4
  ENST ID: ENST00000320122
  CDS Start-End: 524-961
atatcctaatagattgagattcaaactgatgcagcacattttttacggggactactcagattgctgttatgaaatacaagtcagatttatgatctttttcatattgaacatgatatgctatgctaacgctgcatgtgacagtttaatcaaatccatttgttaccaggaagctaaaaggggccgctgggattttaggattacgggcagagttagggaagcatgtggctttgtcattcgccatcattttgcacactgcgaggggctccgtgtgtgcgccctgtcttgtctggccgtcctcatcccttcccccaccccctgccgccactccgacccgctcccaaagtggcttcacaatagtcggtcctcggcggtgtaggctgcgcaccaggtccacacttaagcgaaatcaaggagacccccttctacttctacctttgggtttggtgctcaatgcgaagctgctgcaactcagacacgcctaagtcaactcatgcagaaaaaggagaaaagttttggtatacaaatgctctcagtccagccagacaccaagccgaaaggttgtgctggctgcaaccgaaagatcaaggaccggtatcttctaaaggcactggacaaatactggcatgaagactgcctgaagtgtgcctgctgtgactgtcgcttgggagaggtgggctccaccctgtacactaaagctaatcttatcctttgtcgcagagactatctgaggctctttggtgtaacgggaaactgcgctgcctgtagtaagctcatccctgcctttgagatggtgatgcgtgccaaggacaatgtttaccacctggactgctttgcatgtcagctttgtaatcagagattttgtgttggagacaaatttttcctaaagaataacatgatcctttgccagacggactacgaggaaggtttaatgaaagaaggttatgcaccccaggttcgctgatctatcaacatcaccccattaagaatacaaagcactacattcttttatcttttttgctccacatgtacataagaattgacacaggaacctactgaatagcgtagatataggaaggcaggatggttatatggaataaaaggcggactgcatctgtatgtagtgaaattgccccagttcagagttgaatgtttattattaaagaaaaaagtaatgtacatatggctggatttttttgcttgctattcgtttttgtgtcacttggcatgagatgtttattttggactattgtatataatgtattgtaatatttgaagcacaaatgtaatacagttttattgtgttaccatttgtgttccatttgcttctttgtattgttgcatttagtacaatcagtgtttaaacttactgtatatttatgctttctgtatttaccagctattttaaatgagctgtaactttctagtaaagaattgaaaagcaaatctcactaatgatacacagatagataaagcaagtctatcaacattaaaaatactaaaaaataaagacacacacagagcattttagtgacatccactacttattgccgctatgagttagagtctatcagtgttcttgttataaccccctattttcagggggttaaaaatcagctttaaaaaaatacataaaaatttcatcttaaagcactttcattttataccaacgtgaaaagtgccatttttagaataactttaaagcttaacaggtttccttttaatatcctttttttgtgtgctctttacttacacaatggctttgttttgctttttcagccacaccccttatgtgaactagtgcctttgggtatcacgtaaaattttttccaaagggttactttaaaaatctgttaccacaattatgagatgatttttaagtgataaattaaacttcttcttgtataaattctgcccagatctctccacaagagctgagggtttcataactttatggcttaataaatgtatgacactgaaaagatttgagtgtgaatctactgaaatcactataatgcacattgaagctatgatggtatttgagtagtgaggttacttttgatcggagcaacataatgctcatagaatcttctagaagaagagaaacaaagggattgataaaatgctgagaactagtgattatatatttttctgtatttacctgacatttattttaatgttcaaaaagtaaacactttaagtttgatgtgttttactctctcattgttttaagtaattgccaactcagaatacatcattcttaggctgaaatttgtctttccattttttaaggtgaaatagtactaccttacgtgatagcatacaaagaagaaagctctagaaagagaaattatggagaatgattatttaaattacaattaaggaaatgagaatatgatcccctcttccgagttgcccacaaacttgcttctttgcttttgctccctgtaatagaactacttttcaacaaatctaattttgcacggcaccgttaaccatattttcactacagcaaacttagtgctatgggttttctttttctttgtttttttcttgatcacttgtataggaaacaatattttccagtgttatttgcatatatattttgtccttccaatatatgcattacagatgaaaattaaatgttatacctgaattcttgggttggggccaaaatattaagctgaaaataatgctggtgtggatttgttttaaaacaaagctttattatgaacatgcatgtgaatctggatattgcctcttatttttaagaaaatggttctgtgaaaagtgaatgatatgtatttttccaaatgcttcatggttaggagtcttcaagttccatgttccccagatttgagatatactaaagaaagaaattcaaaagtagctatttggggcccacaaaaataactattattttagccttagagccttacacttgtttcatgaagagaaaggacttgcataaccaaaataaacaaagcaagacaaattaaaaatatgtgggggagagatcagtgaaaagtggttttcttaatgcagccctgctggtccccattaacaattgcttgaaattcacatggatgtaaaattataattgtcaggatcttattcagatgatcttttaaggtttaactggttttgcttttgtttatctatatgtcaaaatacttgtaaattgggaacaaacttctctcagcttcttgaagttgttcaactatccttgccactggaagaccaaacaaggttttcactgctttttcttttacataatatgctgagaattatttcttatgctttttactacaaacaaaattactcacctggattaaagattaaggccttaatctgtttagattatctttaatctccatgaaatcgtgaaataagacaagaatagtgtttcagctgtaggccattttacagctaattgcccataaattgtagcatttattgacctgaagtactaagctaattgtcttgactactcaaagcccctgaattgttgtcaactttcccctttgtgttgtgtagccctaacgtcatttagcttgttgtctgatgcctccagtaggacacctccgatggagctttgatttctgagcagcgaaagctcccttcctaagatgcatctcgcataggctgcctatgatgaaggaccgtgcacctccactccaacagagtgctgagtttaaaagttgacctgtgtttgtaatttcactttcatcttgcttaataaatatctgctggattctttca

SEQ ID NO: 149223 - DNA, 3574 bp, Homo sapiens
  Payload ID: 9461
  Gene Symbol: LMO3
  Gene Name: LIM domain only 3 (rhombotin-like 2)
  Uniprot ID: Q8TAP4
  ENST ID: ENST00000354662
  CDS Start-End: 288-725
ttcttctcagtgcattggctgagacagagcgcacgagacacacacacatgcatgcacacatatgcacacacacacactcacacatactggggtgttttcagagtggctgtagcagagaggtggggtagaacagtggggagctgtgcggatgggtgaagtgcatgtatgcctgcctagacgggccagaaaagccaaacttaagaaatctgcctatgtacagaacaagtcaactaaggggttctcattaatctaccgtctgtgaatatcgttatttttcaggtatacaaatgctctcagtccagccagacaccaagccgaaaggttgtgctggctgcaaccgaaagatcaaggaccggtatcttctaaaggcactggacaaatactggcatgaagactgcctgaagtgtgcctgctgtgactgtcgcttgggagaggtgggctccaccctgtacactaaagctaatcttatcctttgtcgcagagactatctgaggctctttggtgtaacgggaaactgcgctgcctgtagtaagctcatccctgcctttgagatggtgatgcgtgccaaggacaatgtttaccacctggactgctttgcatgtcagctttgtaatcagagattttgtgttggagacaaatttttcctaaagaataacatgatcctttgccagacggactacgaggaaggtttaatgaaagaaggttatgcaccccaggttcgctgatctatcaacatcaccccattaagaatacaaagcactacattcttttatcttttttgctccacatgtacataagaattgacacaggaacctactgaatagcgtagatataggaaggcaggatggttatatggaataaaaggcggactgcatctgtatgtagtgaaattgccccagttcagagttgaatgtttattattaaagaaaaaagtaatgtacatatggctggatttttttgcttgctattcgtttttgtgtcacttggcatgagatgtttattttggactattgtatataatgtattgtaatatttgaagcacaaatgtaatacagttttattgtgttaccatttgtgttccatttgcttctttgtattgttgcatttagtacaatcagtgtttaaacttactgtatatttatgctttctgtatttaccagctattttaaatgagctgtaactttctagtaaagaattgaaaagcaaatctcactaatgatacacagatagataaagcaagtctatcaacattaaaaatactaaaaaataaagacacacacagagcattttagtgacatccactacttattgccgctatgagttagagtctatcagtgttcttgttataaccccctattttcagggggttaaaaatcagctttaaaaaaatacataaaaatttcatcttaaagcactttcattttataccaacgtgaaaagtgccatttttagaataactttaaagcttaacaggtttccttttaatatcctttttttgtgtgctctttacttacacaatggctttgttttgctttttcagccacaccccttatgtgaactagtgcctttgggtatcacgtaaaattttttccaaagggttactttaaaaatctgttaccacaattatgagatgatttttaagtgataaattaaacttcttcttgtataaattctgcccagatctctccacaagagctgagggtttcataactttatggcttaataaatgtatgacactgaaaagatttgagtgtgaatctactgaaatcactataatgcacattgaagctatgatggtatttgagtagtgaggttacttttgatcggagcaacataatgctcatagaatcttctagaagaagagaaacaaagggattgataaaatgctgagaactagtgattatatatttttctgtatttacctgacatttattttaatgttcaaaaagtaaacactttaagtttgatgtgttttactctctcattgttttaagtaattgccaactcagaatacatcattcttaggctgaaatttgtctttccattttttaaggtgaaatagtactaccttacgtgatagcatacaaagaagaaagctctagaaagagaaattatggagaatgattatttaaattacaattaaggaaatgagaatatgatcccctcttccgagttgcccacaaacttgcttctttgcttttgctccctgtaatagaactacttttcaacaaatctaattttgcacggcaccgttaaccatattttcactacagcaaacttagtgctatgggttttctttttctttgtttttttcttgatcacttgtataggaaacaatattttccagtgttatttgcatatatattttgtccttccaatatatgcattacagatgaaaattaaatgttatacctgaattcttgggttggggccaaaatattaagctgaaaataatgctggtgtggatttgttttaaaacaaagctttattatgaacatgcatgtgaatctggatattgcctcttatttttaagaaaatggttctgtgaaaagtgaatgatatgtatttttccaaatgcttcatggttaggagtcttcaagttccatgttccccagatttgagatatactaaagaaagaaattcaaaagtagctatttggggcccacaaaaataactattattttagccttagagccttacacttgtttcatgaagagaaaggacttgcataaccaaaataaacaaagcaagacaaattaaaaatatgtgggggagagatcagtgaaaagtggttttcttaatgcagccctgctggtccccattaacaattgcttgaaattcacatggatgtaaaattataattgtcaggatcttattcagatgatcttttaaggtttaactggttttgcttttgtttatctatatgtcaaaatacttgtaaattgggaacaaacttctctcagcttcttgaagttgttcaactatccttgccactggaagaccaaacaaggttttcactgctttttcttttacataatatgctgagaattatttcttatgctttttactacaaacaaaattactcacctggattaaagattaaggccttaatctgtttagattatctttaatctccatgaaatcgtgaaataagacaagaatagtgtttcagctgtaggccattttacagctaattgcccataaattgtagcatttattgacctgaagtactaagctaattgtcttgactactcaaagcccctgaattgttgtcaactttcccctttgtgttgtgtagccctaacgtcatttagcttgttgtctgatgcctccagtaggacacctccgatggagctttgatttctgagcagcgaaagctcccttcctaagatgcatctcgcataggctgcctatgatgaaggaccgtgcacctccactccaacagagtgctgagtttaaaagttgacctgtgtttgtaatttcactttcatcttgcttaataaatatctgctggattctttcattcacttttttacatttggatttatgtttttaataaaaggggtgttacact

SEQ ID NO: 149224 - DNA, 3534 bp, Homo sapiens
  Payload ID: 9461
  Gene Symbol: LMO3
  Gene Name: LIM domain only 3 (rhombotin-like 2)
  ENST ID: ENST00000396205
  CDS Start-End: 245-454
agcagagaggtggggtagaacagtggggagctgtgcggatgggtgaagtgcatgtatgcctgcctagacgggccagaaaagccaaacttaagaaatctgcctatgtacagaacaagtcaactaaggggttctcattaatctaccgtctgtgaatatcgttatttttcaggagaagcgctacaaagcagccactgtgcttactgaacggcctccccctgtatcgcttaattgagaaggtatacaaatgctctcagtccagccagacaccaagccgaaaggttgtgctggctgcaaccgaaagatcaaggaccggtatcttctaaaggcactggacaaatactggcatgaagactgcctgaagtgtgcctgctgtgactgtcgcttgggagaggtgggctccaccctgtacactaaagctaatcttatcctttgtcgcagagactatctgaggtaggaattatccttgcacaccagtgatgactggatgccttttaaagtacttttgctctttggtgtaacgggaaactgcgctgcctgtagtaagctcatccctgcctttgagatggtgatgcgtgccaaggacaatgtttaccacctggactgctttgcatgtcagctttgtaatcagagattttgtgttggagacaaatttttcctaaagaataacatgatcctttgccagacggactacgaggaaggtttaatgaaagaaggttatgcaccccaggttcgctgatctatcaacatcaccccattaagaatacaaagcactacattcttttatcttttttgctccacatgtacataagaattgacacaggaacctactgaatagcgtagatataggaaggcaggatggttatatggaataaaaggcggactgcatctgtatgtagtgaaattgccccagttcagagttgaatgtttattattaaagaaaaaagtaatgtacatatggctggatttttttgcttgctattcgtttttgtgtcacttggcatgagatgtttattttggactattgtatataatgtattgtaatatttgaagcacaaatgtaatacagttttattgtgttaccatttgtgttccatttgcttctttgtattgttgcatttagtacaatcagtgtttaaacttactgtatatttatgctttctgtatttaccagctattttaaatgagctgtaactttctagtaaagaattgaaaagcaaatctcactaatgatacacagatagataaagcaagtctatcaacattaaaaatactaaaaaataaagacacacacagagcattttagtgacatccactacttattgccgctatgagttagagtctatcagtgttcttgttataaccccctattttcagggggttaaaaatcagctttaaaaaaatacataaaaatttcatcttaaagcactttcattttataccaacgtgaaaagtgccatttttagaataactttaaagcttaacaggtttccttttaatatcctttttttgtgtgctctttacttacacaatggctttgttttgctttttcagccacaccccttatgtgaactagtgcctttgggtatcacgtaaaattttttccaaagggttactttaaaaatctgttaccacaattatgagatgatttttaagtgataaattaaacttcttcttgtataaattctgcccagatctctccacaagagctgagggtttcataactttatggcttaataaatgtatgacactgaaaagatttgagtgtgaatctactgaaatcactataatgcacattgaagctatgatggtatttgagtagtgaggttacttttgatcggagcaacataatgctcatagaatcttctagaagaagagaaacaaagggattgataaaatgctgagaactagtgattatatatttttctgtatttacctgacatttattttaatgttcaaaaagtaaacactttaagtttgatgtgttttactctctcattgttttaagtaattgccaactcagaatacatcattcttaggctgaaatttgtctttccattttttaaggtgaaatagtactaccttacgtgatagcatacaaagaagaaagctctagaaagagaaattatggagaatgattatttaaattacaattaaggaaatgagaatatgatcccctcttccgagttgcccacaaacttgcttctttgcttttgctccctgtaatagaactacttttcaacaaatctaattttgcacggcaccgttaaccatattttcactacagcaaacttagtgctatgggttttctttttctttgtttttttcttgatcacttgtataggaaacaatattttccagtgttatttgcatatatattttgtccttccaatatatgcattacagatgaaaattaaatgttatacctgaattcttgggttggggccaaaatattaagctgaaaataatgctggtgtggatttgttttaaaacaaagctttattatgaacatgcatgtgaatctggatattgcctcttatttttaagaaaatggttctgtgaaaagtgaatgatatgtatttttccaaatgcttcatggttaggagtcttcaagttccatgttccccagatttgagatatactaaagaaagaaattcaaaagtagctatttggggcccacaaaaataactattattttagccttagagccttacacttgtttcatgaagagaaaggacttgcataaccaaaataaacaaagcaagacaaattaaaaatatgtgggggagagatcagtgaaaagtggttttcttaatgcagccctgctggtccccattaacaattgcttgaaattcacatggatgtaaaattataattgtcaggatcttattcagatgatcttttaaggtttaactggttttgcttttgtttatctatatgtcaaaatacttgtaaattgggaacaaacttctctcagcttcttgaagttgttcaactatccttgccactggaagaccaaacaaggttttcactgctttttcttttacataatatgctgagaattatttcttatgctttttactacaaacaaaattactcacctggattaaagattaaggccttaatctgtttagattatctttaatctccatgaaatcgtgaaataagacaagaatagtgtttcagctgtaggccattttacagctaattgcccataaattgtagcatttattgacctgaagtactaagctaattgtcttgactactcaaagcccctgaattgttgtcaactttcccctttgtgttgtgtagccctaacgtcatttagcttgttgtctgatgcctccagtaggacacctccgatggagctttgatttctgagcagcgaaagctcccttcctaagatgcatctcgcataggctgcctatgatgaaggaccgtgcacctccactccaacagagtgctgagtttaaaagttgacctgtgtttgtaatttcactttcatcttgcttaataaatatctgctggattctttca

SEQ ID NO: 149225 - DNA, 2403 bp, Homo sapiens
  Payload ID: 9461
  Gene Symbol: LMO3
  Gene Name: LIM domain only 3 (rhombotin-like 2)
  ENST ID: ENST00000453727
  CDS Start-End: 178-360
gtgaccttttctttggctgtattatgtctggctgggaagggattgcattttgcagctgagagccggagcttccttcagctcggctcctcgcacgctgctggggagaagcgctacaaagcagccactgtgcttactgaacggcctccccctgtatcgcttaattgagaaggtatacaaatgctctcagtccagccagacaccaagccgaaaggttgtgctggctgcaaccgaaagatcaaggaccggtatcttctaaaggcactggacaaatactggcatgaagactgcctgaagtgtgcctgctgtgactgtcgcttgggagaggctctttggtgtaacgggaaactgcgctgcctgtagtaagctcatccctgcctttgagatggtgatgcgtgccaaggacaatgtttaccacctggactgctttgcatgtcagctttgtaatcagagattttgtgttggagacaaatttttcctaaagaataacatgatcctttgccagacggactacgaggaaggtttaatgaaagaaggttatgcaccccaggttcgctgatctatcaacatcaccccattaagaatacaaagcactacattcttttatcttttttgctccacatgtacataagaattgacacaggaacctactgaatagcgtagatataggaaggcaggatggttatatggaataaaaggcggactgcatctgtatgtagtgaaattgccccagttcagagttgaatgtttattattaaagaaaaaagtaatgtacatatggctggatttttttgcttgctattcgtttttgtgtcacttggcatgagatgtttattttggactattgtatataatgtattgtaatatttgaagcacaaatgtaatacagttttattgtgttaccatttgtgttccatttgcttctttgtattgttgcatttagtacaatcagtgtttaaacttactgtatatttatgctttctgtatttaccagctattttaaatgagctgtaactttctagtaaagaattgaaaagcaaatctcactaatgatacacagatagataaagcaagtctatcaacattaaaaatactaaaaaataaagacacacacagagcattttagtgacatccactacttattgccgctatgagttagagtctatcagtgttcttgttataaccccctattttcagggggttaaaaatcagctttaaaaaaatacataaaaatttcatcttaaagcactttcattttataccaacgtgaaaagtgccatttttagaataactttaaagcttaacaggtttccttttaatatcctttttttgtgtgctctttacttacacaatggctttgttttgctttttcagccacaccccttatgtgaactagtgcctttgggtatcacgtaaaattttttccaaagggttactttaaaaatctgttaccacaattatgagatgatttttaagtgataaattaaacttcttcttgtataaattctgcccagatctctccacaagagctgagggtttcataactttatggcttaataaatgtatgacactgaaaagatttgagtgtgaatctactgaaatcactataatgcacattgaagctatgatggtatttgagtagtgaggttacttttgatcggagcaacataatgctcatagaatcttctagaagaagagaaacaaagggattgataaaatgctgagaactagtgattatatatttttctgtatttacctgacatttattttaatgttcaaaaagtaaacactttaagtttgatgtgttttactctctcattgttttaagtaattgccaactcagaatacatcattcttaggctgaaatttgtctttccattttttaaggtgaaatagtactaccttacgtgatagcatacaaagaagaaagctctagaaagagaaattatggagaatgattatttaaattacaattaaggaaatgagaatatgatcccctcttccgagttgcccacaaacttgcttctttgcttttgctccctgtaatagaactacttttcaacaaatctaattttgcacggcaccgttaaccatattttcactacagcaaacttagtgctatgggttttctttttctttgtttttttcttgatcacttgtataggaaacaatattttccagtgttatttgcatatatattttgtccttccaatatatgcattacagatgaaaattaaatgttatacctgaattcttgggttggggccaaaatattaagctgaaaataatgctggtgtggatttgttttaaaacaaagctttattatgaacatgcatgtgaatctggatattgcctcttatttttaagaaaatggttctgtgaaaagtgaatgatatgtatttttcc

SEQ ID NO: 149226 - DNA, 983 bp, Homo sapiens
  Payload ID: 9461
  Gene Symbol: LMO3
  Gene Name: LIM domain only 3 (rhombotin-like 2)
  ENST ID: ENST00000424192
  CDS Start-End: 167-379
aaagaaagaaacagctgaaaacttgaagacgtgtttagaaatatacatatatacacactattttcttgtgggagatctcctttgggcaaaggagaagcgctacaaagcagccactgtgcttactgaacggcctccccctgtatcgcttaattgagaaggtatacaaatgctctcagtccagccagacaccaagccgaaaggttgtgctggctgcaaccgaaagatcaaggaccggtatcttctaaaggcactggacaaatactggcatgaagactgcctgaagtgtgcctgctgtgactgtcgcttgggagaggtgggctccaccctgtacactaaagctaatcttatcctttgtcgcagagactatctgagcatttgaagaggtgtggatctatatacatacatgctgcacatacagagattggaatctgtgtaaccttagaatggccattaccttttgtcatcattgactttagccaacaaatcaccatagcttggctctttggtgtaacgggaaactgcgctgcctgtagtaagctcatccctgcctttgagatggtgatgcgtgccaaggacaatgtttaccacctggactgctttgcatgtcagctttgtaatcagagattttgtgttggagacaaatttttcctaaagaataacatgatcctttgccagacggactacgaggaaggtttaatgaaagaaggttatgcaccccaggttcgctgatctatcaacatcaccccattaagaatacaaagcactacattcttttatcttttttgctccacatgtacataagaattgacacaggaacctactgaatagcgtagatataggaaggcaggatggttatatggaataaaaggcggactgcatctgtatgtagtgaaattgccccagttcagagttgaatgtttattattaaagaaaaaagtaatgtacatatggctggatttttttgcttgctattcgtttttgtg

SEQ ID NO: 149227 - DNA, 3515 bp, Homo sapiens
  Payload ID: 9461
  Gene Symbol: LMO3
  Gene Name: LIM domain only 3 (rhombotin-like 2)
  Uniprot ID: Q8TAP4
  ENST ID: ENST00000441439
  CDS Start-End: 276-713
acacatactggggtgttttcagagtggctgtagcagagaggtggggtagaacagtggggagctgtgcggatgggtgaagtgcatgtatgcctgcctagacgggccagaaaagccaaacttaagaaatctgcctatgtacagaacaagtcaactaaggggttctcattaatctaccgtctgtgaatatcgttatttttcaggagaagcgctacaaagcagccactgtgcttactgaacggcctccccctgtatcgcttaattgagaaggtatacaaatgctctcagtccagccagacaccaagccgaaaggttgtgctggctgcaaccgaaagatcaaggaccggtatcttctaaaggcactggacaaatactggcatgaagactgcctgaagtgtgcctgctgtgactgtcgcttgggagaggtgggctccaccctgtacactaaagctaatcttatcctttgtcgcagagactatctgaggctctttggtgtaacgggaaactgcgctgcctgtagtaagctcatccctgcctttgagatggtgatgcgtgccaaggacaatgtttaccacctggactgctttgcatgtcagctttgtaatcagagattttgtgttggagacaaatttttcctaaagaataacatgatcctttgccagacggactacgaggaaggtttaatgaaagaaggttatgcaccccaggttcgctgatctatcaacatcaccccattaagaatacaaagcactacattcttttatcttttttgctccacatgtacataagaattgacacaggaacctactgaatagcgtagatataggaaggcaggatggttatatggaataaaaggcggactgcatctgtatgtagtgaaattgccccagttcagagttgaatgtttattattaaagaaaaaagtaatgtacatatggctggatttttttgcttgctattcgtttttgtgtcacttggcatgagatgtttattttggactattgtatataatgtattgtaatatttgaagcacaaatgtaatacagttttattgtgttaccatttgtgttccatttgcttctttgtattgttgcatttagtacaatcagtgtttaaacttactgtatatttatgctttctgtatttaccagctattttaaatgagctgtaactttctagtaaagaattgaaaagcaaatctcactaatgatacacagatagataaagcaagtctatcaacattaaaaatactaaaaaataaagacacacacagagcattttagtgacatccactacttattgccgctatgagttagagtctatcagtgttcttgttataaccccctattttcagggggttaaaaatcagctttaaaaaaatacataaaaatttcatcttaaagcactttcattttataccaacgtgaaaagtgccatttttagaataactttaaagcttaacaggtttccttttaatatcctttttttgtgtgctctttacttacacaatggctttgttttgctttttcagccacaccccttatgtgaactagtgcctttgggtatcacgtaaaattttttccaaagggttactttaaaaatctgttaccacaattatgagatgatttttaagtgataaattaaacttcttcttgtataaattctgcccagatctctccacaagagctgagggtttcataactttatggcttaataaatgtatgacactgaaaagatttgagtgtgaatctactgaaatcactataatgcacattgaagctatgatggtatttgagtagtgaggttacttttgatcggagcaacataatgctcatagaatcttctagaagaagagaaacaaagggattgataaaatgctgagaactagtgattatatatttttctgtatttacctgacatttattttaatgttcaaaaagtaaacactttaagtttgatgtgttttactctctcattgttttaagtaattgccaactcagaatacatcattcttaggctgaaatttgtctttccattttttaaggtgaaatagtactaccttacgtgatagcatacaaagaagaaagctctagaaagagaaattatggagaatgattatttaaattacaattaaggaaatgagaatatgatcccctcttccgagttgcccacaaacttgcttctttgcttttgctccctgtaatagaactacttttcaacaaatctaattttgcacggcaccgttaaccatattttcactacagcaaacttagtgctatgggttttctttttctttgtttttttcttgatcacttgtataggaaacaatattttccagtgttatttgcatatatattttgtccttccaatatatgcattacagatgaaaattaaatgttatacctgaattcttgggttggggccaaaatattaagctgaaaataatgctggtgtggatttgttttaaaacaaagctttattatgaacatgcatgtgaatctggatattgcctcttatttttaagaaaatggttctgtgaaaagtgaatgatatgtatttttccaaatgcttcatggttaggagtcttcaagttccatgttccccagatttgagatatactaaagaaagaaattcaaaagtagctatttggggcccacaaaaataactattattttagccttagagccttacacttgtttcatgaagagaaaggacttgcataaccaaaataaacaaagcaagacaaattaaaaatatgtgggggagagatcagtgaaaagtggttttcttaatgcagccctgctggtccccattaacaattgcttgaaattcacatggatgtaaaattataattgtcaggatcttattcagatgatcttttaaggtttaactggttttgcttttgtttatctatatgtcaaaatacttgtaaattgggaacaaacttctctcagcttcttgaagttgttcaactatccttgccactggaagaccaaacaaggttttcactgctttttcttttacataatatgctgagaattatttcttatgctttttactacaaacaaaattactcacctggattaaagattaaggccttaatctgtttagattatctttaatctccatgaaatcgtgaaataagacaagaatagtgtttcagctgtaggccattttacagctaattgcccataaattgtagcatttattgacctgaagtactaagctaattgtcttgactactcaaagcccctgaattgttgtcaactttcccctttgtgttgtgtagccctaacgtcatttagcttgttgtctgatgcctccagtaggacacctccgatggagctttgatttctgagcagcgaaagctcccttcctaagatgcatctcgcataggctgcctatgatgaaggaccgtgcacctccactccaacagagtgctgagtttaaaagttgacctgtgtttgtaatttcactttcatcttgcttaataaatatctgctggattctttcattca

SEQ ID NO: 149228 - DNA, 3365 bp, Homo sapiens
  Payload ID: 9461
  Gene Symbol: LMO3
  Gene Name: LIM domain only 3 (rhombotin-like 2)
  Uniprot ID: Q8TAP4
  ENST ID: ENST00000447609
  CDS Start-End: 127-564
gtcgactcctgcagaggtcacattttgtgtgcgggtttgtccccagcgtttgagaagcgctacaaagcagccactgtgcttactgaacggcctccccctgtatcgcttaattgagaaggtatacaaatgctctcagtccagccagacaccaagccgaaaggttgtgctggctgcaaccgaaagatcaaggaccggtatcttctaaaggcactggacaaatactggcatgaagactgcctgaagtgtgcctgctgtgactgtcgcttgggagaggtgggctccaccctgtacactaaagctaatcttatcctttgtcgcagagactatctgaggctctttggtgtaacgggaaactgcgctgcctgtagtaagctcatccctgcctttgagatggtgatgcgtgccaaggacaatgtttaccacctggactgctttgcatgtcagctttgtaatcagagattttgtgttggagacaaatttttcctaaagaataacatgatcctttgccagacggactacgaggaaggtttaatgaaagaaggttatgcaccccaggttcgctgatctatcaacatcaccccattaagaatacaaagcactacattcttttatcttttttgctccacatgtacataagaattgacacaggaacctactgaatagcgtagatataggaaggcaggatggttatatggaataaaaggcggactgcatctgtatgtagtgaaattgccccagttcagagttgaatgtttattattaaagaaaaaagtaatgtacatatggctggatttttttgcttgctattcgtttttgtgtcacttggcatgagatgtttattttggactattgtatataatgtattgtaatatttgaagcacaaatgtaatacagttttattgtgttaccatttgtgttccatttgcttctttgtattgttgcatttagtacaatcagtgtttaaacttactgtatatttatgctttctgtatttaccagctattttaaatgagctgtaactttctagtaaagaattgaaaagcaaatctcactaatgatacacagatagataaagcaagtctatcaacattaaaaatactaaaaaataaagacacacacagagcattttagtgacatccactacttattgccgctatgagttagagtctatcagtgttcttgttataaccccctattttcagggggttaaaaatcagctttaaaaaaatacataaaaatttcatcttaaagcactttcattttataccaacgtgaaaagtgccatttttagaataactttaaagcttaacaggtttccttttaatatcctttttttgtgtgctctttacttacacaatggctttgttttgctttttcagccacaccccttatgtgaactagtgcctttgggtatcacgtaaaattttttccaaagggttactttaaaaatctgttaccacaattatgagatgatttttaagtgataaattaaacttcttcttgtataaattctgcccagatctctccacaagagctgagggtttcataactttatggcttaataaatgtatgacactgaaaagatttgagtgtgaatctactgaaatcactataatgcacattgaagctatgatggtatttgagtagtgaggttacttttgatcggagcaacataatgctcatagaatcttctagaagaagagaaacaaagggattgataaaatgctgagaactagtgattatatatttttctgtatttacctgacatttattttaatgttcaaaaagtaaacactttaagtttgatgtgttttactctctcattgttttaagtaattgccaactcagaatacatcattcttaggctgaaatttgtctttccattttttaaggtgaaatagtactaccttacgtgatagcatacaaagaagaaagctctagaaagagaaattatggagaatgattatttaaattacaattaaggaaatgagaatatgatcccctcttccgagttgcccacaaacttgcttctttgcttttgctccctgtaatagaactacttttcaacaaatctaattttgcacggcaccgttaaccatattttcactacagcaaacttagtgctatgggttttctttttctttgtttttttcttgatcacttgtataggaaacaatattttccagtgttatttgcatatatattttgtccttccaatatatgcattacagatgaaaattaaatgttatacctgaattcttgggttggggccaaaatattaagctgaaaataatgctggtgtggatttgttttaaaacaaagctttattatgaacatgcatgtgaatctggatattgcctcttatttttaagaaaatggttctgtgaaaagtgaatgatatgtatttttccaaatgcttcatggttaggagtcttcaagttccatgttccccagatttgagatatactaaagaaagaaattcaaaagtagctatttggggcccacaaaaataactattattttagccttagagccttacacttgtttcatgaagagaaaggacttgcataaccaaaataaacaaagcaagacaaattaaaaatatgtgggggagagatcagtgaaaagtggttttcttaatgcagccctgctggtccccattaacaattgcttgaaattcacatggatgtaaaattataattgtcaggatcttattcagatgatcttttaaggtttaactggttttgcttttgtttatctatatgtcaaaatacttgtaaattgggaacaaacttctctcagcttcttgaagttgttcaactatccttgccactggaagaccaaacaaggttttcactgctttttcttttacataatatgctgagaattatttcttatgctttttactacaaacaaaattactcacctggattaaagattaaggccttaatctgtttagattatctttaatctccatgaaatcgtgaaataagacaagaatagtgtttcagctgtaggccattttacagctaattgcccataaattgtagcatttattgacctgaagtactaagctaattgtcttgactactcaaagcccctgaattgttgtcaactttcccctttgtgttgtgtagccctaacgtcatttagcttgttgtctgatgcctccagtaggacacctccgatggagctttgatttctgagcagcgaaagctcccttcctaagatgcatctcgcataggctgcctatgatgaaggaccgtgcacctccactccaacagagtgctgagtttaaaagttgacctgtgtttgtaatttcactttcatcttgcttaataaatatctgctggattctttcattc

SEQ ID NO: 149229 - DNA, 1489 bp, Homo sapiens
  Payload ID: 9461
  Gene Symbol: LMO3
  Gene Name: LIM domain only 3 (rhombotin-like 2)
  ENST ID: ENST00000541764
  CDS Start-End: 266-544
attctggtagcagtttgattctcttgcttttattttaatttccataattggtagcttcagaaatggctttggaaggcaatttgctttaaatgtagccacctattccaaaatgccctggttattttaggaaccctacccttttcctccggagctctctcgcaggagttcttcttttggactggtccaggaggagaagcgctacaaagcagccactgtgcttactgaacggcctccccctgtatcgcttaattgagaaggtatacaaatgctctcagtccagccagacaccaagccgaaaggttgtgctggctgcaaccgaaagatcaaggaccggtatcttctaaaggcactggacaaatactggcatgaagactgcctgaagtgtgcctgctgtgactgtcgcttgggagaggtgggctccaccctgtacactaaagctaatcttatcctttgtcgcagagactatctgagtatctcaagtggatttatgttaccatttcaaataaggagtttatatagcccgggcaatgttaaggtgttttaataaaccaaaggacaaaaattaagtaaacttgaaagaatgtcaactgaaatatctggggtttttgaaaacaaaaataaaaatttgccaaggaaatacctatatttttaattggcttataaaaattggtttgtgtatatgattacttctgctgacacatggcacttcctcttgttaagcatttgaagaggtgtggatctatatacatacatgctgcacatacagagattggaatctgtgtaaccttagaatggccattaccttttgtcatcattgactttagccaacaaatcaccatagcttggctctttggtgtaacgggaaactgcgctgcctgtagtaagctcatccctgcctttgagatggtgatgcgtgccaaggacaatgtttaccacctggactgctttgcatgtcagctttgtaatcagagattttgtgttggagacaaatttttcctaaagaataacatgatcctttgccagacggactacgaggaaggtttaatgaaagaaggttatgcaccccaggttcgctgatctatcaacatcaccccattaagaatacaaagcactacattcttttatcttttttgctccacatgtacataagaattgacacaggaacctactgaatagcgtagatataggaaggcaggatggttatatggaataaaaggcggactgcatctgtatgtagtgaaattgccccagttcagagttgaatgtttattattaaagaaaaaagtaatgtacatatggctggatttttttgcttgctattcgtttttgtgtcacttggcatgagatgtttattttggactattgtatataatgtattgtaatatttgaagcacaaatgtaatacagttttattgtgttaccatttgtgttccatttgcttctttgtattgttgcatttagtacaatcagtgtttaaacttactgtata

SEQ ID NO: 149230 - DNA, 580 bp, Homo sapiens
  Payload ID: 9461
  Gene Symbol: LMO3
  Gene Name: LIM domain only 3 (rhombotin-like 2)
  ENST ID: ENST00000539232
  CDS Start-End: 298-480
aactttcactcgggctgcagctctactgagacggttttgtttaaatcatgtgaggcttcattatttttatgatgagacatgaaatagatgcaggcggaagatgttgatggaaggagggagagcggctgcggcgcggaacgtctcaagtacgactcgagtggataatagtcaaagttcaccatgaactgcagtatttccacacccctgactcccggggagagaggggcagggagagtttggaattaggaagtgtttgctcccagcccataggaaaagaattcagtcctgggtatacaaatgctctcagtccagccagacaccaagccgaaaggttgtgctggctgcaaccgaaagatcaaggaccggtatcttctaaaggcactggacaaatactggcatgaagactgcctgaagtgtgcctgctgtgactgtcgcttgggagaggctctttggtgtaacgggaaactgcgctgcctgtagtaagctcatccctgcctttgagatggtgatgcgtgccaaggacaatgtttaccacctggactgctttgcatgtcagctttgtaatcagagattttgtgtt

SEQ ID NO: 149231 - DNA, 1016 bp, Homo sapiens
  Payload ID: 9461
  Gene Symbol: LMO3
  Gene Name: LIM domain only 3 (rhombotin-like 2)
  Uniprot ID: Q8TAP4
  ENST ID: ENST00000534946
  CDS Start-End: 232-669
tctgggacgccacagaaatcgtaactgaacacccgcacacaaaagtaatctgtgaggtgtgttttaaagaaagaaacagctgaaaacttgaagacgtgtttagaaatatacatatatacacactattttcttgtgggagatctcctttgggcaaaggagaagcgctacaaagcagccactgtgcttactgaacggcctccccctgtatcgcttaattgagaaggtatacaaatgctctcagtccagccagacaccaagccgaaaggttgtgctggctgcaaccgaaagatcaaggaccggtatcttctaaaggcactggacaaatactggcatgaagactgcctgaagtgtgcctgctgtgactgtcgcttgggagaggtgggctccaccctgtacactaaagctaatcttatcctttgtcgcagagactatctgaggctctttggtgtaacgggaaactgcgctgcctgtagtaagctcatccctgcctttgagatggtgatgcgtgccaaggacaatgtttaccacctggactgctttgcatgtcagctttgtaatcagagattttgtgttggagacaaatttttcctaaagaataacatgatcctttgccagacggactacgaggaaggtttaatgaaagaaggttatgcaccccaggttcgctgatctatcaacatcaccccattaagaatacaaagcactacattcttttatcttttttgctccacatgtacataagaattgacacaggaacctactgaatagcgtagatataggaaggcaggatggttatatggaataaaaggcggactgcatctgtatgtagtgaaattgccccagttcagagttgaatgtttattattaaagaaaaaagtaatgtacatatggctggatttttttgcttgctattcgtttttgtgtcacttggcatgagatgtttattttggactattgtatataatgtattgtaatatttgaagcacaaatgtaatacagttttattgtgttaccat

SEQ ID NO: 149232 - DNA, 555 bp, Homo sapiens
  Payload ID: 9461
  Gene Symbol: LMO3
  Gene Name: LIM domain only 3 (rhombotin-like 2)
  ENST ID: ENST00000544754
  CDS Start-End: 74-283
gtacagaacaagtcaactaaggggttctcattaatctaccgtctgtgaatatcgttatttttcaggtatacaaatgctctcagtccagccagacaccaagccgaaaggttgtgctggctgcaaccgaaagatcaaggaccggtatcttctaaaggcactggacaaatactggcatgaagactgcctgaagtgtgcctgctgtgactgtcgcttgggagaggtgggctccaccctgtacactaaagctaatcttatcctttgtcgcagagactatctgaggtaggaattatccttgcacaccagtgatgactggatgccttttaaagtacttttgctctttggtgtaacgggaaactgcgctgcctgtagtaagctcatccctgcctttgagatggtgatgcgtgccaaggacaatgtttaccacctggactgctttgcatgtcagctttgtaatcagagattttgtgttggagacaaatttttcctaaagaataacatgatcctttgccagacggactacgaggaaggtttaatgaaagaaggttatgcacccca

SEQ ID NO: 149233 - DNA, 565 bp, Homo sapiens
  Payload ID: 9461
  Gene Symbol: LMO3
  Gene Name: LIM domain only 3 (rhombotin-like 2)
  ENST ID: ENST00000540590
  CDS Start-End: 313-565
agtatcaacctcatccttcccttgaccgagacctttcactgctcctggactttcagggtgtgctatcctttgcctccccccaacaacctgtctgctgccctaaaaaaaaaattaaaaaaaaaaaagacggcaacctaaccggagcatctctgggacgccacagaaatcgtaactgaacacccgcacacaaaagtaatctgtgaggtgtgttttaaagaaagaaacagctgaaaacttgaagacgtgtttagaaatatacatatatacacactattttcttgtgggagatctcctttgggcaaaggtatacaaatgctctcagtccagccagacaccaagccgaaaggttgtgctggctgcaaccgaaagatcaaggaccggtatcttctaaaggcactggacaaatactggcatgaagactgcctgaagtgtgcctgctgtgactgtcgcttgggagaggtgggctccaccctgtacactaaagctaatcttatcctttgtcgcagagactatctgaggctctttggtgtaacgggaaactgcgctgcctgtagtaagctcatcc

SEQ ID NO: 149234 - DNA, 1685 bp, Homo sapiens
  Payload ID: 9461
  Gene Symbol: LMO3
  Gene Name: LIM domain only 3 (rhombotin-like 2)
  Uniprot ID: Q8TAP4
  ENST ID: ENST00000537304
  CDS Start-End: 475-912
cgagaggtaaatagtcttaaatcggaagggagctgcttctctgtggtcttgacaagcgctgcctgggctccgccggctcactaataactgagtgaccttttctttggctgtattatgtctggctgggaagggattgcattttgcagctgagagccggagcttccttcagctcggctcctcgcacgctgctggggtaagttgtcttgaaccaggacggagagagacagcctcggactgcagttgcctaaaaggaggacacctgtggctcagatgcggtcaacaccattgcttggcgtatccttgaggacctcattattttaaacttaaaaaaaaatagacattccctcccccgtcttttttttttttttcaaacaatgcttctttttgacctttcccaaggagaagcgctacaaagcagccactgtgcttactgaacggcctccccctgtatcgcttaattgagaaggtatacaaatgctctcagtccagccagacaccaagccgaaaggttgtgctggctgcaaccgaaagatcaaggaccggtatcttctaaaggcactggacaaatactggcatgaagactgcctgaagtgtgcctgctgtgactgtcgcttgggagaggtgggctccaccctgtacactaaagctaatcttatcctttgtcgcagagactatctgaggctctttggtgtaacgggaaactgcgctgcctgtagtaagctcatccctgcctttgagatggtgatgcgtgccaaggacaatgtttaccacctggactgctttgcatgtcagctttgtaatcagagattttgtgttggagacaaatttttcctaaagaataacatgatcctttgccagacggactacgaggaaggtttaatgaaagaaggttatgcaccccaggttcgctgatctatcaacatcaccccattaagaatacaaagcactacattcttttatcttttttgctccacatgtacataagaattgacacaggaacctactgaatagcgtagatataggaaggcaggatggttatatggaataaaaggcggactgcatctgtatgtagtgaaattgccccagttcagagttgaatgtttattattaaagaaaaaagtaatgtacatatggctggatttttttgcttgctattcgtttttgtgtcacttggcatgagatgtttattttggactattgtatataatgtattgtaatatttgaagcacaaatgtaatacagttttattgtgttaccatttgtgttccatttgcttctttgtattgttgcatttagtacaatcagtgtttaaacttactgtatatttatgctttctgtatttaccagctattttaaatgagctgtaactttctagtaaagaattgaaaagcaaatctcactaatgatacacagatagataaagcaagtctatcaacattaaaaatactaaaaaataaagacacacacagagcattttagtgacatccactacttattgccgctatgagttagagtctatcagtgttcttgttataaccccctattttcagggggttaaaaatcagctttaaaaaaatacataaaaatttcatcttaaagcactttcattttataccaacgtgaaaagtgccatttttagaataactttaaagcttaacaggtttccttttaatatcctttttttg

SEQ ID NO: 149235 - DNA, 587 bp, Homo sapiens
  Payload ID: 9461
  Gene Symbol: LMO3
  Gene Name: LIM domain only 3 (rhombotin-like 2)
  ENST ID: ENST00000536172
  CDS Start-End: 215-397
gaggaagggaggaagggaggaaggagagtgtgtgtgtgatcccctgaaccaggcttgtgtggcggacttgcggagcagcgacttcagagagttcatgaatggaagtcacagacagaccagcgactgcagccacctccaggagaagcgctacaaagcagccactgtgcttactgaacggcctccccctgtatcgcttaattgagaaggtatacaaatgctctcagtccagccagacaccaagccgaaaggttgtgctggctgcaaccgaaagatcaaggaccggtatcttctaaaggcactggacaaatactggcatgaagactgcctgaagtgtgcctgctgtgactgtcgcttgggagaggctctttggtgtaacgggaaactgcgctgcctgtagtaagctcatccctgcctttgagatggtgatgcgtgccaaggacaatgtttaccacctggactgctttgcatgtcagctttgtaatcagagattttgtgttggagacaaatttttcctaaagaataacatgatcctttgccagacggactacgaggaaggtttaatgaaagaaggttatgcaccccaggtt

SEQ ID NO: 149236 - DNA, 1499 bp, Homo sapiens
  Payload ID: 9461
  Gene Symbol: LMO3
  Gene Name: LIM domain only 3 (rhombotin-like 2)
  ENST ID: ENST00000541589
  CDS Start-End: 101-283
aaagccaaacttaagaaatctgcctatgtacagaacaagtcaactaaggggttctcattaatctaccgtctgtgaatatcgttatttttcaggtatacaaatgctctcagtccagccagacaccaagccgaaaggttgtgctggctgcaaccgaaagatcaaggaccggtatcttctaaaggcactggacaaatactggcatgaagactgcctgaagtgtgcctgctgtgactgtcgcttgggagaggctctttggtgtaacgggaaactgcgctgcctgtagtaagctcatccctgcctttgagatggtgatgcgtgccaaggacaatgtttaccacctggactgctttgcatgtcagctttgtaatcagagattttgtgttggagacaaatttttcctaaagaataacatgatcctttgccagacggactacgaggaaggtttaatgaaagaaggttatgcaccccaggttcgctgatctatcaacatcaccccattaagaatacaaagcactacattcttttatcttttttgctccacatgtacataagaattgacacaggaacctactgaatagcgtagatataggaaggcaggatggttatatggaataaaaggcggactgcatctgtatgtagtgaaattgccccagttcagagttgaatgtttattattaaagaaaaaagtaatgtacatatggctggatttttttgcttgctattcgtttttgtgtcacttggcatgagatgtttattttggactattgtatataatgtattgtaatatttgaagcacaaatgtaatacagttttattgtgttaccatttgtgttccatttgcttctttgtattgttgcatttagtacaatcagtgtttaaacttactgtatatttatgctttctgtatttaccagctattttaaatgagctgtaactttctagtaaagaattgaaaagcaaatctcactaatgatacacagatagataaagcaagtctatcaacattaaaaatactaaaaaataaagacacacacagagcattttagtgacatccactacttattgccgctatgagttagagtctatcagtgttcttgttataaccccctattttcagggggttaaaaatcagctttaaaaaaatacataaaaatttcatcttaaagcactttcattttataccaacgtgaaaagtgccatttttagaataactttaaagcttaacaggtttccttttaatatcctttttttgtgtgctctttacttacacaatggctttgttttgctttttcagccacaccccttatgtgaactagtgcctttgggtatcacgtaaaattttttccaaagggttactttaaaaatctgttaccacaattatgagatgatttttaagtgataaattaaacttcttcttgtataaattctgcccagatctctccacaagagctgagggtttcataactttatggcttaataaatgtatgacactgaaaaga

SEQ ID NO: 149237 - DNA, 590 bp, Homo sapiens
  Payload ID: 9461
  Gene Symbol: LMO3
  Gene Name: LIM domain only 3 (rhombotin-like 2)
  ENST ID: ENST00000546279
  CDS Start-End: 259-590
ctctccttctctctctctctctcctccttgcttggcagtattacttgcttataagtgtgggggaaatggtaaaattgagaggaaaaggaagattggggaaaaaggaagaggatgggatgcacttagagatctgggtgtttgtcccttaagaaaaaggtgacaaagtggttaatgtctttgcaggagaagcgctacaaagcagccactgtgcttactgaacggcctccccctgtatcgcttaattgagaaggtatacaaatgctctcagtccagccagacaccaagccgaaaggttgtgctggctgcaaccgaaagatcaaggaccggtatcttctaaaggcactggacaaatactggcatgaagactgcctgaagtgtgcctgctgtgactgtcgcttgggagaggtgggctccaccctgtacactaaagctaatcttatcctttgtcgcagagactatctgaggctctttggtgtaacgggaaactgcgctgcctgtagtaagctcatccctgcctttgagatggtgatgcgtgccaaggacaatgtttaccacctggactgctttgcatgtcagctttgtaatcagag

SEQ ID NO: 149238 - DNA, 496 bp, Homo sapiens
  Payload ID: 9461
  Gene Symbol: LMO3
  Gene Name: LIM domain only 3 (rhombotin-like 2)
  ENST ID: ENST00000546281
  CDS Start-End: 141-496
agtcctgaaaacatgtttctcagtgctgttggctgtttttcattggagcgtgtgagttttaaatagagaagcgctacaaagcagccactgtgcttactgaacggcctccccctgtatcgcttaattgagaaggtatacaaatgctctcagtccagccagacaccaagccgaaaggttgtgctggctgcaaccgaaagatcaaggaccggtatcttctaaaggcactggacaaatactggcatgaagactgcctgaagtgtgcctgctgtgactgtcgcttgggagaggtgggctccaccctgtacactaaagctaatcttatcctttgtcgcagagactatctgaggctctttggtgtaacgggaaactgcgctgcctgtagtaagctcatccctgcctttgagatggtgatgcgtgccaaggacaatgtttaccacctggactgctttgcatgtcagctttgtaatcagagattttgtgttggagacaaattttt

SEQ ID NO: 149239 - DNA, 906 bp, Homo sapiens
  Payload ID: 9461
  Gene Symbol: LMO3
  Gene Name: LIM domain only 3 (rhombotin-like 2)
  Uniprot ID: Q8TAP4
  ENST ID: ENST00000540445
  CDS Start-End: 226-729
gtgatcccctgaaccaggcttgtgtggcggacttgcggagcagcgacttcagagagttcatgaatggaagtcacagacagaccagcgactgcagccacctccaggcatttcttaaaggggagggttgtgtgctttttccagggtattctggagaagcgctacaaagcagccactgtgcttactgaacggcctccccctgtatcgcttaattgagaaggtatacaaatgctctcagtccagccagacaccaagccgaaaggttgtgctggctgcaaccgaaagatcaaggaccggtatcttctaaaggcactggacaaatactggcatgaagactgcctgaagtgtgcctgctgtgactgtcgcttgggagagcatttgaagaggtgtggatctatatacatacatgctgcacatacagagattggaatctgtgtaaccttagaatggccattaccttttgtcatcattgactttagccaacaaatcaccatagcttggctctttggtgtaacgggaaactgcgctgcctgtagtaagctcatccctgcctttgagatggtgatgcgtgccaaggacaatgtttaccacctggactgctttgcatgtcagctttgtaatcagagattttgtgttggagacaaatttttcctaaagaataacatgatcctttgccagacggactacgaggaaggtttaatgaaagaaggttatgcaccccaggttcgctgatctatcaacatcaccccattaagaatacaaagcactacattcttttatcttttttgctccacatgtacataagaattgacacaggaacctactgaatagcgtagatataggaaggcaggatggttatatggaataaaaggcggactgcatctgtatgtagtgaaattgccccagttc

SEQ ID NO: 149240 - DNA, 543 bp, Homo sapiens
  Payload ID: 9461
  Gene Symbol: LMO3
  Gene Name: LIM domain only 3 (rhombotin-like 2)
  ENST ID: ENST00000539534
  CDS Start-End: 188-543
aatgcatgcacatttggtgttttgtatccttctacatgcaagtttaaaactttatgcctaggagagcaaacataatgcagcagaagggtctctggactgtaagaaggccatttggctggagtctatagcgtaactgtctttcagctttgagcaagtctctgaacctctcttgggcctcggtatacaaatgctctcagtccagccagacaccaagccgaaaggttgtgctggctgcaaccgaaagatcaaggaccggtatcttctaaaggcactggacaaatactggcatgaagactgcctgaagtgtgcctgctgtgactgtcgcttgggagaggtgggctccaccctgtacactaaagctaatcttatcctttgtcgcagagactatctgaggctctttggtgtaacgggaaactgcgctgcctgtagtaagctcatccctgcctttgagatggtgatgcgtgccaaggacaatgtttaccacctggactgctttgcatgtcagctttgtaatcagagattttgtgttggagacaaattttt

SEQ ID NO: 149241 - DNA, 530 bp, Homo sapiens
  Payload ID: 9461
  Gene Symbol: LMO3
  Gene Name: LIM domain only 3 (rhombotin-like 2)
  ENST ID: ENST00000545436
  CDS Start-End: 267-530
atcatagatgcactttgctggcgctctgcactcctggccgctcaaaagcctttctgcttttccgctgcttttgtgtctttctgaaagaaccgaaatattattgttgtaactgctttgaaagactgctgcttaaaccaattaatcttgctagatgcaacaaatactgctacattctttgcaaaccatccctgtgtggctgcaaagacacaaccacaaaaggctggagcataaactccgcaagggattctttgttagagtgtatacaaatgctctcagtccagccagacaccaagccgaaaggttgtgctggctgcaaccgaaagatcaaggaccggtatcttctaaaggcactggacaaatactggcatgaagactgcctgaagtgtgcctgctgtgactgtcgcttgggagaggtgggctccaccctgtacactaaagctaatcttatcctttgtcgcagagactatctgaggctctttggtgtaacgggaaactgcgctgcctgtagtaagctcatccctgcctttgag

SEQ ID NO: 149242 - DNA, 573 bp, Homo sapiens
  Payload ID: 9461
  Gene Symbol: LMO3
  Gene Name: LIM domain only 3 (rhombotin-like 2)
  Uniprot ID: Q8TAP4
  ENST ID: ENST00000541846
  CDS Start-End: 96-533
gagaaaacacagctctgtcaatggactgaatgcaccattaaaactggcgtcactacaaaggttagagcagatctaactgtcaatacagtatacaaatgctctcagtccagccagacaccaagccgaaaggttgtgctggctgcaaccgaaagatcaaggaccggtatcttctaaaggcactggacaaatactggcatgaagactgcctgaagtgtgcctgctgtgactgtcgcttgggagaggtgggctccaccctgtacactaaagctaatcttatcctttgtcgcagagactatctgaggctctttggtgtaacgggaaactgcgctgcctgtagtaagctcatccctgcctttgagatggtgatgcgtgccaaggacaatgtttaccacctggactgctttgcatgtcagctttgtaatcagagattttgtgttggagacaaatttttcctaaagaataacatgatcctttgccagacggactacgaggaaggtttaatgaaagaaggttatgcaccccaggttcgctgatctatcaacatcaccccattaagaatacaaagcactacat

SEQ ID NO: 149243 - DNA, 516 bp, Homo sapiens
  Payload ID: 9461
  Gene Symbol: LMO3
  Gene Name: LIM domain only 3 (rhombotin-like 2)
  ENST ID: ENST00000537757
  CDS Start-End: 161-516
aatggtgcagaaactatggttctttgaccaagttagtcctgaaaacatgtttctcagtgctgttggctgtttttcattggagcgtgagaagcgctacaaagcagccactgtgcttactgaacggcctccccctgtatcgcttaattgagaaggtatacaaatgctctcagtccagccagacaccaagccgaaaggttgtgctggctgcaaccgaaagatcaaggaccggtatcttctaaaggcactggacaaatactggcatgaagactgcctgaagtgtgcctgctgtgactgtcgcttgggagaggtgggctccaccctgtacactaaagctaatcttatcctttgtcgcagagactatctgaggctctttggtgtaacgggaaactgcgctgcctgtagtaagctcatccctgcctttgagatggtgatgcgtgccaaggacaatgtttaccacctggactgctttgcatgtcagctttgtaatcagagattttgtgttggagacaaattttt

SEQ ID NO: 149244 - DNA, 579 bp, Homo sapiens
  Payload ID: 9461
  Gene Symbol: LMO3
  Gene Name: LIM domain only 3 (rhombotin-like 2)
  ENST ID: ENST00000538051
  CDS Start-End: 288-579
ttcttctcagtgcattggctgagacagagcgcacgagacacacacacatgcatgcacacatatgcacacacacacactcacacatactggggtgttttcagagtggctgtagcagagaggtggggtagaacagtggggagctgtgcggatgggtgaagtgcatgtatgcctgcctagacgggccagaaaagccaaacttaagaaatctgcctatgtacagaacaagtcaactaaggggttctcattaatctaccgtctgtgaatatcgttatttttcaggtatacaaatgctctcagtccagccagacaccaagccgaaaggttgtgctggctgcaaccgaaagatcaaggaccggtatcttctaaaggcactggacaaatactggcatgaagactgcctgaagtgtgcctgctgtgactgtcgcttgggagaggtgggctccaccctgtacactaaagctaatcttatcctttgtcgcagagactatctgaggctctttggtgtaacgggaaactgcgctgcctgtagtaagctcatccctgcctttgagatggtgatgcgtgccaaggacaatgttt

SEQ ID NO: 149245 - DNA, 1574 bp, Homo sapiens
  Payload ID: 9461
  Gene Symbol: LMO3
  Gene Name: LIM domain only 3 (rhombotin-like 2)
  Uniprot ID: Q8TAP4
  ENST ID: ENST00000540848
  CDS Start-End: 114-551
agatctaactgtcaatacagtgagtagagtggagtccggagaagcgctacaaagcagccactgtgcttactgaacggcctccccctgtatcgcttaattgagaaggtatacaaatgctctcagtccagccagacaccaagccgaaaggttgtgctggctgcaaccgaaagatcaaggaccggtatcttctaaaggcactggacaaatactggcatgaagactgcctgaagtgtgcctgctgtgactgtcgcttgggagaggtgggctccaccctgtacactaaagctaatcttatcctttgtcgcagagactatctgaggctctttggtgtaacgggaaactgcgctgcctgtagtaagctcatccctgcctttgagatggtgatgcgtgccaaggacaatgtttaccacctggactgctttgcatgtcagctttgtaatcagagattttgtgttggagacaaatttttcctaaagaataacatgatcctttgccagacggactacgaggaaggtttaatgaaagaaggttatgcaccccaggttcgctgatctatcaacatcaccccattaagaatacaaagcactacattcttttatcttttttgctccacatgtacataagaattgacacaggaacctactgaatagcgtagatataggaaggcaggatggttatatggaataaaaggcggactgcatctgtatgtagtgaaattgccccagttcagagttgaatgtttattattaaagaaaaaagtaatgtacatatggctggatttttttgcttgctattcgtttttgtgtcacttggcatgagatgtttattttggactattgtatataatgtattgtaatatttgaagcacaaatgtaatacagttttattgtgttaccatttgtgttccatttgcttctttgtattgttgcatttagtacaatcagtgtttaaacttactgtatatttatgctttctgtatttaccagctattttaaatgagctgtaactttctagtaaagaattgaaaagcaaatctcactaatgatacacagatagataaagcaagtctatcaacattaaaaatactaaaaaataaagacacacacagagcattttagtgacatccactacttattgccgctatgagttagagtctatcagtgttcttgttataaccccctattttcagggggttaaaaatcagctttaaaaaaatacataaaaatttcatcttaaagcactttcattttataccaacgtgaaaagtgccatttttagaataactttaaagcttaacaggtttccttttaatatcctttttttgtgtgctctttacttacacaatggctttgttttgctttttcagccacaccccttatgtgaactagtgcctttgggtatcacgtaaaattttttccaaagggttactttaaaaatctgttaccacaattatgagatgatttttaagtgataaattaaacttcttcttgtataaattctgcccagatctctccacaagagctgagggtttcataactttatggcttaataaatgtatgacactgaaaagattt

SEQ ID NO: 149246 - DNA, 622 bp, Homo sapiens
  Payload ID: 9461
  Gene Symbol: LMO3
  Gene Name: LIM domain only 3 (rhombotin-like 2)
  ENST ID: ENST00000538020
  CDS Start-End: 448-622
atcataagatatcagaggaaactggaggaggtttagctgttttggagaaggaaaatgtacaaaagtgcagattatagcttgacatttcttatcctataatgcatgcacatttggtgttttgtatccttctacatgcaagtttaaaactttatgcctaggagagcaaacataatgcagcagaagggtctctggactgtaagaaggccatttggctggagtctatagcgtaactgtctttcagctttgagcaagtctctgaacctctcttgggcctcggtaacataatttgtaaaatgagggaatttggaattgatgatgtctgcagtactttatagtgcttaaaatgagttatttgataaatatgaggcattggatagttggtccagcttcttgctaaagctgggtgttttaatacctaggaaataagaagacactcaaggtatacaaatgctctcagtccagccagacaccaagccgaaaggttgtgctggctgcaaccgaaagatcaaggaccggtatcttctaaaggcactggacaaatactggcatgaagactgcctgaagtgtgcctgctgtgactgtcgcttgggagaggtgggctccaccctgtacactaaagcta

SEQ ID NO: 149247 - DNA, 1488 bp, Homo sapiens
  Payload ID: 9461
  Gene Symbol: LMO3
  Gene Name: LIM domain only 3 (rhombotin-like 2)
  Uniprot ID: Q8TAP4
  ENST ID: ENST00000535535
  CDS Start-End: 212-649
ttccccaacctctgctaatgaggcataaactggagctgcaacccagctccgcactgcaactttcactcgggctgcagctctactgagacggttttgtttaaatcatgtgaggcttcattatttttatgatgagacatgaaatagatgcaggcggaagatgttgatggaaggagggagagcggctgcggcgcggaacgtctcaagtatacaaatgctctcagtccagccagacaccaagccgaaaggttgtgctggctgcaaccgaaagatcaaggaccggtatcttctaaaggcactggacaaatactggcatgaagactgcctgaagtgtgcctgctgtgactgtcgcttgggagaggtgggctccaccctgtacactaaagctaatcttatcctttgtcgcagagactatctgaggctctttggtgtaacgggaaactgcgctgcctgtagtaagctcatccctgcctttgagatggtgatgcgtgccaaggacaatgtttaccacctggactgctttgcatgtcagctttgtaatcagagattttgtgttggagacaaatttttcctaaagaataacatgatcctttgccagacggactacgaggaaggtttaatgaaagaaggttatgcaccccaggttcgctgatctatcaacatcaccccattaagaatacaaagcactacattcttttatcttttttgctccacatgtacataagaattgacacaggaacctactgaatagcgtagatataggaaggcaggatggttatatggaataaaaggcggactgcatctgtatgtagtgaaattgccccagttcagagttgaatgtttattattaaagaaaaaagtaatgtacatatggctggatttttttgcttgctattcgtttttgtgtcacttggcatgagatgtttattttggactattgtatataatgtattgtaatatttgaagcacaaatgtaatacagttttattgtgttaccatttgtgttccatttgcttctttgtattgttgcatttagtacaatcagtgtttaaacttactgtatatttatgctttctgtatttaccagctattttaaatgagctgtaactttctagtaaagaattgaaaagcaaatctcactaatgatacacagatagataaagcaagtctatcaacattaaaaatactaaaaaataaagacacacacagagcattttagtgacatccactacttattgccgctatgagttagagtctatcagtgttcttgttataaccccctattttcagggggttaaaaatcagctttaaaaaaatacataaaaatttcatcttaaagcactttcattttataccaacgtgaaaagtgccatttttagaataactttaaagcttaacaggtttccttttaatatcctttttttgtgtgctctttacttacacaatggctttgttttgctttttcagccacaccccttatgtgaactagtg

SEQ ID NO: 149248 - DNA, 3498 bp, Homo sapiens
  Payload ID: 9461
  Gene Symbol: LMO3
  Gene Name: LIM domain only 3 (rhombotin-like 2)
  Uniprot ID: Q8TAP4
  ENST ID: ENST00000541295
  CDS Start-End: 158-649
ttccccaacctctgctaatgaggcataaactggagctgcaacccagctccgcactgcaactttcactcgggctgcagctctactgagacggttttgtttaaatcatgtgaggcttcattatttttatgatgagacatgaaatagatgcaggcggaagatgttgatggaaggagggagagcggctgcggcgcggaacgtctcaagtatacaaatgctctcagtccagccagacaccaagccgaaaggttgtgctggctgcaaccgaaagatcaaggaccggtatcttctaaaggcactggacaaatactggcatgaagactgcctgaagtgtgcctgctgtgactgtcgcttgggagaggtgggctccaccctgtacactaaagctaatcttatcctttgtcgcagagactatctgaggctctttggtgtaacgggaaactgcgctgcctgtagtaagctcatccctgcctttgagatggtgatgcgtgccaaggacaatgtttaccacctggactgctttgcatgtcagctttgtaatcagagattttgtgttggagacaaatttttcctaaagaataacatgatcctttgccagacggactacgaggaaggtttaatgaaagaaggttatgcaccccaggttcgctgatctatcaacatcaccccattaagaatacaaagcactacattcttttatcttttttgctccacatgtacataagaattgacacaggaacctactgaatagcgtagatataggaaggcaggatggttatatggaataaaaggcggactgcatctgtatgtagtgaaattgccccagttcagagttgaatgtttattattaaagaaaaaagtaatgtacatatggctggatttttttgcttgctattcgtttttgtgtcacttggcatgagatgtttattttggactattgtatataatgtattgtaatatttgaagcacaaatgtaatacagttttattgtgttaccatttgtgttccatttgcttctttgtattgttgcatttagtacaatcagtgtttaaacttactgtatatttatgctttctgtatttaccagctattttaaatgagctgtaactttctagtaaagaattgaaaagcaaatctcactaatgatacacagatagataaagcaagtctatcaacattaaaaatactaaaaaataaagacacacacagagcattttagtgacatccactacttattgccgctatgagttagagtctatcagtgttcttgttataaccccctattttcagggggttaaaaatcagctttaaaaaaatacataaaaatttcatcttaaagcactttcattttataccaacgtgaaaagtgccatttttagaataactttaaagcttaacaggtttccttttaatatcctttttttgtgtgctctttacttacacaatggctttgttttgctttttcagccacaccccttatgtgaactagtgcctttgggtatcacgtaaaattttttccaaagggttactttaaaaatctgttaccacaattatgagatgatttttaagtgataaattaaacttcttcttgtataaattctgcccagatctctccacaagagctgagggtttcataactttatggcttaataaatgtatgacactgaaaagatttgagtgtgaatctactgaaatcactataatgcacattgaagctatgatggtatttgagtagtgaggttacttttgatcggagcaacataatgctcatagaatcttctagaagaagagaaacaaagggattgataaaatgctgagaactagtgattatatatttttctgtatttacctgacatttattttaatgttcaaaaagtaaacactttaagtttgatgtgttttactctctcattgttttaagtaattgccaactcagaatacatcattcttaggctgaaatttgtctttccattttttaaggtgaaatagtactaccttacgtgatagcatacaaagaagaaagctctagaaagagaaattatggagaatgattatttaaattacaattaaggaaatgagaatatgatcccctcttccgagttgcccacaaacttgcttctttgcttttgctccctgtaatagaactacttttcaacaaatctaattttgcacggcaccgttaaccatattttcactacagcaaacttagtgctatgggttttctttttctttgtttttttcttgatcacttgtataggaaacaatattttccagtgttatttgcatatatattttgtccttccaatatatgcattacagatgaaaattaaatgttatacctgaattcttgggttggggccaaaatattaagctgaaaataatgctggtgtggatttgttttaaaacaaagctttattatgaacatgcatgtgaatctggatattgcctcttatttttaagaaaatggttctgtgaaaagtgaatgatatgtatttttccaaatgcttcatggttaggagtcttcaagttccatgttccccagatttgagatatactaaagaaagaaattcaaaagtagctatttggggcccacaaaaataactattattttagccttagagccttacacttgtttcatgaagagaaaggacttgcataaccaaaataaacaaagcaagacaaattaaaaatatgtgggggagagatcagtgaaaagtggttttcttaatgcagccctgctggtccccattaacaattgcttgaaattcacatggatgtaaaattataattgtcaggatcttattcagatgatcttttaaggtttaactggttttgcttttgtttatctatatgtcaaaatacttgtaaattgggaacaaacttctctcagcttcttgaagttgttcaactatccttgccactggaagaccaaacaaggttttcactgctttttcttttacataatatgctgagaattatttcttatgctttttactacaaacaaaattactcacctggattaaagattaaggccttaatctgtttagattatctttaatctccatgaaatcgtgaaataagacaagaatagtgtttcagctgtaggccattttacagctaattgcccataaattgtagcatttattgacctgaagtactaagctaattgtcttgactactcaaagcccctgaattgttgtcaactttcccctttgtgttgtgtagccctaacgtcatttagcttgttgtctgatgcctccagtaggacacctccgatggagctttgatttctgagcagcgaaagctcccttcctaagatgcatctcgcataggctgcctatgatgaaggaccgtgcacctccactccaacagagtgctgagtttaaaagttgacctgtgtttgtaatttcactttcatcttgcttaataaatatctgctggattctttcattcacttttttacatttggatttatgtttttaataaaaggggtgttacact

SEQ ID NO: 149249 - DNA, 3227 bp, Homo sapiens
  Payload ID: 9461
  Gene Symbol: LMO3
  Gene Name: LIM domain only 3 (rhombotin-like 2)
  ENST ID: ENST00000616247
  CDS Start-End: 1-378
atgctctcagtccagccagacaccaagccgaaaggttgtgctggctgcaaccgaaagatcaaggaccggtatcttctaaaggcactggacaaatactggcatgaagactgcctgaagtgtgcctgctgtgactgtcgctgggagaggctctttggtgtaacgggaaactgcgctgcctgtagtaagctcatccctgcctttgagatggtgatgcgtgccaaggacaatgtttaccacctggactgctttgcatgtcagctttgtaatcagagattttgtgttggagacaaatttttcctaaagaataacatgatcctttgccagacggactacgaggaaggtttaatgaaagaaggttatgcaccccaggttcgctgatctatcaacatcaccccattaagaatacaaagcactacattcttttatcttttttgctccacatgtacataagaattgacacaggaacctactgaatagcgtagatataggaaggcaggatggttatatggaataaaaggcggactgcatctgtatgtagtgaaattgccccagttcagagttgaatgtttattattaaagaaaaaagtaatgtacatatggctggatttttttgcttgctattcgtttttgtgtcacttggcatgagatgtttattttggactattgtatataatgtattgtaatatttgaagcacaaatgtaatacagttttattgtgttaccatttgtgttccatttgcttctttgtattgttgcatttagtacaatcagtgtttaaacttactgtatatttatgctttctgtatttaccagctattttaaatgagctgtaactttctagtaaagaattgaaaagcaaatctcactaatgatacacagatagataaagcaagtctatcaacattaaaaatactaaaaaataaagacacacacagagcattttagtgacatccactacttattgccgctatgagttagagtctatcagtgttcttgttataaccccctattttcagggggttaaaaatcagctttaaaaaaatacataaaaatttcatcttaaagcactttcattttataccaacgtgaaaagtgccatttttagaataactttaaagcttaacaggtttccttttaatatcctttttttgtgtgctctttacttacacaatggctttgttttgctttttcagccacaccccttatgtgaactagtgcctttgggtatcacgtaaaattttttccaaagggttactttaaaaatctgttaccacaattatgagatgatttttaagtgataaattaaacttcttcttgtataaattctgcccagatctctccacaagagctgagggtttcataactttatggcttaataaatgtatgacactgaaaagatttgagtgtgaatctactgaaatcactataatgcacattgaagctatgatggtatttgagtagtgaggttacttttgatcggagcaacataatgctcatagaatcttctagaagaagagaaacaaagggattgataaaatgctgagaactagtgattatatatttttctgtatttacctgacatttattttaatgttcaaaaagtaaacactttaagtttgatgtgttttactctctcattgttttaagtaattgccaactcagaatacatcattcttaggctgaaatttgtctttccattttttaaggtgaaatagtactaccttacgtgatagcatacaaagaagaaagctctagaaagagaaattatggagaatgattatttaaattacaattaaggaaatgagaatatgatcccctcttccgagttgcccacaaacttgcttctttgcttttgctccctgtaatagaactacttttcaacaaatctaattttgcacggcaccgttaaccatattttcactacagcaaacttagtgctatgggttttctttttctttgtttttttcttgatcacttgtataggaaacaatattttccagtgttatttgcatatatattttgtccttccaatatatgcattacagatgaaaattaaatgttatacctgaattcttgggttggggccaaaatattaagctgaaaataatgctggtgtggatttgttttaaaacaaagctttattatgaacatgcatgtgaatctggatattgcctcttatttttaagaaaatggttctgtgaaaagtgaatgatatgtatttttccaaatgcttcatggttaggagtcttcaagttccatgttccccagatttgagatatactaaagaaagaaattcaaaagtagctatttggggcccacaaaaataactattattttagccttagagccttacacttgtttcatgaagagaaaggacttgcataaccaaaataaacaaagcaagacaaattaaaaatatgtgggggagagatcagtgaaaagtggttttcttaatgcagccctgctggtccccattaacaattgcttgaaattcacatggatgtaaaattataattgtcaggatcttattcagatgatcttttaaggtttaactggttttgcttttgtttatctatatgtcaaaatacttgtaaattgggaacaaacttctctcagcttcttgaagttgttcaactatccttgccactggaagaccaaacaaggttttcactgctttttcttttacataatatgctgagaattatttcttatgctttttactacaaacaaaattactcacctggattaaagattaaggccttaatctgtttagattatctttaatctccatgaaatcgtgaaataagacaagaatagtgtttcagctgtaggccattttacagctaattgcccataaattgtagcatttattgacctgaagtactaagctaattgtcttgactactcaaagcccctgaattgttgtcaactttcccctttgtgttgtgtagccctaacgtcatttagcttgttgtctgatgcctccagtaggacacctccgatggagctttgatttctgagcagcgaaagctcccttcctaagatgcatctcgcataggctgcctatgatgaaggaccgtgcacctccactccaacagagtgctgagtttaaaagttgacctgtgtttgtaatttcactttcatcttgcttaataaatatctgctggattctttcattcacttttttacatttggatttatgtttttaataaaaggggtgttacact

SEQ ID NO: 149250 - DNA, 1260 bp, Homo sapiens
  Payload ID: 9462
  Gene Symbol: LMO4
  Gene Name: LIM domain only 4
  Uniprot ID: P61968
  ENST ID: ENST00000370542
  CDS Start-End: 151-648
ggggctgggaggaggtgccgcgaggggtggagcgcgcagcggagcctgctctcggagttttgacagtaccggagctgaaattgtcagcggcggcaagcgcaggaaagttgagaggagctcgtggccccagaacaaagcttgagaaaaaccatggtgaatccgggcagcagctcgcagccgcccccggtgacggccggctccctctcctggaagcggtgcgcaggctgcgggggcaagattgcggaccgctttctgctctatgccatggacagctattggcacagccggtgcctcaagtgctcctgctgccaggcgcagctgggcgacatcggcacgtcctgttacaccaaaagtggcatgatcctttgcagaaatgactacattaggttatttggaaatagcggtgcttgcagcgcttgcggacagtcgattcctgcgagtgaactcgtcatgagggcgcaaggcaatgtgtatcatcttaagtgttttacatgctctacctgccggaatcgcctggtcccgggagatcggtttcactacatcaatggcagtttattttgtgaacatgatagacctacagctctcatcaatggccatttgaattcacttcagagcaatccactactgccagaccagaaggtctgctaaaaggtcagagtaatgcagaatgcgtgccttcatctcagatttgttcatcacaggtggatcccatgtgtcttcagtagacaagtcacctttgtagctagcaccagtgccagctccatgccattgcaccttctttagtcttgattgcccttcccgcatttattggtgtattaaaatgactgaatatgaacattaaggactccatgaacctgggctaatgggagactgtagagaaaatgaaaaaagatccaccagaggacatcttggggagggggagggagctgggggggagggaaatgactaatgaagctaattaaaagaagcattcaaatctgctttctaccctcattaacaattagcagggcactggccagagtttgtaccctgtgttttaccttaacaacattctatttgctctttgtatatttaagtgttgtaaggaaacgtgtttcaatcaaaactgaccatgagataaaggaaagagatgtggcttttgtgatattctatcacaaacacttattgtatctctgtaaaatacaatgtatgtatgcatgtaagtgtttttgtcctaatgttgctactcccatggcaaagaaaaaaaaaagaatgaaaaaa

SEQ ID NO: 149251 - DNA, 5405 bp, Homo sapiens
  Payload ID: 9462
  Gene Symbol: LMO4
  Gene Name: LIM domain only 4
  Uniprot ID: P61968
  ENST ID: ENST00000370544
  CDS Start-End: 781-1278
gctctgtcagtaacacatgtgtaagagccgcggagggagcgagcgagccggctagaggccagcgccgccgccgccgccgcctccgagccgggcagcaacagccccggcagcggcgcaggctccagcgcgccgggcccggccggccgcagcccccgacgcctgggtgcgcctgcctgccggcctccgcaccgtccgccgccgctcccggggctgttgtgtctgcgactgctcccggccggaggtgcagggagctcagccgagccgccgctgccatcccggagcgagcaagcgagcgagcgcgcgggagggaggaaggcggcggcggaggaggaggaggagcgggaggagcgcgggcgggggcgggggcccccgggcgggggaatatacaaagtgaagccacattgccaaacttgcagcagcgattgcagcagttgctgccgctgcgccgcgcctgaagccgcgccgcgcgggccgagggctcctgcagctgctcgcgcgcagtcggaggcggagaaggacgaagactgagactgacacttctgctcccggccgcccggcacttacgcgggggccccccaacccgccccagagcaacgcgatttaaaaaaaaaaaaaaagccgcccttagccccctcctcccctttcctgcttctgcgagaactccctccctccctccagctccgccagcccaggcgccccttccctggaagccgagcggcttcgctcgcatttcaccgccgccgcctctcgcaatattgcaatataggggaaaagcagaccatggtgaatccgggcagcagctcgcagccgcccccggtgacggccggctccctctcctggaagcggtgcgcaggctgcgggggcaagattgcggaccgctttctgctctatgccatggacagctattggcacagccggtgcctcaagtgctcctgctgccaggcgcagctgggcgacatcggcacgtcctgttacaccaaaagtggcatgatcctttgcagaaatgactacattaggttatttggaaatagcggtgcttgcagcgcttgcggacagtcgattcctgcgagtgaactcgtcatgagggcgcaaggcaatgtgtatcatcttaagtgttttacatgctctacctgccggaatcgcctggtcccgggagatcggtttcactacatcaatggcagtttattttgtgaacatgatagacctacagctctcatcaatggccatttgaattcacttcagagcaatccactactgccagaccagaaggtctgctaaaaggtcagagtaatgcagaatgcgtgccttcatctcagatttgttcatcacaggtggatcccatgtgtcttcagtagacaagtcacctttgtagctagcaccagtgccagctccatgccattgcaccttctttagtcttgattgcccttcccgcatttattggtgtattaaaatgactgaatatgaacattaaggactccatgaacctgggctaatgggagactgtagagaaaatgaaaaaagatccaccagaggacatcttggggagggggagggagctgggggggagggaaatgactaatgaagctaattaaaagaagcattcaaatctgctttctaccctcattaacaattagcagggcactggccagagtttgtaccctgtgttttaccttaacaacattctatttgctctttgtatatttaagtgttgtaaggaaacgtgtttcaatcaaaactgaccatgagataaaggaaagagatgtggcttttgtgatattctatcacaaacacttattgtatctctgtaaaatacaatgtatgtatgcatgtaagtgtttttgtcctaatgttgctactcccatggcaaagaaaaaaaaaagaatgaaaaaaagaaaaaaatttggaaaaaaaaatcaggctcatagcagctactgtgtagaaaattccccctacttctaatttgctgaatgaagaaaaaaaaaaatcttttatttgtgatattttcagagacatttgctctagtatggtgtatttaaataataaaaacttaaaagaaaaaatatttaatggtgtttgggtttaaacactgctttttctcttctgtattttgaagaaatttagtttttattgttgttgaataacaagctcactttaaatttgaaggagttgagggaggtggagtgtatatttatttagctctgggccagtaaggtattcttcaaattacttaaccacgccattattggcaggggtacaaagtagtttctaacagggtcctttctataagtcaagaatattctgttaacagcatttcgttacacttctatatcacagtaagtcttttgtgtttataaatacttgagtgtccactattttgtttattctttttctcaatagcaaacaaagccttgggtattgatgaaaagtatgtataaaaaaaaatacggcacaaccatcctgttctcttattgagtttatagcttttgaaggaagtcacaatttctaagtcatacctgtacatattttgaagctcacttagttgtagggacccagagctctttttttatggtgatctttgattggtgaagtagccatttcctggtgacccttaggctcgtgtggttggctgtaaggtgtttattttgttttgctcctacacttctttactgactgcgtttccgtatgtattttgggggaagattctgacttcatttagtcttagtcttgagatactgagttgctggttgcaggcagcagagtgtccaccacagtgcctgcactgcccgcagagctgccctccggaaagcatgcagtataacagctagtgctggaaggaggaaaaccaaataggcctggaggctgaggttgtactgccagcttccttagatgtgagcaaatttcaactacaacttccatcacaggctaataaaaccaggtgtgtgaacgctactattttaaattttcttttttaagatggcattttattttgttccagaaaagcgcctgatgtagaccctccctctgagaatagccgtggagccatgtagagaggtgtagctcagcacatctcaactaccagtcagcttccctttgagaacttctgtgctcacttcctgttttcagagattccagggcaggggaaaaaaaaaatcagttgaacttcaaacctcctagaggagattgtaaaggcatagagttgaggtgaatagttttgttagaaccttataaaaataaaatgcaagaaaataatatgaagaaatcacatatatatgtttgaattagatgtctgtttgaattagatccttggggaatttcttcaaactagttctggttcttatatttgttttttttcctttaaggaactttctgaaggaagttagactgcgatggtaaagggggaaatgggttaatgagattgcaggcattttctatattctttttggcataagcacttatgtccctgatatgtacaaattcaaaggaggtggttaataactttagtaaataatatattgtcgcatttaatgatgtggagggctaaggtcattacggactttaaataaactattatatggctggttcctcaagcactgctgcgtatttaataatgagcttctaaaagcatttcttaagttgcagacctataagattacaaatgtcactcatgttagtataatccacatgcaagtgatgaagccttctctttgatgtgctaaattggagaaggactaatggagctatgaatatacaatagaacatatttaagtagtagtcttgctttaggtaaaacactttcttgaaaccagaggcatttcaaacaataaaacccggctctaatggggatgctctgtgtggatagaaagctactaaaaacactcaggtttattctgatgtgagcagcgattgtgtgcagttcctcccccaatctcaacattgcttaggaaaaaaaaaaatctatgagtttattccacctttcatccattgcatttgtgatgttattagttagcaagatggacactgttctttagaaaggacttatttaatattaaccacgtcatagagcaagatggcccccagtccctacaagcaagtgcaattaaaaataaaagcaaatgttactgagccctgctgaactcctgataaaaaaaattatgtttatggtacatataaatgtctcaatcatgcaaattgtcactcttgttaatgaaacaattttgtaaaaagatagtcctctaaaagggtttaatgttttttacctatctaactgtctaattagatttacacatcccgcaaggcaggggagcctgaagcttttccaaaccaaatcgtttgccactagaaactattttcagctcttcatgatttattaggaaatagtttaacccggactgtagtgtcttataaaatacaaaacgagaaaactgacacaccaaaatgaagtctgtgaaattgtcatcctcttaatattacctgtatttaaattctttcttttgcccttattaacactgatatttgaaacaactaatcatctaaaaggaagctcttaaagggctttaaatgtcaatatagtaagattctaatgtgcactactatttatataaaatatttcttagggcccataaatcatataataaacagtgaacccaagagctacatatggagtctagtgaagagttcccatgtagcctaactaattgtatttaaattgaggagatccaaaaaccccatcacccttcaccccaaagaccccttcacccttcaccagggaattctatcctgggtgctgtcccacctatgaccccttcaagaggccattggaaaaaggccatttacaagttaatgttacttatagctttgttactaagactcacctattgttagtgcagccaagtcacagaagtgcttattgcagttaaatagcaatttgtttccatgaaactgcaattaaagtattactgagcagccattttagattggcagtgctctgaacgcatgttaaacagccagctactcccacttgcagagtctgagatctgactagcagcaaagtgtagcacattcgccgatgctgggtacctagttaaagaggcatttgtagccctctgctcccatcgtgaacatgctgagagcaatgacaagtcagggctgatttttggaaggtgaacttgcaacttacctcaagtgaatactgttttcagttgtgcaagaagtgctttatgctagtagatatgtgcatgtttcctagagggaatgttttcaagttcagattgattctgctgagaatggacggcaactcggaggcctcaagccaataatgtactacaggccctgacatgttacagctgtgtaaacagggccattctatttcctaaatcacaactaataaagcagaggatgaaaatcaa

SEQ ID NO: 149252 - DNA, 11331 bp, Homo sapiens
  Payload ID: 9463
  Gene Symbol: LIMD1
  Gene Name: LIM domains containing 1
  Uniprot ID: Q9UGP4
  ENST ID: ENST00000273317
  CDS Start-End: 22-2052
gcccggacacctgtctgcagcatggataagtatgacgacctgggcctggaggccagtaaattcatcgaggacctgaacatgtatgaggcctctaaggatgggctcttccgagtggacaagggtgcaggcaacaaccccgagtttgaggaaactcgcagggtgttcgccaccaagatggccaaaatccacctccagcagcagcagcagcagctcctgcaggaggagactctgcccagggggagtagaggccctgtcaatggagggggccgcctgggcccacaggcccgttgggaagttgtgggcagcaagctgactgtggatggtgctgccaagcctcctcttgctgcctcgacaggggcacctggggcagtcaccaccctcgctgctgggcagcccccgtacccaccgcaggagcagagatccaggccatacctgcatggcacgaggcatggcagccaggactgtggttccagggagagcctggcgacttctgagatgtctgctttccaccagccaggcccctgtgaggatccttcctgcctcactcatggagactattatgacaacctctccttggcaagcccaaagtggggtgacaaaccaggagtgtcccccagcatcggcctgagtgtagggagtgggtggcctagctccccggggagtgacccaccactgcccaaaccctgcggggaccatcccctaaatcaccgacagctctccctgagctccagcaggtcttctgagggtagcctcggtggtcagaatagtggcattggtggccgcagcagcgagaagccaacaggcctttggtccactgcctcctcccagcgggtgagccctggcctgccttccccaaacttggagaacggagcaccagctgtggggcctgttcagcccaggaccccttctgtgtcagcacccttggccctgagctgccccaggcaaggaggtcttccaagatcaaactcggggctggggggtgaggtttcaggtgtgatgtccaaacccaatgtggacccccaaccctggttccaggatgggcccaaatcttacctttccagttctgccccgtcatcctcgccagctggtctggacggttcacagcagggtgcggtccctgggctggggccgaagcctggctgcacagaccttggcactggtcccaagctcagccccaccagtcttgtccatccagtgatgtccaccctgcctgagttatcttgtaaagagggtcccctgggctggtcttctgatggtagcctgggatctgtgctcctggacagccccagctcccctagggtaaggctgccctgccagcccctcgtcccaggtcctgagctgagaccctctgctgctgagttgaaattagaagccctcacccaacgtctggagcgagagatggatgctcacccgaaggctgattactttggagcctgtgtgaaatgcagcaaaggggtgtttggggctggccaggcctgtcaggccatggggaacctctaccatgacacatgcttcacctgtgcagcttgcagccggaagctgagaggaaaagccttttattttgtcaacggcaaagtgttttgtgaagaagacttcctgtactctggtttccagcagtcggctgacaggtgttttctttgtggacatctgatcatggacatgatcctgcaagccctggggaagtcctaccaccccggctgtttccgctgtgtcatctgtaatgagtgtttggatggggtgcccttcaccgtggactcagagaacaagatctactgtgtccgagattaccacaaggtgctggcccccaagtgtgcagcctgtgggcttcccatccttccacctgagggctcagatgagaccatccgtgtcgtgtccatggacagagactaccacgtggagtgttaccactgcgaggactgtggtctggagctcaatgatgaagatggccaccgctgttatccgctggaggaccacctgttctgtcactcctgccacgtgaagaggctggagaagagaccctcatctacagcccttcaccagcaccacttctagccagagccacttgcagacatcacggcaggggatgaggagccggggttgctgctgctgcttccggtggcccctggggtggaagtggggtaggggaagaggaggggcaggagggagagttcctgtgagcatgtggggggtgcctttcctttaaccagggaggtgaacactacctgcctcctgcgtgtattttccaagtgcttttctctgttgccacattttcctcaggttactcaggaaaatgctccagcatgtgcgagcacatgacctgaggttgcatcatagcaccaaaggaatcctcctgtcccctctgggaacatttcatgcttcagagggagaggtttttattgagcttgtttcacaatatccccttgaagggacagctcagctgccaatacattcaaccctttctcttccttcaggaaaatacctatacccaaatgttccctcccccgacatatatcatggcatgatttaaggcttcttttcacctgagagcttcagttcttctgcagaatggctgcaaatttaattgcattaaggcaagaaggaagctctaatgtgtgctttgtatcctaagataaatttgcttagaaaaccagagtcaagatttgaaataggtgaggcagggtttcctccttagacactgacagcattctctgtaccccttcaaatccttactctcctaaaggcagctgagtccgcgacagaaatttgccctatgtgagtaaaacatactttgggagaagaacttggtgcaggcaccaggatttttttttttgcccacgtgtttgcgctgtttttctctggagttctcaagagttggtgacttggaaggccgcttctgcaaggcaagtctcaggaacccatgcaggtacatcgcttgcacctgtttttagcttatttaatgacgggcttttgggaagagctgcccgcatactgagagacagcttcttataaacaaggagagtttttgtgtgtgcgagatctctaagccagcgtgggagggagcgcctcaggataagttattatattcatttcgttggtttctctcctgcccaattcttggcacaggcattatgtttgaagaaaccaggataaggtacactgcttttgtctgtttaatttttttagttgtttcccttcactttcagtcttccacacacaaaaaatacctcacagagcttcaccaaatcacagattcaggaggaatttggctttcacactggactcagataccttcttcagtgtgttggaaatcactggcttcacacaggcccaactccagctggtcagggcagagtgatcgtaactaaaggtcagtggggaatagatccgattcagtgcttttgccttatgcatttcagcatcctggctccccagggtggcaggagctgagggagggccacacactggcaagatttcaagaccactctctgcactgaagaggtaaaatttgcactgcaagtcacatccctgaggccagaggtcagtaccctttggtatttcgattagaagaagctgcaaaagaaaggcagcccattttaccattgccagccaggccggggacacaggagccggtgtgtgcactctgcctcctcaccttgcacccagagcaagaggactgggtgctgggctgcagaggccggtcagtggagcccctagcacgtgtgaactcaggcttttcattgggcccggctccacttctaggccatgttttgactcatttggtaaccattgcctgtaagcagcacagaattggtgccatggattatcttttccatgttgatggaattcattctgttggaatcctttggccagatgtcacttcagccagggtgtgcatcatcattggttctttttcacaggctgagcctcctgaaaacccatgaacgctggggctggggaagtgaaccctgaggtggggaccctctcttcccatcaaatcatccagctcagtgtggggcgtggcaggggggtaaatgaagccagccaatgtgttaacctgtctctgtcaacctaagaatgttggccttactgacacacctttgctccatgttcaagaccagaagtagctgggatttgtttgcaaattgggtaattagtttaaaaatctgtgattacatttttaaatgaaattttcaaagtggcctagattgaggtgattcagataggtttgcgaatataccattttatattgttgagaaagaacaaaaagggaatttccagatgtcctagaaatcctagcaacagatttctctggttgtcagtttccctggagaaggcgccagataggaatctccaatcagttgtttttctcttcgcttcaggcccttacacaaaagccatgaagagatgttcacctacccggtattttaaatgttctgtaaattattagccaaatagaactgtaatggggttgtatttatgggcgcctagaaagaaaacacaaggacttggtaggccaggaagaaaagattttaaaatttagaatgaatagcccttctgggttttctttttgacaattcttggacttgaggtaaaacaaggaggattgtggccggatttcagatcccaaagccagcctccatcttaggcctttgcctcattgtgccttttaggttttcttacccaccgtctcctgttttgtcttttttttcttttctcctacccctatcttgggacattcagaaactgcctgggtggtttgagaagagacaacccagtttgatctgcaatacaaggatccattcgtaatctctctctcactgatgttattcccccatctgccgtcttggttcatctcaccacagaagggcatttagtcctacccagccatcggctgcgtatgacagcaggatggcacttcccatttctctgtggttagtgctcgagtgaaaacctctttcagctgagtcctctgaggttctgctgttgagtcctgggtggctgatggaatgattgaggaggtctggtcaccctcaagcgccgtcatcgccttgtttccatgggcttctgtcacacaaaatgaagaacagaaatgttaggacttaagagaatgtttggaattcacacctctttgcagtcctttcaaggctgctgctctgtgctgtgtcccatgcatgtgaaagtagagctgtgatggctgctgggacgcttgcaaagatcatgtgtgagaattgagcacaagaccacaaattattactgcttgatgcgcttgttaaaactctatctgccaggaaaccaaattttcttttcttttctttttttttttgagacagggcctcactctgttgcccaggctggagtgcagtggcgcgatctcagctcactgcagcctccacctactgggctcaagtgatcctcccacctcagcctcccgagtagccgggaccacaggcgtgtatgactggctacgcctggctaatttttgtatttttaatagagacgagtttcaccatgttgcccaggatggtctggaactcctgggctcaagtgatctgcccacttccgcctcccaaagtgttgggattatggccattagccactgtacctggcacaatttttttttgtaccctcctttatgccaagaatcagtcctaatttctttactatgtgaagtaacttttaaaggtaatagaaaaggccaggcacagtggctcatgcctgtaatcccaggcgccgtggctcacgcctgtaatcccagcactttgagaggctgaggcgggtggatcacttaaggtcaggagttagagaccagcctgaccaacatggtgaaacactgtctctactaaaaatacaaaattagctgggtttggtggcgcacgcctgtaatcccagctacctgagaggttgaggcaggagaatcgcttgaacctgggaggcagaggttgcagtgagccgagatggtgccattgcactccgacctgggcaacagagcgaaacactgtctcaaaaaaaaaaaaaaaagtaacagaaaaaagagtgaaatatattagctatcttttattctgagccaaaacttgacagatgtgggaaatcttcatatagtgtatgaaaatttcattgtacagggaaattattttcctctgtgtcttttcttttactataaagtgattcagaattttactgttactataaaattatgcaaagtattgtgacaaaactgcatcaatttgttgactattaaagtgctccttgaacattatatttcctgggtcttttctgtgtgtggagtcagcaaactgttttttgctacctggactttgtcttcttttacagctctggattcttaaaagtaccacataggtagcaaacctgtgaagggtatgagattttaccctacttgcaggctaataaagtgagcacaccacatgggttcatggatcctggcagaagttatgagactcataggtcagagacaaaggacagtttattatagcaatagcagtggccagattatcagcatttacactggttccctgagccccaggccccaagaagagggccaggtgagacctgcacacgcagtgggctgcattacaagaggaacccccatgcttaggggaccctggtatttgataatgggcagtaagcctgcctgacttttgctccagagacagacactatctctgtcatccaagactgttcactagataaacatccttgaaaatataagtctggaacctggcaattggtgtctattcttaccagatgtataaaaatgtgagaggccttggagaatcatatcccaagaatcagcagtttcttttactggacctttaagattgagacttgtaaggtcctgatgcagtgacttgtaaggtcactttgtctctcttgtgaatgttactgttttttctcttctgaggttatgaccaaagaatcctcaaggcgagtgatccttcaggtttgagacagccacatgcaggaagacaggacttgtagagtgttggggccaagtgtgtggttagaatccttggggtggggaaagagtttgttctagactccagtgtagtccttgtggctaccaggtctgacgtgccaaggacacgggaaagctgggagtgaggatactcatagtcatagcaccttacaccagaataaaagttttttttttctttttaagtgatgagagaatggctagtctgattttgccaacatgggctgctatttgcttaagaccttgatggtataaggagtgaagatgcaatcagggtaaaaggcggtctggagttgtggtgtgctggcaaaccagccctctggggcaaaaaattaaaaagccttgatatggagtgtttgctgatacctatgatgtaaatattcccgccatggccactttccagctaccagcaaggcatcctggcaccagggattgggaggagatggcatagtcctaagagtcagccttgggcattgggccatgtgggactgggcagtggggtatctggtctggttctaagtgctgtgatgaagcagtagcagctgtaatagctggcatttcccgtgtgctcatcacatagcagatgttattccaaggactgtatgttctttatcatccctcatttgatagacaagacaactgagacacaaaagggtgaaataaacagtaagtactccatcccaggccatctcatccagagggtgctgtcttgaccactctactactctggttgatgggaggcagtaaattgtccatcagtatacttcttcatcaaagctacatagtcaaaaagccacaggaggctgtgaggagaagctcactgctgctctgttgaagtctgtattggtttcctatggccactcttaacaaattaccacaacctcagtggcttaaaacaacacaaatatatcattctgtcatcctggacacgagccaaaggttgtcggcagaagcgaattgcttccagaggtgctatagggtgctgcccattccttgccccttttccgcttctagaggctgcccattttccttggcttgtggctgcatcattctggctgcttctattgtcacacctcctctctgaccctccctgcctccttgtaaggacacttgggattacgcccatccagataatctagaataatctcccattttgtgattcttaataacatctgcaaagcctcttttaccttgcagaataagatattcacaggttctggtgaggaggacagggacatctctgaaggggagggaagcaggagatagggtctggaggcatggaattggcttcctaaggccaattcaggctgacttcctagaactaagtcaaaaggaaaaccccaactttccacgctcaagtaacaaaaggaccagaggctactccctttgcaacctccccacccccagccccttttctgcatggcaggtgaaaaattgaaagtatcgctaattgatcccctcccacaaccaatcagactggtcttaggccaagtcttcatttgcctaggagtataactttgtaacttcagcctctgattgggcgttttacacaaccagtcagatgtttgtatagggtggtgtaactttgtaactttgcttcagcctctgattggtcccctcccacaaccaatcaaactgatcatggacctctgcttcatttacatagggtgtacaccaagtaaccaatgggaaacctctagagggtatttaaatcccagaaaattctgtaaccgggttcttgagctgcttgggctgctcccaccctgtggagcgtactttcgtttttcaataaatctcttttgttgcttcattctttacttgctttgtgcgttttgtccatttctttatcaagacgccaagaacctggacaccctccaccggtaacaggaggagcattagtcagcctaccacagactccaacgaacgttttttgagaggaaatgaaagaatattcctaagttattgggtgccttttcttcaggaatccctgaaagtgggggtttgcaattttccctggattgaaaacagaaatgcttcctacacaaacatgattgagaccttgtactctaggtgtaaaaaaacagagtaggtcatactctgtgggttatggtcagagagatctggttagaagttcccaggtaggcgacagccctagatgtgtgacacttctaggagaatctctggctatgtggatacgtccaggtgtgtaaggcagcctcagggactgccaccacttggtcacatacatgtccctccaactaatcctagctctcaaggacaggtggttctgggccctgtgttgcccatgagacttggtccacggcaagcctgtgacggagtgaaagtgaggggacacccaatttgaaaactcggcaggaagccagactccatgacatacaaatagatcaaagtgaatcggctccgttgtttggggaaatacctgaggtttgttgtttcgtgccaagaagattaacaacacggacacacgtgggtgggttaaggagcagaaagtttaacaggcagaaaaaagagaacagctcccccatgcagagggaggaggactccgaatggatctccccattcctggcgggaagcagactgatatatagaggagggggtttgaagaggtggtatttgatttacatagagcccaagggattggtttgaccaggtgtgccatttacatagccctcgaagaaactggccattccaccttgatcttttattatgcagatagggttttttacttggccagagccttgacacctgcacacatggcaacaaacagaagggaggcgaaatcttccatattggatgcacctgtcttccaggtgcagctgccggcatttatctgtgcaagcttctagcttgcttatttatgcttgcagcttgacttttcaggctgctttctgttggaaaagaaatggttttgggggctgctttttattaaaagaaaagccttaccaaggactcctgtaccctatctgcctaaattttttttaactactatattaaaaggtctgtaagtgggagctggccctaaaagtaggttgtagagattatttggatgtgccaacaagcttcatctgcagcttggactgtctccattggaaggcctctggcagattttgtaaaaagttatataacaattttactataggaaaaacttggctacagatatgaatttatattacccatcattggctggttccttatcctgaacattggtttccttggaatctgattttggcttgtttggcctttaaaaaccccagaagaatggggtttctgccagattattttctggttttcagtctcactgaatgtcacaaaggccttggtttatggttcccaactggtaaagaaacgtcaaactttgcctctcttagttccttctacatgacaatgggtggcagttgctcatatggaagcatttcttttccccctaaagcctatgagacaggctgcaacttaaacccctattttattaaaggagaggaaatgtccaagagcccagagatagtgggtaaaagcatcataaggactagaaatggggtcttcttgttgctaattagtaggggtgaggggtaagtggcagatgtgactgccgtccatgcccagacagggaattgtccttgaacctactcatgcggtgtcttctggggtacagtgagtccacagggcaggacggccttggagtcaagagcccagactcacattctatctcaggcttcataactcaattgctccatgaccttaagccaatttagttccctcatctgtaaaaatggggataacaactgaatttacctcatgggattgtgtaatgcccaaccttgtttttactaaccctgtttttagactctccctcttcctttaatcacctagccttgtttccacctgaattgactctcccttagctaagacagccagacagactccatcttggctctttcactggcaccccttcctcaaggacttaacttgtgcaagctgactcccagcacatccaagaatgcaattaactgataagatactgtggcaagctatatccgcaattcccaggaattcgtctgattgataacgcccaaagccccgggtctatcaccttgtaatagtcttaaagcccctgcacctggaactgtttactttcctgtaaccatttatccttttaactttttgcctactttatttctgtaaaattgttttaactagacccccccctcccctttctaaaccaaagtataaaagaaaatctagccctttcctcagggctgagaaaattttgagtgttagccgtctctcggtcgctggctaataaaggactcttaattcgtctt

SEQ ID NO: 149253 - DNA, 2773 bp, Homo sapiens
  Payload ID: 9463
  Gene Symbol: LIMD1
  Gene Name: LIM domains containing 1
  ENST ID: ENST00000440097
  CDS Start-End: 557-2419
gcagcggaggacccagcgcctggaacgtacctgcgcctcagccgccgcgcgtttgctccggcccgactcgcggcctcggcgccctcccggccgattcagcttcacccggcccagtcggctgctgccttgctgtgagtttccgtgtttggttgcctaaggaggatgtgattttacttttttgctgttttctttttccttttataatttgaagaggagaaaagaactccgctgagcaggcccgggacggcgaagtgccaccagctaccccaacaaggacgtctccaggggaaagggagttggaagcaaacttggtccagctggcgttgaggtctcaacttcggctggactcttaaatcctggggtcatgcccttcacgctaggcaggtggaagtctttacttgtactgggccggacttgagccccgacccttcgccagcatctccccgctgccctcaacacacacacacacacacacacacacacacacacacacacacacacacacacacacacacacacacggcacctgggctaggcccggacacctgtctgcagcatggataagtatgacgacctgggcctggaggccagtaaattcatcgaggacctgaacatgtatgaggcctctaaggatgggctcttccgagtggacaagggtgcaggcaacaaccccgagtttgaggaaactcgcagggtgttcgccaccaagatggccaaaatccacctccagcagcagcagcagcagctcctgcaggaggagactctgcccagggggagtagaggccctgtcaatggagggggccgcctgggcccacaggcccgttgggaagttgtgggcagcaagctgactgtggatggtgctgccaagcctcctcttgctgcctcgacaggggcacctggggcagtcaccaccctcgctgctgggcagcccccgtacccaccgcaggagcagagatccaggccatacctgcatggcacgaggcatggcagccaggactgtggttccagggagagcctggcgacttctgagatgtctgctttccaccagccaggcccctgtgaggatccttcctgcctcactcatggagactattatgacaacctctccttggcaagcccaaagtggggtgacaaaccaggagtgtcccccagcatcggcctgagtgtagggagtgggtggcctagctccccggggagtgacccaccactgcccaaaccctgcggggaccatcccctaaatcaccgacagctctccctgagctccagcaggtcttctgagggtagcctcggtggtcagaatagtggcattggtggccgcagcagcgagaagccaacaggcctttggtccactgcctcctcccagcgggtgagccctggcctgccttccccaaacttggagaacggagcaccagctgtggggcctgttcagcccaggaccccttctgtgtcagcacccttggccctgagctgccccaggcaaggaggtcttccaagatcaaactcggggctggggggtgaggtttcaggtgtgatgtccaaacccaatgtggacccccaaccctggttccaggatgggcccaaatcttacctttccagttctgccccgtcatcctcgccagctggtctggacggttcacagcagggtgcggtccctgggctggggccgaagcctggctgcacagaccttggcactggtcccaagctcagccccaccagtcttgtccatccagtgatgtccaccctgcctgagttatcttgtaaagagggtcccctgggctggtcttctgatggtagcctgggatctgtgctcctggacagccccagctcccctagggtaaggctgccctgccagcccctcgtcccaggtcctgagctgagaccctctgctgctgagttgaaattagaagccctcacccaacgtctggagcgagagatggatgctcacccgaaggctgattactttggagcctgtgtgaaatgcagcaaaggggtgtttggggctggccaggcctgtcaggccatggggaacctctaccatgacacatgcttcacctgtgcagcttgcagccggaagctgagaggaaaagccttttattttgtcaacggcaaagtgttttgtgaagaagacttcctgtactctggtttccagcagtcggctgacaggtgttttctttgtggacatctgatcatggacatgatcctgcaagccctggggaagtcctaccaccccggctgtttccgctgtgtcatctgtaatgagtgtttggatggggtgcccttcaccgtggactcagagaacaagatctactgtgtccgagattaccacaaggtgctggcccccaagtgtgcagcctgtgggcttcccatccttccacctgaggtaagatgcccttccagacatgctcccaggggcttctaagacatgaatatctccctgggctcatttacaagatccatgtcctgtccttacagcttttaaggtatccttttaaaaatctcaactctggcctggtgcagtggctcacgcctgtaatcccaccccttttaggaggcccaggcaggaaaattgcttgaggcctggagtttaagaacagcctgggcaacatagcaagacctcatctctacaaaaaattgttaaaaattggccaagtgtggtggcatgtgcctgtagtcctagctgcttgagcccaagagtttgaggctgcagcgagctatgatggtgctactgcattccagcaggtgacagcaagaccttgtctccaaaaaaaaaaaa

SEQ ID NO: 149254 - DNA, 3425 bp, Homo sapiens
  Payload ID: 9464
  Gene Symbol: LHX1
  Gene Name: LIM homeobox 1
  Uniprot ID: P48742
  ENST ID: ENST00000614239
  CDS Start-End: 724-1944
ccaagatcttcctcctaccctcccctctttcccttctcccgcggtcggccctcgccccctcccccaggcccagcgcgggcgctcggcgcgtccagacccgcggcgcgatgccggcagtttaggatccaaagcttctctgctccttttgttctttccttcccttttttaaaaaaagaggggggaaatcccagtggtgggcagcctggcacgcacacagtcgccctcataccccgacaaaagcagatgcactttgacttctgacagctctacctcaagccccggagaactcagcggcgctttcctcgcaacccgagctcggcgagtcgtcgtcttcttcttctccgtttttatttatttatttccgttcccgccgccgttctcgctgaccttcactcctccgcgggctctgagcagaagggtcgcattctctcccgcctgagacttcttttcctcgccccgggagctcaggcggcgccgctccagcccggggccccgggactccccggctgcacacttcactgagacgcccccccaggccccgatcagcctcgtttcctccaccctactttgatttcctggtgcgagttttggcttgcacggccgagtgtgtgtcctctttttggagagactggggagctcgtgccgattgtcttcaggagtcatcccctgggctctactttgcccctctctctctctgggcctcatcagaccaaaccaaagaccatggttcactgtgccggctgcaaaaggcccatcctggaccgctttctcttgaacgtgctggacagggcctggcacgtcaagtgcgtccagtgctgtgaatgtaaatgcaacctgaccgagaagtgcttctccagggaaggcaaactctactgcaagaacgacttcttccggtgtttcggtaccaaatgcgcaggctgcgctcagggcatctcccctagcgacctggtgcggagagcgcggagcaaagtgtttcacctgaactgcttcacctgcatgatgtgtaacaagcagctctccactggcgaggaactctacatcatcgacgagaataagttcgtctgcaaagaggattacctaagtaacagcagtgttgccaaagagaacagccttcactcggccaccacgggcagtgaccccagtttgtctccggattcccaagacccgtcgcaggacgacgccaaggactcggagagcgccaacgtgtcggacaaggaagcgggtagcaacgagaatgacgaccagaacctgggcgccaagcggcggggaccgcgcaccaccatcaaagccaagcagctggagacgctgaaggccgccttcgctgctacacccaagcccacccgccacatccgcgagcagctggcgcaggagaccggcctcaacatgcgcgtcattcaggtctggttccagaaccggcgctccaaggagcggaggatgaagcagctgagcgccctgggcgcccggcgccacgccttcttccgcagtccgcgccggatgcggccgctggtggaccgcctggagccgggcgagctcatccccaatggtcccttctccttctacggagattaccagagcgagtactacgggcccgggggcaactacgacttcttcccgcaaggccccccgtcctcgcaggcccagacaccagtggacctacccttcgtgccgtcatctgggccgtccgggacgcccctgggtggcctggagcacccgctgccgggccaccacccgtcgagcgaggcgcagcggtttaccgacatcctggcgcacccacccggggactcgcccagccccgagcccagcctgcccgggcctctgcactccatgtcggccgaggtcttcggacccagcccgcccttctcgtcgctgtcggtcaacggtggggcgagctacggaaaccacctgtcccacccccccgaaatgaacgaggcggccgtgtggtagcggggtctcgcacggtctgcggagttcgtggttgtacagaaatgaacctttatttaagaaaaatagaaaaaaaaaaacataaaaagcaagtccccacccccttcctccagcctcgagaaccattctccttctggggagaccggatggaaaagggggacacgaaataggatccaaatcggcctcgaggtgggactgggatccgcgcactggctgtcgacgtgcagaactggggctccccaaaggaaacgcagacctctccccaactcccacctggacccggatccgtagacagaccccgcgggcgtgtgcgcctggcaggcgggcggcgaaaagacgtccagggcagccgcgggtgcgcacagccgttggcgatgccaggagccgtggggagggaggccgtgagcacagccgggtgaaggaagtgaagcggcccagggcgctcccgggccagccaggagggttctagctctgggatatcccttattagtgttgtctcagagttcaacaacagcgacaaaaaactcttatagcttcagaaacgccgacctgccgtgcatcaggtgggactatatatatattttttgtctatctggatttttggtttttgtttttgccaaaattgcaaaattctaaatgtaaagccctccgtatcaactcttctaccttcgcaaaactacacatacacacatacacacgtacacggacacactcggtaagatggtctccagccagaccgctcagtaaaatgacttgaacatcagctgtacaagaaaagtattctaccttcacacacaaaaagttaaaaaaaaaaaaaaagactattgaactaaaaacagtcaactgtttacgtataatgttaaattcaggagttcagtgttttactaatatatcctgttttgaaacctcttgttcgaaaacaaaatgttttgagcaatcaaccaaaattgttccttttcttttcctgtagatgttctgacagatttgcagggctttcggctcactgtgctagtatgtaaaaaggtgttgtttacacgaggcaaagagaaaacatgctattcagacagttgccaaatagaataattatagcacaaatactgtaaaggtgcctggcaccagcaacctgagaaagtgttaaaaaaaaaaaaaaaaaagtgttacaagatttaaaaaaaaacatctttgctaatttttttgtcctgttgaacattcatggaattgttaatatgacttatatagacccacacaggttttatttttgtgtctttaaaataaaagtccaaaatatttaaattttatggtcaaatatgcagtcaacagctgctactttttctttatatattaaatttctcatatgtcttttattgttctaataaacctaagcttgtgtgacctccagtgcatattagaccattcactgtatgaaagaaaacatgttgaataaatttgtgagtttttaataaaaatagaaaatctgatgttta

SEQ ID NO: 149255 - DNA, 512 bp, Homo sapiens
  Payload ID: 9464
  Gene Symbol: LHX1
  Gene Name: LIM homeobox 1
  ENST ID: ENST00000621767
  CDS Start-End: 1-424
gcggccgctggtggaccgcctggagccgggcgagctcatccccaatggtcccttctccttctacggagcctcgagaaccattctccttctggggagaccggatggaaaagggggacacgaaataggatccaaatcggcctcgaggtgggactgggatccgcgcactggctgtcgacgtgcagaactggggctccccaaaggaaacgcagacctctccccaactcccacctggacccggatccgtagacagaccccgcgggcgtgtgcgcctggcaggcgggcggcgaaaagacgtccagggcagccgcgggtgcgcacagccgttggcgatgccaggagccgtggggagggaggccgtgagcacagccgggtgaaggaagtgaagcggcccagggcgctcccgggccagccaggagggttctagctctgggatatcccttattagtgttgtctcagagttcaacaacagcgacaaaaaactcttatagcttcagaaacgccgacctgccgtg

SEQ ID NO: 149256 - DNA, 3428 bp, Homo sapiens
  Payload ID: 9464
  Gene Symbol: LHX1
  Gene Name: LIM homeobox 1
  Uniprot ID: P48742
  ENST ID: ENST00000620305
  CDS Start-End: 724-1944
ccaagatcttcctcctaccctcccctctttcccttctcccgcggtcggccctcgccccctcccccaggcccagcgcgggcgctcggcgcgtccagacccgcggcgcgatgccggcagtttaggatccaaagcttctctgctccttttgttctttccttcccttttttaaaaaaagaggggggaaatcccagtggtgggcagcctggcacgcacacagtcgccctcataccccgacaaaagcagatgcactttgacttctgacagctctacctcaagccccggagaactcagcggcgctttcctcgcaacccgagctcggcgagtcgtcgtcttcttcttctccgtttttatttatttatttccgttcccgccgccgttctcgctgaccttcactcctccgcgggctctgagcagaagggtcgcattctctcccgcctgagacttcttttcctcgccccgggagctcaggcggcgccgctccagcccggggccccgggactccccggctgcacacttcactgagacgcccccccaggccccgatcagcctcgtttcctccaccctactttgatttcctggtgcgagttttggcttgcacggccgagtgtgtgtcctctttttggagagactggggagctcgtgccgattgtcttcaggagtcatcccctgggctctactttgcccctctctctctctgggcctcatcagaccaaaccaaagaccatggttcactgtgccggctgcaaaaggcccatcctggaccgctttctcttgaacgtgctggacagggcctggcacgtcaagtgcgtccagtgctgtgaatgtaaatgcaacctgaccgagaagtgcttctccagggaaggcaaactctactgcaagaacgacttcttccggtgtttcggtaccaaatgcgcaggctgcgctcagggcatctcccctagcgacctggtgcggagagcgcggagcaaagtgtttcacctgaactgcttcacctgcatgatgtgtaacaagcagctctccactggcgaggaactctacatcatcgacgagaataagttcgtctgcaaagaggattacctaagtaacagcagtgttgccaaagagaacagccttcactcggccaccacgggcagtgaccccagtttgtctccggattcccaagacccgtcgcaggacgacgccaaggactcggagagcgccaacgtgtcggacaaggaagcgggtagcaacgagaatgacgaccagaacctgggcgccaagcggcggggaccgcgcaccaccatcaaagccaagcagctggagacgctgaaggccgccttcgctgctacacccaagcccacccgccacatccgcgagcagctggcgcaggagaccggcctcaacatgcgcgtcattcaggtctggttccagaaccggcgctccaaggagcggaggatgaagcagctgagcgccctgggcgcccggcgccacgccttcttccgcagtccgcgccggatgcggccgctggtggaccgcctggagccgggcgagctcatccccaatggtcccttctccttctacggagattaccagagcgagtactacgggcccgggggcaactacgacttcttcccgcaaggccccccgtcctcgcaggcccagacaccagtggacctacccttcgtgccgtcatctgggccgtccgggacgcccctgggtggcctggagcacccgctgccgggccaccacccgtcgagcgaggcgcagcggtttaccgacatcctggcgcacccacccggggactcgcccagccccgagcccagcctgcccgggcctctgcactccatgtcggccgaggtcttcggacccagcccgcccttctcgtcgctgtcggtcaacggtggggcgagctacggaaaccacctgtcccacccccccgaaatgaacgaggcggccgtgtggtagcggggtctcgcacggtctgcggagttcgtggttgtacagaaatgaacctttatttaagaaaaatagaaaaaaaaaaaaacataaaaagcaagtccccacccccttcctccagcctcgagaaccattctccttctggggagaccggatggaaaagggggacacgaaataggatccaaatcggcctcgaggtgggactgggatccgcgcactggctgtcgacgtgcagaactggggctccccaaaggaaacgcagacctctccccaactcccacctggacccggatccgtagacagaccccgcgggcgtgtgcgcctggcaggcgggcggcgaaaagacgtccagggcagccgcgggtgcgcacagccgttggcgatgccaggagccgtggggagggaggccgtgagcacagccgggtgaaggaagtgaagcggcccagggcgctcccgggccagccaggagggttctagctctgggatatcccttattagtgttgtctcagagttcaacaacagcgacaaaaaactcttatagcttcagaaacgccgacctgccgtgcatcaggtgggactatatatatattttttgtctatctggatttttggtttttgtttttgccaaaattgcaaaattctaaatgtaaagccctccgtatcaactcttctaccttcgcaaaactacacatacacacatacacacgtacacggacacactcggtaagatggtctccagccagaccgctcagtaaaatgacttgaacatcagctgtacaagaaaagtattctaccttcacacacaaaaagttaaaaaaaaaaaaaaaagactattgaactaaaaacagtcaactgtttacgtataatgttaaattcaggagttcagtgttttactaatatatcctgttttgaaacctcttgttcgaaaacaaaatgttttgagcaatcaaccaaaattgttccttttcttttcctgtagatgttctgacagatttgcagggctttcggctcactgtgctagtatgtaaaaaggtgttgtttacacgaggcaaagagaaaacatgctattcagacagttgccaaatagaataattatagcacaaatactgtaaaggtgcctggcaccagcaacctgagaaagtgttaaaaaaaaaaaaaaaaaagtgttacaagatttaaaaaaaaacatctttgctaatttttttgtcctgttgaacattcatggaattgttaatatgacttatatagacccacacaggttttatttttgtgtctttaaaataaaagtccaaaatatttaaattttatggtcaaatatgcagtcaacagctgctactttttctttatatattaaatttctcatatgtcttttattgttctaataaacctaagcttgtgtgacctccagtgcatattagaccattcactgtatgaaagaaaacatgttgaataaatttgtgagtttttaataaaaatagaaaatctgatgttta

SEQ ID NO: 149257 - DNA, 512 bp, Homo sapiens; identical to SEQ ID NO: 149255
  Payload ID: 9464
  Gene Symbol: LHX1
  Gene Name: LIM homeobox 1
  ENST ID: ENST00000633397
  CDS Start-End: 1-424

SEQ ID NO: 149258 - DNA, 2554 bp, Homo sapiens
  Payload ID: 9465
  Gene Symbol: LHX2
  Gene Name: LIM homeobox 2
  Uniprot ID: P50458
  ENST ID: ENST00000373615
  CDS Start-End: 740-1960
gactgcagagccggggctgggctaggcgcgcgcttggagagcattgcgcgcggctgggcccgcggccggcggctcctcctcccactctgctcctcctcttttttctcctcctccacctcctcctccgcctcctcctcctcctcttcctcctcctcttcaattctcccggtggctcgactcggctcgcaggcttcggagaaacccctactccagtcgccgactcagcgcccaagagggtcgccttgggctgggggcgcaccccagggaggggaggggtccaggcagctgggccgccgcggacacctagcggcttcagggtgaaccccgaccgcagccgtcgccgcctcgggcagagtttgcgcccttgctttgcgccccgggcgctgaagccgggcgggcgatgcccgcggcgtgaaagcgcccgcggcgggcgccgacctctgtcctagtctcctgctccccccgccccgcttgtcccgtgcccttgtgaccctggctttggcgccgtcgcccaggcgccccgcaatgtagctgcccctgcgcctcggcgggaggcgtcctgccccgcgagcgcccggggcccggagcccggcctgggggctcagccgagctcgggcggggccggggccgcggtggcgatgcaccgggcccgttagcgccaggagcgccaggcagctgaggcggggggcaagccctccctcggaggagccgcgcccccggccccgccggtcccgccgcgatgctgttccacagtctgtcgggccccgaggtgcacggggtcatcgacgagatggaccgcagggccaagagcgaggctcccgccatcagctccgccatcgaccgcggcgacaccgagacgaccatgccgtccatcagcagtgaccgcgccgcgctgtgcgccggctgcgggggcaagatctcggaccgctactacctgctggcggtggacaagcagtggcacatgcgctgcctcaagtgctgcgagtgcaagctcaacctggagtcggagctcacctgtttcagcaaggacggtagcatctactgcaaggaagactactacaggcgcttctctgtgcagcgctgcgcccgctgccacctgggcatctcggcctcggagatggtgatgcgcgctcgggacttggtttatcacctcaactgcttcacgtgcaccacgtgtaacaagatgctgaccacgggcgaccacttcggcatgaaggacagcctggtctactgccgcttgcacttcgaggcgctgctgcagggcgagtaccccgcacacttcaaccatgccgacgtggcagcggcggccgctgcagccgcggcggccaagagcgcggggctgggcgcagcaggggccaaccctctgggtcttccctactacaatggcgtgggcactgtgcagaaggggcggccgaggaaacgtaagagcccgggccccggtgcggatctggcggcctacaacgctgcgctaagctgcaacgaaaacgacgcagagcacctggaccgtgaccagccatacccgagcagccagaagaccaagcgcatgcgcacgtccttcaagcaccaccagcttcggaccatgaagtcttactttgccattaaccacaaccccgacgccaaggacttgaagcagctcgcgcaaaagacgggcctcaccaagcgggtcctccaggtctggttccagaacgcccgagccaagttcaggcgcaacctcttacggcaggaaaacacgggcgtggacaagtcgacagacgcggcgctgcagacagggacgccatcgggcccggcctcggagctctccaacgcctcgctcagcccctccagcacgcccaccaccctgacagacttgactagccccaccctgccaactgtgacgtccgtcttaacttctgtgcctggcaacctggagggccatgagcctcacagcccctcacaaacgactcttaccaaccttttctaatgactcgcaacccctcaccccacaatttctttaaaaaagaaattatctttagttgaattccaagtgtattttaaaatagaggctttgagcaactaactaaccacattttaggatctcgcctggaaacagaggtaaaaaaaagaagtgtgcgcccggctaatgcagcggtgtggaccgaggaacaacttggaagatctacctgcaacacaacatttgtgtcactgtacagttttgtggactgagcgaggaaaaacaacaaataatttaagttggctagagcttctgtattttcaaagactgccacgtgccttaggaatactgttttatctccatactttggatgacttgttcatttttctctccctctttttctctgtatatttatgaccagagcaaaaatgtaaaaaacaaaaaaaacaacaaaaaaagtttgttactttgaatagtcctaaaaagaaaaaaagaaaaaaaaaaaaggaaaaatcaaaccccctccaacggtcgctttgttgttttagaattttaaggtggaagtctgttcgaatatcagaatttgtaaaatctaaccagtaataaaaccacttattgaaacta

SEQ ID NO: 149259 - DNA, 1414 bp, Homo sapiens
  Payload ID: 9465
  Gene Symbol: LHX2
  Gene Name: LIM homeobox 2
  ENST ID: ENST00000446480
  CDS Start-End: 1-1237
ccacagtctgtcgggccccgaggtgcacggggtcatcgacgagatggaccgcagggccaagagcgaggctcccgccatcagctccgccatcgaccgcggcgacaccgagacgaccatgccgtccatcagcagtgaccgcgccgcgctgtgcgccggctgcgggggcaagatctcggaccgctactacctgctggcggtggacaagcagtggcacatgcgctgcctcaagtgctgcgagtgcaagctcaacctggagtcggagctcacctgtttcagcaaggacggtagcatctactgcaaggaagactactacagcccctccctccatggtccctacaggcgcttctctgtgcagcgctgcgcccgctgccacctgggcatctcggcctcggagatggtgatgcgcgctcgggacttggtttatcacctcaactgcttcacgtgcaccacgtgtaacaagatgctgaccacgggcgaccacttcggcatgaaggacagcctggtctactgccgcttgcacttcgaggcgctgctgcagggcgagtaccccgcacacttcaaccatgccgacgtggcagcggcggccgctgcagccgcggcggccaagagcgcggggctgggcgcagcaggggccaaccctctgggtcttccctactacaatggcgtgggcactgtgcagaaggggcggccgaggaaacgtaagagcccgggccccggtgcggatctggcggcctacaacgctgcgctaagctgcaacgaaaacgacgcagagcacctggaccgtgaccagccatacccgagcagccagaagaccaagcgcatgcgcacgtccttcaagcaccaccagcttcggaccatgaagtcttactttgccattaaccacaaccccgacgccaaggacttgaagcagctcgcgcaaaagacgggcctcaccaagcgggtcctccaggtctggttccagaacgcccgagccaagttcaggcgcaacctcttacggcaggaaaacacgggcgtggacaagtcgacagacgcggcgctgcagacagggacgccatcgggcccggcctcggagctctccaacgcctcgctcagcccctccagcacgcccaccaccctgacagacttgactagccccaccctgccaactgtgacgtccgtcttaacttctgtgcctggcaacctggagggccatgagcctcacagcccctcacaaacgactcttaccaaccttttctaatgactcgcaacccctcaccccacaatttctttaaaaaagaaattatctttagttgaattccaagtgtattttaaaatagaggctttgagcaactaactaaccacattttaggatctcgcctggaaacagaggtaaaaaaaagaagtgtgcgcccggctaatgcagcggtgtggaccg

SEQ ID NO: 149260 - DNA, 471 bp, Homo sapiens
  Payload ID: 9465
  Gene Symbol: LHX2
  Gene Name: LIM homeobox 2
  ENST ID: ENST00000560961
  CDS Start-End: 32-471
gggactcccgagatgggaggttctgcagaccatgccgtccatcagcagtgaccgcgccgcgctgtgcgccggctgcgggggcaagatctcggaccgctactacctgctggcggtggacaagcagtggcacatgcgctgcctcaagtgctgcgagtgcaagctcaacctggagtcggagctcacctgtttcagcaaggacggtagcatctactgcaaggaagactactacaggcgcttctctgtgcagcgctgcgcccgctgccacctgggcatctcggcctcggagatggtgatgcgcgctcgggacttggtttatcacctcaactgcttcacgtgcaccacgtgtaacaagatgctgaccacgggcgaccacttcggcatgaaggacagcctggtctactgccgcttgcacttcgaggcgctgctgcagggcgagtaccccgcacacttcaaccatgccgacgtggcagc

SEQ ID NO: 149261 - DNA, 1266 bp, Homo sapiens
  Payload ID: 9465
  Gene Symbol: LHX2
  Gene Name: LIM homeobox 2
  ENST ID: ENST00000488674
  CDS Start-End: 1-347
ggctgggcgcagcaggggccaaccctctgggtcttccctactacaatggcgtgggcactgtgcagaaggggcggccgaggaaacgtaagagcccgggccccggtgcggatctggcggcctacaacgctgcgctaagctgcaacgaaaacgacgcagagcacctggaccgtgaccagccatacccgagcagccagaagaccaagcgcatgcgcacgtccttcaagcaccaccagcttcggaccatgaagtcttactttgccattaaccacaaccccgacgccaaggacttgaagcagctcgcgcaaaagacgggcctcaccaagcgggtcctccaggcatctctctagatttatcttctgcctcccagactctcctggaagcaaggtctggttccagaacgcccgagccaagttcaggcgcaacctcttacggcaggaaaacacgggcgtggacaagtcgacagacgcggcgctgcagacagggacgccatcgggcccggcctcggagctctccaacgcctcgctcagcccctccagcacgcccaccaccctgacagacttgactagccccaccctgccaactgtgacgtccgtcttaacttctgtgcctggcaacctggagggccatgagcctcacagcccctcacaaacgactcttaccaaccttttctaatgactcgcaacccctcaccccacaatttctttaaaaaagaaattatctttagttgaattccaagtgtattttaaaatagaggctttgagcaactaactaaccacattttaggatctcgcctggaaacagaggtaaaaaaaagaagtgtgcgcccggctaatgcagcggtgtggaccgaggaacaacttggaagatctacctgcaacacaacatttgtgtcactgtacagttttgtggactgagcgaggaaaaacaacaaataatttaagttggctagagcttctgtattttcaaagactgccacgtgccttaggaatactgttttatctccatactttggatgacttgttcatttttctctccctctttttctctgtatatttatgaccagagcaaaaatgtaaaaaacaaaaaaaacaacaaaaaaagtttgttactttgaatagtcctaaaaagaaaaaaagaaaaaaaaaaaaggaaaaatcaaaccccctccaacggtcgctttgttgttttagaattttaaggtggaagtctgttcgaatatcagaatttgtaaaatctaaccagtaataaaaccacttattgaaacta

SEQ ID NO: 149262 - DNA, 2403 bp, Homo sapiens
  Payload ID: 9466
  Gene Symbol: LHX3
  Gene Name: LIM homeobox 3
  Uniprot ID: Q9UBR4
  ENST ID: ENST00000371746
  CDS Start-End: 120-1328
cgcagcgcccagcagcacccggagtcgcttggacgccggttcggggctattgcggggtggcgtcgctgggcccgggaaagttcgggactggagagtggcgacgccgggcggcgggacccatggaggcgcgcggggagctgggcccggcccgggagtcggcgggaggcgacctgctgctagcactgctggcgcggagggcggacctgcgccgagagatcccgctgtgcgctggctgtgaccagcacatcctggaccgcttcatcctcaaggctctggaccgccactggcacagcaagtgtctcaagtgcagcgactgccacacgccactggccgagcgctgcttcagccgaggggagagcgtttactgcaaggacgactttttcaagcgcttcgggaccaagtgcgccgcgtgccagctgggcatcccgcccacgcaggtggtgcgccgcgcccaggacttcgtgtaccacctgcactgctttgcctgcgtcgtgtgcaagcggcagctggccacgggcgacgagttctacctcatggaggacagccggctcgtgtgcaaggcggactacgaaaccgccaagcagcgagaggccgaggccacggccaagcggccgcgcacgaccatcaccgccaagcagctggagacgctgaagagcgcttacaacacctcgcccaagccggcgcgccacgtgcgcgagcagctctcgtccgagacgggcctggacatgcgcgtggtgcaggtttggttccagaaccgccgggccaaggagaagaggctgaagaaggacgccggccggcagcgctgggggcagtatttccgcaacatgaagcgctcccgcggcggctccaagtcggacaaggacagcgttcaggaggggcaggacagcgacgctgaggtctccttccccgatgagccttccttggcggaaatgggcccggccaatggcctctacgggagcttgggggaacccacccaggccttgggccggccctcgggagccctgggcaacttctccctggagcatggaggcctggcaggcccagagcagtaccgagagctgcgtcccggcagcccctacggtgtccccccatcccccgccgccccgcagagcctccctggcccccagcccctcctctccagcctggtgtacccagacaccagcttgggccttgtgccctcgggagcccccggcgggcccccacccatgagggtgctggcagggaacggacccagttctgacctatccacggggagcagcgggggttaccccgacttccctgccagccccgcctcctggctggatgaggtagaccacgctcagttctgacccaggcccggctccaccctgcacctcacacgagggagctgcccctgggtgggcggctcggggctgctggggtttccgaggaagtggggccagggcgtcaagggagggctggtgccttcggagcctcccactgccgaccgcacagctccctctctgggggctgagggacccacctggcccctcctctgacacagggctggcccgccaggtggcctcccagcaagccagccttttttgtaagcaaatttctcccctttattgaccaattaactgagcacttgctgctatttctagacatgaaatgtcaccttgctgaggcccagcccagcccagcatagcccgagggctggaaaaacgctttcatctctaaaactgagaaatcatcataattgtgctttcacttcccaggctccatgtgtcttggagccgtcaccccgaggctccctctttaggtcggagattggccttgcctgtcgaggcaagaggctgcagaggcggggacacacctgtgtcctccgggagaggccccctcctctccccagaccacagggggcctctctgcctccagccccaccttccccgggagaagctttccccaatccccaggtctctagatcattctgttctcgagtatcctgtggaggaggcaaaaatgcctggcgccccttctctccaagctcaattctctaagcccctcagggtctcctcctcaccccaccccaggcccttggtgtccaggctgcacccacagatgtctgttgccaaacagcctgccctccctgccggagccggctctgccagccccagattgggaagtctccccgctggagaagggtggggctcctctgagcctgccctgcctcctccatcagatcctttgggaagaagtttctgggagatgcccgcagctgtgcgtgccccagacacaaaggctggcctgtgtgtaagtcaaagtcactcccgcaaacctgaatctcgagctacctattggttctgtgaatgttctgtgtcttttatttattctcgggtgatcagctctttccaagacttcaataaatttgtcagttacagtcaa

SEQ ID NO: 149263 - DNA, 2365 bp, Homo sapiens
  Payload ID: 9466
  Gene Symbol: LHX3
  Gene Name: LIM homeobox 3
  Uniprot ID: Q9UBR4
  ENST ID: ENST00000371748
  CDS Start-End: 98-1291
gccccgcacgacgcggcgggacttgggagccccgaaccctccaggggacgctgacctaggaggagcgcgtctcgcgccactcggcctggtggccgcgatgctgctggaaacggggctcgagcgcgaccgagcgaggcccggggccgccgccgtctgcaccttgggcgggactcgggagatcccgctgtgcgctggctgtgaccagcacatcctggaccgcttcatcctcaaggctctggaccgccactggcacagcaagtgtctcaagtgcagcgactgccacacgccactggccgagcgctgcttcagccgaggggagagcgtttactgcaaggacgactttttcaagcgcttcgggaccaagtgcgccgcgtgccagctgggcatcccgcccacgcaggtggtgcgccgcgcccaggacttcgtgtaccacctgcactgctttgcctgcgtcgtgtgcaagcggcagctggccacgggcgacgagttctacctcatggaggacagccggctcgtgtgcaaggcggactacgaaaccgccaagcagcgagaggccgaggccacggccaagcggccgcgcacgaccatcaccgccaagcagctggagacgctgaagagcgcttacaacacctcgcccaagccggcgcgccacgtgcgcgagcagctctcgtccgagacgggcctggacatgcgcgtggtgcaggtttggttccagaaccgccgggccaaggagaagaggctgaagaaggacgccggccggcagcgctgggggcagtatttccgcaacatgaagcgctcccgcggcggctccaagtcggacaaggacagcgttcaggaggggcaggacagcgacgctgaggtctccttccccgatgagccttccttggcggaaatgggcccggccaatggcctctacgggagcttgggggaacccacccaggccttgggccggccctcgggagccctgggcaacttctccctggagcatggaggcctggcaggcccagagcagtaccgagagctgcgtcccggcagcccctacggtgtccccccatcccccgccgccccgcagagcctccctggcccccagcccctcctctccagcctggtgtacccagacaccagcttgggccttgtgccctcgggagcccccggcgggcccccacccatgagggtgctggcagggaacggacccagttctgacctatccacggggagcagcgggggttaccccgacttccctgccagccccgcctcctggctggatgaggtagaccacgctcagttctgacccaggcccggctccaccctgcacctcacacgagggagctgcccctgggtgggcggctcggggctgctggggtttccgaggaagtggggccagggcgtcaagggagggctggtgccttcggagcctcccactgccgaccgcacagctccctctctgggggctgagggacccacctggcccctcctctgacacagggctggcccgccaggtggcctcccagcaagccagccttttttgtaagcaaatttctcccctttattgaccaattaactgagcacttgctgctatttctagacatgaaatgtcaccttgctgaggcccagcccagcccagcatagcccgagggctggaaaaacgctttcatctctaaaactgagaaatcatcataattgtgctttcacttcccaggctccatgtgtcttggagccgtcaccccgaggctccctctttaggtcggagattggccttgcctgtcgaggcaagaggctgcagaggcggggacacacctgtgtcctccgggagaggccccctcctctccccagaccacagggggcctctctgcctccagccccaccttccccgggagaagctttccccaatccccaggtctctagatcattctgttctcgagtatcctgtggaggaggcaaaaatgcctggcgccccttctctccaagctcaattctctaagcccctcagggtctcctcctcaccccaccccaggcccttggtgtccaggctgcacccacagatgtctgttgccaaacagcctgccctccctgccggagccggctctgccagccccagattgggaagtctccccgctggagaagggtggggctcctctgagcctgccctgcctcctccatcagatcctttgggaagaagtttctgggagatgcccgcagctgtgcgtgccccagacacaaaggctggcctgtgtgtaagtcaaagtcactcccgcaaacctgaatctcgagctacctattggttctgtgaatgttctgtgtcttttatttattctcgggtgatcagctctttccaagacttcaataaatttgtcagttacagtca

SEQ ID NO: 149264 - DNA, 2698 bp, Homo sapiens
  Payload ID: 9466
  Gene Symbol: LHX3
  Gene Name: LIM homeobox 3
  ENST ID: ENST00000619587
  CDS Start-End: 465-1625
actgggagatgggctggagccggcggggtccacagccagggaggcgggtgcaatatgtcagtaaatcccggtcccttcagcgggcactcctctcttccagagactttttctaagtgaagagggagtcctcagcccttgacacctggaaaacccgctcacagactcgaggctcccacagggcacccttggacctccccagtgtggttcctccagggggcctgcagtaccgaagtggggtgtggggggcagaagcagcgggaagccagacgtttgagtaactctgacggtgttgggggcacccacgcctgacacaaaggcagtggatcggcttgtccagtccactcataagtaattttgcggctgcccaatgatggggaaggcattgatatttaccccggaggcctgcagacagggccaccaggcagggcagccacatttgcgaggagtccctagaaagagtggccatgacgcttaacatgaaggagacccgatggggtgccccagctccagagatcccgctgtgcgctggctgtgaccagcacatcctggaccgcttcatcctcaaggctctggaccgccactggcacagcaagtgtctcaagtgcagcgactgccacacgccactggccgagcgctgcttcagccgaggggagagcgtttactgcaaggacgactttttcaagcgcttcgggaccaagtgcgccgcgtgccagctgggcatcccgcccacgcaggtggtgcgccgcgcccaggacttcgtgtaccacctgcactgctttgcctgcgtcgtgtgcaagcggcagctggccacgggcgacgagttctacctcatggaggacagccggctcgtgtgcaaggcggactacgaaaccgccaagcagcgagaggccgaggccacggccaagcggccgcgcacgaccatcaccgccaagcagctggagacgctgaagagcgcttacaacacctcgcccaagccggcgcgccacgtgcgcgagcagctctcgtccgagacgggcctggacatgcgcgtggtgcaggtttggttccagaaccgccgggccaaggagaagaggctgaagaaggacgccggccggcagcgctgggggcagtatttccgcaacatgaagcgctcccgcggcggctccaagtcggacaaggacagcgttcaggaggggcaggacagcgacgctgaggtctccttccccgatgagccttccttggcggaaatgggcccggccaatggcctctacgggagcttgggggaacccacccaggccttgggccggccctcgggagccctgggcaacttctccctggagcatggaggcctggcaggcccagagcagtaccgagagctgcgtcccggcagcccctacggtgtccccccatcccccgccgccccgcagagcctccctggcccccagcccctcctctccagcctggtgtacccagacaccagcttgggccttgtgccctcgggagcccccggcgggcccccacccatgagggtgctggcagggaacggacccagttctgacctatccacggggagcagcgggggttaccccgacttccctgccagccccgcctcctggctggatgaggtagaccacgctcagttctgacccaggcccggctccaccctgcacctcacacgagggagctgcccctgggtgggcggctcggggctgctggggtttccgaggaagtggggccagggcgtcaagggagggctggtgccttcggagcctcccactgccgaccgcacagctccctctctgggggctgagggacccacctggcccctcctctgacacagggctggcccgccaggtggcctcccagcaagccagccttttttgtaagcaaatttctcccctttattgaccaattaactgagcacttgctgctatttctagacatgaaatgtcaccttgctgaggcccagcccagcccagcatagcccgagggctggaaaaacgctttcatctctaaaactgagaaatcatcataattgtgctttcacttcccaggctccatgtgtcttggagccgtcaccccgaggctccctctttaggtcggagattggccttgcctgtcgaggcaagaggctgcagaggcggggacacacctgtgtcctccgggagaggccccctcctctccccagaccacagggggcctctctgcctccagccccaccttccccgggagaagctttccccaatccccaggtctctagatcattctgttctcgagtatcctgtggaggaggcaaaaatgcctggcgccccttctctccaagctcaattctctaagcccctcagggtctcctcctcaccccaccccaggcccttggtgtccaggctgcacccacagatgtctgttgccaaacagcctgccctccctgccggagccggctctgccagccccagattgggaagtctccccgctggagaagggtggggctcctctgagcctgccctgcctcctccatcagatcctttgggaagaagtttctgggagatgcccgcagctgtgcgtgccccagacacaaaggctggcctgtgtgtaagtcaaagtcactcccgcaaacctgaatctcgagctacctattggttctgtgaatgttctgtgtcttttatttattctcgggtgatcagctctttccaagacttcaataaatttgtcagttacagtc

SEQ ID NO: 149265 - DNA, 5820 bp, Homo sapiens
  Payload ID: 9467
  Gene Symbol: LHX4
  Gene Name: LIM homeobox 4
  Uniprot ID: Q969G2
  ENST ID: ENST00000263726
  CDS Start-End: 245-1417
aacctgggatgtgcaccaaccccggagagcgagatcaaagggactggaaacagactggggactggcggggggagggggccggccagcctgtggagtcctccctgagaagcggagggcccggcttccaccgtgactccagcggcctgcttggggttttaattattattttgaaatttctgaatcgagctagagcgagagagcgagagatctccgtagactgcgactcgctggctttcgctccgagatgatgcagagtgcgactgtccccgcggaaggggctgtcaaggggctcccggagatgctaggtgtgccgatgcaacagattccccagtgcgctggctgcaaccagcacatcctggacaagttcatcctgaaggtcctggacagacactggcacagctcctgcctcaagtgtgcagactgccagatgcagctggcggacaggtgcttctccagggctgggagcgtctactgcaaggaggacttcttcaagcgcttcggcacaaaatgcacggcctgccagcagggtatccccccaacccaggtggtccgcaaggcccaggactttgtctaccacctgcactgctttgcttgcatcatctgcaaccggcagctggccacgggggacgaattctacctcatggaggacgggcggctggtgtgcaaggaagactacgagacagccaagcagaacgatgactcagaggctggagctaagcggccccggaccaccatcacagccaagcagctggagacattaaagaatgcatacaagaactcccccaagcctgcccggcacgtgagggagcagctgtcctcagagacaggcctggacatgagggtcgtacaggtttggtttcagaacagaagggccaaagagaaacgcctgaagaaggatgcagggcggcaccgctgggggcagttctataagagcgtcaagaggagccggggcagcagcaagcaggagaaggagagctctgcagaggactgtggggttagtgacagtgagctgagcttccgagaggatcaaattctctcagaacttggccacaccaataggatttatggcaacgtgggggacgttacaggcggacagttaatgaatgggagcttctccatggacgggacaggacaatcctatcaggacttgagggatgggagcccctatggaatcccccagtctccatcctccatatcgtccctgccatcccacgctcctttgctcaatgggctggattacacggtggacagtaatttgggcatcattgcgcatgcagggcagggagtaagccagacgctgagagccatggctgggggacccacctctgacatctccacaggaagcagtgtaggctatcccgactttccaactagcccaggctcttggctcgatgaaatggatcatcctcctttttaaacttctctcctccccaccctacctgcccccctggcttgagagaatatcttcaaggatcaaaagagacttgccttttaaggatcgaaagtacgccaatgtgaatttccattattttcaatggaagtcctccgctgattcctagaaggctgtgagaccacactagggcattgtttccctggggaagcagtgggagagcagactcatctcagaacacagcacagggggtaatggcctagagctctagggacactggcttgttgggtctctcccctgctgttctgcttaggggcttggctgctcagtgctttggtagcacaaggtgactgtgataggcccccttggcctttgggaactttgctccaactggtgtgtctcacacaatgcctcccaaaacactgctctcaccagaactgagactcctaaggtagaggcctcacagcccttgagtaaaataaaagtgatttctggaccatccttattgaaccctatatttcaaaatgaaaagatcagttattaaaggtcagtgaacactttgatggccagtttgatattaaaaacatgccccctccttttttatttttgctgtgaagatatgaattctttcctacaaaccagagaatatgaacctgttttggtttttaagtgtcccatctatatcattgactctgatggcaagaggtggttttcattgcaggtgactgaggctgagctgagtagccctggaccaccgctgcagattgcctgagtcgtccccttggtgcacagtgtgccttcttcaattgcttgtatcatttattccacaagacaggctgtgggctgtaaaatgagcaaaactaaaatgtggggagaacaaaatgacaatcaatcagtgaacatttgtagacacatttggattccaaacctgcagtctgttcagccatatcggctgatgccagtcttccagagttccccatcccttgtagggtgaaatatttggagtctgttttgaaggagttggtttagatgagcttgcaagtctacccctctgaaagctttctctgctgtcctagctgactcaattggaggacagttttggtcatttccaggaaccagcaatttttttttggcctaccttggttgggaagagtaatttagggagcagccctaaaattgtccaaagggttctaagtggttcttgggctgcatctctctggattgctggctggacacctgccatgccttgggctgcagtcccatggtcagaaagccagaactctctggccagtggtggtgcagggactccccgttgtgcaggtttgcagtagcaaatcactaagcctgaggccagagcaaggccaacccccgctttacgagttgccactcctgcgacagactgcactgctgtgggaaacgctgtcctgaatggtgctgcagctcccacccaccttgtgcacccatctaccatcaggaagctctccatgtgcaaactggaatttagccagctggaatttattcctgtccctctgggaagctgtgtttgcttcttctggcctcccattctcttaaatgagatcagcagagtaggaaagggtgagaaggcattgcctatcacatgaagtgatggggccagagaccctaaggacccttccttctacgaatggttggtcaccttttgaggactgcaaagacttaggcatgtcataggcagactaaaggaagaatacacagttcctcttggactgctacatcttttgtaagcccttttccaggactaaactaagttcaattaagtaagttctttaaaacagtaaattccgggatcagccttcgggccctcttctctgaccaattttatagcgtaccctcgttttttggtgtgctgcagtggtcatgatttttgcttgagaagtctgcaaacatagacacttctcttgaggttccatgtttatggatgatgttgtgttaatcctagccaattctgtgctattgggaattctccaatcatgaacactggggtggggaggaagacacaaatgccatgtgaggaaaggaaaatgcagtcgtctttttggaggatggctttttaaatacacccttcttagcaggctgcttaaaatacacaggagaaaaggctctgctgggcaatgaaccagatgaaaagctgcccacccagatcactgttgcaggttgactatttggcttagcaactcatgggatttcagaggcccttgaagtttttggtgagtatagtgtgggggagagcaggctttttaaaaggggggggggcatcctcctctgtgtagcactgtttaagatcactgtaagtaagttgaccagtttttgtaagttaatcatactaattcccagttcaatagtggaaggagaggccttcctcatttatactaataatataataaatctcttgaggaactcagtgagcagttgacgaggtcaatagttctttggcatcagtagggctggttagctggaaaaacccttgagagcactggcctgaaaaccaggagagctttgttttccagagccacctccccagaaagcagcaaacactgctgcctgtttagaagcacagccacagtaggtctaagattttaaatggatctccctacaggttgggttagcattatgggtgggctggtgccactaatgagccattgcatgacaggactcttctggggtttggaaatggagaaaagccgggcattcattacttttagcttctcttagaggcactcctctgttgcttggaagtctattatggggtataaggtgctacatggtagctgtttccccccttgctaaaatgacatggatgaattttaaaaatgaaatgagaccttctagaggcaaccattatctgcagtgcctggctggtcgactttagagtaggaagctcttgaatccaggagcaaattagttaaaaccccaagttccagtggtaactggtataagcaaaatggaaactgaggggctatggaggaatctctgtttgttggaacgtaatgaaaccatggaggaaataccagatttaagggctaagaagctggcccgatgggtaaatcagtgttgggagtcaggttcttggcccttcaaggacttgctatgcaacctcaggcaaattcctctcagtctttgtgctttctctttcttgtctcatctgacagttatgaatataacgtaaaataaagatcaactatcattgataacactgttcctgcaaatgaatactgtgaaacatcagggaaagaggaaaaaattaagccacaagaaaaccatttggcagtgtccttaaactttttttgggggggggcagtgtaaaacatgaaacctagtaagataattgggccattagatcttcatcattaaactcactttgcaaggaagtgtaagaaatctgtaaaacaaaagacattcctatctcagaagctcaaactggtgatttccaactgcctctttacaggagggggctcaaggcttctgatgagcaaaggctgtgtgttgtatgacagtccactctctgcacctacacttccacgtgccacgactgacaacttggttataaccatgaaaataatgaccatacctccccagccagcagggtctggaaggcctgaggaggctcatttttaaacactgcactttaaaaattggaaaccgtgagatgaagaaaaattcaattaagcggaaatgagttttgttttattgcctgctgctgaagggctctgggcatgctgaaagctaaatgaaaagcacatcactggctctcttctttcttggattggtcaattggccctttttgcagtagttgctccaactgttctaaacagtgagtgactggagccaaaaagagagagctcagcaaagccatcccatccacactctgcttggtaggaccacactaaaagcacagtttcatgctgctagctctggtaaggagacagctgcaggtttgggaggtgcaccaagcattcctttgcttagggaggcagagcacaggtgaacagaggaaggacacccccactctcatctattgcccaccgagaggcaagaatcacaccaactttcccacttgaggactgtgttcggccaaacaagcaggttcagggctgcgggattccagaagttgctctgagcttgcaatcagacctcaaagccccagatcccctcagctctggatcgttgccctcatccttcacaatgtaaattttgtacagttaaagagaaatgaagtctcgtttcctggggaaaaaaaagaaaaaaagaaaaaaaaaagacccacccatccttatttattgccatatgactttggaaaacagaagctggtgcgtttgtttgtatatgcctcctgtgtgttggcatgagatgtgtacggtaaaattatgtaaaataaatatggaaattcttta

SEQ ID NO: 149266 - DNA, 603 bp, Homo sapiens
  Payload ID: 9467
  Gene Symbol: LHX4
  Gene Name: LIM homeobox 4
  ENST ID: ENST00000561113
  CDS Start-End: 1-454
agattccccagtgcgctggctgcaaccagcacatcctggacaagttcatcctgaaggtcctggacagacactggcacagctcctgcctcaagtgtgcagactgccagatgcagctggcggacaggtgcttctccagggctgggagcgtctactgcaaggaggacttcttcaagtaagtcagaacggcgcttcggcacaaaatgcacggcctgccagcagggtatccccccaacccaggtggtccgcaaggcccaggactttgtctaccacctgcactgctttgcttgcatcatctgcaaccggcagctggccacgggggacgaattctacctcatggaggacgggcggctggtgtgcaaggaagactacgagacagccaagcagaacgatgactcagaggctggagctaagcggccccggaccaccatcacagccaagcagctggagacattaaagaatgcatacaagaactcccccaagcctgcccggcacgtgagggagcagctgtcctcagagacaggcctggacatgagggtcgtacaggtttggtttcagaacagaagggccaaagagaaacgcctgaagaaggatgcagggcggcac

SEQ ID NO: 149267 - DNA, 2939 bp, Homo sapiens
  Payload ID: 9468
  Gene Symbol: LHX5
  Gene Name: LIM homeobox 5
  Uniprot ID: Q9H2C1
  ENST ID: ENST00000261731
  CDS Start-End: 575-1783
aaccaggtacaagctaatactcaacaatactgatgccttgttttttttgctctgtccggacagcaacgctgtagccaatttagatatgctataaatttaagaggttgccatggccacggtgcgcccattggccgctgggccccctacgtgcagcgccacgtcaccaaatctgaataaggatgcgcgaattacgcggcgaccagacaaagatgaggatccggaccgcttgaaagtgggggaaagtgccggcgcctccgccaccggggaaagccgctccgcagcgccgaggccagcagccacccgagatacctggggaagcccggaacaggcgccggggcgtgcggcccgtggcatgaggttgtgaacgccacccgccccccaccaccccactccgggcagcccagcgccaggccagagattgcccaaggactggaccggctgagtcttggtccggaccagactcgccctgcagctgctgagacaagaggcgaagggcagcggagggcccggcaggcccgagggccaggggcccaaagggagggcaaggcggccgaagccgccggggcgcggggctatgatggtgcactgcgccggttgcgagcggcccatcctcgaccgctttctgctgaacgtgctggaccgcgcgtggcacatcaaatgtgttcagtgctgcgagtgcaaaaccaacctctcggagaagtgcttctcgcgcgagggcaagctctactgcaaaaatgactttttcaggcgctttggcacgaaatgcgccggctgcgcgcaaggcatctcgcccagcgacctggtgcgcaaggcccggagcaaagtctttcacctcaactgtttcacctgcatggtgtgtaacaagcagctgtccaccggcgaggagctctacgtcatcgacgagaacaagttcgtgtgcaaagacgactacctgagctcatccagcctcaaggagggcagcctcaactcagtgtcatcctgtacggaccgcagtttgtccccggacctccaggacgcactgcaggacgaccccaaagagacggacaactcgacctcgtcggacaaggagacggccaacaacgagaacgaggagcagaactcgggcaccaagcggcgcggcccccgcaccaccatcaaggccaagcagctggagacgctcaaggctgccttcgccgccacgcccaagcccacgcgccacatccgcgagcagctggcgcaggagaccggcctcaacatgcgcgtcatccaggtgtggtttcagaaccgacggtccaaagaacgccggatgaaacagctgagcgccctaggcgcccggaggcacgccttcttccggagtccgcggcgcatgcgtccgctgggcggccgcttggacgagtctgagatgttggggtccaccccgtacacctactacggagactaccaaggcgactactacgcgccgggaagcaactacgacttcttcgcgcacggcccgccttcgcaggcgcagtccccggccgactccagcttcctggcggcctctggccccggctcgacgccgctgggagcgctggaaccgccgctcgccggcccgcacgccgcggacaaccccaggttcaccgacatgatctcgcacccggacacaccgagccccgagccaggcctgccgggcacgctgcaccccatgcccggcgaggtattcagcggcgggcccagcccgcccttcccaatgagcggcaccagcggctacagcggacccctgtcgcatcccaaccccgagctcaacgaagccgccgtgtggtaaggccgccgggccgccccccgcgctcggcccccgggggccccgccccgaagcagcctcctgaaaccaaaacgcccgacgcagacgcggtgggagacgtgggtgtccctcgggggttctctctcgggtccgcactcaactggcagctgctcctcggctgggcgccgagggggggccgacccccatctccaccccgcgggctctccaggagcctcagcccaccgccagtactctcccagcaaccgcgagcaatttcttgggaccaaagtcaatactccggagggtcaagagatttcgagcacgctctagactttccccgggcccccacccacccacccagccaccgccacctctttggactgagagagggtgaggccaaggggcggagacggtgtttttccctctctctgcaatccgagtggcattttgtaatcttatttctcgctgtgctttccccgtctttaaaaaaaaagatgataagaaaaggagagagattgaaagagagggagaggaaagggggcaagatgaggaggagatggagagacagcgtcagccagagggagaagacggagagcgagcgaggaactcgcgtgaaccgggagccaccgagagggagaccgagccacctgcacgctggcgctccctggtggccaatcttgaggctcaaggtcagcttctctaggaatagggctgtgggtcaggaagtggccagccgggtccagctcccgctcttccttactttgacgtttatgttgagcccgagggagcaggccggactcgaacacgcacacatcctgctctccccctgggtggggcgccaggattgctgggctcagacccacagaccaccctccctgcccagggcctggaggctgggccgtcaggatgtacaatattatacttttttggaagttgaacgcttctagtttccttattttgtataaagaagaaacaaataaagtatgtttttgtgtttactgtttatttattgtactctagttatccggggttggacatttttatatttttaagaggaggtagggcagagtgacggaggggaagcagaaagaggtttacctaaaaaaaacaaaaaacaaaaacaaaaaaaatcaactttttttaaagagaaagattaataaaaaaaaatcttttttccctc

SEQ ID NO: 149268 - DNA, 3457 bp, Homo sapiens
  Payload ID: 9469
  Gene Symbol: LHX6
  Gene Name: LIM homeobox 6
  Uniprot ID: Q9UPM6
  ENST ID: ENST00000340587
  CDS Start-End: 202-1335
gaggcagcggcggcagcagccagggaggccggggctgcgcgcgggccgggggcgggggctgaggccgggcccggggcggcggggccggcgcctcggctctcctcctgctcctgcagcagcctctgctcccactgcggctgtggtccccctcggcgcagctctccgcgctgcgcgcccgctgagcccgaggttccccggcccatgtactggaagcatgagaacgccgccccggcgttgcccgagggctgccggctgccggccgagggcggccccgccaccgaccaggtgatggcccagccagggtccggctgcaaagcgaccacccgctgtcttgaagggaccgcgccgcccgccatggctcagtctgacgccgaggccctggcaggagctctggacaaggacgagggtcaggcctccccatgtacgcccagcacgccatctgtctgctcaccgccctctgccgcctcctccgtgccgtctgcaggcaagaacatctgctccagctgcggcctcgagatcctggaccgatatctgctcaaggtcaacaacctcatctggcacgtgcggtgcctcgagtgctccgtgtgtcgcacgtcgctgaggcagcagaacagctgctacatcaagaacaaggagatcttctgcaagatggactacttcagccgattcgggaccaagtgtgcccggtgcggccgacagatctacgccagcgactgggtgcggagagctcgcggcaacgcctaccacctggcctgcttcgcctgcttctcgtgcaagcgccagctgtccactggtgaggagttcggcctggtcgaggagaaggtgctctgccgcatccactacgacaccatgattgagaacctcaagagggccgccgagaacgggaacggcctcacgttggagggggcagtgccctcggaacaggacagtcaacccaagccggccaagcgcgcgcggacgtccttcaccgcggaacagctgcaggttatgcaggcgcagttcgcgcaggacaacaaccccgacgctcagacgctgcagaagctggcggacatgacgggcctcagccggagagtcatccaggtgtggtttcaaaactgccgggcgcgtcataaaaagcacacgccgcaacacccagtgccgccctcgggggcgcccccgtcccgccttccctccgccctgtccgacgacatccactacaccccgttcagcagccccgagcgggcgcgcatggtcaccctgcacggctacattgagagtcatcctttttcagtactaacgctgccggcacttccgcatctgcccgtgggcgccccacagctgcccctcagccgctgagatccagtgtccaagctgcggccaggagtccacccacctccgcatccacccccgtccgccatcctgcccaccaccaggtcggttcccgaggcctggcctttccctctcctgctgagaaccagaacccaccaggagcaccacagagtcctcctcttggaaggcagaactccctgaaatctggaatcagggtggaaacagcctgtttttcccatttaaacaggagtcctcttcaacttcagctgattacaataacaaaaggcggaattgaattgtgcgatgccaacggccttctcatttacaggtttttttcccccacattggcctttatttactacttccttggaaccatctctgaattctgaatagctgacaacccccaatgttatccactctgttgcttttgtctggaaaactctacagtgtttgtgggatgtccccaaaggaaagctatgttctaattttatcatttccatctgtctggttatgtcaagttaattcagaaagagaagagacagtgaccaaccctgagaggcctaatagggcagagatggaggcctgcccagactaggaggcagcggggatagacagggaatggggagaagaaagacccccattggtttggaaatcaaggagagggcggtgacatattggaccagaagaggcactagccattttaaggagaggaaagagaaaactctggggtcagggagagaccctacccccacctaattatccagcatatatgtaagaaacatagcagcgatggtattcgatctgtgccatgactcttctgaatgtttggacaggttagagttggggacccctgttggccacttgttgacctctcatagtggtgcttgggccaggtcttctcaatggaaggggaatcccttataggggagagggaacagagcccagtgaaatggcagtcagaatgttaaccctggatccatctctaagtagagagagggtgcccattgcctaggtgagtgtgccaagctcaggattccaactggtgcctctgagcttcccaatcaatacttcctggagccagccccacccacccctgagaacagaggtcagacacagctgcgtaacatccatcctgctacaactcttccaccccaaacaaaagggctcaggctacacacgaccatgatttatgttttcaggggatgcccatttgtcccaagcttatcctgtaattctagaattacctggtgtcctgatgcattttccactagaggttgctaatcagcatgttttagcccaagtccgccttcctgctgtggttaacctgttatgttgcttttggaaggagactctaagacagggaaagcaagttcatggtacatacgcagccattgtctctgtttttacccatggcagacattgctaatcaatggcagctctatttcactgagtctggataaggtttcagagttcaaatgcttgacgttggcacttaacatgaaagcctataggtcattcttgctctgggatctacaggcagggtaggcacaggtgcagcctaagaagggaacctgcttcctctcccttccaaagacagtgacagctgactgagggcaaagagcaggcaccactcagaacgtggtgagtacagctcagctcagcactcagtcagtggtaacttgtgcccagccctgtgctaggcgctgacattaacaggagcaaccagggcccaattcctggccttggagctcaaatctttcctttgatttttgctcctgatcatcaaggccccagtggcaaccatgtggtaagtggccaaccaagccctacccagggtcacccaacacactctgccttgagcctctcctcagggtctattccttgcgtggattatgtggccgtagcatgttacagttcaaacatgtctccactaccctgttaagagcagcctgggaacgtacaggccatcaagactatttatttaaatacaaaaaaaggggaaaacacacacacggaaaaaaaattgtaagcactttttttgtaaaaccaatgtctgttttgttacatacctttcatgtcgtgctttgtaaatgtcttatttgtgtaataaagttaatgcaagtagaagtgctggcactgaaatccagaa

SEQ ID NO: 149269 - DNA, 3278 bp, Homo sapiens
  Payload ID: 9469
  Gene Symbol: LHX6
  Gene Name: LIM homeobox 6
  Uniprot ID: Q9UPM6
  ENST ID: ENST00000373754
  CDS Start-End: 110-1156
gttcggcgccggtttatataacaggcgcggggaggcgctgggctcaggctgtgcggagccagttcagcagccgccgccgcctgcgttccctccccccctcccccaggtgatggcccagccagggtccggctgcaaagcgaccacccgctgtcttgaagggaccgcgccgcccgccatggctcagtctgacgccgaggccctggcaggagctctggacaaggacgagggtcaggcctccccatgtacgcccagcacgccatctgtctgctcaccgccctctgccgcctcctccgtgccgtctgcaggcaagaacatctgctccagctgcggcctcgagatcctggaccgatatctgctcaaggtcaacaacctcatctggcacgtgcggtgcctcgagtgctccgtgtgtcgcacgtcgctgaggcagcagaacagctgctacatcaagaacaaggagatcttctgcaagatggactacttcagccgattcgggaccaagtgtgcccggtgcggccgacagatctacgccagcgactgggtgcggagagctcgcggcaacgcctaccacctggcctgcttcgcctgcttctcgtgcaagcgccagctgtccactggtgaggagttcggcctggtcgaggagaaggtgctctgccgcatccactacgacaccatgattgagaacctcaagagggccgccgagaacgggaacggcctcacgttggagggggcagtgccctcggaacaggacagtcaacccaagccggccaagcgcgcgcggacgtccttcaccgcggaacagctgcaggttatgcaggcgcagttcgcgcaggacaacaaccccgacgctcagacgctgcagaagctggcggacatgacgggcctcagccggagagtcatccaggtgtggtttcaaaactgccgggcgcgtcataaaaagcacacgccgcaacacccagtgccgccctcgggggcgcccccgtcccgccttccctccgccctgtccgacgacatccactacaccccgttcagcagccccgagcgggcgcgcatggtcaccctgcacggctacattgagagtcatcctttttcagtactaacgctgccggcacttccgcatctgcccgtgggcgccccacagctgcccctcagccgctgagatccagtgtccaagctgcggccaggagtccacccacctccgcatccacccccgtccgccatcctgcccaccaccaggtcggttcccgaggcctggcctttccctctcctgctgagaaccagaacccaccaggagcaccacagagtcctcctcttggaaggcagaactccctgaaatctggaatcagggtggaaacagcctgtttttcccatttaaacaggagtcctcttcaacttcagctgattacaataacaaaaggcggaattgaattgtgcgatgccaacggccttctcatttacaggtttttttcccccacattggcctttatttactacttccttggaaccatctctgaattctgaatagctgacaacccccaatgttatccactctgttgcttttgtctggaaaactctacagtgtttgtgggatgtccccaaaggaaagctatgttctaattttatcatttccatctgtctggttatgtcaagttaattcagaaagagaagagacagtgaccaaccctgagaggcctaatagggcagagatggaggcctgcccagactaggaggcagcggggatagacagggaatggggagaagaaagacccccattggtttggaaatcaaggagagggcggtgacatattggaccagaagaggcactagccattttaaggagaggaaagagaaaactctggggtcagggagagaccctacccccacctaattatccagcatatatgtaagaaacatagcagcgatggtattcgatctgtgccatgactcttctgaatgtttggacaggttagagttggggacccctgttggccacttgttgacctctcatagtggtgcttgggccaggtcttctcaatggaaggggaatcccttataggggagagggaacagagcccagtgaaatggcagtcagaatgttaaccctggatccatctctaagtagagagagggtgcccattgcctaggtgagtgtgccaagctcaggattccaactggtgcctctgagcttcccaatcaatacttcctggagccagccccacccacccctgagaacagaggtcagacacagctgcgtaacatccatcctgctacaactcttccaccccaaacaaaagggctcaggctacacacgaccatgatttatgttttcaggggatgcccatttgtcccaagcttatcctgtaattctagaattacctggtgtcctgatgcattttccactagaggttgctaatcagcatgttttagcccaagtccgccttcctgctgtggttaacctgttatgttgcttttggaaggagactctaagacagggaaagcaagttcatggtacatacgcagccattgtctctgtttttacccatggcagacattgctaatcaatggcagctctatttcactgagtctggataaggtttcagagttcaaatgcttgacgttggcacttaacatgaaagcctataggtcattcttgctctgggatctacaggcagggtaggcacaggtgcagcctaagaagggaacctgcttcctctcccttccaaagacagtgacagctgactgagggcaaagagcaggcaccactcagaacgtggtgagtacagctcagctcagcactcagtcagtggtaacttgtgcccagccctgtgctaggcgctgacattaacaggagcaaccagggcccaattcctggccttggagctcaaatctttcctttgatttttgctcctgatcatcaaggccccagtggcaaccatgtggtaagtggccaaccaagccctacccagggtcacccaacacactctgccttgagcctctcctcagggtctattccttgcgtggattatgtggccgtagcatgttacagttcaaacatgtctccactaccctgttaagagcagcctgggaacgtacaggccatcaagactatttatttaaatacaaaaaaaggggaaaacacacacacggaaaaaaaattgtaagcactttttttgtaaaaccaatgtctgttttgttacatacctttcatgtcgtgctttgtaaatgtcttatttgtgtaataaagttaatgcaagtagaagtgctggcactgaaatccagaa

SEQ ID NO: 149270 - DNA, 3384 bp, Homo sapiens
  Payload ID: 9469
  Gene Symbol: LHX6
  Gene Name: LIM homeobox 6
  Uniprot ID: Q9UPM6
  ENST ID: ENST00000373755
  CDS Start-End: 110-1201
gttcggcgccggtttatataacaggcgcggggaggcgctgggctcaggctgtgcggagccagttcagcagccgccgccgcctgcgttccctccccccctcccccaggtgatggcccagccagggtccggctgcaaagcgaccacccgctgtcttgaagggaccgcgccgcccgccatggctcagtctgacgccgaggccctggcaggagctctggacaaggacgagggtcaggcctccccatgtacgcccagcacgccatctgtctgctcaccgccctctgccgcctcctccgtgccgtctgcaggcaagaacatctgctccagctgcggcctcgagatcctggaccgatatctgctcaaggtcaacaacctcatctggcacgtgcggtgcctcgagtgctccgtgtgtcgcacgtcgctgaggcagcagaacagctgctacatcaagaacaaggagatcttctgcaagatggactacttcagccgattcgggaccaagtgtgcccggtgcggccgacagatctacgccagcgactgggtgcggagagctcgcggcaacgcctaccacctggcctgcttcgcctgcttctcgtgcaagcgccagctgtccactggtgaggagttcggcctggtcgaggagaaggtgctctgccgcatccactacgacaccatgattgagaacctcaagagggccgccgagaacgggaacggcctcacgttggagggggcagtgccctcggaacaggacagtcaacccaagccggccaagcgcgcgcggacgtccttcaccgcggaacagctgcaggttatgcaggcgcagttcgcgcaggacaacaaccccgacgctcagacgctgcagaagctggcggacatgacgggcctcagccggagagtcatccaggtgtggtttcaaaactgccgggcgcgtcataaaaagcacacgccgcaacacccagtgccgccctcgggggcgcccccgtcccgccttccctccgccctgtccgacgacatccactacaccccgttcagcagccccgagcgggcgcgcatggtcaccctgcacggctacattgagagtcaggtacagtgcgggcaggtgcactgccggctgccttacaccgcaccccccgtccacctcaaagccgatatggatgggccgctctccaaccggggtgagaaggtcatcctttttcagtactaacgctgccggcacttccgcatctgcccgtgggcgccccacagctgcccctcagccgctgagatccagtgtccaagctgcggccaggagtccacccacctccgcatccacccccgtccgccatcctgcccaccaccaggtcggttcccgaggcctggcctttccctctcctgctgagaaccagaacccaccaggagcaccacagagtcctcctcttggaaggcagaactccctgaaatctggaatcagggtggaaacagcctgtttttcccatttaaacaggagtcctcttcaacttcagctgattacaataacaaaaggcggaattgaattgtgcgatgccaacggccttctcatttacaggtttttttcccccacattggcctttatttactacttccttggaaccatctctgaattctgaatagctgacaacccccaatgttatccactctgttgcttttgtctggaaaactctacagtgtttgtgggatgtccccaaaggaaagctatgttctaattttatcatttccatctgtctggttatgtcaagttaattcagaaagagaagagacagtgaccaaccctgagaggcctaatagggcagagatggaggcctgcccagactaggaggcagcggggatagacagggaatggggagaagaaagacccccattggtttggaaatcaaggagagggcggtgacatattggaccagaagaggcactagccattttaaggagaggaaagagaaaactctggggtcagggagagaccctacccccacctaattatccagcatatatgtaagaaacatagcagcgatggtattcgatctgtgccatgactcttctgaatgtttggacaggttagagttggggacccctgttggccacttgttgacctctcatagtggtgcttgggccaggtcttctcaatggaaggggaatcccttataggggagagggaacagagcccagtgaaatggcagtcagaatgttaaccctggatccatctctaagtagagagagggtgcccattgcctaggtgagtgtgccaagctcaggattccaactggtgcctctgagcttcccaatcaatacttcctggagccagccccacccacccctgagaacagaggtcagacacagctgcgtaacatccatcctgctacaactcttccaccccaaacaaaagggctcaggctacacacgaccatgatttatgttttcaggggatgcccatttgtcccaagcttatcctgtaattctagaattacctggtgtcctgatgcattttccactagaggttgctaatcagcatgttttagcccaagtccgccttcctgctgtggttaacctgttatgttgcttttggaaggagactctaagacagggaaagcaagttcatggtacatacgcagccattgtctctgtttttacccatggcagacattgctaatcaatggcagctctatttcactgagtctggataaggtttcagagttcaaatgcttgacgttggcacttaacatgaaagcctataggtcattcttgctctgggatctacaggcagggtaggcacaggtgcagcctaagaagggaacctgcttcctctcccttccaaagacagtgacagctgactgagggcaaagagcaggcaccactcagaacgtggtgagtacagctcagctcagcactcagtcagtggtaacttgtgcccagccctgtgctaggcgctgacattaacaggagcaaccagggcccaattcctggccttggagctcaaatctttcctttgatttttgctcctgatcatcaaggccccagtggcaaccatgtggtaagtggccaaccaagccctacccagggtcacccaacacactctgccttgagcctctcctcagggtctattccttgcgtggattatgtggccgtagcatgttacagttcaaacatgtctccactaccctgttaagagcagcctgggaacgtacaggccatcaagactatttatttaaatacaaaaaaaggggaaaacacacacacggaaaaaaaattgtaagcactttttttgtaaaaccaatgtctgttttgttacatacctttcatgtcgtgctttgtaaatgtcttatttgtgtaataaagttaatgcaagtagaagtgctggcactgaaatccagaaca

SEQ ID NO: 149271 - DNA, 3465 bp, Homo sapiens
  Payload ID: 9469
  Gene Symbol: LHX6
  Gene Name: LIM homeobox 6
  Uniprot ID: Q9UPM6
  ENST ID: ENST00000394319
  CDS Start-End: 106-1284
ctctcctcctgctcctgcagcagcctctgctcccactgcggctgtggtccccctcggcgcagctctccgcgctgcgcgcccgctgagcccgaggttccccggcccatgtactggaagcatgagaacgccgccccggcgttgcccgagggctgccggctgccggccgagggcggccccgccaccgaccaggtgatggcccagccagggtccggctgcaaagcgaccacccgctgtcttgaagggaccgcgccgcccgccatggctcagtctgacgccgaggccctggcaggagctctggacaaggacgagggtcaggcctccccatgtacgcccagcacgccatctgtctgctcaccgccctctgccgcctcctccgtgccgtctgcaggcaagaacatctgctccagctgcggcctcgagatcctggaccgatatctgctcaaggtcaacaacctcatctggcacgtgcggtgcctcgagtgctccgtgtgtcgcacgtcgctgaggcagcagaacagctgctacatcaagaacaaggagatcttctgcaagatggactacttcagccgattcgggaccaagtgtgcccggtgcggccgacagatctacgccagcgactgggtgcggagagctcgcggcaacgcctaccacctggcctgcttcgcctgcttctcgtgcaagcgccagctgtccactggtgaggagttcggcctggtcgaggagaaggtgctctgccgcatccactacgacaccatgattgagaacctcaagagggccgccgagaacgggaacggcctcacgttggagggggcagtgccctcggaacaggacagtcaacccaagccggccaagcgcgcgcggacgtccttcaccgcggaacagctgcaggttatgcaggcgcagttcgcgcaggacaacaaccccgacgctcagacgctgcagaagctggcggacatgacgggcctcagccggagagtcatccaggtgtggtttcaaaactgccgggcgcgtcataaaaagcacacgccgcaacacccagtgccgccctcgggggcgcccccgtcccgccttccctccgccctgtccgacgacatccactacaccccgttcagcagccccgagcgggcgcgcatggtcaccctgcacggctacattgagagtcaggtacagtgcgggcaggtgcactgccggctgccttacaccgcaccccccgtccacctcaaagccgatatggatgggccgctctccaaccggggtgagaaggtcatcctttttcagtactaacgctgccggcacttccgcatctgcccgtgggcgccccacagctgcccctcagccgctgagatccagtgtccaagctgcggccaggagtccacccacctccgcatccacccccgtccgccatcctgcccaccaccaggtcggttcccgaggcctggcctttccctctcctgctgagaaccagaacccaccaggagcaccacagagtcctcctcttggaaggcagaactccctgaaatctggaatcagggtggaaacagcctgtttttcccatttaaacaggagtcctcttcaacttcagctgattacaataacaaaaggcggaattgaattgtgcgatgccaacggccttctcatttacaggtttttttcccccacattggcctttatttactacttccttggaaccatctctgaattctgaatagctgacaacccccaatgttatccactctgttgcttttgtctggaaaactctacagtgtttgtgggatgtccccaaaggaaagctatgttctaattttatcatttccatctgtctggttatgtcaagttaattcagaaagagaagagacagtgaccaaccctgagaggcctaatagggcagagatggaggcctgcccagactaggaggcagcggggatagacagggaatggggagaagaaagacccccattggtttggaaatcaaggagagggcggtgacatattggaccagaagaggcactagccattttaaggagaggaaagagaaaactctggggtcagggagagaccctacccccacctaattatccagcatatatgtaagaaacatagcagcgatggtattcgatctgtgccatgactcttctgaatgtttggacaggttagagttggggacccctgttggccacttgttgacctctcatagtggtgcttgggccaggtcttctcaatggaaggggaatcccttataggggagagggaacagagcccagtgaaatggcagtcagaatgttaaccctggatccatctctaagtagagagagggtgcccattgcctaggtgagtgtgccaagctcaggattccaactggtgcctctgagcttcccaatcaatacttcctggagccagccccacccacccctgagaacagaggtcagacacagctgcgtaacatccatcctgctacaactcttccaccccaaacaaaagggctcaggctacacacgaccatgatttatgttttcaggggatgcccatttgtcccaagcttatcctgtaattctagaattacctggtgtcctgatgcattttccactagaggttgctaatcagcatgttttagcccaagtccgccttcctgctgtggttaacctgttatgttgcttttggaaggagactctaagacagggaaagcaagttcatggtacatacgcagccattgtctctgtttttacccatggcagacattgctaatcaatggcagctctatttcactgagtctggataaggtttcagagttcaaatgcttgacgttggcacttaacatgaaagcctataggtcattcttgctctgggatctacaggcagggtaggcacaggtgcagcctaagaagggaacctgcttcctctcccttccaaagacagtgacagctgactgagggcaaagagcaggcaccactcagaacgtggtgagtacagctcagctcagcactcagtcagtggtaacttgtgcccagccctgtgctaggcgctgacattaacaggagcaaccagggcccaattcctggccttggagctcaaatctttcctttgatttttgctcctgatcatcaaggccccagtggcaaccatgtggtaagtggccaaccaagccctacccagggtcacccaacacactctgccttgagcctctcctcagggtctattccttgcgtggattatgtggccgtagcatgttacagttcaaacatgtctccactaccctgttaagagcagcctgggaacgtacaggccatcaagactatttatttaaatacaaaaaaaggggaaaacacacacacggaaaaaaaattgtaagcactttttttgtaaaaccaatgtctgttttgttacatacctttcatgtcgtgctttgtaaatgtcttatttgtgtaataaagttaatgcaagtagaagtgctggcactgaaatccagaa

SEQ ID NO: 149272 - DNA, 2942 bp, Homo sapiens
  Payload ID: 9469
  Gene Symbol: LHX6
  Gene Name: LIM homeobox 6
  Uniprot ID: Q9UPM6
  ENST ID: ENST00000541397
  CDS Start-End: 72-1172
agtaaagacacaggcgaatcaagaggaggcgaggccggtattgtccgtctgaataggcgctgatagcgccgatgcgccgggggttgtgccggcgcagcgctgagaatcccgacgcggggccggtgatggcccagccagggtccggctgcaaagcgaccacccgctgtcttgaagggaccgcgccgcccgccatggctcagtctgacgccgaggccctggcaggagctctggacaaggacgagggtcaggcctccccatgtacgcccagcacgccatctgtctgctcaccgccctctgccgcctcctccgtgccgtctgcaggcaagaacatctgctccagctgcggcctcgagatcctggaccgatatctgctcaaggtcaacaacctcatctggcacgtgcggtgcctcgagtgctccgtgtgtcgcacgtcgctgaggcagcagaacagctgctacatcaagaacaaggagatcttctgcaagatggactacttcagccgattcgggaccaagtgtgcccggtgcggccgacagatctacgccagcgactgggtgcggagagctcgcggcaacgcctaccacctggcctgcttcgcctgcttctcgtgcaagcgccagctgtccactggtgaggagttcggcctggtcgaggagaaggtgctctgccgcatccactacgacaccatgattgagaacctcaagagggccgccgagaacgggaacggcctcacgttggagggggcagtgccctcggaacaggacagtcaacccaagccggccaagcgcgcgcggacgtccttcaccgcggaacagctgcaggttatgcaggcgcagttcgcgcaggacaacaaccccgacgctcagacgctgcagaagctggcggacatgacgggcctcagccggagagtcatccaggtgtggtttcaaaactgccgggcgcgtcataaaaagcacacgccgcaacacccagtgccgccctcgggggcgcccccgtcccgccttccctccgccctgtccgacgacatccactacaccccgttcagcagccccgagcgggcgcgcatggtcaccctgcacggctacattgagagtcatcctttttcagtactaacgctgccggcacttccgcatctgcccgtgggcgccccacagctgcccctcagccgctgagatccagtgtccaagctgcggccaggagtccacccacctccgcatccacccccgtccgccatcctgcccaccaccaggtcggttcccgaggcctggcctttccctctcctgctgagaaccagaacccaccaggagcaccacagagtcctcctcttggaaggcagaactccctgaaatctggaatcagggtggaaacagcctgtttttcccatttaaacaggagtcctcttcaacttcagctgattacaataacaaaaggcggaattgaattgtgcgatgccaacggccttctcatttacaggtttttttcccccacattggcctttatttactacttccttggaaccatctctgaattctgaatagctgacaacccccaatgttatccactctgttgcttttgtctggaaaactctacagtgtttgtgggatgtccccaaaggaaagctatgttctaattttatcatttccatctgtctggttatgtcaagttaattcagaaagagaagagacagtgaccaaccctgagaggcctaatagggcagagatggaggcctgcccagactaggaggcagcggggatagacagggaatggggagaagaaagacccccattggtttggaaatcaaggagagggcggtgacatattggaccagaagaggcactagccattttaaggagaggaaagagaaaactctggggtcagggagagaccctacccccacctaattatccagcatatatgtaagaaacatagcagcgatggtattcgatctgtgccatgactcttctgaatgtttggacaggttagagttggggacccctgttggccacttgttgacctctcatagtggtgcttgggccaggtcttctcaatggaaggggaatcccttataggggagagggaacagagcccagtgaaatggcagtcagaatgttaaccctggatccatctctaagtagagagagggtgcccattgcctaggtgagtgtgccaagctcaggattccaactggtgcctctgagcttcccaatcaatacttcctggagccagccccacccacccctgagaacagaggtcagacacagctgcgtaacatccatcctgctacaactcttccaccccaaacaaaagggctcaggctacacacgaccatgatttatgttttcaggggatgcccatttgtcccaagcttatcctgtaattctagaattacctggtgtcctgatgcattttccactagaggttgctaatcagcatgttttagcccaagtccgccttcctgctgtggttaacctgttatgttgcttttggaaggagactctaagacagggaaagcaagttcatggtacatacgcagccattgtctctgtttttacccatggcagacattgctaatcaatggcagctctatttcactgagtctggataaggtttcagagttcaaatgcttgacgttggcacttaacatgaaagcctataggtcattcttgctctgggatctacaggcagggtaggcacaggtgcagcctaagaagggaacctgcttcctctcccttccaaagacagtgacagctgactgagggcaaagagcaggcaccactcagaacgtggtgagtacagctcagctcagcactcagtcagtggtaacttgtgcccagccctgtgctaggcgctgacattaacaggagcaaccagggcccaattcctggccttggagctcaaatctttcctttgatttttgctcctgatcatcaaggccccagtgg

SEQ ID NO: 149273 - DNA, 666 bp, Homo sapiens
  Payload ID: 9469
  Gene Symbol: LHX6
  Gene Name: LIM homeobox 6
  ENST ID: ENST00000464484
  CDS Start-End: 290-397
gtagctgggctcggcgcggagggtggtgcgtgcacgtggccatccttctccaggaggcgacgaggcagtcccgcctggggtctcccggcggcgcgtccgactcttttcctcgaggctgaggctgccgaggctgtcgttccaggtgtggtttcaaaactgccgggcgcgtcataaaaagcacacgccgcaacacccagtgccgccctcgggggcgcccccgtcccgccttccctccgccctgtccgacgacatccactacaccccgttcagcagccccgagcgggcgcgcatggtcaccctgcacggctacattgagagtcatcctttttcagtactaacgctgccggcacttccgcatctgcccgtgggcgccccacagctgcccctcagccgctgagatccagtgtccaagctgcggccaggagtccacccacctccgcatccacccccgtccgccatcctgcccaccaccaggtcggttcccgaggcctggcctttccctctcctgctgagaaccagaacccaccaggagcaccacagagtcctcctcttggaaggcagaactccctgaaatctggaatcagggtggaaacagcctgtttttcccatttaaacaggagtcctcttcaacttcagctgattacaataacaaaaggcggaattgaa

SEQ ID NO: 149274 - DNA, 736 bp, Homo sapiens
  Payload ID: 9469
  Gene Symbol: LHX6
  Gene Name: LIM homeobox 6
  ENST ID: ENST00000560485
  CDS Start-End: 636-736
tttagtaaagacacaggcgaatcaagaggaggcgaggccggtattgtccgtctgaataggcgctgatagcgccgatgcgccgggggttgtgccggcgcagcgctgagaatcccgacgcggggccggtacccggcgcgccgaggggctggagggtgctttttcctccccttgagcgcctctcttttctctttttggtcccgtttcgccccgatctcgctctctttttgctccgggtttccctccgactggccctcgaaaggcgcctgaatccgtgtcaatatagctgcttcaatttcgccgcgcgtgtcaggcgggcgggcgggcgggtgctcaccgcgctcggggttttcttttcttcaaccaccctccgcccctcacccatctcttttttattttctttctttctctcttttctcctttttgcattttgtgccgagaggagaagggagcgaggaaggggagtggggtgggggggcgggtggagagagaaaaaattcgatttttaattactaccattaaaaaatcaaatttgcaattctttgggcggcctgatggatctcactgattgacagttggaattgacactctggctacctcttatcttgggcattcacgacaatttctaattgcaggtgatggcccagccagggtccggctgcaaagcgaccacccgctgtcttgaagggaccgcgccgcccgccatggctcagtctgacgccgaggccctggcaggagc

SEQ ID NO: 149275 - DNA, 918 bp, Homo sapiens
  Payload ID: 9469
  Gene Symbol: LHX6
  Gene Name: LIM homeobox 6
  ENST ID: ENST00000482062
  CDS Start-End: 261-413
gtgcacgtggccatccttctccaggaggcgacgaggcagtcccgcctggggtctcccggcggcgcgtccgactcttttcctcgaggctgaggctgccgaggctgtcgttccaggtgtggtttcaaaactgccgggcgcgtcataaaaagcacacgccgcaacacccagtgccgccctcgggggcgcccccgtcccgccttccctccgccctgtccgacgacatccactacaccccgttcagcagccccgagcgggcgcgcatggtcaccctgcacggctacattgagagtcaggtacagtgcgggcaggtgcactgccggctgccttacaccgcaccccccgtccacctcaaagccgatatggatgggccgctctccaaccggggtgagaaggtcatcctttttcagtactaacgctgccggcacttccgcatctgcccgtgggcgccccacagctgcccctcagccgctgagatccagtgtccaagctgcggccaggagtccacccacctccgcatccacccccgtccgccatcctgcccaccaccaggtcggttcccgaggcctggcctttccctctcctgctgagaaccagaacccaccaggagcaccacagagtcctcctcttggaaggcagaactccctgaaatctggaatcagggtggaaacagcctgtttttcccatttaaacaggagtcctcttcaacttcagctgattacaataacaaaaggcggaattgaattgtgcgatgccaacggccttctcatttacaggtttttttcccccacattggcctttatttactacttccttggaaccatctctgaattctgaatagctgacaacccccaatgttatccactctgttgcttttgtctggaaaactctacagtgtttgtgggatgtccccaaaggaaa

SEQ ID NO: 149276 - DNA, 3587 bp, Homo sapiens
  Payload ID: 9469
  Gene Symbol: LHX6
  Gene Name: LIM homeobox 6
  Uniprot ID: Q9UPM6
  ENST ID: ENST00000559895
  CDS Start-End: 880-1410
gatgtgtggctccctgggtgatcttgcaacacttaggcaggagtgacctcagaggcctgtgaatggagcacctttgtcaatatcaggtcactgcggtccctggccctcctgccttctgacaatgggagtggggagtaaagggttaactgcttcccctcgtgtttatgggggtgggggttcagtgagtgccctggaggctaaagttcctcttcccagctaggcccaaacgacttcatgcaagcccctagccttctctggccctccgccttgagcccaagctctgtcgcgggctccagcgggagaagcctaccccctcccgcaaagcgagggtcccaggggaagcgcagagcgggaagcggccccccaccgcggcagagagcggcccagcggcggccagctgttgggggacagatgttgggggagccgagaggggagctgggggaggagcctcggggccgggacctccgagaagcggtcgttttaacctcttaattgctggttctgggttttttttccccctctggcttcttcccctacgggtttacctagaagggaaggagcagagagaataggtagggccccacctccaacccaccttgttcgcctcacaggatctaaagccttcaagaaggtcttgaacctaaaataagtgaacctccgtttgagtttcggcctctcggctcaatagcttgccgattcgggaccaagtgtgcccggtgcggccgacagatctacgccagcgactgggtgcggagagctcgcggcaacgcctaccacctggcctgcttcgcctgcttctcgtgcaagcgccagctgtccactggtgaggagttcggcctggtcgaggagaaggtgctctgccgcatccactacgacaccatgattgagaacctcaagagggccgccgagaacgggaacggcctcacgttggagggggcagtgccctcggaacaggacagtcaacccaagccggccaagcgcgcgcggacgtccttcaccgcggaacagctgcaggttatgcaggcgcagttcgcgcaggacaacaaccccgacgctcagacgctgcagaagctggcggacatgacgggcctcagccggagagtcatccaggtgtggtttcaaaactgccgggcgcgtcataaaaagcacacgccgcaacacccagtgccgccctcgggggcgcccccgtcccgccttccctccgccctgtccgacgacatccactacaccccgttcagcagccccgagcgggcgcgcatggtcaccctgcacggctacattgagagtcaggtacagtgcgggcaggtgcactgccggctgccttacaccgcaccccccgtccacctcaaagccgatatggatgggccgctctccaaccggggtgagaaggtcatcctttttcagtactaacgctgccggcacttccgcatctgcccgtgggcgccccacagctgcccctcagccgctgagatccagtgtccaagctgcggccaggagtccacccacctccgcatccacccccgtccgccatcctgcccaccaccaggtcggttcccgaggcctggcctttccctctcctgctgagaaccagaacccaccaggagcaccacagagtcctcctcttggaaggcagaactccctgaaatctggaatcagggtggaaacagcctgtttttcccatttaaacaggagtcctcttcaacttcagctgattacaataacaaaaggcggaattgaattgtgcgatgccaacggccttctcatttacaggtttttttcccccacattggcctttatttactacttccttggaaccatctctgaattctgaatagctgacaacccccaatgttatccactctgttgcttttgtctggaaaactctacagtgtttgtgggatgtccccaaaggaaagctatgttctaattttatcatttccatctgtctggttatgtcaagttaattcagaaagagaagagacagtgaccaaccctgagaggcctaatagggcagagatggaggcctgcccagactaggaggcagcggggatagacagggaatggggagaagaaagacccccattggtttggaaatcaaggagagggcggtgacatattggaccagaagaggcactagccattttaaggagaggaaagagaaaactctggggtcagggagagaccctacccccacctaattatccagcatatatgtaagaaacatagcagcgatggtattcgatctgtgccatgactcttctgaatgtttggacaggttagagttggggacccctgttggccacttgttgacctctcatagtggtgcttgggccaggtcttctcaatggaaggggaatcccttataggggagagggaacagagcccagtgaaatggcagtcagaatgttaaccctggatccatctctaagtagagagagggtgcccattgcctaggtgagtgtgccaagctcaggattccaactggtgcctctgagcttcccaatcaatacttcctggagccagccccacccacccctgagaacagaggtcagacacagctgcgtaacatccatcctgctacaactcttccaccccaaacaaaagggctcaggctacacacgaccatgatttatgttttcaggggatgcccatttgtcccaagcttatcctgtaattctagaattacctggtgtcctgatgcattttccactagaggttgctaatcagcatgttttagcccaagtccgccttcctgctgtggttaacctgttatgttgcttttggaaggagactctaagacagggaaagcaagttcatggtacatacgcagccattgtctctgtttttacccatggcagacattgctaatcaatggcagctctatttcactgagtctggataaggtttcagagttcaaatgcttgacgttggcacttaacatgaaagcctataggtcattcttgctctgggatctacaggcagggtaggcacaggtgcagcctaagaagggaacctgcttcctctcccttccaaagacagtgacagctgactgagggcaaagagcaggcaccactcagaacgtggtgagtacagctcagctcagcactcagtcagtggtaacttgtgcccagccctgtgctaggcgctgacattaacaggagcaaccagggcccaattcctggccttggagctcaaatctttcctttgatttttgctcctgatcatcaaggccccagtggcaaccatgtggtaagtggccaaccaagccctacccagggtcacccaacacactctgccttgagcctctcctcagggtctattccttgcgtggattatgtggccgtagcatgttacagttcaaacatgtctccactaccctgttaagagcagcctgggaacgtacaggccatcaagactatttatttaaatacaaaaaaaggggaaaacacacacacggaaaaaaaattgtaagcactttttttgtaaaaccaatgtctgttttgttacatacctttcatgtcgtgctttgtaaatgtcttatttgtgtaataaagttaatgcaagtagaagtgctggcactgaaatcc

SEQ ID NO: 149277 - DNA, 2373 bp, Homo sapiens
  Payload ID: 9470
  Gene Symbol: LHX8
  Gene Name: LIM homeobox 8
  Uniprot ID: Q68G74
  ENST ID: ENST00000294638
  CDS Start-End: 665-1735
agaggcaagaggctagcggctggaccacttgtgctggagtggtaaagaactatcatgaatccatttactgaaagtgtccatttctgaactcaccctaaagaggacaaacaccgcaaagtagttaaaagtcaggcattcgcgtcggacgtctgggtttgaattctgccctggcttgactggaaacgcttcccctatttcttccgtagcggaccgggagagcttactggcgctctgcgaaccggctggaaagaaacaccgagtcactcgtacagactcttggtcgcagaacttggctttccgctattggtcctccagaaccgcttgaaacaactggccccagctggcgcatcagaccgcagtgaggaatgccgcggggcgggtggcgaaggcagggtctgcccgccagtggattcccgggtgtcccgcgtggagcaggcttgcccagctgggaagcccatcaaacctcagtcttggcccacagtgggagagagaccagtgggtcccagacggaggccctcgcccgcttttggcgacctccactggcgtgaataaaagcacccctctcttaccctcagaaactgtgggtagcaaggtataaaacggagtctgggaccggtaagtcccaaggtgagcccgtatacagctctgccatctctgaggggttatgcagattctgagcaggtgtcaggggctcatgtcagaggagtgcgggcggactacagccctggcggccgggaggactcgcaaaggcgccggggaagagggactggtgagccccgagggagcgggggacgaggactcgtgctcctcctcggccccgctgtccccgtcgtcctcgccccggtccatggcctcgggctccggctgccctcctggcaagtgtgtgtgcaacagttgcggcctggagatcgtggacaaataccttctcaaggtgaatgacctatgctggcatgtccggtgtctctcctgcagtgtttgcagaacctccctaggaaggcacaccagctgttatattaaagacaaagacattttctgcaaacttgattatttcagaaggtatggaactcgctgctctcgatgtgggagacacatccattctactgactgggtccggagagccaaggggaatgtctatcacttggcatgctttgcctgcttttcctgcaaaaggcaactttccacaggagaggagtttgctttggtggaagagaaagtcctctgcagagtacattatgactgcatgctggataatttaaaaagagaagtagaaaatgggaatgggattagtgtggaaggtgccctcctcacagagcaagatgttaaccatccaaaaccagcaaaaagagctcggaccagctttacagcagatcagcttcaggttatgcaagcacaatttgctcaggacaacaacccagatgcacagacactccagaaattggcagaaaggacaggcttgagcagacgtgtgatacaggtgtggtttcagaattgtagagcacgccacaagaaacacgtcagtcctaatcactcatcctccaccccagtcacagcagtcccaccctccaggctgtctccacccatgttagaagaaatggcttattctgcctacgtgccccaagatggaacgatgttaactgcgctgcatagttatatggatgctcattcaccaacaactcttggactccagcccttgttaccccattcaatgacacaactgccaataagtcatacctaattcttttttcagggatagacttgattaaggatataaatttgtcatttattatgtataaaataccattgaaaagatattactgttaattttttatttaacacctaaagcatttccaacatcactttgctgcccaggtatgtatctatagttggcctgcaagacacttttattaattcttcattttttgtaaaacttatgtttacaagaagaaaacaaatcaaaacattttttgtattgtctggaaatagttcactctagtgtgtatctgttaatttatttgtcatcaaaagagcactttgcctaaaagaaaggactgacaagtgtgcaaaatgtttacaatcttttgtgaaattgtagtttatcattagtttgtatctgtaagttattgtaataaatattacctgtattttttgttatatacaactttatactttgaagcttgtatctgtgaatttgcaactgaaatttattttgccaatgttttctgaatgaactgaataaagcttctgttgtagcatgccatgcaaacacattattgtgtttgtggttgatgaattatggctgtaaataacactatagtttaataagcccaccattctgagtttattaaacattttccattcttgtgaaaatttcaa

SEQ ID NO: 149278 - DNA, 1764 bp, Homo sapiens
  Payload ID: 9470
  Gene Symbol: LHX8
  Gene Name: LIM homeobox 8
  Uniprot ID: Q68G74
  ENST ID: ENST00000356261
  CDS Start-End: 86-1126
ctcacttaacctgagacatggagactgtaatttgggagatgaagcctcgagcctaaggcgctctcaggtccattgtcaggggctcatgtcagaggagtgcgggcggactacagccctggcggccgggaggactcgcaaaggcgccggggaagagggactggtgagccccgagggagcgggggacgaggactcgtgctcctcctcggccccgctgtccccgtcgtcctcgccccggtccatggcctcgggctccggctgccctcctggcaagtgtgtgtgcaacagttgcggcctggagatcgtggacaaataccttctcaaggtgaatgacctatgctggcatgtccggtgtctctcctgcagtgtttgcagaacctccctaggaaggcacaccagctgttatattaaagacaaagacattttctgcaaacttgattatttcagaaggtatggaactcgctgctctcgatgtgggagacacatccattctactgactgggtccggagagccaaggggaatgtctatcacttggcatgctttgcctgcttttcctgcaaaaggcaactttccacaggagaggagtttgctttggtggaagagaaagtcctctgcagagtacattatgactgcatgctggataatttaaaaagagaagtagaaaatgggaatgggattagtgtggaaggtgccctcctcacagagcaagatgttaaccatccaaaaccagcaaaaagagctcggaccagctttacagcagatcagcttcaggttatgcaagcacaatttgctcaggacaacaacccagatgcacagacactccagaaattggcagaaaggacaggcttgagcagacgtgtgatacaggtgtggtttcagaattgtagagcacgccacaagaaacacgtcagtcctaatcactcatcctccaccccagtcacagcagtcccaccctccaggctgtctccacccatgttagaagaaatggcttattctgcctacgtgccccaagatggaacgatgttaactgcgctgcatagttatatggatgctcattcaccaacaactcttggactccagcccttgttaccccattcaatgacacaactgccaataagtcatacctaattcttttttcagggatagacttgattaaggatataaatttgtcatttattatgtataaaataccattgaaaagatattactgttaattttttatttaacacctaaagcatttccaacatcactttgctgcccaggtatgtatctatagttggcctgcaagacacttttattaattcttcattttttgtaaaacttatgtttacaagaagaaaacaaatcaaaacattttttgtattgtctggaaatagttcactctagtgtgtatctgttaatttatttgtcatcaaaagagcactttgcctaaaagaaaggactgacaagtgtgcaaaatgtttacaatcttttgtgaaattgtagtttatcattagtttgtatctgtaagttattgtaataaatattacctgtattttttgttatatacaactttatactttgaagcttgtatctgtgaatttgcaactgaaatttattttgccaatgttttctgaatgaactgaataaagcttctgttgtagcatgccatgcaaacacattattgtgtttgtggttgatgaattatggctgtaaataacactatagtttaataagcccaccattctgagtttattaaacattttccattcttgtgaaaatttcaa

SEQ ID NO: 149279 - DNA, 7836 bp, Homo sapiens
  Payload ID: 9471
  Gene Symbol: LHX9
  Gene Name: LIM homeobox 9
  Uniprot ID: Q9NQ69
  ENST ID: ENST00000367387
  CDS Start-End: 426-1619
ggaacttgcaagcagccagggaacgctgaaaatagcacgtctttttctttctttgtgttcaaaactattttctttcttcaccagattttgttttcctccccccgctgcagttgtttcccattagtaactcgatctctcagagcagtaagattcgccttctacgcctctttttccctccgcccgaattgtttgttttctgcacatctccttcagggagccgctgaggcttccccccaactcttcccagttctttttgcttcccctcggccccccaagcagaccgatttccactccatctgtttcttctcctcctttctctccctctttccctccatcctcgagcgtctctgcgctcctacagggcagccctctctggtcccttgcctccttcactcggatgagctgaaagccccgggcgtgtgtatatggaaatagtggggtgccgagcagaagacaactcgtgtcctttccgccccccagccatgctctttcacgggatctccggaggccacatccaaggcatcatggaggagatggagcgcagatccaagactgaggcccgtctggccaaaggcgcccagctcaacggccgcgacgcgggcatgcccccgctcagcccggagaagcccgccctgtgcgccggctgcgggggcaagatctcggacaggtactatctgctggctgtggacaaacagtggcatctgagatgcctgaagtgctgtgaatgtaagctggccctcgagtccgagctcacctgctttgccaaggacggtagcatttactgcaaggaggattactacagaaggttctctgtgcagagatgtgcccgctgccaccttggcatttccgcctcggagatggtcatgcgcgcccgagactctgtctaccacctgagctgcttcacctgctccacttgcaacaagactctgaccacgggcgaccatttcggcatgaaggacagcctggtgtactgccgcgcccacttcgagaccctcttgcaaggagagtatccaccgcagctgagctacacggagctggcggccaagagcggcggcctggccctgccttacttcaacggtacgggcaccgtgcagaaagggcggccccggaagcggaagagcccagcgctgggagtggacatcgtcaattacaactcaggttgtaatgagaatgaggcagaccacttggaccgggaccagcagccttatccaccctcgcagaagaccaagcgcatgcgaacctctttcaagcatcaccagctccggaccatgaaatcctactttgccatcaaccacaacccggatgccaaggacctcaagcagcttgcccagaaaacaggtctgaccaaaagagttttgcaggtttggttccaaaacgcacgagccaaattcagaaggaaccttttgcggcaggagaatgggggtgttgataaagctgacggcacgtcgcttccggccccgccctcagcagacagcggagctctcactccacccggcactgcgaccactttaacagacctgaccaatcccactatcactgtagtgacatccgtgacctctaacatggacagccacgaatccggaagcccctcacaaactaccttaacaaaccttttctaacattggttttttttttttagtttttaaattcttcctcttctttttattattattctaattattattattttattatttacaagactttttttttcttctaacccacaagatatttggggaataaaaataacagcttggtgtgtagcatctgcagccacttggcaaatgagtttacagtattgtctcctttaagtgaatatattttgtctacaaagtgtatttggatttaaaaaaattaattaggtctttcagttggtaaggagagtttttgaataattctaataagtgcctcttaaaattgtatgttacttatttccagaatctcgaagaaaaaagaaaaaagagtggtattattatgggcaaataatcatattcccacttaaatgattaggttaataaagaaccagataattaattagttactttttaaatcttgcaattgtatgtgtgattatggagttttgaaaacgttacattttttaaatcttaaaactgaaaacttgtttttagtatttctatttcttacctgaactgttaattcaagtgaggaatatgatgaaataaaagcattaactacagacattttaaatagtaatgattaattaggtgagaaatctattacaggaatgtgacttttccttctcttaggggtgtacaactctaaaaactttttacttggttatttgtttttcaacatttgaaaaatacttaagctccctatgtatccatgaaaattccgcattgattttgacattccatacttttaacctcctaaagctaaaaacaatagctcggaaaccattctttctagttactttttttcccagggaaaatggaaataagcaaaatataatgttttaagaagtaaaaaaatcaatataatttaattaatagctctattaattggcttcagctgtaccatgatattgtatctggcattctatatgaataatgtttaaaatacccagcctggtagacttataccaacaattggttttgttttgttttattttattttgacataggttgacttatgtattgaaaataatttttctgatattagagatttgaagttattagtcttaaagtagataaactcagaagccttgtggatgctgatctgaatatatttcctagtttacagtagcatttttttcttttaatttaagctaaaatcttaatggtctgggcagtggtgaatgttcatctattacgcttctgttgtagttaaataccaattagattgtggatttcctaaaaaaataaaaaagaagtcaagatatatgtcttgctttagtggattgttaagaataactttgcacatattttccactttttggaccccttaaatctcctttggtggtcgaagtggctatttaatagattttaaaggtgtccttctggctgtataaatgtgtggttacatattgacagttcactgcccacattaaagtgcattattgtaacttttgctcagggtctttagaaaattagcacagaaagtagcttattttttaaaaaaagatgatggaagataagttaacactgtaacagaagaaaggtgtgattgccattatatatttagcaagtatggttatcatcttatatggagcttaaatcttgacttttcatacttctattacattttgggcatttaccactaaccagaccaaacaaccttggtaaggctgagatcttattaatacacttttacaggtaaaatattgacacttataaattttgttctttgacagaacaatatatggtactatatagatctactttattaagtagactaattataactcagttctcctatgtgccttatgatataacttggaagtaagtttgtgaaaaatcaggatatatgtgttgtttgttaaattaactgttttaagcccttttaacacctcactagttttgtactgttttacctcttatttctgaaactctttttatggtgtatcctgttagaggggacaaacatgtcatagaaagcagttgtgcactctttcaaatatagttgataaattcaataatcttatatattgagcttcgtgtttatagtacagtaagtggtctagcaaaattgtccatgtttctttgtttattgataaatgcattgtatagaaactatttcccctaaatatttatggaccaaacaattgtgatatatcctattaaatttgtgtgaataaaacattttgaatctaaggagttttctttcccatcagttttatttaagttttaaccgtactagtgtgttccagcatctatatgtaaaagcttttcaaatggtaatacaacattgttagaaatatttaaacatacaaatagtttttagacttccaaacttctgattcatatgaaatgttacacattgttgcacaggcagtgtaattcaacctagaaatacctttgaatatatttgcttataacaaaagtaatgccccactgatttgactcagtccaatttttagaataaaaaggctaattagcatataaagtaattgcatggaacgaaaccttaaatatgattaagatttcatgttaggtctattgagcacaaatggatatttgtaaatctaaatagaaattgcagacccctaaaagccaagttgctctgtagttaataaattgtcactatgatttttttcagggagaacaaatcttggggcattacagccaaacatcccgacgtttgaaaattccctaaagtattaaaagaaggggaaaagtttgatcggaaatccactgcagtgaagacaaagacactattaggttatgataatcatacattaaaaaatttattaagccaaaaaaaaagagagagagagagacttaaatgtcatttactgaatgttaacgaaacttgtgttctttatggtgtctaacacaactgaaggcctaaaattatgtggtttaaacaaaattagataaaccatgtacaaaaccagagcaacctggcagtaatatgcccaccccatatttgaaaaaaattattattgaaaaaaatttcacacatttgtcaagcacagttgtaaaataaagtccaaaacattcatttcacctgcttgctaatgtgtattagtcctgttaatggcattttccaactgtaaattcaaagaaaagctatcacccatttaagagtatagggatcaaaccccagtaattttagcattattgtttatcacttcctttttaaacagaaatctctgcatgcacttttacatatgtcacctctagtgtacacctctgtatgatgacttatctttgctgtttcttgtatgataaatagctttcattaataaacatttatttgatgcaaacatagttaactttatgttaaacacatgctgttgaaattaattttgaacacttaaagaggcagcacagtacatttacaacttgttatactaatgaaaaaatacaaacagcatagtgagattaaattctggtaatctaggataaaattacttacttggtttttaccttttcatgacttattttcatttgttgtattcaattgccacatgtattaaaaataaaaaacaaagtgaacccaaattacaacaaaataaaccttagaataaactattgtgtaaaatttcagcaacttttttagattactagggtaaaatttatagatcctatgtgagtttacatgtttgctatgcaatgaacaaatttattgatgtatacaaatatattctgaactataaaaagatccaatctttgcatagttcaattacatatgattattacaaacaaaaaagcaaatggaaagacagacaaatatttaggaatgaggttttttttaattgttaaagggaatatttgaagaataaaattttagctattcctatttagccgtatatccaaagcatatgttaaacaaactaacatatactttccagaaaatttttcattatgatgaaatttttattatatacaaatgaaccctatgtaaatgatgtaacttttatgaatgacagacattaaatatttcacttacatgtattctcagaattttgaatgttttcttaaatgctttcacttcctgaataataaaaagaaaaaattttaaagaagagagagcaacttactaataaaaaaaagcaatgcaccatgacaagtagactattttgagtgatcacaaatcatgctggttttgtcagtaacttgaatgtttatgcctcattgaaacctcatccacagctatagcaacttaaatagattttccaatgcatttccagccagtttattcaaatctttgccctacagtcttgccttctttccctgttctgtcacctgtggcaatttcatttagaagtattttggaacttcgcctggttttacagacctttaaatatttgtctggtatgtgaaatgcaggaagagaccagagagggaaagaacataactgaaattagacatctgaaaaaaaaatacaaatttgaaacaggcacattttttaaaaccaaaaaaaaaaaaaaaaagagagagagagagaaaggagtactaattatgtgagtgggaagaggaagcgtgtgatgcagagctggaaggtctgttgtgctttactgtgatgtaaagcagtctttgagtctgggcaactgcacatttactgtttggtgtggaatagaaaaatgtggacctcttagttgagagcaggacactaaattttcatagcttctacctcccagttgcctgggttagtctaacttctggcagattgatcttgggcaaaaagcttcactgagagttagtgtctgtgtgctttggttgaatagccaccttaatactgacttacatagtgggtaggtttttgatacctcaaataaggataaaactccataataaaggacccaaagcaaatacttttaaaacttaggtgatttttcatcacctaaaacataaatagctttatttagcaaaatcccagtggaatctaccacacattcttttataataacccttttttgggagtcaaagtattgtttttttattagccacatataaatatcatctcattttctgttgcagtgtgactgcaaggcatgttgtggtggaaatcattagaactgggaagctctggaatggaaatttggaatcgtgtcattctaggctcttaaagagaatattagggataatactgttgtaaaaaataaatataaacacctaattttgtatgaagttttgctatttaaattttaactatgttataaacaaagctagctttacttgtagagagttcgtgtactcttgagctcattcaatagcttttacattttgtagtctcttccacaacagggcaaaataagcacagtaggacttagtccaaattgacgaaatatcattgaattttctttgaaagcatatatatagataaactctggattggtcttttagatctgttttctgtttttagtaattgggaacaaactcttgatattaaaataaataaaatgcctctaatgtaaagccacagccctgcttctagccaatgtcaaaaataggaagtttttttaatggtttactgttgattttaaacattttaataatagtgctctgccctcacaacagtttttttttcagaataatattatgatttaccttattttaaaaataaattataattctaacttaaaatattattttaaatgcccctctgggaagatttccgttttattttatgaggttccctggcagttgggggggtggtgaggttgggagagggaaagtttagaactgtgcatgatactcaaggaaaagtctatgaatatgatgtaagtagtaacattattgccacaactaaatttctgtttaactgtgttgcagaatatgataatgtcatctaacatcactccctacttgcaacattcctctgtgaatattaatatagttaaccctcccttattatgtatcatatcaataagtttctcttcccttggattaatttttgcttctttgcattacattttatcttgtgctaagataacaaaaagcaagcaagaataaagatccagatattagccatatgtagaaagttcctggtgtgcatttctgtgtacttttccctcacatattagaattgtcaggaaagtttttttcttttggaactttctgtttacattttgcatgatcttataaattaacctgaagagtaattggataccttttatggttatttgaaaataaaatttgctacaaataa

SEQ ID NO: 149280 - DNA, 758 bp, Homo sapiens
  Payload ID: 9471
  Gene Symbol: LHX9
  Gene Name: LIM homeobox 9
  ENST ID: ENST00000367388
  CDS Start-End: 191-355
acagctcaggcaggagcagtccccaacccaatctacaggcactgggaacttgcaagcagccagggaacgctgaaaatagcacgtctttttctttctttgtgttcaaaactattttctttcttcaccagattttgttttcctccccccgctgcagttgtttcccattagtaactcgatctctcagagcaccatgctctttcacgggatctccggaggccacatccaaggcatcatggaggagatggagcgcagatccaagactgaggcccgtctggccaaaggcgcccagctcaacggccgcgacgcggcgtctccccggcgaggatccgcagctccgagggcaagctgggcataagcaataggaggacggcgcgctgccgaggcgtccgagccaagcaggagcccaggtggccttagtctctgggcctgatgaccggacctgtggagtagattccgacgcgactgggtcatttccagttctctagacgctcggggcttgggacccctaaccgagagaatctcagggtttctggcatcccgactcagtccctctaaggagacagcactacgtttagcgccaggacccggcgggtgtcatgtgtagggggaaatcaaataaaacatacggaggagcgcggcacccagtcgaaacgcatgaactttataaccaacccttaaacaagctaatcaaccaccactgtttctactatccataataataaagtcatgtcctcttaataaagaaaactaattactta

SEQ ID NO: 149281 - DNA, 7413 bp, Homo sapiens
  Payload ID: 9471
  Gene Symbol: LHX9
  Gene Name: LIM homeobox 9
  Uniprot ID: Q9NQ69
  ENST ID: ENST00000367390
  CDS Start-End: 28-1194
gcgtgatccactccttttcctctaagaatgctgaacggtaccactctagaggcagccatgctctttcacgggatctccggaggccacatccaaggcatcatggaggagatggagcgcagatccaagactgaggcccgtctggccaaaggcgcccagctcaacggccgcgacgcgggcatgcccccgctcagcccggagaagcccgccctgtgcgccggctgcgggggcaagatctcggacaggtactatctgctggctgtggacaaacagtggcatctgagatgcctgaagtgctgtgaatgtaagctggccctcgagtccgagctcacctgctttgccaaggacggtagcatttactgcaaggaggattactacagaaggttctctgtgcagagatgtgcccgctgccaccttggcatttccgcctcggagatggtcatgcgcgcccgagactctgtctaccacctgagctgcttcacctgctccacttgcaacaagactctgaccacgggcgaccatttcggcatgaaggacagcctggtgtactgccgcgcccacttcgagaccctcttgcaaggagagtatccaccgcagctgagctacacggagctggcggccaagagcggcggcctggccctgccttacttcaacggtacgggcaccgtgcagaaagggcggccccggaagcggaagagcccagcgctgggagtggacatcgtcaattacaactcaggttgtaatgagaatgaggcagaccacttggaccgggaccagcagccttatccaccctcgcagaagaccaagcgcatgcgaacctctttcaagcatcaccagctccggaccatgaaatcctactttgccatcaaccacaacccggatgccaaggacctcaagcagcttgcccagaaaacaggtctgaccaaaagagttttgcaggtttggttccaaaacgcacgagccaaattcagaaggaaccttttgcggcaggagaatgggggtgttgataaagctgacggcacgtcgcttccggccccgccctcagcagacagcggagctctcactccacccggcactgcgaccactttaacagacctgaccaatcccactatcactgtagtgacatccgtgacctctaacatggacagccacgaatccggaagcccctcacaaactaccttaacaaaccttttctaacattggttttttttttttagtttttaaattcttcctcttctttttattattattctaattattattattttattatttacaagactttttttttcttctaacccacaagatatttggggaataaaaataacagcttggtgtgtagcatctgcagccacttggcaaatgagtttacagtattgtctcctttaagtgaatatattttgtctacaaagtgtatttggatttaaaaaaattaattaggtctttcagttggtaaggagagtttttgaataattctaataagtgcctcttaaaattgtatgttacttatttccagaatctcgaagaaaaaagaaaaaagagtggtattattatgggcaaataatcatattcccacttaaatgattaggttaataaagaaccagataattaattagttactttttaaatcttgcaattgtatgtgtgattatggagttttgaaaacgttacattttttaaatcttaaaactgaaaacttgtttttagtatttctatttcttacctgaactgttaattcaagtgaggaatatgatgaaataaaagcattaactacagacattttaaatagtaatgattaattaggtgagaaatctattacaggaatgtgacttttccttctcttaggggtgtacaactctaaaaactttttacttggttatttgtttttcaacatttgaaaaatacttaagctccctatgtatccatgaaaattccgcattgattttgacattccatacttttaacctcctaaagctaaaaacaatagctcggaaaccattctttctagttactttttttcccagggaaaatggaaataagcaaaatataatgttttaagaagtaaaaaaatcaatataatttaattaatagctctattaattggcttcagctgtaccatgatattgtatctggcattctatatgaataatgtttaaaatacccagcctggtagacttataccaacaattggttttgttttgttttattttattttgacataggttgacttatgtattgaaaataatttttctgatattagagatttgaagttattagtcttaaagtagataaactcagaagccttgtggatgctgatctgaatatatttcctagtttacagtagcatttttttcttttaatttaagctaaaatcttaatggtctgggcagtggtgaatgttcatctattacgcttctgttgtagttaaataccaattagattgtggatttcctaaaaaaataaaaaagaagtcaagatatatgtcttgctttagtggattgttaagaataactttgcacatattttccactttttggaccccttaaatctcctttggtggtcgaagtggctatttaatagattttaaaggtgtccttctggctgtataaatgtgtggttacatattgacagttcactgcccacattaaagtgcattattgtaacttttgctcagggtctttagaaaattagcacagaaagtagcttattttttaaaaaaagatgatggaagataagttaacactgtaacagaagaaaggtgtgattgccattatatatttagcaagtatggttatcatcttatatggagcttaaatcttgacttttcatacttctattacattttgggcatttaccactaaccagaccaaacaaccttggtaaggctgagatcttattaatacacttttacaggtaaaatattgacacttataaattttgttctttgacagaacaatatatggtactatatagatctactttattaagtagactaattataactcagttctcctatgtgccttatgatataacttggaagtaagtttgtgaaaaatcaggatatatgtgttgtttgttaaattaactgttttaagcccttttaacacctcactagttttgtactgttttacctcttatttctgaaactctttttatggtgtatcctgttagaggggacaaacatgtcatagaaagcagttgtgcactctttcaaatatagttgataaattcaataatcttatatattgagcttcgtgtttatagtacagtaagtggtctagcaaaattgtccatgtttctttgtttattgataaatgcattgtatagaaactatttcccctaaatatttatggaccaaacaattgtgatatatcctattaaatttgtgtgaataaaacattttgaatctaaggagttttctttcccatcagttttatttaagttttaaccgtactagtgtgttccagcatctatatgtaaaagcttttcaaatggtaatacaacattgttagaaatatttaaacatacaaatagtttttagacttccaaacttctgattcatatgaaatgttacacattgttgcacaggcagtgtaattcaacctagaaatacctttgaatatatttgcttataacaaaagtaatgccccactgatttgactcagtccaatttttagaataaaaaggctaattagcatataaagtaattgcatggaacgaaaccttaaatatgattaagatttcatgttaggtctattgagcacaaatggatatttgtaaatctaaatagaaattgcagacccctaaaagccaagttgctctgtagttaataaattgtcactatgatttttttcagggagaacaaatcttggggcattacagccaaacatcccgacgtttgaaaattccctaaagtattaaaagaaggggaaaagtttgatcggaaatccactgcagtgaagacaaagacactattaggttatgataatcatacattaaaaaatttattaagccaaaaaaaaagagagagagagagacttaaatgtcatttactgaatgttaacgaaacttgtgttctttatggtgtctaacacaactgaaggcctaaaattatgtggtttaaacaaaattagataaaccatgtacaaaaccagagcaacctggcagtaatatgcccaccccatatttgaaaaaaattattattgaaaaaaatttcacacatttgtcaagcacagttgtaaaataaagtccaaaacattcatttcacctgcttgctaatgtgtattagtcctgttaatggcattttccaactgtaaattcaaagaaaagctatcacccatttaagagtatagggatcaaaccccagtaattttagcattattgtttatcacttcctttttaaacagaaatctctgcatgcacttttacatatgtcacctctagtgtacacctctgtatgatgacttatctttgctgtttcttgtatgataaatagctttcattaataaacatttatttgatgcaaacatagttaactttatgttaaacacatgctgttgaaattaattttgaacacttaaagaggcagcacagtacatttacaacttgttatactaatgaaaaaatacaaacagcatagtgagattaaattctggtaatctaggataaaattacttacttggtttttaccttttcatgacttattttcatttgttgtattcaattgccacatgtattaaaaataaaaaacaaagtgaacccaaattacaacaaaataaaccttagaataaactattgtgtaaaatttcagcaacttttttagattactagggtaaaatttatagatcctatgtgagtttacatgtttgctatgcaatgaacaaatttattgatgtatacaaatatattctgaactataaaaagatccaatctttgcatagttcaattacatatgattattacaaacaaaaaagcaaatggaaagacagacaaatatttaggaatgaggttttttttaattgttaaagggaatatttgaagaataaaattttagctattcctatttagccgtatatccaaagcatatgttaaacaaactaacatatactttccagaaaatttttcattatgatgaaatttttattatatacaaatgaaccctatgtaaatgatgtaacttttatgaatgacagacattaaatatttcacttacatgtattctcagaattttgaatgttttcttaaatgctttcacttcctgaataataaaaagaaaaaattttaaagaagagagagcaacttactaataaaaaaaagcaatgcaccatgacaagtagactattttgagtgatcacaaatcatgctggttttgtcagtaacttgaatgtttatgcctcattgaaacctcatccacagctatagcaacttaaatagattttccaatgcatttccagccagtttattcaaatctttgccctacagtcttgccttctttccctgttctgtcacctgtggcaatttcatttagaagtattttggaacttcgcctggttttacagacctttaaatatttgtctggtatgtgaaatgcaggaagagaccagagagggaaagaacataactgaaattagacatctgaaaaaaaaatacaaatttgaaacaggcacattttttaaaaccaaaaaaaaaaaaaaaaagagagagagagagaaaggagtactaattatgtgagtgggaagaggaagcgtgtgatgcagagctggaaggtctgttgtgctttactgtgatgtaaagcagtctttgagtctgggcaactgcacatttactgtttggtgtggaatagaaaaatgtggacctcttagttgagagcaggacactaaattttcatagcttctacctcccagttgcctgggttagtctaacttctggcagattgatcttgggcaaaaagcttcactgagagttagtgtctgtgtgctttggttgaatagccaccttaatactgacttacatagtgggtaggtttttgatacctcaaataaggataaaactccataataaaggacccaaagcaaatacttttaaaacttaggtgatttttcatcacctaaaacataaatagctttatttagcaaaatcccagtggaatctaccacacattcttttataataacccttttttgggagtcaaagtattgtttttttattagccacatataaatatcatctcattttctgttgcagtgtgactgcaaggcatgttgtggtggaaatcattagaactgggaagctctggaatggaaatttggaatcgtgtcattctaggctcttaaagagaatattagggataatactgttgtaaaaaataaatataaacacctaattttgtatgaagttttgctatttaaattttaactatgttataaacaaagctagctttacttgtagagagttcgtgtactcttgagctcattcaatagcttttacattttgtagtctcttccacaacagggcaaaataagcacagtaggacttagtccaaattgacgaaatatcattgaattttctttgaaagcatatatatagataaactctggattggtcttttagatctgttttctgtttttagtaattgggaacaaactcttgatattaaaataaataaaatgcctctaatgtaaagccacagccctgcttctagccaatgtcaaaaataggaagtttttttaatggtttactgttgattttaaacattttaataatagtgctctgccctcacaacagtttttttttcagaataatattatgatttaccttattttaaaaataaattataattctaacttaaaatattattttaaatgcccctctgggaagatttccgttttattttatgaggttccctggcagttgggggggtggtgaggttgggagagggaaagtttagaactgtgcatgatactcaaggaaaagtctatgaatatgatgtaagtagtaacattattgccacaactaaatttctgtttaactgtgttgcagaatatgataatgtcatctaacatcactccctacttgcaacattcctctgtgaatattaatatagttaaccctcccttattatgtatcatatcaataagtttctcttcccttggattaatttttgcttctttgcattacattttatcttgtgctaagataacaaaaagcaagcaagaataaagatccagatattagccatatgtagaaagttcctggtgtgcatttctgtgtacttttccctcacatattagaattgtcaggaaagtttttttcttttggaactttctgtttacattttgcatgatcttataaattaacctgaagagtaattggataccttttatggttatttgaaaataaaatttgctacaaataaga

SEQ ID NO: 149282 - DNA, 1623 bp, Homo sapiens
  Payload ID: 9471
  Gene Symbol: LHX9
  Gene Name: LIM homeobox 9
  Uniprot ID: Q9NQ69
  ENST ID: ENST00000367391
  CDS Start-End: 42-1007
caaccaccattacggcgtgatccactccttttcctctaagaatgctgaacggtaccactctagaggcagccatgctctttcacgggatctccggaggccacatccaaggcatcatggaggagatggagcgcagatccaagactgaggcccgtctggccaaaggcgcccagctcaacggccgcgacgcgggcatgcccccgctcagcccggagaagcccgccctgtgcgccggctgcgggggcaagatctcggacaggtactatctgctggctgtggacaaacagtggcatctgagatgcctgaagtgctgtgaatgtaagctggccctcgagtccgagctcacctgctttgccaaggacggtagcatttactgcaaggaggattactacagaaggttctctgtgcagagatgtgcccgctgccaccttggcatttccgcctcggagatggtcatgcgcgcccgagactctgtctaccacctgagctgcttcacctgctccacttgcaacaagactctgaccacgggcgaccatttcggcatgaaggacagcctggtgtactgccgcgcccacttcgagaccctcttgcaaggagagtatccaccgcagctgagctacacggagctggcggccaagagcggcggcctggccctgccttacttcaacggtacgggcaccgtgcagaaagggcggccccggaagcggaagagcccagcgctgggagtggacatcgtcaattacaactcaggttgtaatgagaatgaggcagaccacttggaccgggaccagcagccttatccaccctcgcagaagaccaagcgcatgcgaacctctttcaagcatcaccagctccggaccatgaaatcctactttgccatcaaccacaacccggatgccaaggacctcaagcagcttgcccagaaaacaggtctgaccaaaagagttttgcagggagaacaaatcttggggcattacagccaaacatcccgacgtttgaaaattccctaaagtattaaaagaaggggaaaagtttgatcggaaatccactgcagtgaagacaaagacactattaggttatgataatcatacattaaaaaatttattaagccaaaaaaaaagagagagagagagacttaaatgtcatttactgaatgttaacgaaacttgtgttctttatggtgtctaacacaactgaaggcctaaaattatgtggtttaaacaaaattagataaaccatgtacaaaaccagagcaacctggcagtaatatgcccaccccatatttgaaaaaaattattattgaaaaaaatttcacacatttgtcaagcacagttgtaaaataaagtccaaaacattcatttcacctgcttgctaatgtgtattagtcctgttaatggcattttccaactgtaaattcaaagaaaagctatcacccatttaagagtatagggatcaaaccccagtaattttagcattattgtttatcacttcctttttaaacagaaatctctgcatgcacttttacatatgtcacctctagtgtacacctctgtatgatgacttatctttgctgtttcttgtatgataaatagctttcattaataaacatttatttgatgcaaacat

SEQ ID NO: 149283 - DNA, 2144 bp, Homo sapiens
  Payload ID: 9471
  Gene Symbol: LHX9
  Gene Name: LIM homeobox 9
  ENST ID: ENST00000561173
  CDS Start-End: 843-1853
tcatcctctcacttctttttttctttccttcttccctctctccctctctccctggcttttctcccgtcatctttctagctttggccacagttcccggtcgggctcccccgggcggagggaagcgggtctgcggccgggcggctcttgtgaggtatctaggatgtgccaggacacaggcaccgcagtcctgggaaaggcggcgggaagtagtggggaacgcaggctgacgaaggggacggaaggaacagagagcggccggcgcgtcctcctctctgggtaaagccgcgttggttcctgccgcagcgctgtgcttcggactcctagggggcctctggccgtttgaatgaatcgacaatatcagagtattgtggacactttttaatggggccggggaggggccgccgctgccgagaactgagggcgacagaacaatcccacctcttgtgaggagcaggtctgccattctgcttgtcagttctcaccttcccctcctccacggcaaagagtccctttcacacccttctgagtgtgcgggtgcgcccagttttacaagtcctctgtcctgccagggtagtgggagaagcacgcgatggggctagcgcccagtcctgcgggggcaggcgccaagctcccgggagtccgcaagtcgcttcctatattggcaagcttcaaatgagacattagaatctccggcaaccttccttcaaacctgaaccggggaagagaataagccgccctatggccaaggcgcaattgcgtacccgtgtgtacaggtccatgccctgtcccctacactctaattttctcaaagaaaattgttttgccaaaagtaaccctgagaaatgcagacgctccaaacgccctctccacttcggatgaagccagcatctagtagggtctccggccctcaagaagccatgctctttcacgggatctccggaggccacatccaaggcatcatggaggagatggagcgcagatccaagactgaggcccgtctggccaaaggcgcccagctcaacggccgcgacgcgggcatgcccccgctcagcccggagaagcccgccctgtgcgccggctgcgggggcaagatctcggacaggtactatctgctggctgtggacaaacagtggcatctgagatgcctgaagtgctgtgaatgtaagctggccctcgagtccgagctcacctgctttgccaaggacggtagcatttactgcaaggaggattactacagaaggttctctgtgcagagatgtgcccgctgccaccttggcatttccgcctcggagatggtcatgcgcgcccgagactctgtctaccacctgagctgcttcacctgctccacttgcaacaagactctgaccacgggcgaccatttcggcatgaaggacagcctggtgtactgccgcgcccacttcgagaccctcttgcaaggagagtatccaccgcagctgagctacacggagctggcggccaagagcggcggcctggccctgccttacttcaacggtacgggcaccgtgcagaaagggcggccccggaagcggaagagcccagcgctgggagtggacatcgtcaattacaactcaggttgtaatgagaatgaggcagaccacttggaccgggaccagcagccttatccaccctcgcagaagaccaagcgcatgcgaacctctttcaagcatcaccagctccggaccatgaaatcctactttgccatcaaccacaacccggatgccaaggacctcaagcagcttgcccagaaaacaggtctgaccaaaagagttttgcagggagaacaaatcttggggcattacagccaaacatcccgacgtttgaaaattccctaaagtattaaaagaaggggaaaagtttgatcggaaatccactgcagtgaagacaaagacactattaggttatgataatcatacattaaaaaatttattaagccaaaaaaaaagagagagagagagacttaaatgtcatttactgaatgttaacgaaacttgtgttctttatggtgtctaacacaactgaaggcctaaaattatgtggtttaaacaaaattagataaaccatgtacaaaaccagagcaacctggcagtaatatgcccaccccatatttgaaaaaaattattatt

SEQ ID NO: 149284 - DNA, 259 bp, Homo sapiens
  Payload ID: 9471
  Gene Symbol: LHX9
  Gene Name: LIM homeobox 9
  ENST ID: ENST00000475727
  CDS Start-End: 181-259
gtgcaaccaccattacggcgtgatccactccttttcctctaagaatgctgaacggtaccactctagaggcagtcctaacccagcgcagccgtttctgcgcctgatctcagcggacgcagtgcgggacttctccctttatttctgcagagctgagggcaggcggcgcaacaaatctcagccatgctctttcacgggatctccggaggccacatccaaggcatcatggaggagatggagcgcagatccaagactgaggccc

SEQ ID NO: 149285 - DNA, 431 bp, Homo sapiens
  Payload ID: 9471
  Gene Symbol: LHX9
  Gene Name: LIM homeobox 9
  ENST ID: ENST00000606127
  CDS Start-End: 321-431
ggaagggctgaacgcaacctcagagcgtttctctgggcaccggcccgcgtctgtgccctctgcccaccccttcctcctccccctcccgatttggaagcataaacagaaaataaaagacaggtggagagagctaagggtcagagggggaccctcagcgagacgcagggactggcccgcacctctggccgccgcctcccgccgagaaccgagttctagttggggaaacgtctgacatctggacatcaagtgcaaccaccattacggcgtgatccactccttttcctctaagaatgctgaacggtaccactctagaggcagccatgctctttcacgggatctccggaggccacatccaaggcatcatggaggagatggagcgcagatccaagactgaggcccgtctggccaaaggcgcccagctcaacggccgc

SEQ ID NO: 149286 - DNA, 3350 bp, Homo sapiens
  Payload ID: 9472
  Gene Symbol: LMX1A
  Gene Name: LIM homeobox transcription factor 1, alpha
  Uniprot ID: Q8TE12
  ENST ID: ENST00000294816
  CDS Start-End: 195-1343
ctcttttgcttctgcagacattcccggcactggccgactggcgggaggacctccccgcgcgccccgcacaccggctcctgcgcgcaccccaacagagcgcagcgccaggagtccagaagcgggcgggacgccctccgggtcccttacagtgccccttctcgacctggggcaggtcctcccggcccggcccgaacatgctggacggcctaaagatggaggagaacttccaaagcgcgatcgacacctcggcctccttctcctcgctgctgggcagagcggtgagccccaagtctgtctgcgagggctgtcagcgggtcatcttggacaggtttctgctgcggctcaacgacagcttctggcatgagcagtgcgtgcagtgcgcctcctgcaaagagcccctggagaccacctgcttctaccgggacaagaagctgtactgcaagtatgactacgagaagctgtttgctgttaaatgtgggggctgcttcgaggccatcgctcccaatgagtttgttatgcgggcccagaagagtgtataccacctgagctgcttctgctgctgtgtctgcgagcgacagcttcagaagggtgatgagtttgtcctgaaggaggggcagctgctctgcaaaggggactatgagaaggagcgggagctgctcagcctggtgagcccagcagcctcagactcaggtaaaagtgatgatgaagaaagtctctgcaagtcagcccatggggcagggaaaggaactgctgaggaaggcaaggaccataagcgccccaaacgtccgagaaccatcttgacaactcaacagaggcgagcattcaaggcctcatttgaagtatcctccaagccctgcaggaaggtgagagagactctggctgcagagacagggctgagtgtccgtgtcgtccaggtgtggttccaaaaccagagagcgaagatgaagaagctggccaggcgacagcagcagcagcagcaagatcagcagaacacccagaggctgagctctgctcagacaaacggtggtgggagtgctgggatggaaggaatcatgaacccctacacggctctgcccaccccacagcagctcctggccatcgagcagagtgtctacagctcagatcccttccgacagggtctcaccccaccccagatgcctggagaccacatgcacccttatggtgccgagccccttttccatgacctggatagcgacgacacctccctcagtaacctgggtgattgtttcctagcaacctcagaagctgggcctctgcagtccagagtgggaaaccccattgaccatctgtactccatgcagaattcttacttcacatcttgagtcttcccctagagttctgtgactaggctcccatatggaacaaccatattctttgaggggtcactggctttaggacagggaggccagggaagaggtgggttggggagggagttttgttggggatgctgttgtataatgatatggtgtagctcagcatttccaaagactgaatacattatggattgcatagtttaatgtttctaataagagtcttagcattagatatgaagacgtgtttatcattaaggacagagacttttaatatagacattctcatgcaaactagatacttagggactcctaacaacttcccaccatgtcggggaagctcttgtcaagaggtgcatatgtctatccatctacacaccaatagacagaaggacagatagatagatgtgtgtgtgtgagtgtgtaacctttcgtattttaccctcaaagtttattcctaattataacagacaccaactgtacagcaaaagtaactttattttcagtgtgaactatatttaaggaaatgcttgatgcacttaagttataaaatgagataatttacttttataaactttatttttagcttgacaagacttgtcagcagggcagagagggctgctccacctagccccatagctttgagtgctggggttcattctgttttcagagtgtctttcagatctggaaagaaattctgtgtggctgatggtgttctctcttgcattcttgctctctttggggttgaatcactgggcaggggtgggacagaataatctctgatcatgttctgagaaaatgtaaagcccagactcctgggctttcttttaaattctgacaagtggttgttgggcagtgctaggatgattggttcagctcttgagcttcagcatctgcaaatgtggatgaggctaatagtatgtacctacctcactgggaaacaccaaggcttaattcattcccaggacacatgagcagggctgagactaatatctgatatttgtttaagatacaaccaggccactcacttggcaaaggagggtacatagggttgcagagcaggagggctcctgaactccagagggcagttctgcctgctgaagtccctctgcaaagcctgtgctgaaggagacaccagctcagagcagttcagagggatcccagagtcccagagtggggaggaggtgaaggctgaggggatagaggagggcctggtggtgttctagagcagggttgggcaaactcctgcttgcgggcctgctttctatggcttgccagcaaagaatggtttttactttttttttgaggtcattaaaaaaaaggagaagaagaatatataacaggctgtctgtggcctggaaagcctgaaatatttgctatctgtattgtctggcccttacagaaaaagtttggggccccttgttttagagggtctgtttctaaagaacctcatggcgctcatagaggcagaaggttccagtggaaacccttggctcttccttccaactcactcctctgatcctcggcacagaagacccagcagccattgtacatggggacagttccacaccctggtctccagttgcggtgctaggatggtattgttctgtgctaggaagtctcctgggaacccagaatgagttggtggggaagacagcgggtcactgtggacccatccaggaggggccaggataggcttggcctcatttctggggacatcattggagacttgaacacagagacacgtccctatcactctggcaaggccagagggaacatgtccccttatggtagagtctatgttgtgtgatttttgtgctcttgtttataatttatgcaaaccaccaagaaacccaaaccagtctgatgagtgaaaattatgcagatgctgtatggccccacaggtttctgtggtaaagaccagttggagaatgtaggagatactatgtgagtgaaaatgaatagagatccttattccactccttaatggcataccaagatgaaattaaaatctcttac

SEQ ID NO: 149287 - DNA, 3545 bp, Homo sapiens
  Payload ID: 9472
  Gene Symbol: LMX1A
  Gene Name: LIM homeobox transcription factor 1, alpha
  Uniprot ID: Q8TE12
  ENST ID: ENST00000342310
  CDS Start-End: 384-1532
agaagctgcaggatccgccccggcgaagcagggccgactcgcacccaggaccctgggcctctgccttccctcctagccttggagaagcaactggccctctcctcccgctgaggagcgacgcgggctggtaggacgtcccgggaaggccggcagctcgcgaccacgtcccggcccagcctgggcgcgccgaggagcagagccagcggccggcgttcgctccggctccctccccggcgctccgaagccgagggcggctcctccggctgcagtctcgggggcgacgccttcccgggcagaagcttccagcagcgctccgcaacttctctctgctccagtcactgggagagagctcgcctaccaggtcctcccggcccggcccgaacatgctggacggcctaaagatggaggagaacttccaaagcgcgatcgacacctcggcctccttctcctcgctgctgggcagagcggtgagccccaagtctgtctgcgagggctgtcagcgggtcatcttggacaggtttctgctgcggctcaacgacagcttctggcatgagcagtgcgtgcagtgcgcctcctgcaaagagcccctggagaccacctgcttctaccgggacaagaagctgtactgcaagtatgactacgagaagctgtttgctgttaaatgtgggggctgcttcgaggccatcgctcccaatgagtttgttatgcgggcccagaagagtgtataccacctgagctgcttctgctgctgtgtctgcgagcgacagcttcagaagggtgatgagtttgtcctgaaggaggggcagctgctctgcaaaggggactatgagaaggagcgggagctgctcagcctggtgagcccagcagcctcagactcaggtaaaagtgatgatgaagaaagtctctgcaagtcagcccatggggcagggaaaggaactgctgaggaaggcaaggaccataagcgccccaaacgtccgagaaccatcttgacaactcaacagaggcgagcattcaaggcctcatttgaagtatcctccaagccctgcaggaaggtgagagagactctggctgcagagacagggctgagtgtccgtgtcgtccaggtgtggttccaaaaccagagagcgaagatgaagaagctggccaggcgacagcagcagcagcagcaagatcagcagaacacccagaggctgagctctgctcagacaaacggtggtgggagtgctgggatggaaggaatcatgaacccctacacggctctgcccaccccacagcagctcctggccatcgagcagagtgtctacagctcagatcccttccgacagggtctcaccccaccccagatgcctggagaccacatgcacccttatggtgccgagccccttttccatgacctggatagcgacgacacctccctcagtaacctgggtgattgtttcctagcaacctcagaagctgggcctctgcagtccagagtgggaaaccccattgaccatctgtactccatgcagaattcttacttcacatcttgagtcttcccctagagttctgtgactaggctcccatatggaacaaccatattctttgaggggtcactggctttaggacagggaggccagggaagaggtgggttggggagggagttttgttggggatgctgttgtataatgatatggtgtagctcagcatttccaaagactgaatacattatggattgcatagtttaatgtttctaataagagtcttagcattagatatgaagacgtgtttatcattaaggacagagacttttaatatagacattctcatgcaaactagatacttagggactcctaacaacttcccaccatgtcggggaagctcttgtcaagaggtgcatatgtctatccatctacacaccaatagacagaaggacagatagatagatgtgtgtgtgtgagtgtgtaacctttcgtattttaccctcaaagtttattcctaattataacagacaccaactgtacagcaaaagtaactttattttcagtgtgaactatatttaaggaaatgcttgatgcacttaagttataaaatgagataatttacttttataaactttatttttagcttgacaagacttgtcagcagggcagagagggctgctccacctagccccatagctttgagtgctggggttcattctgttttcagagtgtctttcagatctggaaagaaattctgtgtggctgatggtgttctctcttgcattcttgctctctttggggttgaatcactgggcaggggtgggacagaataatctctgatcatgttctgagaaaatgtaaagcccagactcctgggctttcttttaaattctgacaagtggttgttgggcagtgctaggatgattggttcagctcttgagcttcagcatctgcaaatgtggatgaggctaatagtatgtacctacctcactgggaaacaccaaggcttaattcattcccaggacacatgagcagggctgagactaatatctgatatttgtttaagatacaaccaggccactcacttggcaaaggagggtacatagggttgcagagcaggagggctcctgaactccagagggcagttctgcctgctgaagtccctctgcaaagcctgtgctgaaggagacaccagctcagagcagttcagagggatcccagagtcccagagtggggaggaggtgaaggctgaggggatagaggagggcctggtggtgttctagagcagggttgggcaaactcctgcttgcgggcctgctttctatggcttgccagcaaagaatggtttttactttttttttgaggtcattaaaaaaaaggagaagaagaatatataacaggctgtctgtggcctggaaagcctgaaatatttgctatctgtattgtctggcccttacagaaaaagtttggggccccttgttttagagggtctgtttctaaagaacctcatggcgctcatagaggcagaaggttccagtggaaacccttggctcttccttccaactcactcctctgatcctcggcacagaagacccagcagccattgtacatggggacagttccacaccctggtctccagttgcggtgctaggatggtattgttctgtgctaggaagtctcctgggaacccagaatgagttggtggggaagacagcgggtcactgtggacccatccaggaggggccaggataggcttggcctcatttctggggacatcattggagacttgaacacagagacacgtccctatcactctggcaaggccagagggaacatgtccccttatggtagagtctatgttgtgtgatttttgtgctcttgtttataatttatgcaaaccaccaagaaacccaaaccagtctgatgagtgaaaattatgcagatgctgtatggccccacaggtttctgtggtaaagaccagttggagaatgtaggagatactatgtgagtgaaaatgaatagagatccttattccactccttaatggcataccaagatgaaattaaaatctcttacaaatga

SEQ ID NO: 149288 - DNA, 1342 bp, Homo sapiens
  Payload ID: 9472
  Gene Symbol: LMX1A
  Gene Name: LIM homeobox transcription factor 1, alpha
  Uniprot ID: Q8TE12
  ENST ID: ENST00000367893
  CDS Start-End: 188-1336
ctgatctctcctcccaccctacattctcttggctggaccctatcctcctggctgattctggtcgccctggacactccctcagttctttcccaggagtgcggtggctgctggcgccgagtcccagcgggcacggacgtcagacgcatcgtttcttctcctctacaggtcctcccggcccggcccgaacatgctggacggcctaaagatggaggagaacttccaaagcgcgatcgacacctcggcctccttctcctcgctgctgggcagagcggtgagccccaagtctgtctgcgagggctgtcagcgggtcatcttggacaggtttctgctgcggctcaacgacagcttctggcatgagcagtgcgtgcagtgcgcctcctgcaaagagcccctggagaccacctgcttctaccgggacaagaagctgtactgcaagtatgactacgagaagctgtttgctgttaaatgtgggggctgcttcgaggccatcgctcccaatgagtttgttatgcgggcccagaagagtgtataccacctgagctgcttctgctgctgtgtctgcgagcgacagcttcagaagggtgatgagtttgtcctgaaggaggggcagctgctctgcaaaggggactatgagaaggagcgggagctgctcagcctggtgagcccagcagcctcagactcaggtaaaagtgatgatgaagaaagtctctgcaagtcagcccatggggcagggaaaggaactgctgaggaaggcaaggaccataagcgccccaaacgtccgagaaccatcttgacaactcaacagaggcgagcattcaaggcctcatttgaagtatcctccaagccctgcaggaaggtgagagagactctggctgcagagacagggctgagtgtccgtgtcgtccaggtgtggttccaaaaccagagagcgaagatgaagaagctggccaggcgacagcagcagcagcagcaagatcagcagaacacccagaggctgagctctgctcagacaaacggtggtgggagtgctgggatggaaggaatcatgaacccctacacggctctgcccaccccacagcagctcctggccatcgagcagagtgtctacagctcagatcccttccgacagggtctcaccccaccccagatgcctggagaccacatgcacccttatggtgccgagccccttttccatgacctggatagcgacgacacctccctcagtaacctgggtgattgtttcctagcaacctcagaagctgggcctctgcagtccagagtgggaaaccccattgaccatctgtactccatgcagaattcttacttcacatcttgagtcttc

SEQ ID NO: 149289 - DNA, 5809 bp, Homo sapiens
  Payload ID: 9473
  Gene Symbol: LMX1B
  Gene Name: LIM homeobox transcription factor 1, beta
  Uniprot ID: O60663
  ENST ID: ENST00000355497
  CDS Start-End: 8-1228
gcgtcccatggatatagcaacaggtcccgagtcgctggagaggtgcttccctcgcgggcagacggactgcgccaagatgttggacggcatcaagatggaggagcacgccctgcgccccgggcccgccactctgggggtgctgctgggctccgactgcccgcatcccgccgtctgcgagggctgccagcggcccatctccgaccgcttcctgatgcgagtcaacgagtcgtcctggcacgaggagtgtttgcagtgcgcggcgtgtcagcaagccctcaccaccagctgctacttccgggatcggaaactgtactgcaaacaagactaccaacagctcttcgcggccaagtgcagcggctgcatggagaagatcgcccccaccgagttcgtgatgcgggcgctggagtgcgtgtaccacctgggctgcttctgctgctgcgtgtgtgaacggcagctacgcaagggcgacgaattcgtgctcaaggagggccagctgctgtgcaagggtgactacgagaaggagaaggacctgctcagctccgtgagccccgacgagtccgactccgtgaagagcgaggatgaagatggggacatgaagccggccaaggggcagggcagtcagagcaagggcagcggggatgacgggaaggacccgcggaggcccaagcgaccccggaccatcctcaccacgcagcagcgaagagccttcaaggcctccttcgaggtctcgtcgaagccttgccgaaaggtccgagagacactggcagctgagacgggcctcagtgtgcgcgtggtccaggtctggtttcagaaccaaagagcaaagatgaagaagctggcgcggcggcaccagcagcagcaggagcagcagaactcccagcggctgggccagggtgagccggggccggggcagggcctgggccaggaggtcctgtccagccgcatggagggcatgatggcttcctacacgccgctggccccaccacagcagcagatcgtggccatggaacagagcccctacggcagcagcgaccccttccagcagggcctcacgccgccccaaatgccagggaacgactccatcttccatgacatcgacagcgatacctccttaaccagcctcagcgactgcttcctcggctcctcagacgtgggctccctgcaggcccgcgtggggaaccccatcgaccggctctactccatgcagagttcctacttcgcctcctgagagccagccaggcgcacggacgcttgggcaggggcctgggggggactgccagcctctgcggccagcctggccacccccgccctgctctccgcacagactacagacagccatacggtgccctcccctcggccagctgggcctgaccactgtgcccgttgggtacagccagaccggtagatgggcacagcctgggcaggggctgtgtcctgcccacagagaccttgtcatccccagggacccagagctctcggacggccactcgcctcccagccccacctcggcctccatcgcctcctccccatctcttttttgggaagcttaaattctctctatttttttaaatgtcctctctgtgtccatggccctccatgcaagccccaggacaatggtgtcatgaggcggtgacctgagaagcgtgtgtacctgtgccccagcaagggcaggggtggcctctgggggcaggcccactgcctggaaccgcacacccctcagcctgagtctggagcagcagtggagaggggcctgaggggaggcactgtcaggaggcgggctcggagcctgagcctgggcaggcgcaaagggacagagaggcacgtgcagacacatgcacacttgcagacaaacccacgcaaacacacacacagctgtatggggacaccagaagggacagggatgctcagcgggtctgtcctgccttgtcagaaagagaaaaggaggccaggcaggggaccccccagttcttaagagcgattggaaagggaggaaggggagaggaagaggcgaacttgaagcatcggacccagttgtatcccagcctgggcccaaatgggggcagcctgggcagggagggcagccccaggccccaccaactctagaggcagatggagcccccagaaccaggtagcatcagaccagacaacagagcctccaggggtcagggacttcagaagcacctgctgggcaccccatctgcaatgtggtcctctccccagccacctctgcctcccctcacatacctccagtgacaaggagctcactaggtcagcgagcccacagcagctgtgctgtcctgcatcccagagccaggcttccccagctctccctcttaacactgtcccccagcaggcctccggctgtccctctaaaggtgtggggcaggtatcacttcaccttcccactgatgtcagccggccagaagtgagcaggcacatcacctctcctgctgtggcacccttcctctgttaatttggcccaaaagacaatgatttggccacatgaccttagagattcaccctgccctgctgtagctaaatccctgggccccacacgcaagtgacagctaagccacatctgttttctgtgtatatgcaggatgggggcacctactgttttgttttgttttgttttgttttgttttgttttgttttgttttgttttgtttgagacggagtttcgctcttgttgcccaggctggagtgcaatggcgcgatctcggctcaccacaacctccgcctcccaggttcaagtgattctgatgcctcagcctccctagtagctgagattacaggcatgcgccaccacacccagctaattttgtatttttagtagcaacggggtttctccatgttggtcaggctggtctccaacccccgacctcaggtgatccgcctgcctcggcctcccaaagtgctgggattacaggcgtgagccaccgcacccagtctgcacttactgtttagactgaatgagggaccgtgacctctttccttttccattccttcttactcgattcattccagcctgtggaatttctctgcaccctgattcagtgaccactgctctcctctctcccagcacatctgcccagtgaggagttggccctgggtctcacctgaggtgtgtggaccgggctggcctctccctgtttgacattggcccattaatgcatcctctttgggggacacattccaattgcatttcctgcccccttctcccagggcaattgcagaagattgtgtcaggcgccctgctggaagtcaggtgcactagatccatccccagccccagtctgctcaactctatccctgtcagagcaaggaggctgggctgctggggcctgactggtgagcccaccctgtcccctggtgatcactgtgtccccttgttcaggtgctcacaaccctacctttaactctgaggtcaagccctaggccaccaccctaaagtctgcctggtccaacctttgagcaagtaaggataatgaatgtcccttttccacctttggggccctctgcctggatctctggaatcctctaagttcaacctgttctgtggttttgctcccgtttgctgggaaattcagtccccccagaatgtcctgggccaacctccttgcctgacatgtggcctcgtgtcacccattgggccccagcagccagctagcccttctgcagctcttcttacaaacagagcctctccaaggacctcagttgatgttctggtccttctgccgcctcagcccaccagggtccgtgccaccatgggtctcttgagcagcagctgcactggcttctggagagacacccctctttctccttttgcacatgcaccatctgaatcgtgccagggacatcctgggcagattcaggggcagatgccctatcccccaggagacctggcccttctctctcagacccaataagttggaagggacgtcagaagcggtcatctcatctgccccttattttatagttggaaaccctgaggcaagagagggaaagaggcctgtccaaggtccgggttagtgacagagctgagctgagaacagggacgttgtgccccactgtcccctgtggtttgtgaatgacctccaggtcagggggtcacaacttgttcttagtaaacttgccagctgttggggtcacatattcccattctggggcctcacaaacccccgaatccagccgggaccccatgccaggagctggtctagggacagcatgcttgtgacccacagactgttaaagccagaagggacctcagagagtcccttatgctggaggcgccctgtcagccgtggctaggggccccttgctctatgctgtgccttgctgcccacaggctcccagacaccagtgcccactctgcccagccccggactgggtgtggctcgcagatgaacaagatgcagggcctgccttgaggggtgtctcctagaaggaaagccagactctccggcccagccagagagtccagacatggcagggacccgtttctcagatgaggagcctgaggctcagagaagggaggcgatgtgttcagggccacccagcagaagcctgtggggctgggcaaccttctcccactttatgggaggagctgcagccttggctgggagctgggcggggagtagccaggaccaccccttgcccgtgccgtgacatggaaccttcatcactaagggggctggagtgggaagagggagataactgtgtggtctccagagcaaaagagaatgagaggtgggcagggggagtcttggcaaaagaccaagttccacttccctgctggggaagtcaaggctcagaaagaggaaataattgccccaggtaacacagggcagaggagggacaaaaagctgggcatggccccagccagagcctcatctgcctactccgtgaagcctcccaggtactctgctatcctgggaaacgcacagggaggccacacagagacactgctcacaagagtcagaccaaggtgccagcacagcctggaaagagctcagaaagggggttggtgcacgtggctgggcatcttaggaggcttcctgagggtgggtaaaggtgggaaggccctggcgctgcatcagatgagcagggcctggcagggacaagcctcttctcctttgggaagccctgcagcctcctagcaagaggctgattccccactctgcccccatctgaatgtccttttcatgttgcacgcagggaacctcaggaaggaggattgcctgatgcctgcctggctccatccttgagctctgggcaccacctagggtgagggagagcctgcagctctggggctaagtctgccctggggggaaagggctccacgctcacacgcacgcgctcgcacacacacactcacacctggacgcacacggaggcttgcggacccatactcacaggcacatgtggcctggggactgggggagcaggaaagacccctccaacatttggcccttggaaggcaccattgccaatgagcctctttgctggttcccccgaccccacctgggggtcccatgggagcccagcccagccaggtgtggggatgggccaccggccattcctgttttccttgtacagacagattctcactacccacccgccatccccagacacattttatttaataacttgtcattgttaaattatttattagcgtttaccacaccaccacccccaccctgccctccactctcaccttccacctcttcccacaacagcagaaaatggaaacaacaacaaaaaaagatgagacatcagtatatttgtaaataaaccgacctgtacactc

SEQ ID NO: 149290 - DNA, 5797 bp, Homo sapiens
  Payload ID: 9473
  Gene Symbol: LMX1B
  Gene Name: LIM homeobox transcription factor 1, beta
  Uniprot ID: O60663
  ENST ID: ENST00000373474
  CDS Start-End: 8-1216
gcgtcccatggatatagcaacaggtcccgagtcgctggagaggtgcttccctcgcgggcagacggactgcgccaagatgttggacggcatcaagatggaggagcacgccctgcgccccgggcccgccactctgggggtgctgctgggctccgactgcccgcatcccgccgtctgcgagggctgccagcggcccatctccgaccgcttcctgatgcgagtcaacgagtcgtcctggcacgaggagtgtttgcagtgcgcggcgtgtcagcaagccctcaccaccagctgctacttccgggatcggaaactgtactgcaaacaagactaccaacagctcttcgcggccaagtgcagcggctgcatggagaagatcgcccccaccgagttcgtgatgcgggcgctggagtgcgtgtaccacctgggctgcttctgctgctgcgtgtgtgaacggcagctacgcaagggcgacgaattcgtgctcaaggagggccagctgctgtgcaagggtgactacgagaaggagaaggacctgctcagctccgtgagccccgacgagtccgactccgtgaagagcgaggatgaagatggggacatgaagccggccaaggggcagggcagtcagagcaagggcagcggggatgacgggaaggacccgcggaggcccaagcgaccccggaccatcctcaccacgcagcagcgaagagccttcaaggcctccttcgaggtctcgtcgaagccttgccgaaaggtccgagagacactggcagctgagacgggcctcagtgtgcgcgtggtccaggtctggtttcagaaccaaagagcaaagatgaagaagctggcgcggcggcaccagcagcagcaggagcagcagaactcccagcggctgggccaggaggtcctgtccagccgcatggagggcatgatggcttcctacacgccgctggccccaccacagcagcagatcgtggccatggaacagagcccctacggcagcagcgaccccttccagcagggcctcacgccgccccaaatgccaggtgaccacatgaacccctatgggaacgactccatcttccatgacatcgacagcgatacctccttaaccagcctcagcgactgcttcctcggctcctcagacgtgggctccctgcaggcccgcgtggggaaccccatcgaccggctctactccatgcagagttcctacttcgcctcctgagagccagccaggcgcacggacgcttgggcaggggcctgggggggactgccagcctctgcggccagcctggccacccccgccctgctctccgcacagactacagacagccatacggtgccctcccctcggccagctgggcctgaccactgtgcccgttgggtacagccagaccggtagatgggcacagcctgggcaggggctgtgtcctgcccacagagaccttgtcatccccagggacccagagctctcggacggccactcgcctcccagccccacctcggcctccatcgcctcctccccatctcttttttgggaagcttaaattctctctatttttttaaatgtcctctctgtgtccatggccctccatgcaagccccaggacaatggtgtcatgaggcggtgacctgagaagcgtgtgtacctgtgccccagcaagggcaggggtggcctctgggggcaggcccactgcctggaaccgcacacccctcagcctgagtctggagcagcagtggagaggggcctgaggggaggcactgtcaggaggcgggctcggagcctgagcctgggcaggcgcaaagggacagagaggcacgtgcagacacatgcacacttgcagacaaacccacgcaaacacacacacagctgtatggggacaccagaagggacagggatgctcagcgggtctgtcctgccttgtcagaaagagaaaaggaggccaggcaggggaccccccagttcttaagagcgattggaaagggaggaaggggagaggaagaggcgaacttgaagcatcggacccagttgtatcccagcctgggcccaaatgggggcagcctgggcagggagggcagccccaggccccaccaactctagaggcagatggagcccccagaaccaggtagcatcagaccagacaacagagcctccaggggtcagggacttcagaagcacctgctgggcaccccatctgcaatgtggtcctctccccagccacctctgcctcccctcacatacctccagtgacaaggagctcactaggtcagcgagcccacagcagctgtgctgtcctgcatcccagagccaggcttccccagctctccctcttaacactgtcccccagcaggcctccggctgtccctctaaaggtgtggggcaggtatcacttcaccttcccactgatgtcagccggccagaagtgagcaggcacatcacctctcctgctgtggcacccttcctctgttaatttggcccaaaagacaatgatttggccacatgaccttagagattcaccctgccctgctgtagctaaatccctgggccccacacgcaagtgacagctaagccacatctgttttctgtgtatatgcaggatgggggcacctactgttttgttttgttttgttttgttttgttttgttttgttttgttttgttttgtttgagacggagtttcgctcttgttgcccaggctggagtgcaatggcgcgatctcggctcaccacaacctccgcctcccaggttcaagtgattctgatgcctcagcctccctagtagctgagattacaggcatgcgccaccacacccagctaattttgtatttttagtagcaacggggtttctccatgttggtcaggctggtctccaacccccgacctcaggtgatccgcctgcctcggcctcccaaagtgctgggattacaggcgtgagccaccgcacccagtctgcacttactgtttagactgaatgagggaccgtgacctctttccttttccattccttcttactcgattcattccagcctgtggaatttctctgcaccctgattcagtgaccactgctctcctctctcccagcacatctgcccagtgaggagttggccctgggtctcacctgaggtgtgtggaccgggctggcctctccctgtttgacattggcccattaatgcatcctctttgggggacacattccaattgcatttcctgcccccttctcccagggcaattgcagaagattgtgtcaggcgccctgctggaagtcaggtgcactagatccatccccagccccagtctgctcaactctatccctgtcagagcaaggaggctgggctgctggggcctgactggtgagcccaccctgtcccctggtgatcactgtgtccccttgttcaggtgctcacaaccctacctttaactctgaggtcaagccctaggccaccaccctaaagtctgcctggtccaacctttgagcaagtaaggataatgaatgtcccttttccacctttggggccctctgcctggatctctggaatcctctaagttcaacctgttctgtggttttgctcccgtttgctgggaaattcagtccccccagaatgtcctgggccaacctccttgcctgacatgtggcctcgtgtcacccattgggccccagcagccagctagcccttctgcagctcttcttacaaacagagcctctccaaggacctcagttgatgttctggtccttctgccgcctcagcccaccagggtccgtgccaccatgggtctcttgagcagcagctgcactggcttctggagagacacccctctttctccttttgcacatgcaccatctgaatcgtgccagggacatcctgggcagattcaggggcagatgccctatcccccaggagacctggcccttctctctcagacccaataagttggaagggacgtcagaagcggtcatctcatctgccccttattttatagttggaaaccctgaggcaagagagggaaagaggcctgtccaaggtccgggttagtgacagagctgagctgagaacagggacgttgtgccccactgtcccctgtggtttgtgaatgacctccaggtcagggggtcacaacttgttcttagtaaacttgccagctgttggggtcacatattcccattctggggcctcacaaacccccgaatccagccgggaccccatgccaggagctggtctagggacagcatgcttgtgacccacagactgttaaagccagaagggacctcagagagtcccttatgctggaggcgccctgtcagccgtggctaggggccccttgctctatgctgtgccttgctgcccacaggctcccagacaccagtgcccactctgcccagccccggactgggtgtggctcgcagatgaacaagatgcagggcctgccttgaggggtgtctcctagaaggaaagccagactctccggcccagccagagagtccagacatggcagggacccgtttctcagatgaggagcctgaggctcagagaagggaggcgatgtgttcagggccacccagcagaagcctgtggggctgggcaaccttctcccactttatgggaggagctgcagccttggctgggagctgggcggggagtagccaggaccaccccttgcccgtgccgtgacatggaaccttcatcactaagggggctggagtgggaagagggagataactgtgtggtctccagagcaaaagagaatgagaggtgggcagggggagtcttggcaaaagaccaagttccacttccctgctggggaagtcaaggctcagaaagaggaaataattgccccaggtaacacagggcagaggagggacaaaaagctgggcatggccccagccagagcctcatctgcctactccgtgaagcctcccaggtactctgctatcctgggaaacgcacagggaggccacacagagacactgctcacaagagtcagaccaaggtgccagcacagcctggaaagagctcagaaagggggttggtgcacgtggctgggcatcttaggaggcttcctgagggtgggtaaaggtgggaaggccctggcgctgcatcagatgagcagggcctggcagggacaagcctcttctcctttgggaagccctgcagcctcctagcaagaggctgattccccactctgcccccatctgaatgtccttttcatgttgcacgcagggaacctcaggaaggaggattgcctgatgcctgcctggctccatccttgagctctgggcaccacctagggtgagggagagcctgcagctctggggctaagtctgccctggggggaaagggctccacgctcacacgcacgcgctcgcacacacacactcacacctggacgcacacggaggcttgcggacccatactcacaggcacatgtggcctggggactgggggagcaggaaagacccctccaacatttggcccttggaaggcaccattgccaatgagcctctttgctggttcccccgaccccacctgggggtcccatgggagcccagcccagccaggtgtggggatgggccaccggccattcctgttttccttgtacagacagattctcactacccacccgccatccccagacacattttatttaataacttgtcattgttaaattatttattagcgtttaccacaccaccacccccaccctgccctccactctcaccttccacctcttcccacaacagcagaaaatggaaacaacaacaaaaaaagatgagacatcagtatatttgtaaataaaccgacctgtacactc

SEQ ID NO: 149291 - DNA, 1195 bp, Homo sapiens
  Payload ID: 9473
  Gene Symbol: LMX1B
  Gene Name: LIM homeobox transcription factor 1, beta
  Uniprot ID: O60663
  ENST ID: ENST00000526117
  CDS Start-End: 8-1195
gcgtcccatggatatagcaacaggtcccgagtcgctggagaggtgcttccctcgcgggcagacggactgcgccaagatgttggacggcatcaagatggaggagcacgccctgcgccccgggcccgccactctgggggtgctgctgggctccgactgcccgcatcccgccgtctgcgagggctgccagcggcccatctccgaccgcttcctgatgcgagtcaacgagtcgtcctggcacgaggagtgtttgcagtgcgcggcgtgtcagcaagccctcaccaccagctgctacttccgggatcggaaactgtactgcaaacaagactaccaacagctcttcgcggccaagtgcagcggctgcatggagaagatcgcccccaccgagttcgtgatgcgggcgctggagtgcgtgtaccacctgggctgcttctgctgctgcgtgtgtgaacggcagctacgcaagggcgacgaattcgtgctcaaggagggccagctgctgtgcaagggtgactacgagaaggagaaggacctgctcagctccgtgagccccgacgagtccgactccgtgaagagcgaggatgaagatggggacatgaagccggccaaggggcagggcagtcagagcaagggcagcggggatgacgggaaggacccgcggaggcccaagcgaccccggaccatcctcaccacgcagcagcgaagagccttcaaggcctccttcgaggtctcgtcgaagccttgccgaaaggtccgagagacactggcagctgagacgggcctcagtgtgcgcgtggtccaggtctggtttcagaaccaaagagcaaagatgaagaagctggcgcggcggcaccagcagcagcaggagcagcagaactcccagcggctgggccaggaggtcctgtccagccgcatggagggcatgatggcttcctacacgccgctggccccaccacagcagcagatcgtggccatggaacagagcccctacggcagcagcgaccccttccagcagggcctcacgccgccccaaatgccagggaacgactccatcttccatgacatcgacagcgatacctccttaaccagcctcagcgactgcttcctcggctcctcagacgtgggctccctgcaggcccgcgtggggaaccccatcgaccggctctactccatgcagagttcctacttcgcctcctga

SEQ ID NO: 149292 - DNA, 1300 bp, Homo sapiens
  Payload ID: 9473
  Gene Symbol: LMX1B
  Gene Name: LIM homeobox transcription factor 1, beta
  ENST ID: ENST00000561065
  CDS Start-End: 51-1202
ccgagtcgctggagaggtgcttccctcgcgggcagacggactgcgccaagatgttggacggcatcaagatggaggagcacgccctgcgccccgggcccgccactctgggggtgctgctgggctccgactgcccgcatcccgccgtctgcgagggctgccagcggcccatctccgaccgcttcctgatgcgagtcaacgagtcgtcctggcacgaggagtgtttgcagtgcgcggcgtgtcagcaagccctcaccaccagctgctacttccgggatcggaaactgtactgcaaacaagactaccaacagctcttcgcggccaagtgcagcggctgcatggagaagatcgcccccaccgagttcgtgatgcgggcgctggagtgcgtgtaccacctgggctgcttctgctgctgcgtgtgtgaacggcagctacgcaagggcgacgaattcgtgctcaaggagggccagctgctgtgcaagggtgactacgagaaggagaaggacctgctcagctccgtgagccccgacgagtccgactccgtgaagagcgaggatgaagatggggacatgaagccggccaaggggcagggcagtcagagcaagggcagcggggatgacgggaaggacccgcggaggcccaagcgaccccggaccatcctcaccacgcagcagcgaagagccttcaaggcctccttcgaggtctcgtcgaagccttgccgaaaggtccgagagacactggcagctgagacgggcctcagtgtgcgcgtggtccaggtctggtttcagaaccaaagagcaaagatgaagaagctggcgcggcggcaccagcagcagcaggagcagcagaactcccagcggctgggccagggtgagccggggccggggcagggcctgggccaggaggtcctgtccagccgcatggagggcatgatggcttcctacacgccgctggccccaccacagcagcagatcgtggccatggaacagagcccctacggcagcagcgaccccttccagcagggcctcacgccgccccaaatgccagggaacgactccatcttccatgacatcgacagcgatacctccttaaccagcctcagcgactgcttcctcggctcctcagacgtgggctccctgcaggcccgcgtggggaaccccatcgaccggctctactccatgcagagttcctacttcgcctcctgagagccagccaggcgcacggacgcttgggcaggggcctgggggggactgccagcctctgcggccagcctggccacccccgccctgctctccgcacagac

SEQ ID NO: 149293 - DNA, 4026 bp, Homo sapiens
  Payload ID: 9474
  Gene Symbol: LIX1
  Gene Name: limb and CNS expressed 1
  Uniprot ID: Q8N485
  ENST ID: ENST00000274382
  CDS Start-End: 297-1145
agcgagcttccccagctagcctgtaggtgggtgtgtttaacagaagaaagcaatgggaacccgcctgtcagccagcctttcgagctaattagctcagcatacaacaaagataagtgagcctgggaagagggccccctgaggggtctttagattctgggaaatgtctgattggcagatgttaaaagggattccttggtaatccagtgcatcaatgagctgcagaaattcagcccaggactgcaagaattcaggcatgaggacactctgtacaggaggctcacacaggcagacccaagatggacagaaccttggaatctctgagacacatcattgcccaagtcttgcctcacagagatccggctctagtcttcaaagacttgaacgttgtgtcaatgttacaggaattttgggaaagcaagcagcagcagaaggctgcattcccaagtgaaggtgtggtggtctatgagtcactgccagctcctgggcctccctttgtgagttacgtgaccctcccagggggaagctgttttggcaactttcagtgctgcttaagtagagccgaggccaggcgggatgcagctaaagtggccctgatcaactccctcttcaatgagctgccctctcgcaggatcaccaaggaattcattatggaaagtgttcaggaagcagtagcctccaccagcggcaccttagatgatgcagatgaccccagcaccagtgttggggcctatcactacatgctggagtcaaacatggggaagactatgctggagtttcaggagctgatgaccattttccaactattgcactggaatggaagcctaaaagcccttcgtgaaacaaagtgttcccgacaggaagtcatctcctactattctcagtattctctagatgaaaagatgcgcagccacatggccctggactggatcatgaaggagcgggactcaccaggaattgtctctcaagagctacgaatggccctgaggcagttggaggaagccaggaaagcaggacaagaactacggttttacaaagaaaagaaagaaatattgagcttagccctgactcagatctgcagtgaccctgacacttcctcacccagtgatgatcagctgagccttacggccctgtgtggctatcactagcaaggccaagccccgggtaccctcagtgatggcagaggccagattaacattaggaatctcagtgcagaggtcctcagaggctccagcatctctagtactacctgaaggctctcctaaccctctccacacattccatttacagagtatgagagtcgtaggacccttacaagacccaacaagccactcgatgcatttttctatcacattctcaatagttccagctcaggatgaaaggatagacacaaaattgtttgaaaaacattttccaggcctggctccaacctaaagcctgactgtcacgtgccttgcttgattttatatatattgtttcaagaatagtccaatatagcattccccaaatgaacagcagccagaattaggtgaagtagcatgatagcagtgtttaaaaatacttaggattaaataaataatatggattgttttaaaaaatatccaaggatcagagtctctttctaagctttgtaagctaagcaatagtttatgtcctactagatacactgcaaactacagtggggattttatctggacatcccaccatcaaagatcttgaaatagtaatagtatgaaaatactagataaaattaatgtttaaaatgtttttgtaacaataatttttaaaacccacactcttccatatatggggataaatatcacctagaaaagtagcctcactcttattcctcaagaattaatatccaatgtttatgagtcttgcaatcaattttgttcatttttaatttgcaaatcgataacctgaactaatttgttcttattttttgccactgcaaacatatatctacagagagaaaaattaatggcattttaaaggttaaaacattttgaaaaattattagcatgtaacaaagaatgcttgcatttgattagtttcaccagcatttgagagaaggaccctttagctctgtttgttgttcaagaacataagcaaccagtagctcaaatgtagtatcattattaagtttaagtcactggaatcttctttaaaggaaggataagacattgccatctctatttaactcatccatatgggtcaatcaactgattagaaaatcaaaaaacaataaaaactttttttttttttttttttttagtagagacgggatttcatcatgttgcccaggctggtcttgaactcctgggctcaagccatctgcctgcctccacctcccaaaatgctgagattacaggtgtgagccaccatgcctggcctaaactaatttttagatagttcctggtcactcaaatttaagaatgtcagcaatgtcaattttaaatgctcataggtctttccatatctgtaacatgaaaatgattattctgcattttattcagtagtccaaattaaagaaaatgtttttctcaatttaaaataatttctttttcttttgtttatgcaagtgcatacatgcttcactgaaagcaaaaccattataattacattaaagtttataaaatatgatattttaacctcatatctaataagtatgtacaaaggtaaccatcactccttaaatccacatgaaaactactgtaactgatcatgtattttggaattagacttgataataaaagattatcatgtatcacatatctcacaccaggggaacaattagctacataattgtcataccttaatatcttttaaaggtaacagtaattttcaacacattttattttaaaatattattttaacaaaagttacattcctctccacaatgaggctaaatgtcacccacgaaagaactttattcccttatattcctgaaaagaaatcagaattaacatttttatgttgaataaattttaaaatttaggaaatgttctatttaaagttaatttctttcataaagccattactctttacattgtcatttccaaaaagccacaatttcccatgctggatgtgatgaaagttaggcacacctttactgcattagcagcctttgacaatgacttcctcaaactgacaccatcttaattagatgcagggacagggatcagatgggacaatatcaaatttactttgtgccctacaagttaaaaactgcacccattctgtaaattgaatatagaggttctcccttggccactgtcagcttttcttgactggccaaaactgcccattcttcctggaatggtatgaaagcttcagcaaaataaataaaagtcagaatctttgctggtccctttaatgctgatttgatagtaaatcaatttcagctgagacataagggctgtcagtctatcatataaacatctttaactatagcctagagaaaagagggttgaagagcaaagcagattttttttttccttttctatatcttgttctgaacaacacactgtgataaaggggactagagtggaagattccctatttaaacacatgaagctctgggtcctagccttttttggttataagccctttgagaatctgataaaagctgtggatcatctcctaggaaaatagaacaaaacatacatattcacattacacagttccagagtatgtggaccccccaaagtccagagattgccctaggggatctttagattcttgtttagaactgttgattttgaacacaacatacactgtcaaactttacatcagggatccaacataactcagacatagcccaggtagcctgtttctaacacaactgtcataatcctgaaatccaaaattgcactgtgtttgacatgagatagtttaagttccacaaaatccaaatttaccatattattgtttttaaaaaagcagtttagagcaaactgtcactaaacttggataaatgggtcagaaagtacagatttaataaagtcgtacctctaatgttcagaa

SEQ ID NO: 149294 - DNA, 529 bp, Homo sapiens
  Payload ID: 9474
  Gene Symbol: LIX1
  Gene Name: limb and CNS expressed 1
  ENST ID: ENST00000512378
  CDS Start-End: 339-529
ctgggaagagggccccctgaggggtctttagattctgggaaatgtctgattggcagatgttaaaagggattccttggtaatccagtgcatcaatgagctgcagaaattcagcccaggactgcaagaattcaggcatgaggacactctgtacaggaggctcacacaggcagacccaagatggacagaaccttggaatctctgagacacatcattgcccaagtcttgcctcacagagatccggctctagtcttcaaagactttaagatttgttagtctgaactcaattttaacaacttctgaaactcatgtgttaagttacagcccataataggatacagatgcataaggtgaacgttgtgtcaatgttacaggaattttgggaaagcaagcagcagcagaaggctgcattcccaagtgaaggtgtggtggtctatgagtcactgccagctcctgggcctccctttgtgagttacgtgaccctcccagggggaagctgttttggcaactttcagtgctgcttaagtagagc

SEQ ID NO: 149295 - DNA, 3975 bp, Homo sapiens
  Payload ID: 9475
  Gene Symbol: LIX1L
  Gene Name: limb and CNS expressed 1 like
  Uniprot ID: Q8IVB5
  ENST ID: ENST00000604000
  CDS Start-End: 75-1088
gctgactggggtggttgggaccgttagctcggcaggctggcaggctccggggcgctactccattggcggccgggatggagactatgcgagcgcagcggctgcagcctggtgtgggcaccagcgggaggggcactctccgagcgctgcggcccggagtgactggggccgcggccgccaccgccacaccccctgcgggccccccgcctgccccgccgcctcccgcaccgcccccgccgccgctgctcctgtctggggccccaggactacccctgccccccggcgccgccggcagcccggcagtgctgcgagaggccgtggaggccgtggtgaggagcttcgccaagcacacgcagggctatggccgagtgaatgtggtggaggcacttcaggaattctggcagatgaagcagtcccgtggtgctgacttaaagaatggggctctagtggtttatgagatggttccctccaacagccctccttatgtctgctatgtcaccctgcctgggggaagctgctttgggagtttccagttttgccccacaaaagctgaggcccggaggagtgctgcaaagattgcgctaatgaattctgtgtttaatgaacatccttcccgaagaatcactgatgagttcatcgagaagagtgtctctgaggccctggcatcttttaatggcaacagggaggaagctgacaacccaaatacagggattggtgccttccgattcatgctggaatccaacaagggcaaatcaatgttggagttccaggagctaatgacagtttttcaactgctacactggaatggcagccttaaggccatgagggaacgacaatgctctcggcaggaggtgttggctcattattcgcaccgggccctggatgatgatattcgccaccaaatggccttggactgggtgagccgggagcagagtgtgccgggggcactgtctagagagctggcctctactgagcgggagctggatgaagcccgactggcaggcaaggagctgcgcttccacaaggagaagaaagatattcttgtgctggctgctgggcagttgggcaatatgcattcttccaactgctaggcatccacccacataactccccaggctttccacagcctttttttatgtctcctttctaagatttaggatgattttttgtacatactttctcatttttatactttaaaaaatatatatgtgtataaattctacacctagattcctatttgctaagagatcccttttcttactaccagtttttggatgtagttttatttgaaacatcttcagtccactttacaacaaagagcagcttgtctttgcagctttgttagctcttaaacttccagattaactgtgtagccatttcagtagcactaaaagattaactctagtgttcatgtgtccttcttttcaaatatcaggtaacttgaataaggattatgtgccccacccttactctcattcctgcttcctcttggactcaaacagggtatgagtatgaagattttgcctttagttcctgaactgaacctgcttgctatccctttcctccccaccactaccttattccttctctgcctccaaattgccactttgttttgaggcttccttccctaccttattattctgaaggaagtagagatcttgcttctgaaacccctcctaagaaactgcccagggacaagataaattacaaacaattcatgggagtttactacctaagttgcttctagggcatatgtataccatactagtagtctagatttctggatatactctacagtagatgggggttatggttgaaactgattctctttcagtattccctctaaacatctcccctactcccccagcttagttaaaccctgcgtttggaccttcctgcctgcagctattagtagaaagtaaaacatatttccatatttcccttcacctaacattttattttttggaagcgttatcagtcctatttggttagtgagaaccatgttccccttattcccgctaagttgctgctgtttactaccttagattctcatttgttttctctttctttcctctccttccacattaattattagaacataagttgatcaggaaaattaaatgagactttagtattttggcacttcctaattgacaccttgggagactgcaggaagggaaagagaatcaatgatcagttatttgtgtgtgtgtgtggtttttttttttttttggaagacagagtctcacacttttgcccaggctggagtgcagtggcgtgatctcggctcactgcaacctctgcctccagggttcaagcgattctcttgcctcagcttcccgagtagctgggattacaggcacacgccacaacgcctggctaatttttatatttttagtagagacagggtttcaccatgttggccaggctgttcttgaactcctgacataaggtaatccacccgcctcagcctcccaaagtgctgggattacaggcgtgaggcactgagcctggcctatttgtggtttttttttggttttgtttttgtttttgtttttgagacggagtcttgctctgtcgcccaggctagagtgcagtggcgcgatctcggctcactgcaacctccgcctcccagattcacaccattctcctgcctcagcctcccgagtagctgggattacaggtgcccaccaccacgcccagctaattttttgtatttttagtagagacggggtttcaccatgttagccaggacggtctccatctcctgacctcgtgatccacctgcctcggcctcccaaactatttgtgtgttttttttttttttgagacggagtctcgctctgtcgcccaggctggagtgcagtggcgctatctcggctcactgcaagctccgcctcccgggttcacgccactctcctgcctcagcctccttagtagctgggactacaggcgcccgccaccatgcctggctaatttttttgtatttttagtagagacggggtttcaccgtgtttgacaggatggtctcgatttcctgacttcgtgatccgcccgcctcggcctcccaaagtgctgggattacaggcgtgagccaccgcgcccggcactatttgtgtttttaacaccattctcccccacttctctcctgggtgacataagagagaaataacctgtagtacagcagctaaagtattctcctttcagagaatttttttggaggtctctaatatatatttcccccttgtctctgtgatctcttatttatactatattattgtcccatgtactttctaaactgagcttggaacatttagtattcctgcaattggacttcccacttaacaattatacagactttgcttttagaaatagattaggttccaaacagaaagttcaagtgtaacaacaacaataaaaatagattatgaaacaggctataattggctcttttggatttgataggggcaagatgaaaggcaactttcttgcttttgaaatcatgttgggtaagaggtaaggaatccagctacaattttattagtgcttgaaacgggcttccttgaattctccaggccctatcattttttttttcttactaatcagaagagagctggggtagaagccccatgtttgtattccatgaaacacgtcgggttggagtaaaggcaaaaacagctagacacaccaggtgtgtctgtttgacatttataagctggcactcatcaacactcctgtttctcctttctctgggacgtgtggattaaggggtgtgagttgtgggaagaattgccctcgtacctcctggatttattatttttctcaaataccaaccagtaagatcccaaataacttgagaaaaattgtttcctgatctgtccacttctggtgtcaaagattttactcatcttcttagtacattctatgtattttatatgtataattttatacaattaaaaatagatttttgtctagtga

SEQ ID NO: 149296 - DNA, 2933 bp, Homo sapiens
  Payload ID: 9476
  Gene Symbol: LBH
  Gene Name: limb bud and heart development
  Uniprot ID: Q53QV2
  ENST ID: ENST00000395323
  CDS Start-End: 209-526
ggggctgagtgctcagtggagagcggggagttgtgtccaccttgccgacgtcgctagccgtggggctgtcctgggaaggcggacggcgagcgcccggtgtccgcactcggccgcctgccgtgcccgtctgcgcccgtgtcatcctcactcgggacgcagggaccgtttttaaatcacaggggcgtgtgtcagcctgccctaggacttcatgtctatatatttccccattcactgccccgactatctgagatcggccaagatgactgaggtgatgatgaacacccagcccatggaggagatcggcctcagcccccgcaaggatggcctttcctaccagatcttcccagacccgtcagattttgaccgctgctgcaaactgaaggaccgtctgccctccatagtggtggaacccacagaaggggaggtggagagcggggagctccggtggccccctgaggagttcctggtccaggaggatgagcaagataactgcgaagagacagcgaaagaaaataaagagcagtagagtccctgtggactcccatgggtcataccagccagcatctgttcctgaactgtgtttttcccatcatgacggaagaagagagtgagccgcaattgttctgaaaatgtcaaacgaggcttctgttttgcacctgcagatcaccgagttggttttcttttcttttcttgcctttttttttttttgaaatttgccgagcagtggagccctctgacaatttgcaaggccctctgagaaaggaagctgcttagagccagggggttagtgggtgaggggagcgagtgctgtttttgagatcattatctgaactcaggcagcctagtagaggcagtggtgggattccaatgggtcttggtgggtgggaggtggggcatgtgcaaagcaagcaaggaacatttggggtaagaaaacaaacatgaggcaaaagaaaaaatacatgtttttaagaaaacattgagcagagaactgcagccaggatgcgctcagcagacattcactctggctgctgggacatcagaaaacaaagtcttcatctctctctccagtttcacccaccccaccctttgctttcatttcaggtgtgttggtctatatgacagggaggagagtaaaggagagcaggagcaattggctgcctgcaaagccagctggaggtgaagtgcaggaaaggaaaggtcaccccattctactccatggcctctctgctcccagctgtggtaggctcacatagccagtgtgatcggtttttaagaggcagtgcttttcagcttttctccctgatatatccattttgcttcccagcactttttaggagtagtgagagcacttcctgcccttgttggaagccccagggtggacactcagcacgaaggtctctcccttaactgctgcccttccaagacttgctcccgagatggagtgggcgtggtcttccaggctggcccttccttctcctcaccgccaccttccctgccccagccccagcagccatgggtacatgggtccccagctcacctatggattcccgccagtctgcccagctgcagtactcacgccccatgggggatcttggtctgtttttcttgtgggagcctagtggagagcagacgtggctttttatgtgtcttgttggggaggtgacttgcatggtggggacaaggctgtcgtggcaaccttgggatcgagtttgagactaaaggatgtcatgagatccctggcttctccccatgttgttcccggacaagggcagaagggaggcatggcaagggacctctgctgtccttactcaacagtggtcctcatccctccccacctcccactgcttcctgcaagggcaccagttgtatgagaaagttggcctttggacttaggatttcttattgtagctaagagccatctgaagcagcaggttgcaggacaaatgcttcagtccgccgagagcagtaccgtgtggccaagaggtggactcagagccttccttgagctaaactcggccaaccaaggcacgcagcatgtcccctcaggtctccagtcagtccaggttgaccctcagttctggacgtgtgtatatagctgtatttaatacctcaaggtcattgtggctctggggatgccggggcaggaggacgagggtgcgctgtggacacagcagtccgcggaattccgttctgggaagccaatggtcgccggcaccccttgcttcctccctctgttgtctgcctgtgtgacacacatcaatggcaataacttcttccaactcctcgcagaagtgggagaggccggcagcctgcaccgagaggggctttcctctctcttgctccccgcttcgttctgttttggctgcagagagtggttcatccatactctcattccctcgcctccccttgtggacgggggtcttgccttttcaattcctgtgttttggtgtcttcccttatctgctaccctgaatcacctgtcctggtcttgctgtgtgatgggaacatgcttgtaaactgcgtaacaaatctactttgtgtatgtgtctgtttatgggggtggtttattatttttgctggtccctagaccactttgtatgaccgtttgcagtctgagcaggccaggggctgacagctaatgtcaggaccctcagcggtggagcctgctggggggacccagctgctcttggacaagtggctgagctcctatctggcctcctctttttttttttttcaagtaatttgtgtgtatttctaactgattgtattgaaaaaattcctagtatttcagtaaaaatgcctgttgtgagatgaacctcctgtaacttctatctgttcttttttgaggctcagggagaaactagcatttttttttttccaaactactttttgtcactgtgacagttgtaaataaagtttgaaaatgctttcca

SEQ ID NO: 149297 - DNA, 543 bp, Homo sapiens
  Payload ID: 9476
  Gene Symbol: LBH
  Gene Name: limb bud and heart development
  ENST ID: ENST00000404397
  CDS Start-End: 203-349
gagtgctcagtggagagcggggagttgtgtccaccttgccgacgtcgctagccgtggggctgtcctgggaaggcggacggcgagcgcccggtgtccgcactcggccgcctgccgtgcccgtctgcgcccgtgtcatcctcactcgggacgcagggaccgtttttaaatcacaggggcgtgtgtcagcctgccctaggacttcatgtctatatatttccccattcactgccccgactatctgagatcggccaagatgactgaggtgatgatgaacacccagcccatggaggagatcggcctcagcccccgcaaggatggcctttcctaccaggattgtgaagaaccctagagaatactcgggtatgggatacgccagaagagctagcccttcccagctcacatcttggaaaacagcgtgtgaaccaattagcacctctcagccatgaagaaaacgttgagtcacagccttgtacatgaggttctcagagtgagatgggaccacatagggccaacctgcccagcccctgcctgcaggcggagaag

SEQ ID NO: 149298 - DNA, 559 bp, Homo sapiens
  Payload ID: 9476
  Gene Symbol: LBH
  Gene Name: limb bud and heart development
  ENST ID: ENST00000406087
  CDS Start-End: 203-361
gagtgctcagtggagagcggggagttgtgtccaccttgccgacgtcgctagccgtggggctgtcctgggaaggcggacggcgagcgcccggtgtccgcactcggccgcctgccgtgcccgtctgcgcccgtgtcatcctcactcgggacgcagggaccgtttttaaatcacaggggcgtgtgtcagcctgccctaggacttcatgtctatatatttccccattcactgccccgactatctgagatcggccaagatgactgaggtgatgatgaacacccagcccatggaggagatcggcctcagcccccgcaaggatggcctttcctaccaggtgaatcttcccagacccgtcagattttgaccgctgctgcaaactgaaggaccgtctgccctccatagtggtggaacccacagaaggggaggtggagagcggggagctccggtggccccctgaggagttcctggtccaggaggatgagcaagataactgcgaagagacagcgaaagaaaataaagagcagtagagtccctgtggactcccatgggtcataccagccag

SEQ ID NO: 149299 - DNA, 485 bp, Homo sapiens
  Payload ID: 9476
  Gene Symbol: LBH
  Gene Name: limb bud and heart development
  ENST ID: ENST00000401506
  CDS Start-End: 11-346
ttttgtttgcatgcaagtctcaacgtcgaggccggcagcagcggggctgagctgccccgactatctgagatcggccaagatgactgaggtgatgatgaacacccagcccatggaggagatcggcctcagcccccgcaaggatggcctttcctaccagatcttcccagacccgtcagattttgaccgctgctgcaaactgaaggaccgtctgccctccatagtggtggaacccacagaaggggaggtggagagcggggagctccggtggccccctgaggagttcctggtccaggaggatgagcaagataactgcgaagagacagcgaaagaaaataaagagcagtagagtccctgtggactcccatgggtcataccagccagcatctgttcctgaactgtgtttttcccatcatgacggaagaagagagtgagccgcaattgttctgaaaatgtcaaacgaggcttctgttttgcacctgcagatc

SEQ ID NO: 149300 - DNA, 756 bp, Homo sapiens
  Payload ID: 9476
  Gene Symbol: LBH
  Gene Name: limb bud and heart development
  ENST ID: ENST00000407930
  CDS Start-End: 441-707
gaggccggcagcagcggggctgagctggtgcggccgcagggtttgcagagctccgggggggtggggggcgggaaacgctctccccacacgtaaccccactaaagccacaagcagcagggcacgcgctgcagcctctcaacccctgccctctccaccgcccctaaaaaccgacgcacattggtgggggccgggactgggaggagccgccttcgccgtgctgaaggggaaggagcccgggccgggcgcggggcgtcggaggtttgccccggactggggatcggagccgggagggatgcagagagaggcaggcccctgactgctgggacttccttgctggcagtttcttccttcctgctctgggttagaggagaagcggccgggggcgagcgccggcagccccggagcgcgctctcagccccgactatctgagatcggccaagatgactgaggtgatgatgaacacccagcccatggaggagatcggcctcagcccccgcaaggatggcctttcctaccagatcttcccagacccgtcagattttgaccgctgctgcaaactgaaggaccgtctgccctccatagtggtggaacccacagaaggggaggtggagagcggggagctccggtggccccctgaggagttcctggtccaggaggatgagcaagataactgcgaagagacagcgaaagaaaataaagagcagtagagtccctgtggactcccatgggtcataccagccagcatctgttcctgaa

SEQ ID NO: 149301 - DNA, 550 bp, Homo sapiens
  Payload ID: 9476
  Gene Symbol: LBH
  Gene Name: limb bud and heart development
  ENST ID: ENST00000412933
  CDS Start-End: 204-335
tgagtgctcagtggagagcggggagttgtgtccaccttgccgacgtcgctagccgtggggctgtcctgggaaggcggacggcgagcgcccggtgtccgcactcggccgcctgccgtgcccgtctgcgcccgtgtcatcctcactcgggacgcagggaccgtttttaaatcacaggggcgtgtgtcagcctgccctaggacttcatgtctatatatttccccattcactgccccgactatctgagatcggccaagatgactgaggtgatgatgaacacccagcccatggaggagatcggcctcagcccccgcaaggatggcctttcctaccagtagtttaccatatgagaggtttcaccatgttagccaggatggtctcgatctcctgacctcgtgatccacctgcctcagcatccgaaagcactgggattacagatcttcccagacccgtcagattttgaccgctgctgcaaactgaaggaccgtctgccctccatagtggtggaacccacagaaggggaggtggagagcggggagctccggtggccccc

SEQ ID NO: 149302 - DNA, 7997 bp, Homo sapiens
  Payload ID: 9477
  Gene Symbol: LMBR1
  Gene Name: limb development membrane protein 1
  Uniprot ID: Q8WVP7
  ENST ID: ENST00000353442
  CDS Start-End: 238-1710
gccccgcccccgccccgcccccgactgcgcggcgcccgccctcccttagtcagagctgctcgtctgaggctgctgaggcgacggccggtgtcgtggtcgcggtacctgttccaacacggctcgcgggcccgtgccggctccggtccccggcgcggctgtccgagcccctgcggcgggcggacgatggtgtggcggagcacgcggacgcgggcggcgcggcggcgggcatgaaggaggatggaagggcaggacgaggtgtcggcgcgggagcagcacttccacagccaagtgcgggagtccacgatatgtttccttctttttgccattctctacgttgtttcctacttcatcatcacaagatacaagagaaaatcagatgaacaagaagatgaagatgccatcgtcaacaggatttcgttgtttttgagcacgttcactctcgcagtgtcagctggggctgttttgcttttacccttctcaatcatcagcaatgaaatcctgctttcttttcctcagaactactatattcagtggctaaatggctccctgattcatggtttgtggaatcttgcttcccttttttccaacctttgtttatttgtattgatgccctttgcctttttctttctggaatcagaaggctttgctggcctgaaaaagggaatccgagcccgcattttagagactttggtcatgcttcttcttcttgcgttactcattcttgggatagtgtgggtagcttcagcactcattgacaacgatgccgcaagcatggaatctttatatgatctctgggagttctatctaccctatttatattcctgtatatcattgatgggatgtttgttacttctcttgtgtacaccagttggcctttctcgtatgttcacagtgatgggtcagttgctagtgaagccaacaattcttgaagacctggatgaacaaatttatatcattaccttagaggaagaagcactccagagacgactaaatgggctgtcttcatcggtggaatacaacataatggagttggaacaagaacttgaaaatgtaaagactcttaagacaaaattagagaggcgaaaaaaggcttcagcatgggaaagaaatttggtgtatcccgctgttatggttctccttcttattgagacatccatctcggtcctcttggtggcttgtaatattctttgcctattggttgatgaaacagcaatgccaaaaggaacaagggggcctggaataggaaatgcctctctttctacgtttggttttgtgggagctgcgcttgaaatcattttgattttctatcttatggtgtcctctgttgtcggcttctatagccttcgattttttggaaactttactcccaagaaagatgacacaactatgacaaagatcattggaaattgtgtgtccatcttggttttgagctctgctctgcctgtgatgtcgagaacactgggaatcactagatttgatctacttggcgactttggaaggtttaattggctgggaaatttctatattgtattatcctacaatttgctttttgctattgtgacaacattgtgtctggtccgaaaattcacctctgcagttcgagaagaacttttcaaggccctagggcttcataaacttcacttaccaaatacttcaagggattcagaaacagccaagccttctgtaaatgggcatcagaaagcactgtgagacgcacagacggcgtcttctgccaccaagagacccgagaactccagattcacgacattcctgtcccatgtagaagcatttccattcaaccgtggcccctcttcagaacctagacctatcagtgccatttttttttcataatctacgaagaacttggctatggctgatcttttttaaatttaactttctgatggaccctgtagtttccagttaagtgcagattccttacagacatatagaacagcgcattcttctgtagacatttgctcatgttggtaaatacaatcacccatatgaaaaaattgttttcacctgatatgaaaatgttagaaaaggcaaactccgggacttctaaagatttacttaaatcccattatgtactttattcagaatgtagaagctgacttgaaaggcatccttggtactaagtgaagcttattcagaaaatgcatttttcaaatgcaatggcaactgcttgtagatatcatttttgcagtgtatgttggagctgtaatggttgcaattatgtttcttatttccttaaaagcaaaaagcgtagtttctgatttatgttatagaatgatactgattagactttgagccaaggggaaaatactaaattcttttaaacctggagccttagagagccacaggaatatcttctgttgtacagtctaataagctgtggtaggaagtatcatgtaatcacagtttaatgacagtttatgtatatatataattcagtattccctctgataacatagttgccagtgtttaatacacttgtaacttggatttttaccttataggctatatgtatactcagttttttaaagcatttttttcagagatcacttaattccccatgcttctgcaatgcatataaaaactataaatgccgagtggtagaaactcctctttcttcatagtcctcaggctttggttacatttgcatatgccatttgaagcctccagcttttaccagtttaacatccaaagttcacagcatcagcattcatggtgtaagaacagttttgcagtataacacgatctgataatcattcagttattaaattgtaaataattattgggatggtttcttggctttaagtccactgaataaaaactatgaaattgcactctgtgtcaaccatccactaggatagaataccgaaatctgtgcatgcaaaaataggagatgggcccatttgcacacaattcgtagttatgcagtctgctatataaatatgttcacatgcactgtgtgtatgaaaatagatggtctgtgttcagacaaaagtaaaacatttttttcaaattgttacatttaaaggttttctgggagaaatttatgaaacgcaggctgtgtctatttgacatcagaaatttccactttaaaccaaaataataagaaactttaatctgtatatttacaacctttgttgagtacacttcccccttatttatacgtctgcatttccttccgagcttcacatctttctaaaatgcagcttggttttaaaataaaagaacattcattttgtgattctaaacaagcttcagtaaataccaccagtatagtactggtgaatttctcagcataaaatcgacatacctaaaaagttaataaaattcagctcttttccaatttcattgttatgcctattgaagtattaattgccaggtttgatttttagtgaagcttggagtccatactttgagcagaccaagtgaagggaagaacagaaagaaactcaggagtagagtaatatcacttctcacttacaccactttcaggcacatccaaagagttcctagatacttggaaaatgtctgaaaatttttaagtaaaatactaaacttttcagtgtttagctcaactttttgttcatttggaagtttctctccatccgaggacttaagccagttttggatttgtaagccctgagtacaatacacttcctggaggcatcctcactgctgttgaagcaaaggatatgcatggggtggaaggacggcttcgaacctgggactcatatgccttgagaacaaatagattgttacagccttgggctgctgcgtaatcacggttcctcgaggctcttcctgagcacatgcccaagcatctgcctctggagagactgactccaaatgcaggtgcttccattggagctaggtcggaggctgctttatatgacgaactccagaaatggatgccagaatacggaggccaaacgttctgagtcctggtaaggacagtcgctctgggggtcctcattttactgcagttcctgcacgccagtgaaagagaggagatagaccctggaaggcagagctgcagatgctcatcatcaggtcaattctggagctacagttttgtttctgactggatagggatgcaccagtgactgtcacatcaagcagtccttttattctctctcctttagtatcgattttaaagggcattaggcactatggttccagagtttcttggggaaaacttgcagattcttattaattggttctgcaatacttaaataaattattttacaattataagttttcagattataacatttgtattaatttttactgattttccaagatacttcttagatttactatttacgtagctttatgtacattctctgtaaaaatagacctctaaatatgaggctttacatgaaatttgtacacacatacacactaatgttagctccttaaattgctgcactaaggtgctggttagtagagatggacggagcctctcgcgttttgctctcagatgtgttaaaggcgcacgtgtacctgctctcagcggcagtgcggcctccccatctgctgggtgcccatggccctccctgcagcctcagtgatgacctcgtctgccagggacacaggttttcatcatttacaggctcttatgtgctagttttgttggtagcacgttatttaatgcataaaggcagaattcttacaagtttttttttttaatgtgaacatagatgcagcaccgactttttaaacttgaaaaaactggtataatgttaacttttaaaaataacatttggacacactagtaattgatttttgtttacagattgttttgtttacaaattgttagtctttgtttctatgagatacttttagtgtgactttttaaatgtcttagaaattaaaagttgtacaaaaagtgatttcatatttggtttataagcatttatatgtggggtttatttgttcttttgttttttccatcttaaatattatcatggctaaaacttaagggtatttatagtttaattccatttcagttttatagagggcagtaattattctgatgaatgttgaattaagaaatggatattttctttctctgttgtgcagttattggtagatcaatttcttataacccacaatgtagcatcaataattgatagcatgtattttatttaattacttgaattatttagacttgatttctctaattttttccataaaaggactgaacagcacctacttgtggtctggacagcttaacccagagttcctggaagaataaatgctgttagcatctggttaatttactggcagacagaagcctacttacagtggctttcaactttttgaccacagtaagaaataacccattacacacacacacacacacacactctctctctctctctctctctctctctgtctctcagatacgtataagcaaaaatttaacaagacagtacttgtttttcctaagtgtgcatgctggcatcttctgttttattatttttaaaaatactagacacagacactaagttactttgtggcctcctaatagatggcagacttcagtttgaaaagcatccctttggaatgtggtttaaaagaagaaataatacaaagacctttttggagttttttttttttttggtttttgaatattgtttaggtaaaaattattgctgcaaacacaactgaagcaaaagtactgtgtacgcaaattacttgttgcactgtagaaaatgtaatatcaggagaagttcctaaaactcacaaatatatacaaaatttcaaaacttggtgattgatccatatgtcttgaaggaatattaggcaataaacttaccttttcaagagaagttatttaacttccaattctgtgttctttaattaggaaaaaattttttcaaggttaactataatcaaataggaacttcacacaaaacctcattattcttggatatggatttggtgttctgctgttacttctaaaggtggtacagaagtcaagtttatgagcctggattatgaacagcagggcggccctgatgtgagtggttgtggaggactagagtgatgtagaagaatctgttgtgtctgagtgtgaggaggtggagagtcacgtgtgggctatgggtctgagaactgaagttttaacagttactaaaactgttttgtggctgttgtaatgtcttctcctttcctttcctttgaaaagctgttactgaatgaacgatgccgcttacaaacactgacacttcagaaccaagcatatttgatactgctgtagctatttatattgattctgcaacttctctttaacagcatcttgaagtcatccacagttgttctatatggactccacagtagagtcagagaactaagtgacaagtggagcatcgtcctcctcctgctcacttcctcctcgccacctctctggcctggctatccttcagtctgaagagtgattcactttttcttttctttttagtctttactgtggaatctcatcaaagacttggaagcaggggtggtgagaggggcctggggcgtggtgtggagggtcgagttctttgtcgtcccacagtcacccccaggaccaccttgcgaagccgaaaatacacatctgcattttaccgacaaggaacgccactgagaaagctgcagacatttgcctggggtcacgcttacagtgggcagatgaactggatgtaaatacaggccagtacaaccgcagtctcattttttctttgttttaggttttcagtttcttgttcattcatgtaccttacagttctattatctggttgataaagattcatgacaggtatcctcattctagattataacctttattcttatcaaatgcctccagtcccacaattcgctaagaattctctttctggacttgatagtgatttaatgattccccccgcccatggaatggtaggctcctaattaagtggatttaaaggcaaaaagggatgtgtgagaaggcacaagaagtggcttcatcttgcaaggtgactgtcagacaagtgggttccaacctgttaaaataagggaggaatggccacatcccgtagggactgctgtagctgaccaggaagacacaatgagggcagcagacagggctctccctgtccgctgagtcctcccatgaactcatgtttccaaaggccccactctttcttggtcagtgtcccagtttttatagaagagacctgatgaggctgtggagtaattgtataaaagcttgcactgttttcctgacttgacctgacaatgtggcgttatcttcaaattgtccagagaagtagctacttcattcaggtcctttttagcgttctgtggttgcaacttggtctcgcaagctttcgatgggcgcgccattccatggccacttttcagtaagaaaattgcctgattttctgttaactgtcacaggctgccctggaccattcctcagaactcatgggattttcgcgaccctcatcctcagtgaagttagatgaccattcctgcctttcatcccaccgattttcctaagtatctgttgcctgcaactaacactagttcctgtgtcagtaaagtactgcacttggttgcaaagaatagagatggactctgccaacataggcacggaaggtttacggggtggatggcatggctcacagatgtgatgagaaagccccggaagaagtgttgggcacagccttaggcacaacctttcctgggctcttcccatcactgaatgatccatgtatctccgggactctccttctagatccaaagtttagggcggcggaatcggactgctctggcctttgacacgtgcctgtgctttgcctgtcaacgctatggggagagagatgtcagcttacagaaaattgaggttctgtgattcagtttccctctgctctcttagaataaaagtgcttactcattgtttaaagcattctccaaattagtctgcaaattttttgatagtatacatccttaaaaaa

SEQ ID NO: 149303 - DNA, 4727 bp, Homo sapiens
  Payload ID: 9477
  Gene Symbol: LMBR1
  Gene Name: limb development membrane protein 1
  ENST ID: ENST00000359422
  CDS Start-End: 672-1526
gactgcgcggcgcccgccctcccttagtcagagctgctcgtctgaggctgctgaggcgacggccggtgtcgtggtcgcggtacctgttccaacacggctcgcgggcccgtgccggctccggtccccggcgcggctgtccgagcccctgcggcgggcggacgatggtgtggcggagcacgcggacgcgggcggcgcggcggcgggcatgaaggaggatggaagggcaggacgaggtgtcggcgcgggagcagcacttccacagccaagtgcgggagtccacgatatgtttccttctttttgccattctctacgttgtttcctacttcatcatcacaagatacaagagaaaatcagatgaacaagaagatgaagatgccatcgtcaacaggatttcgttgtttttgagcacgttcactctcgcagtgtcagctggggctgttttgcttttacccttctcaatcatcagcaatgaaatcctgctttcttttcctcagaactactatattcagtggctaaatggctccctgattcatggtttgtggaatcttgcttcccttttttccaacctttgtttatttgtattgatgccctttgcctttttctttctggaatcagaaggctttgctggcctgaaaaagggaatccgagcccgcattttagagactttggtcatgcttcttcttcttgcgttactcattcttgggatagtgtgggtagcttcagcactcattgacaacgatgccgcaagcatggaatctttatatgatctctgggagttctatctaccctatttatattcctgtatatcattgatgggatgtttgttacttctcttgtgtacaccagttggcctttctcgtatgttcacagtgatgggtcagttgctagtgaagccaacaattcttgaagacctggatgaacaaatttatatcattaccttagaggaagaagcactccagagacgactaaatgggctgtcttcatcggtggaatacaacataatggagttggaacaagaacttgaaaatgtaaagactcttaagacaaaattagagaggcgaaaaaaggcttcagcatgggaaagaaatttggtgtatcccgctgttatggttctccttcttattgagacatccatctcggtcctcttggtggcttgtaatattctttgcctattggttgatgaaacagcaatgccaaaaggaacaagggggcctggaataggaaatgcctctctttctacgtttggttttgtgggagctgcgcttgaaatcattttgattttctatcttatggtgtcctctgttgtcggcttctatagccttcgattttttggaaactttactcccaagaaagatgacacaactatgacaaagatcattggaaattgtgtgtccatcttggttttgagctctgctctgcctgtgatgtcgagaacactggggcttcataaacttcacttaccaaatacttcaagggattcagaaacagccaagccttctgtaaatgggcatcagaaagcactgtgagacgcacagacggcgtcttctgccaccaagagacccgagaactccagattcacgacattcctgtcccatgtagaagcatttccattcaaccgtggcccctcttcagaacctagacctatcagtgccatttttttttcataatctacgaagaacttggctatggctgatcttttttaaatttaactttctgatggaccctgtagtttccagttaagtgcagattccttacagacatatagaacagcgcattcttctgtagacatttgctcatgttggtaaatacaatcacccatatgaaaaaattgttttcacctgatatgaaaatgttagaaaaggcaaactccgggacttctaaagatttacttaaatcccattatgtactttattcagaatgtagaagctgacttgaaaggcatccttggtactaagtgaagcttattcagaaaatgcatttttcaaatgcaatggcaactgcttgtagatatcatttttgcagtgtatgttggagctgtaatggttgcaattatgtttcttatttccttaaaagcaaaaagcgtagtttctgatttatgttatagaatgatactgattagactttgagccaaggggaaaatactaaattcttttaaacctggagccttagagagccacaggaatatcttctgttgtacagtctaataagctgtggtaggaagtatcatgtaatcacagtttaatgacagtttatgtatatatataattcagtattccctctgataacatagttgccagtgtttaatacacttgtaacttggatttttaccttataggctatatgtatactcagttttttaaagcatttttttcagagatcacttaattccccatgcttctgcaatgcatataaaaactataaatgccgagtggtagaaactcctctttcttcatagtcctcaggctttggttacatttgcatatgccatttgaagcctccagcttttaccagtttaacatccaaagttcacagcatcagcattcatggtgtaagaacagttttgcagtataacacgatctgataatcattcagttattaaattgtaaataattattgggatggtttcttggctttaagtccactgaataaaaactatgaaattgcactctgtgtcaaccatccactaggatagaataccgaaatctgtgcatgcaaaaataggagatgggcccatttgcacacaattcgtagttatgcagtctgctatataaatatgttcacatgcactgtgtgtatgaaaatagatggtctgtgttcagacaaaagtaaaacatttttttcaaattgttacatttaaaggttttctgggagaaatttatgaaacgcaggctgtgtctatttgacatcagaaatttccactttaaaccaaaataataagaaactttaatctgtatatttacaacctttgttgagtacacttcccccttatttatacgtctgcatttccttccgagcttcacatctttctaaaatgcagcttggttttaaaataaaagaacattcattttgtgattctaaacaagcttcagtaaataccaccagtatagtactggtgaatttctcagcataaaatcgacatacctaaaaagttaataaaattcagctcttttccaatttcattgttatgcctattgaagtattaattgccaggtttgatttttagtgaagcttggagtccatactttgagcagaccaagtgaagggaagaacagaaagaaactcaggagtagagtaatatcacttctcacttacaccactttcaggcacatccaaagagttcctagatacttggaaaatgtctgaaaatttttaagtaaaatactaaacttttcagtgtttagctcaactttttgttcatttggaagtttctctccatccgaggacttaagccagttttggatttgtaagccctgagtacaatacacttcctggaggcatcctcactgctgttgaagcaaaggatatgcatggggtggaaggacggcttcgaacctgggactcatatgccttgagaacaaatagattgttacagccttgggctgctgcgtaatcacggttcctcgaggctcttcctgagcacatgcccaagcatctgcctctggagagactgactccaaatgcaggtgcttccattggagctaggtcggaggctgctttatatgacgaactccagaaatggatgccagaatacggaggccaaacgttctgagtcctggtaaggacagtcgctctgggggtcctcattttactgcagttcctgcacgccagtgaaagagaggagatagaccctggaaggcagagctgcagatgctcatcatcaggtcaattctggagctacagttttgtttctgactggatagggatgcaccagtgactgtcacatcaagcagtccttttattctctctcctttagtatcgattttaaagggcattaggcactatggttccagagtttcttggggaaaacttgcagattcttattaattggttctgcaatacttaaataaattattttacaattataagttttcagattataacatttgtattaatttttactgattttccaagatacttcttagatttactatttacgtagctttatgtacattctctgtaaaaatagacctctaaatatgaggctttacatgaaatttgtacacacatacacactaatgttagctccttaaattgctgcactaaggtgctggttagtagagatggacggagcctctcgcgttttgctctcagatgtgttaaaggcgcacgtgtacctgctctcagcggcagtgcggcctccccatctgctgggtgcccatggccctccctgcagcctcagtgatgacctcgtctgccagggacacaggttttcatcatttacaggctcttatgtgctagttttgttggtagcacgttatttaatgcataaaggcagaattcttacaagtttttttttttaatgtgaacatagatgcagcaccgactttttaaacttgaaaaaactggtataatgttaacttttaaaaataacatttggacacactagtaattgatttttgtttacagattgttttgtttacaaattgttagtctttgtttctatgagatacttttagtgtgactttttaaatgtcttagaaattaaaagttgtacaaaaagtgatttc

SEQ ID NO: 149304 - DNA, 451 bp, Homo sapiens
  Payload ID: 9477
  Gene Symbol: LMBR1
  Gene Name: limb development membrane protein 1
  ENST ID: ENST00000414218
  CDS Start-End: 187-303
agagctgctcgtctgaggctgctgaggcgacggccggtgtcgtggtcgcggtacctgttccaacacggctcgcgggcccgtgccggctccggtccccggcgcggctgtccgagcccctgcggcgggcggacgatggtgtggcggagcacgcggacgcgggcggcgcggcggcgggcatgaaggaggatggaagggcaggacgaggtgtcggcgcgggagcagcacttccacagccaagtgcgggagtccacgatgaacaagaagatgaagatgccatcgtcaacaggatttcgttgtttttgagcacgttcactctcgcagtgtcagctggggctgttttgcttttacccttctcaatcatcagcaatgaaatcctgctttcttttcctcagaactactatattcagtggctaaatggctccctgattcatggtttgtggaatcttgcttc

SEQ ID NO: 149305 - DNA, 762 bp, Homo sapiens
  Payload ID: 9477
  Gene Symbol: LMBR1
  Gene Name: limb development membrane protein 1
  ENST ID: ENST00000444719
  CDS Start-End: 165-356
tgaggcgacggccggtgtcgtggtcgcggtacctgttccaacacggctcgcgggcccgtgccggctccggtccccggcgcggctgtccgagcccctgcggcgggcggacgatggtgtggcggagcacgcggacgcgggcggcgcggcggcgggcatgaaggaggatggaagggcaggacgaggtgtcggcgcgggagcagcacttccacagccaagtgcgggagtccacgatatgtttccttctttttgccattctctacgttgtttcctacttcatcatcacaagatacaagagaaaatcagatgaacaagaagatgaagatgccatcgtcaacaggatttcgtatgtattttaaagttgtttttgagcacgttcactctcgcagtgtcagctggggctgttttgcttttacccttctcaatcatcagcaatgaaatcctgctttcttttcctcagaactactatattcagtggctaaatggctccctgattcatggtttgtggaatcttgcttcccttttttccaacctttgtttatttgtattgatgccctttgcctttttctttctggaatcagaaggctttgctggcctgaaaaagggaatccgagcccgcattttagagactttggtcatgcttcttcttcttgcgttactcattcttgggatagtgtgggtagcttcagcactcattgacaacgatgccgcaagcatggaatctttatatgatctctgggagttctatctaccctatttatattc

SEQ ID NO: 149306 - DNA, 930 bp, Homo sapiens
  Payload ID: 9477
  Gene Symbol: LMBR1
  Gene Name: limb development membrane protein 1
  ENST ID: ENST00000434503
  CDS Start-End: 216-449
gactgcgcggcgcccgccctcccttagtcagagctgctcgtctgaggctgctgaggcgacggccggtgtcgtggtcgcggtacctgttccaacacggctcgcgggcccgtgccggctccggtccccggcgcggctgtccgagcccctgcggcgggcggacgatggtgtggcggagcacgcggacgcgggcggcgcggcggcgggcatgaaggaggatggaagggcaggacgaggtgtcggcgcgggagcagcacttccacagccaagtgcgggagtccacgatatgtttccttctttttgccattctctacgttgtttcctacttcatcatcacaagatacaagagaaaatcagggaatccgagcccgcattttagagactttggtcatgcttcttcttcttgcgttactcattcttgggatagtgtgggtagcttcagcactcattgacaacgatgccgcaagcatggaatctttatatgatctctgggagttctatctaccctatttatattcctgtatatcattgatgggatgtttgttacttctcttgtgtacaccagttggcctttctcgtatgttcacagtgatgggtcagttgctagtgaagccaacaattcttgaagacctggatgaacaaatttatatcattaccttagaggaagaagcactccagagacgactaaatgggctgtcttcatcggtggaatacaacataatggagttggaacaagaacttgaaaatgtaaagactcttaagacaaaattagatcattggaaattgtgtgtccatcttggttttgagctctgctctgcctgtgatgtcgagaacactgggaatcactagatttgatctacttggcgactttggaaggtttaattggctgggaaatttctatattgtattatcctacaatttgctttttgctat

SEQ ID NO: 149307 - DNA, 2229 bp, Homo sapiens
  Payload ID: 9477
  Gene Symbol: LMBR1
  Gene Name: limb development membrane protein 1
  ENST ID: ENST00000434453
  CDS Start-End: 224-370
ccgcccccgactgcgcggcgcccgccctcccttagtcagagctgctcgtctgaggctgctgaggcgacggccggtgtcgtggtcgcggtacctgttccaacacggctcgcgggcccgtgccggctccggtccccggcgcggctgtccgagcccctgcggcgggcggacgatggtgtggcggagcacgcggacgcgggcggcgcggcggcgggcatgaaggaggatggaagggcaggacgaggtgtcggcgcgggagcagcacttccacagccaagtgcgggagtccacgatatgtttccttctttttgccattctctacgttgtttcctacttcatcatcacaagatacaagagaaaatcaggcaaatgaacaagaagatgaagatgccatcgtcaacaggatttcgttgtttttgagcacgttcactctcgcagtgtcagctggggctgttttgcttttacccttctcaatcatcagcaatgaaatcctgctttcttttcctcagaactactatattcagtggctaaatggctccctgattcatgtagagactggtttcaccgtgttagccaggatggtctcgatctcctgaccttgtgatccgcccgcctcagcctcccaaagtgctgggattacaggcgtgagccaccgtgcccggctgcatgtgtgtattatatatagcatatgcagtttatacctttaaaacctttaatattatattgtgttttccataccttttatgttcttcaaaaccatttttagtggtgtaacctgagccatgtatttagcaatatattaagctagtggttttcaaaggctatttcgtcattttaaagggtggaaccatttatccctccagtgacttgctacctgcatttttttcagatttgcaatagaaaacagctgagttgttcctcaggcaccaaacccaccctgtcctctttgtgaaacatttcacttcaccagtaaactgttgttgagcatctagaggatttttaaattttcattattatttgggtttctgacaatttctttacatggaaattagaatgaaaattattaggctaatgagtattaattgctaaactgttttctagaattacttgtttatattctcttgatagaccatgaaggtgcctcttgtttttagccataaacttaataacagtgaatattagtatctttaaaatcttttccattttcatgggtagaaggtagtttctcattattgtaatgttaatttaaaaaatttttagtcagataggacattttaattttaatttataaaatatagaaaaatatctaatacatatatcattttatttttatttatttattttattattataatttttttgagatgaagtgttgctctgttgcccaggctggagtgcagtggcgcagtcttggctcactgcaacctctacctcccgggttcaagcgattctcctgcctcagcttcctgaggagcggggactacaggtgtgtgccaccacgcccagatcatttttatatttttagtagagacagggggtttcaccatgttggccaggctggcctcaaactcctgacctcaagtgatccaccctcttcggcctctgaaatgctgggattacaggcatgagccaccgtgcccagcccatgtatattttatttgattaatgtcctttgcccttttttgtggttgttgcttttttcatattgaatttatgatctctttgtttgaacacatcagcttttcatttcaattttttacatgtttttctgattgttattttgctttttaatattaattgcttttttccagaatttgaatattttttataatatttggtttttctttttctcttggtgtctctaattgtttttgtgtttagaagattgtttcccaccctgagatatgacagctagttgtcccaataccattaattgaatattcttttctgtactgattttttatgcttcattttcagtaagctaaatattatattagcgtttgtttctgggctcaggtatgcaggttttggagtcagatagacctgggcttgaatttcaaatctgtctgaaacccttagcaaccttgagcatattgtttacgctttcagagtctcagtcttttatctataaaatgaccatatcaaggtctagtttatagaattattatatgtagtaagtggaatatatgtatagtataaagtacctagtctattgcctggtggccaagagta

SEQ ID NO: 149308 - DNA, 3629 bp, Homo sapiens
  Payload ID: 9477
  Gene Symbol: LMBR1
  Gene Name: limb development membrane protein 1
  ENST ID: ENST00000448926
  CDS Start-End: 1-138
ggtttgtggaatcttgcttcccttttttccaacctttgtttatttgtattgatgccctttgcctttttctttctggaatcagaaggctttgctggcctgaaaaaggagggcaagatgtccaggcaaaaccttgtttaaatgttcatcaccatagaaacatgacagcttctccatagagcttttggaatccgagcccgcattttagagactttggtcatgcttcttcttcttgcgttactcattcttgggatagtgtgggtagcttcagcactcattgacaacgatgccgcaagcatggaatctttatatgatctctgggagttctatctaccctatttatattcctgtatatcattgatgggatgtttgttacttctcttgtgtacaccagttggcctttctcgtatgttcacagtgatgggtcagttgctagtgaagccaacaattcttgaagacctggatgaacaaatttatatcattaccttagaggaagaagcactccagagacgactaaatgggctgtcttcatcggtggaatacaacataatggagttggaacaagaacttgaaaatgtaaagactcttaagacaaaattagagaggcgaaaaaaggcttcagcatgggaaagaaatttggtgtatcccgctgttatggttctccttcttattgagacatccatctcggtcctcttggtggcttgtaatattctttgcctattggttgatgaaacagcaatgccaaaaggaacaagggggcctggaataggaaatgcctctctttctacgtttggttttgtgggagctgcgcttgaaatcattttgattttctatcttatggtgtcctctgttgtcggcttctatagccttcgattttttggaaactttactcccaagaaagatgacacaactatgacaaagatcattggaaattgtgtgtccatcttggttttgagctctgctctgcctgtgatgtcgagaacactggggcttcataaacttcacttaccaaatacttcaagggattcagaaacagccaagccttctgtaaatgggcatcagaaagcactgtgagacgcacagacggcgtcttctgccaccaagagacccgagaactccagattcacgacattcctgtcccatgtagaagcatttccattcaaccgtggcccctcttcagaacctagacctatcagtgccatttttttttcataatctacgaagaacttggctatggctgatcttttttaaatttaactttctgatggaccctgtagtttccagttaagtgcagattccttacagacatatagaacagcgcattcttctgtagacatttgctcatgttggtaaatacaatcacccatatgaaaaaattgttttcacctgatatgaaaatgttagaaaaggcaaactccgggacttctaaagatttacttaaatcccattatgtactttattcagaatgtagaagctgacttgaaaggcatccttggtactaagtgaagcttattcagaaaatgcatttttcaaatgcaatggcaactgcttgtagatatcatttttgcagtgtatgttggagctgtaatggttgcaattatgtttcttatttccttaaaagcaaaaagcgtagtttctgatttatgttatagaatgatactgattagactttgagccaaggggaaaatactaaattcttttaaacctggagccttagagagccacaggaatatcttctgttgtacagtctaataagctgtggtaggaagtatcatgtaatcacagtttaatgacagtttatgtatatatataattcagtattccctctgataacatagttgccagtgtttaatacacttgtaacttggatttttaccttataggctatatgtatactcagttttttaaagcatttttttcagagatcacttaattccccatgcttctgcaatgcatataaaaactataaatgccgagtggtagaaactcctctttcttcatagtcctcaggctttggttacatttgcatatgccatttgaagcctccagcttttaccagtttaacatccaaagttcacagcatcagcattcatggtgtaagaacagttttgcagtataacacgatctgataatcattcagttattaaattgtaaataattattgggatggtttcttggctttaagtccactgaataaaaactatgaaattgcactctgtgtcaaccatccactaggatagaataccgaaatctgtgcatgcaaaaataggagatgggcccatttgcacacaattcgtagttatgcagtctgctatataaatatgttcacatgcactgtgtgtatgaaaatagatggtctgtgttcagacaaaagtaaaacatttttttcaaattgttacatttaaaggttttctgggagaaatttatgaaacgcaggctgtgtctatttgacatcagaaatttccactttaaaccaaaataataagaaactttaatctgtatatttacaacctttgttgagtacacttcccccttatttatacgtctgcatttccttccgagcttcacatctttctaaaatgcagcttggttttaaaataaaagaacattcattttgtgattctaaacaagcttcagtaaataccaccagtatagtactggtgaatttctcagcataaaatcgacatacctaaaaagttaataaaattcagctcttttccaatttcattgttatgcctattgaagtattaattgccaggtttgatttttagtgaagcttggagtccatactttgagcagaccaagtgaagggaagaacagaaagaaactcaggagtagagtaatatcacttctcacttacaccactttcaggcacatccaaagagttcctagatacttggaaaatgtctgaaaatttttaagtaaaatactaaacttttcagtgtttagctcaactttttgttcatttggaagtttctctccatccgaggacttaagccagttttggatttgtaagccctgagtacaatacacttcctggaggcatcctcactgctgttgaagcaaaggatatgcatggggtggaaggacggcttcgaacctgggactcatatgccttgagaacaaatagattgttacagccttgggctgctgcgtaatcacggttcctcgaggctcttcctgagcacatgcccaagcatctgcctctggagagactgactccaaatgcaggtgcttccattggagctaggtcggaggctgctttatatgacgaactccagaaatggatgccagaatacggaggccaaacgttctgagtcctggtaaggacagtcgctctgggggtcctcattttactgcagttcctgcacgccagtgaaagagaggagatagaccctggaaggcagagctgcagatgctcatcatcaggtcaattctggagctacagttttgtttctgactggatagggatgcaccagtgactgtcacatcaagcagtccttttattctctctcctttagtatcgattttaaagggcattaggcactatggttccagagtttcttggggaaaacttgcagattcttattaattggttctgcaatacttaaataaattattttacaattata

SEQ ID NO: 149309 - DNA, 3457 bp, Homo sapiens
  Payload ID: 9477
  Gene Symbol: LMBR1
  Gene Name: limb development membrane protein 1
  ENST ID: ENST00000415428
  CDS Start-End: 1-1590
gggcaggacgaggtgtcggcgcgggagcagcacttccacagccaagtgcgggagtccacgatatgtttccttctttttgccattctctacgttgtttcctacttcatcatcacaagatacaagagaaaatcagatgaacaagaagatgaagatgccatcgtcaacaggatttcgttgtttttgagcacgttcactctcgcagtgtcagctggggctgttttgcttttacccttctcaatcatcagcaatgaaatcctgctttcttttcctcagaactactatattcagtggctaaatggctccctgattcatggtttgtggaatcttgcttcccttttttccaacctttgtttatttgtattgatgccctttgcctttttctttctggaatcagaaggctttgctggcctgaaaaagggaatccgagcccgcattttagagactttggtcatgcttcttcttcttgcgttactcattcttgggatagtgtgggtagcttcagcactcattgacaacgatgccgcaagcatggaatctttatatgatctctgggagttctatctaccctatttatattcctgtatatcattgatgggatgtttgttacttctcttgtgtacaccagttggcctttctcgtatgttcacagtgatgggtcagttgctagtgaagccaacaattcttgaagacctggatgaacaaatttatatcattaccttagaggaagaagcactccagagacgactaaatgtgggaatgctttgtgcgggaaatccagaagttgcaacaggaagacaagtgccagaagaacaagctggacagctacttttgggaaaatggattcaggagggaggagacatgatagcaaacccacggctgtcttcatcggtggaatacaacataatggagttggaacaagaacttgaaaatgtaaagactcttaagacaaaattagagaggcgaaaaaaggcttcagcatgggaaagaaatttggtgtatcccgctgttatggttctccttcttattgagacatccatctcggtcctcttggtggcttgtaatattctttgcctattggttgatgaaacagcaatgccaaaaggaacaagggggcctggaataggaaatgcctctctttctacgtttggttttgtgggagctgcgcttgaaatcattttgattttctatcttatggtgtcctctgttgtcggcttctatagccttcgattttttggaaactttactcccaagaaagatgacacaactatgacaaagatcattggaaattgtgtgtccatcttggttttgagctctgctctgcctgtgatgtcgagaacactgggaatcactagatttgatctacttggcgactttggaaggtttaattggctgggaaatttctatattgtattatcctacaatttgctttttgctattgtgacaacattgtgtctggtccgaaaattcacctctgcagttcgagaagaacttttcaaggccctagggcttcataaacttcacttaccaaatacttcaagggattcagaaacagccaagccttctgtaaatgggcatcagaaagcactgtgagacgcacagacggcgtcttctgccaccaagagacccgagaactccagattcacgacattcctgtcccatgtagaagcatttccattcaaccgtggcccctcttcagaacctagacctatcagtgccatttttttttcataatctacgaagaacttggctatggctgatcttttttaaatttaactttctgatggaccctgtagtttccagttaagtgcagattccttacagacatatagaacagcgcattcttctgtagacatttgctcatgttggtaaatacaatcacccatatgaaaaaattgttttcacctgatatgaaaatgttagaaaaggcaaactccgggacttctaaagatttacttaaatcccattatgtactttattcagaatgtagaagctgacttgaaaggcatccttggtactaagtgaagcttattcagaaaatgcatttttcaaatgcaatggcaactgcttgtagatatcatttttgcagtgtatgttggagctgtaatggttgcaattatgtttcttatttccttaaaagcaaaaagcgtagtttctgatttatgttatagaatgatactgattagactttgagccaaggggaaaatactaaattcttttaaacctggagccttagagagccacaggaatatcttctgttgtacagtctaataagctgtggtaggaagtatcatgtaatcacagtttaatgacagtttatgtatatatataattcagtattccctctgataacatagttgccagtgtttaatacacttgtaacttggatttttaccttataggctatatgtatactcagttttttaaagcatttttttcagagatcacttaattccccatgcttctgcaatgcatataaaaactataaatgccgagtggtagaaactcctctttcttcatagtcctcaggctttggttacatttgcatatgccatttgaagcctccagcttttaccagtttaacatccaaagttcacagcatcagcattcatggtgtaagaacagttttgcagtataacacgatctgataatcattcagttattaaattgtaaataattattgggatggtttcttggctttaagtccactgaataaaaactatgaaattgcactctgtgtcaaccatccactaggatagaataccgaaatctgtgcatgcaaaaataggagatgggcccatttgcacacaattcgtagttatgcagtctgctatataaatatgttcacatgcactgtgtgtatgaaaatagatggtctgtgttcagacaaaagtaaaacatttttttcaaattgttacatttaaaggttttctgggagaaatttatgaaacgcaggctgtgtctatttgacatcagaaatttccactttaaaccaaaataataagaaactttaatctgtatatttacaacctttgttgagtacacttcccccttatttatacgtctgcatttccttccgagcttcacatctttctaaaatgcagcttggttttaaaataaaagaacattcattttgtgattctaaacaagcttcagtaaataccaccagtatagtactggtgaatttctcagcataaaatcgacatacctaaaaagttaataaaattcagctcttttccaatttcattgttatgcctattgaagtattaattgccaggtttgatttttagtgaagcttggagtccatactttgagcagaccaagtgaagggaagaacagaaagaaactcaggagtagagtaatatcacttctcacttacaccactttcaggcacatccaaagagttcctagatacttggaaaatgtctgaaaatttttaagtaaaatactaaacttttca

SEQ ID NO: 149310 - DNA, 678 bp, Homo sapiens
  Payload ID: 9477
  Gene Symbol: LMBR1
  Gene Name: limb development membrane protein 1
  ENST ID: ENST00000434278
  CDS Start-End: 190-333
gtcagagctgctcgtctgaggctgctgaggcgacggccggtgtcgtggtcgcggtacctgttccaacacggctcgcgggcccgtgccggctccggtccccggcgcggctgtccgagcccctgcggcgggcggacgatggtgtggcggagcacgcggacgcgggcggcgcggcggcgggcatgaaggaggatggaagggcaggacgaggtgtcggcgcgggagcagcacttccacagccaagtgcgggagtccacggttgtttttgagcacgttcactctcgcagtgtcagctggggctgttttgcttttacccttctcaatcatcagcaatgaaatcctgctttcttttcctcagaactactatattcagtggctaaatggctccctgattcatggtttgtggaatcttgcttcccttttttccaacctttgtttatttgtattgatgccctttgcctttttctttctggaatcagaaggctttgctggcctgaaaaagggaatccgagcccgcattttagagactttggtcatgcttcttcttcttgcgttactcattcttgggatagtgtgggtagcttcagcactcattgacaacgatgccgcaagcatggaatctttatatgatctctgggagttctatctaccctatttatattcctgtatatcattgatggg

SEQ ID NO: 149311 - DNA, 2922 bp, Homo sapiens
  Payload ID: 9477
  Gene Symbol: LMBR1
  Gene Name: limb development membrane protein 1
  ENST ID: ENST00000454132
  CDS Start-End: 167-325
gctgaggcgacggccggtgtcgtggtcgcggtacctgttccaacacggctcgcgggcccgtgccggctccggtccccggcgcggctgtccgagcccctgcggcgggcggacgatggtgtggcggagcacgcggacgcgggcggcgcggcggcgggcatgaaggaggatggaagggcaggacgaggtgtcggcgcgggagcagcacttccacagccaagtgcgggagtccacgatatgtttccttctttttgccattctctacgttgtttcctacttcatcatcacaagatacaagagaaaatcaggatctccttctgtcccctaggccggagagcagtggggcaatcatggctgactgtagcctcgacctcctgggctcaagtgattctccaacctcagcctcctgagtatcctgcactacagatgaacaagaagatgaagatgccatcgtcaacaggatttcgttgtttttgagcacgttcactctcgcagtgtcagctggggctgttttgcttttacccttctcaatcatcagcaatgaaatcctgctttcttttcctcagaactactatattcagtggctaaatggctccctgattcatggtttgtggaatcttgcttcccttttttccaacctttgtttatttgtattgatgccctttgcctttttctttctggaatcagaaggctttgctggcctgaaaaaggagggcaagatgtccaggcaaaaccttgtttaaatgttcatcaccatagaaacatgacagcttctccatagagcttttggaatccgagcccgcattttagagactttggtcatgcttcttcttcttgcgttactcattcttgggatagtgtgggtagcttcagcactcattgacaacgatgccgcaagcatggaatctttatatgatctctgggagttctatctaccctatttatattcctgtatatcattgatgggatgtttgttacttctcttgtgtacaccagttggcctttctcgtatgttcacagtgatgggtcagttgctagtgaagccaacaattcttgaagacctggatgaacaaatttatatcattaccttagaggaagaagcactccagagacgactaaatgggctgtcttcatcggtggaatacaacataatggagttggaacaagaacttgaaaatgtaaagactcttaagacaaaattagagaggcgaaaaaaggcttcagcatgggaaagaaatttggtgtatcccgctgttatggttctccttcttattgagacatccatctcggtcctcttggtggcttgtaatattctttgcctattggttgatgaaacagcaatgccaaaaggaacaagggggcctggaataggaaatgcctctctttctacgtttggttttgtgggagctgcgcttgaaatcattttgattttctatcttatggtgtcctctgttgtcggcttctatagccttcgattttttggaaactttactcccaagaaagatgacacaactatgacaaagatcattggaaattgtgtgtccatcttggttttgagctctgctctgcctgtgatgtcgagaacactgggaatcactagatttgatctacttggcgactttggaaggtttaattggctgggaaatttctatattgtattatcctacaatttgctttttgctattgtgacaacattgtgtctggtccgaaaattcacctctgcagttcgagaagaacttttcaaggccctagggcttcataaacttcacttaccaaatacttcaagggattcagaaacagccaagccttctgtaaatgggcatcagaaagcactgtgagacgcacagacggcgtcttctgccaccaagagacccgagaactccagattcacgacattcctgtcccatgtagaagcatttccattcaaccgtggcccctcttcagaacctagacctatcagtgccatttttttttcataatctacgaagaacttggctatggctgatcttttttaaatttaactttctgatggaccctgtagtttccagttaagtgcagattccttacagacatatagaacagcgcattcttctgtagacatttgctcatgttggtaaatacaatcacccatatgaaaaaattgttttcacctgatatgaaaatgttagaaaaggcaaactccgggacttctaaagatttacttaaatcccattatgtactttattcagaatgtagaagctgacttgaaaggcatccttggtactaagtgaagcttattcagaaaatgcatttttcaaatgcaatggcaactgcttgtagatatcatttttgcagtgtatgttggagctgtaatggttgcaattatgtttcttatttccttaaaagcaaaaagcgtagtttctgatttatgttatagaatgatactgattagactttgagccaaggggaaaatactaaattcttttaaacctggagccttagagagccacaggaatatcttctgttgtacagtctaataagctgtggtaggaagtatcatgtaatcacagtttaatgacagtttatgtatatatataattcagtattccctctgataacatagttgccagtgtttaatacacttgtaacttggatttttaccttataggctatatgtatactcagttttttaaagcatttttttcagagatcacttaattccccatgcttctgcaatgcatataaaaactataaatgccgagtggtagaaactcctctttcttcatagtcctcaggctttggttacatttgcatatgccatttgaagcctccagcttttaccagtttaacatccaaagttcacagcatcagcattcatggtgtaagaacagttttgcagtataacacgatctgataatcattcagttattaaattgtaaataatta

SEQ ID NO: 149312 - DNA, 2934 bp, Homo sapiens
  Payload ID: 9478
  Gene Symbol: LMBR1L
  Gene Name: limb development membrane protein 1-like
  Uniprot ID: Q6UX01
  ENST ID: ENST00000267102
  CDS Start-End: 344-1813
tgtgtcgtcactagatctcttaaaaagatggaccctcagcggcgcttcctcgtagcgagcctagtggcgggtgtttgcattgaaacgtgagcgcgacccgaccttaaagagtggggagcaaagggaggacagagccctttaaaacgaggcgggtggtgcctgcccctttaagggcggggcgtccggacgactgtatctgagccccagactgccccgagtttctgtcgcaggctgcgaggaaaggcccctaggctgggtctgggtgcttggcggcggcggcttcctccccgctcgtcctccccgggcccagaggcacctcggcttcagtcatgctgagcagagtatggaagcacctgactacgaagtgctatccgtgcgagaacagctattccacgagaggatccgcgagtgtattatatcaacacttctgtttgcaacactgtacatcctctgccacatcttcctgacccgcttcaagaagcctgctgagttcaccacagtggatgatgaagatgccaccgtcaacaagattgcgctcgagctgtgcacctttaccctggcaattgccctgggtgctgtcctgctcctgcccttctccatcatcagcaatgaggtgctgctctccctgcctcggaactactacatccagtggctcaacggctccctcatccatggcctctggaaccttgtttttctcttctccaacctgtccctcatcttcctcatgccctttgcatatttcttcactgagtctgagggctttgctggctccagaaagggtgtcctgggccgggtctatgagacagtggtgatgttgatgctcctcactctgctggtgctaggtatggtgtgggtggcatcagccattgtggacaagaacaaggccaacagagagtcactctatgacttttgggagtactatctcccctacctctactcatgcatctccttccttggggttctgctgctcctggtgtgtactccactgggtctcgcccgcatgttctccgtcactgggaagctgctagtcaagccccggctgctggaagacctggaggagcagctgtactgctcagcctttgaggaggcagccctgacccgcaggatctgtaatcctacttcctgctggctgcctttagacatggagctgctacacagacaggtcctggctctgcagacacagagggtcctgctggagaagaggcggaaggcttcagcctggcaacggaacctgggctaccccctggctatgctgtgcttgctggtgctgacgggcctgtctgtgctcattgtggccatccacatcctggagctgctcatcgatgaggctgccatgccccgaggcatgcagggtacctccttaggccaggtctccttctccaagctgggctcctttggtgccgtcattcaggttgtactcatcttttacctaatggtgtcctcagttgtgggcttctatagctctccactcttccggagcctgcggcccagatggcacgacactgccatgacgcagataattgggaactgtgtctgtctcctggtcctaagctcagcacttcctgtcttctctcgaaccctggggctcactcgctttgacctgctgggtgactttggacgcttcaactggctgggcaatttctacattgtgttcctctacaacgcagcctttgcaggcctcaccacactctgtctggtgaagaccttcactgcagctgtgcgggcagagctgatccgggcctttgggctggacagactgccgctgcccgtctccggtttcccccaggcatctaggaagacccagcaccagtgacctccagctgggggtgggaaggaaaaaactggacactgccatctgctgcctaggcctggagggaagcccaaggctacttggacctcaggacctggaatctgagagggtgggtggcagaggggagcagagccatctgcactattgcataatctgagccagagtttgggaccaggacctcctgcttttccatacttaactgtggcctcagcatggggtagggctgggtgactgggtctagcccctgatcccaaatctgtttacacatcaatctgcctcactgctgttctgggccatccccatagccatgtttacatgatttgatgtgcaatagggtggggtaggggcagggaaaggactgggccagggcaggctcgggagatagattgtctcccttgcctctggcccagcagagcctaagcactgtgctatcctggaggggctttggaccacctgaaagaccaaggggatagggaggaggaggcttcagccatcagcaataaagttgatcccagggtttgctttgtttttttaaagcacctgtctctgtgtatatttgaacagccttgctcccaccagcccggcgtctgcccagtaagagaagcagaggggtcctgcccaccatccttttccttccccttcatctatattattaccatcctttggggacttggatctggtgttaggccatgcagttgggcagtgggaaactcctccatcctcagtcttgcttaaagctggcttgtcccctgactcctccttatattcatggccttgtttctgtaccttgagtattgggggtaggacatgggcataggagtaggctaacctccccgatacactcataccttcagccctatcctccctggcttaactattggatatagagtaaaataagtggctggctgacaaggattttcatttcctacctgagagaagaatctagctttttactagaggccatcagtttcttgaaaagcccatgtgctatgttgggagtaagagcgcaaaacttaggcttatacagattgtgtattgcacagcttccagggacaccattcacctcatagtcattgtgtggatagttactatgatagttttctaataaatgtcagtcatcttga

SEQ ID NO: 149313 - DNA, 2334 bp, Homo sapiens
  Payload ID: 9478
  Gene Symbol: LMBR1L
  Gene Name: limb development membrane protein 1-like
  ENST ID: ENST00000417750
  CDS Start-End: 127-351
gtttctgtcgcaggctgcgaggaaaggcccctaggctgggtctgggtgcttggcggcggcggcttcctccccgctcgtcctccccgggcccagaggcacctcggcttcagtcatgctgagcagagtatggaagcacctgactacgaagtgctatccgtgcgagaacagctattccacgagaggatccgcgagtgtattatatcaacacttctgtttgcaacactgtacatcctctgccacatcttcctgacccgcttcaagaagcctgctgagttcaccacagtttcatcctacaaaatgggcgtaacaatgtctacctactccattgtgtggaccaaaggagatggttaatgtgaaagccctttgtgaacctgaagtgagcaactgctggatgaatgtcattacgggcacaggctctgtgtcatctcctctcctagtgcttccacagccaggaccagagacctccctgatgactggggaacctgtggatgatgaagatgccaccgtcaacaagattgcgctcgagctgtgcacctttaccctggcaattgccctgggtgctgtcctgctcctgcccttctccatcatcagcaatgaggtgctgctctccctgcctcggaactactacatccagtggctcaacggctccctcatccatggcctctggaaccttgtttttctcttctccaacctgtccctcatcttcctcatgccctttgcatatttcttcactgagtctgagggctttgctggctccagaaagggtgtcctgggccgggtctatgagacagtggtgatgttgatgctcctcactctgctggtgctaggtatggtgtgggtggcatcagccattgtggacaagaacaaggccaacagagagtcactctatgacttttgggagtactatctcccctacctctactcatgcatctccttccttggggttctgctgctcctggtgtgtactccactgggtctcgcccgcatgttctccgtcactgggaagctgctagtcaagccccggctgctggaagacctggaggagcagctgtactgctcagcctttgaggaggcagccctgacccgcaggatctgtaatcctacttcctgctggctgcctttagacatggagctgctacacagacaggtcctggctctgcagacacagagggtcctgctggagaagaggcggaaggcttcagcctggcaacggaacctgggctaccccctggctatgctgtgcttgctggtgctgacgggcctgtctgtgctcattgtggccatccacatcctggagctgctcatcgatgaggctgccatgccccgaggcatgcagggtacctccttaggccaggtctccttctccaagctgggctcctttggtgccgtcattcaggttgtactcatcttttacctaatggtgtcctcagttgtgggcttctatagctctccactcttccggagcctgcggcccagatggcacgacactgccatgacgcagataattgggaactgtgtctgtctcctggtcctaagctcagcacttcctgtcttctctcgaaccctggggctcactcgctttgacctgctgggtgactttggacgcttcaactggctgggcaatttctacattgtgttcctctacaacgcagcctttgcaggcctcaccacactctgtctggtgaagaccttcactgcagctgtgcgggcagagctgatccgggcctttgggctggacagactgccgctgcccgtctccggtttcccccaggcatctaggaagacccagcaccagtgacctccagctgggggtgggaaggaaaaaactggacactgccatctgctgcctaggcctggagggaagcccaaggctacttggacctcaggacctggaatctgagagggtgggtggcagaggggagcagagccatctgcactattgcataatctgagccagagtttgggaccaggacctcctgcttttccatacttaactgtggcctcagcatggggtagggctgggtgactgggtctagcccctgatcccaaatctgtttacacatcaatctgcctcactgctgttctgggccatccccatagccatgtttacatgatttgatgtgcaatagggtggggtaggggcagggaaaggactgggccagggcaggctcgggagatagattgtctcccttgcctctggcccagcagagcctaagcactgtgctatcctggaggggctttggaccacctgaaagaccaaggggatagggaggaggaggcttcagccatcagcaataaagttgatcccagggtttgctttgtttttttaaagca

SEQ ID NO: 149314 - DNA, 1081 bp, Homo sapiens
  Payload ID: 9478
  Gene Symbol: LMBR1L
  Gene Name: limb development membrane protein 1-like
  ENST ID: ENST00000457164
  CDS Start-End: 296-757
ctcgtagcgagcctagtggcgggtgtttgcattgaaacgtgagcgcgacccgaccttaaagagtggggagcaaagggaggacagagccctttaaaacgaggcgggtggtgcctgcccctttaagggcggggcgtccggacgactgtatctgagccccagactgccccgagtttctgtcgcaggctgcgaggaaaggcccctaggctgggtctgggtgcttggcggcggcggcttcctccccgctcgtcctccccgggcccagaggcacctcggcttcagtcatgctgagcagagtatggaagcacctgactacgaagtgctatccgtgcgagaacagctattccacgagaggatccgcgagtgtattatatcaacacttctgtttgcaacactgtacatcctctgccacatcttcctgacccgcttcaagaagcctgctgagttcaccacaggctcgagctgtgcacctttaccctggcaattgccctgggtgctgtcctgctcctgcccttctccatcatcagcaatgaggtgctgctctccctgcctcggaactactacatccagtggctcaacggctccctcatccatggtgtgtggctcctggaagctgcttggggcctctggaaccttgtttttctcttctccaacctgtccctcatcttcctcatgccctttgcatatttcttcactgagtctgagggctttgctggctccagaaagggtgtcctgggccgggtctatgagacagtggtgatgttgatgctcctcactctgctggtgctaggtatggtgtgggtggcatcagccattgtggacaagaacaaggccaacagagagtcactctatgacttttgggagtactatctcccctacctctactcatgcatctccttccttggggttctgctgctcctggtgtgtactccactgggtctcgcccgcatgttctccgtcactgggaagctgctagtcaagccccggctgctggaagacctggaggagcagctgtactgctcagcctttgaggaggcagccctgacccgcaggatctgtaatcctacttcctgctggctgcctt

SEQ ID NO: 149315 - DNA, 535 bp, Homo sapiens
  Payload ID: 9478
  Gene Symbol: LMBR1L
  Gene Name: limb development membrane protein 1-like
  ENST ID: ENST00000551854
  CDS Start-End: 112-535
gttgggggtctccggggtctgagagcctgcggagtctgccttagtctgataatcggggaaggatgggtttgcttctcaaactgggttgagggcaaactcagctgacgttggatgaaggggagacgtcgtcacactgagcttgattccagaaaagaggggaggtgtagggatggcagacgggaggaacctggggacttgatatcaacacttctgtttgcaacactgtacatcctctgccacatcttcctgacccgcttcaagaagcctgctgagttcaccacagtggatgatgaagatgccaccgtcaacaagattgcgctcgagctgtgcacctttaccctggcaattgccctgggtgctgtcctgctcctgcccttctccatcatcagcaatgaggtgctgctctccctgcctcggaactactacatccagtggctcaacggctccctcatccatggcctctggaaccttgtttttctcttctccaacctgtccctcatcttcctcatgccctttgcatatttcttcactgagt

SEQ ID NO: 149316 - DNA, 1866 bp, Homo sapiens
  Payload ID: 9478
  Gene Symbol: LMBR1L
  Gene Name: limb development membrane protein 1-like
  ENST ID: ENST00000547670
  CDS Start-End: 323-502
aaaaagatggaccctcagcggcgcttcctcgtagcgagcctagtggcgggtgtttgcattgaaacgtgagcgcgacccgaccttaaagagtggggagcaaagggaggacagagccctttaaaacgaggcgggtggtgcctgcccctttaagggcggggcgtccggacgactgtatctgagccccagactgccccgagtttctgtcgcaggctgcgaggaaaggcccctaggctgggtctgggtgcttggcggcggcggcttcctccccgctcgtcctccccgggcccagaggcacctcggcttcagtcatgctgagcagagtatggaagcacctgactacgaagtgctatccgtgcgagaacagctattccacgagaggatccgcgagtgtattgctgggttcccagcctctcagccattccggggtttccccagtgagtggtcctcccagggcttcagagggtacctggctgctgttccttacgccctccctgccacttagagcgacaactgaaccttgcgcacagaagtggactactcaattctgggatatcaacacttctgtttgcaacactgtacatcctctgccacatcttcctgacccgcttcaagaagcctgctgagttcaccacagtggatgatgaagatgccaccgtcaacaagattgcgctcgagctgtgcacctttaccctggcaattgccctgggtgctgtcctgctcctgcccttctccatcatcagcaatgaggtgctgctctccctgcctcggaactactacatccagtggctcaacggctccctcatccatggcctctggaaccttgtttttctcttctccaacctgtccctcatcttcctcatgccctttgcatatttcttcactgagtctgagggctttgctggctccagaaagggtgtcctgggccgggtctatgagacagtggtgatgttgatgctcctcactctgctggtgctaggtatggtgtgggtggcatcagccattgtggacaagaacaaggccaacagagagtcactctatgacttttgggagtactatctcccctacctctactcatgcatctccttccttggggttctgctgctcctggtgtgtactccactgggtctcgcccgcatgttctccgtcactgggaagctgctagtcaagccccggctgctggaagacctggaggagcagctgtactgctcagcctttgaggaggcagccctgacccgcaggatctgtaatcctacttcctgctggctgcctttagacatggagctgctacacagacaggtcctggctctgcagacacagagggtcctgctggagaagaggcggaaggcttcagcctggcaacggaacctgggctaccccctggctatgctgtgcttgctggtgctgacgggcctgtctgtgctcattgtggccatccacatcctggagctgctcatcgatgaggctgccatgccccgaggcatgcaggtaccaggctgccctcccaccttacctaatggtgtcctcagttgtgggcttctatagctctccactcttccggagcctgcggcccagatggcacgacactgccatgacgcagataattgggaactgtgtctgtctcctggtcctaagctcagcacttcctgtcttctctcgaaccctggggctcactcgctttgacctgctgggtgactttggacgcttcaactggctgggcaatttctacattgtgttcctctacaacgcagcctttgcaggcctcaccacactctgtctggtgaagaccttcactgcagctgtgcgggcagagctgatccgggcctttgggctggacagactgccgctgcccgtctccggtttccccca

SEQ ID NO: 149317 - DNA, 581 bp, Homo sapiens
  Payload ID: 9478
  Gene Symbol: LMBR1L
  Gene Name: limb development membrane protein 1-like
  ENST ID: ENST00000547675
  CDS Start-End: 121-581
gtcgcaggctgcgaggaaaggcccctaggctgggtctgggtgcttggcggcggcggcttcctccccgctcgtcctccccgggcccagaggcacctcggcttcagtcatgctgagcagagtatggaagcacctgactacgaagtgctatccgtgcgagaacagctattccacgagaggatccgcgagtgtattatatcaacacttctgtttgcaacactgtacatcctctgccacatcttcctgacccgcttcaagaagcctgctgagttcaccacagtggatgatgaagatgccaccgtcaacaagattgcgctcgagctgtgcacctttaccctggcaattgccctgggtgctgtcctgctcctgcccttctccatcatcagcaatgaggtgctgctctccctgcctcggaactactacatccagtggctcaacggctccctcatccatgtgtgtactccactgggtctcgcccgcatgttctccgtcactgggaagctgctagtcaagccccggctgctggaagacctggaggagcagctgtactgctcagcctttgaggaggcagccctgacccgcag

SEQ ID NO: 149318 - DNA, 2235 bp, Homo sapiens
  Payload ID: 9478
  Gene Symbol: LMBR1L
  Gene Name: limb development membrane protein 1-like
  Uniprot ID: Q6UX01
  ENST ID: ENST00000547382
  CDS Start-End: 296-1705
ctcgtagcgagcctagtggcgggtgtttgcattgaaacgtgagcgcgacccgaccttaaagagtggggagcaaagggaggacagagccctttaaaacgaggcgggtggtgcctgcccctttaagggcggggcgtccggacgactgtatctgagccccagactgccccgagtttctgtcgcaggctgcgaggaaaggcccctaggctgggtctgggtgcttggcggcggcggcttcctccccgctcgtcctccccgggcccagaggcacctcggcttcagtcatgctgagcagagtatggaagcacctgactacgaagtgctatccgtgcgagaacagctattccacgagaggatccgcgagtgtattatatcaacacttctgtttgcaacactgtacatcctctgccacatcttcctgacccgcttcaagaagcctgctgagttcaccacagtggatgatgaagatgccaccgtcaacaagattgcgctcgagctgtgcacctttaccctggcaattgccctgggtgctgtcctgctcctgcccttctccatcatcagcaatgaggtgctgctctccctgcctcggaactactacatccagtggctcaacggctccctcatccatggcctctggaaccttgtttttctcttctccaacctgtccctcatcttcctcatgccctttgcatatttcttcactgagtctgagggctttgctggctccagaaagggtgtcctgggccgggtctatgagacagtggtgatgttgatgctcctcactctgctggtgctaggtatggtgtgggtggcatcagccattgtggacaagaacaaggccaacagagagtcactctatgacttttgggagtactatctcccctacctctactcatgcatctccttccttggggttctgctgctcctggtgtgtactccactgggtctcgcccgcatgttctccgtcactgggaagctgctagtcaagccccggctgctggaagacctggaggagcagctgtactgctcagcctttgaggaggcagccctgacccgcaggatctgtaatcctacttcctgctggctgcctttagacatggagctgctacacagacaggtcctggctctgcagacacagagggtcctgctggagaagaggcggaaggcttcagcctggcaacggaacctgggctaccccctggctatgctgtgcttgctggtgctgacgggcctgtctgtgctcattgtggccatccacatcctggagctgctcatcgatgaggctgccatgccccgaggcatgcaggttgtactcatcttttacctaatggtgtcctcagttgtgggcttctatagctctccactcttccggagcctgcggcccagatggcacgacactgccatgacgcagataattgggaactgtgtctgtctcctggtcctaagctcagcacttcctgtcttctctcgaaccctggggctcactcgctttgacctgctgggtgactttggacgcttcaactggctgggcaatttctacattgtgttcctctacaacgcagcctttgcaggcctcaccacactctgtctggtgaagaccttcactgcagctgtgcgggcagagctgatccgggcctttgggctggacagactgccgctgcccgtctccggtttcccccaggcatctaggaagacccagcaccagtgacctccagctgggggtgggaaggaaaaaactggacactgccatctgctgcctaggcctggagggaagcccaaggctacttggacctcaggacctggaatctgagagggtgggtggcagaggggagcagagccatctgcactattgcataatctgagccagagtttgggaccaggacctcctgcttttccatacttaactgtggcctcagcatggggtagggctgggtgactgggtctagcccctgatcccaaatctgtttacacatcaatctgcctcactgctgttctgggccatccccatagccatgtttacatgatttgatgtgcaatagggtggggtaggggcagggaaaggactgggccagggcaggctcgggagatagattgtctcccttgcctctggcccagcagagcctaagcactgtgctatcctggaggggctttggaccacctgaaagaccaaggggatagggaggaggaggcttcagccatcagcaataaagttgatcccagggtttgctttgttttttt

SEQ ID NO: 149319 - DNA, 771 bp, Homo sapiens
  Payload ID: 9478
  Gene Symbol: LMBR1L
  Gene Name: limb development membrane protein 1-like
  ENST ID: ENST00000551169
  CDS Start-End: 1-119
tctgccacatcttcctgacccgcttcaagaagcctgctgagttcaccacagtttcatcctacaaaatgggcgtaacaatgtctacctactccattgtgtggaccaaaggagatggttaatgtgaaagccctttgtgaacctgaagtgagcaactgctggatgaatgtcattacgggcacaggctctgtgtcatctcctctcctagtgcttccacagccaggaccagagacctccctgatgactggggaacctggtgatggtggcctttctctttatggggagcctgatggatgatgaagatgccaccgtcaacaagattgcgctcgagctgtgcacctttaccctggcaattgccctgggtgctgtcctgctcctgcccttctccatcatcagcaatgaggtgctgctctccctgcctcggaactactacatccagtggctcaacggctccctcatccatggcctctggaaccttgtttttctcttctccaacctgtccctcatcttcctcatgccctttgcatatttcttcactgagtctgagggctttgctggctccagaaagggtgtcctgggccgggtctatgagacagtggtgatgttgatgctcctcactctgctggtgctaggtatggtgtgggtggcatcagccattgtggacaagaacaaggccaacagagagtcactctatgacttttgggagtactatctcccctacctctactcatgcatctccttccttggggttctgctgctcctgggtgagtgtac

SEQ ID NO: 149320 - DNA, 768 bp, Homo sapiens
  Payload ID: 9478
  Gene Symbol: LMBR1L
  Gene Name: limb development membrane protein 1-like
  ENST ID: ENST00000553040
  CDS Start-End: 1-557
agaagaggcggaaggcttcagcctggcaacggaacctgggctaccccctggctatgctgtgcttgctggtgctgacgggcctgtctgtgctcattgtggccatccacatcctggagctgctcatcgatgaggctgccatgccccgaggcatgcaggttgtactcatcttttacctaatggtgtcctcagttgtgggcttctatagctctccactcttccggagcctgcggcccagatggcacgacactgccatgacgcagataattgggaactgtgtctgtctcctggtcctaagctcagcacttcctgtcttctctcgaaccctggggctcactcgctttgacctgctgggtgactttggacgcttcaactggctgggcaatttctacattgtgttcctctacaacgcagcctttgcaggcctcaccacactctgtctggtgaagaccttcactgcagctgtgcgggcagagctgatccgggcctttgggctggacagactgccgctgcccgtctccggtttcccccaggcatctaggaagacccagcaccagtgacctccagctgggggtgggaaggaaaaaactggacactgccatctgctgcctaggcctggagggaagcccaaggctacttggacctcaggacctggaatctgagaggagcctaagcactgtgctatcctggaggggctttggaccacctgaaagaccaaggggatagggaggaggaggcttcagccatcagcaataaagttgatcccagggt

SEQ ID NO: 149321 - DNA, 905 bp, Homo sapiens
  Payload ID: 9478
  Gene Symbol: LMBR1L
  Gene Name: limb development membrane protein 1-like
  ENST ID: ENST00000547698
  CDS Start-End: 1-378
ggcctgtctgtgctcattgtggccatccacatcctggagctgctcatcgatgaggctgccatgccccgaggcatgcagggtacctccttaggccaggtctccttctccaagctgggctcctttggtgccgtcattcaggttgtactcatcttttacctaatggtgtcctcagttgtgggcttctatagctctccactcttccggagcctgcggcccagatggcacgacactgccatgacgcagataattgggaactgtgtctgtctcctggtcctaagctcagcacttcctgtcttctctcgaaccctggggctggacagactgccgctgcccgtctccggtttcccccaggcatctaggaagacccagcaccagtgacctccagctgggggtgggaaggaaaaaactggacactgccatctgctgcctaggcctggagggaagcccaaggctacttggacctcaggacctggaatctgagagggtgggtggcagaggggagcagagccatctgcactattgcataatctgagccagagtttgggaccaggacctcctgcttttccatacttaactgtggcctcagcatggggtagggctgggtgactgggtctagcccctgatcccaaatctgtttacacatcaatctgcctcactgctgttctgggccatccccatagccatgtttacatgatttgatgtgcaatagggtggggtaggggcagggaaaggactgggccagggcaggctcgggagatagattgtctcccttgcctctggcccagcagagcctaagcactgtgctatcctggaggggctttggaccacctgaaagaccaaggggatagggaggaggaggcttcagccatcagcaataaagttgatcccagggtttgctttgtttt

SEQ ID NO: 149322 - DNA, 541 bp, Homo sapiens
  Payload ID: 9478
  Gene Symbol: LMBR1L
  Gene Name: limb development membrane protein 1-like
  ENST ID: ENST00000550815
  CDS Start-End: 123-347
ctgtcgcaggctgcgaggaaaggcccctaggctgggtctgggtgcttggcggcggcggcttcctccccgctcgtcctccccgggcccagaggcacctcggcttcagtcatgctgagcagagtatggaagcacctgactacgaagtgctatccgtgcgagaacagctattccacgagaggatccgcgagtgtattatatcaacacttctgtttgcaacactgtacatcctctgccacatcttcctgacccgcttcaagaagcctgctgagttcaccacagtttcatcctacaaaatgggcgtaacaatgtctacctactccattgtgtggaccaaaggagatggttaatgtgaaagccctttgtgaacctgaatggatgatgaagatgccaccgtcaacaagattgcgctcgagctgtgcacctttaccctggcaattgccctgggtgctgtcctgctcctgcccttctccatcatcagcaatgaggtgctgctctccctgcctcggaactactacatccagtggctcaacggctccctcat

SEQ ID NO: 149323 - DNA, 529 bp, Homo sapiens
  Payload ID: 9478
  Gene Symbol: LMBR1L
  Gene Name: limb development membrane protein 1-like
  ENST ID: ENST00000550137
  CDS Start-End: 291-529
agcgagcctagtggcgggtgtttgcattgaaacgtgagcgcgacccgaccttaaagagtggggagcaaagggaggacagagccctttaaaacgaggcgggtggtgcctgcccctttaagggcggggcgtccggacgactgtatctgagccccagactgccccgagtttctgtcgcaggctgcgaggaaaggcccctaggctgggtctgggtgcttggcggcggcggcttcctccccgctcgtcctccccgggcccagaggcacctcggcttcagtcatgctgagcagagtatggaagcacctgactacgaagtgctatccgtgcgagaacagctattccacgagaggatccgcgagtgtattatatcaacacttctgtttgcaacactgtacatcctctgccacatcttcctgacccgcttcaagaagcctgctgagttcaccacaggcctctggaaccttgtttttctcttctccaacctgtccctcatcttcctcatgccctttgcatatttcttcactgagtctga

SEQ ID NO: 149324 - DNA, 567 bp, Homo sapiens
  Payload ID: 9478
  Gene Symbol: LMBR1L
  Gene Name: limb development membrane protein 1-like
  ENST ID: ENST00000551782
  CDS Start-End: 188-567
agatctcttaaaaagatggaccctcagcggcgcttcctcgtagcgagcctagtggcgggtgtttgcattgaaacgctgcgaggaaaggcccctaggctgggtctgggtgcttggcggcggcggcttcctccccgctcgtcctccccgggcccagaggcacctcggcttcagtcatgctgagcagagtatggaagcacctgactacgaagtgctatccgtgcgagaacagctattccacgagaggatccgcgagtgtattatatcaacacttctgtttgcaacactgtacatcctctgccacatcttcctgacccgcttcaagaagcctgctgagttcaccacagtggatgatgaagatgccaccgtcaacaagattgcgctcgagctgtgcacctttaccctggcaattgccctgggtgctgtcctgctcctgcccttctccatcatcagcaatgaggtgctgctctccctgcctcggaactactacatccagtggctcaacggctccctcatccatggcctctggaaccttgtttttctcttctccaacctgtccctcatcttcct

SEQ ID NO: 149325 - DNA, 560 bp, Homo sapiens
  Payload ID: 9478
  Gene Symbol: LMBR1L
  Gene Name: limb development membrane protein 1-like
  ENST ID: ENST00000549296
  CDS Start-End: 296-445
ctcgtagcgagcctagtggcgggtgtttgcattgaaacgtgagcgcgacccgaccttaaagagtggggagcaaagggaggacagagccctttaaaacgaggcgggtggtgcctgcccctttaagggcggggcgtccggacgactgtatctgagccccagactgccccgagtttctgtcgcaggctgcgaggaaaggcccctaggctgggtctgggtgcttggcggcggcggcttcctccccgctcgtcctccccgggcccagaggcacctcggcttcagtcatgctgagcagagtatggaagcacctgactacgaagtgctatccgtgcgagaacagctattccacgagaggatccgcgagtgtattgctcgagctgtgcacctttaccctggcaattgccctgggtgctgtcctgctcctgcccttctccatcatcagcaatgaggtgctgctctccctgcctcggaactactacatccagtggctcaacggctccctcatccatggcctctggaaccttgtttttctcttctccaacctgtccctcatcttcctcatg

SEQ ID NO: 149326 - DNA, 277 bp, Homo sapiens
  Payload ID: 9478
  Gene Symbol: LMBR1L
  Gene Name: limb development membrane protein 1-like
  ENST ID: ENST00000552449
  CDS Start-End: 1-277
gcctggcaacggaacctgggctaccccctggctatgctgtgcttgctggtgctgacgggcctgtctgtgctcattgtggccatccacatcctggagctgctcatcgatgaggctgccatgccccgaggcatgcaggttgtactcatcttgtatccttctggaaacccatcattgcctctgttcagcaaacctgtctcctgggactctagaccgagcacttcttggactttttacctaatggtgtcctcagttgtgggcttctatagctctccactct

SEQ ID NO: 149327 - DNA, 1561 bp, Homo sapiens
  Payload ID: 9479
  Gene Symbol: LSAMP
  Gene Name: limbic system-associated membrane protein
  ENST ID: ENST00000333617
  CDS Start-End: 1-1038
ctgagattgctctgccttcttcccacaggactgcctgttcgcagcgtggattttaaccgaggcacggacaacatcaccgtgaggcagggggacacagccatcctcaggtgcgttgtagaagacaagaactcaaaggtggcctggttgaaccgttctggcatcatttttgctggacatgacaagtggtctctggacccacgggttgagctggagaaacgccattctctggaatacagcctccgaatccagaaggtggatgtctatgatgagggttcctacacttgctcagttcagacacagcatgagcccaagacctcccaagtttacttgatcgtacaagtcccaccaaagatctccaatatctcctcggatgtcactgtgaatgagggcagcaacgtgactctggtctgcatggccaatggccgtcctgaacctgttatcacctggagacaccttacaccaactggaagggaatttgaaggagaagaagaatatctggagatccttggcatcaccagggagcagtcaggcaaatatgagtgcaaagctgccaacgaggtctcctcggcggatgtcaaacaagtcaaggtcactgtgaactatcctcccactatcacagaatccaagagcaatgaagccaccacaggacgacaagcttcactcaaatgtgaggcctcggcagtgcctgcacctgactttgagtggtaccgggatgacactaggataaatagtgccaatggccttgagattaagagcacggagggccagtcttccctgacggtgaccaacgtcactgaggagcactacggcaactacacctgtgtggctgccaacaagctgggggtcaccaatgccagcctagtccttttcaaacgtgttttacccacaatcccccaccccattcaagaaattggtaccaccgtgcacttcaagcaaaaaggacctgggtcggtgagaggaataaatggatccatcagtctggccgtaccactgtggctgctggcagcatctctgctctgccttctcagcaaatgttaatagaataaaaatttaaaaataatttaaaaaacacacaaaaatgcgtcacacagaatacagagagagagagacagagagagagagagagagagagatgggggagaccgtttatttcacaactttgtgtgtttatacatgaagggggaaataagaaagtgaagaagaaaatacaacatttaaaacaattttacagtccatcattaaaaatttatgtatcattcaggatggagaaggttctactgggatatgtttatatctactaagcaaatgtatgctgtgtaaagactacaccacactaaggacatctggatgctgtaaaaataagagaagaaccagatggatattaagccccccaacacacactttatccttccttccttcatcttttttcatctgtggggaagaaaataaggtcttgcctttggtgtttatatttccataaccttttaattctatttttcatttgagctgacttgtagccacttcagactatcaatggaatcttatgttgagcctttctctg

SEQ ID NO: 149328 - DNA, 772 bp, Homo sapiens
  Payload ID: 9479
  Gene Symbol: LSAMP
  Gene Name: limbic system-associated membrane protein
  ENST ID: ENST00000474851
  CDS Start-End: 157-772
aatcatgggggcaggtctttcctgtgctgttctcatgagagtgaataagtttcatgagatctgatagttctataaaggggagtttccctgcatgagctctccctttgcctgctgccatccacgtaagatgtgacttgctcctccttgccttctgccatgattgtgaggctcccccagccatgtggaactgtaagtgaaaagatatcttctgaagtgttctccagaaactgtgcaggtggcggttctcttagaagaaaaagaaaggcagggatccttgaaatggtaatatttcagttgtttcatatacatagaagtgtctcacatggccagcaaggactgcctgttcgcagcgtggattttaaccgaggcacggacaacatcaccgtgaggcagggggacacagccatcctcaggtgcgttgtagaagacaagaactcaaaggtggcctggttgaaccgttctggcatcatttttgctggacatgacaagtggtctctggacccacgggttgagctggagaaacgccattctctggaatacagcctccgaatccagaaggtggatgtctatgatgagggttcctacacttgctcagttcagacacagcatgagcccaagacctcccaagtttacttgatcgtacaagtcccaccaaagatctccaatatctcctcggatgtcactgtgaatgagggcagcaacgtgactctggtctgcatggccaatggccgtcctgaacctgttatcacctggagacaccttacaccaactg

SEQ ID NO: 149329 - DNA, 9446 bp, Homo sapiens
  Payload ID: 9479
  Gene Symbol: LSAMP
  Gene Name: limbic system-associated membrane protein
  Uniprot ID: Q13449
  ENST ID: ENST00000490035
  CDS Start-End: 501-1517
ggggagagaggctctgggttgctgctgcttctgctgctgctgctgctgtgtggctgtttctgtacactcactggcaggcttggtgccggctccctcgcccgcccgcccgccagcctgggaaagtgggttacagagcgaaggagctcagctcagacactggcagaggagcatccagtcacagagagaccaaacaagaaccctttcctttggcttcctcttcagctcttccagagggcttgctatttgcactctctcttttgaaattgtgttgcttttacttttcacccttctgcttgggttttatgagggctttgttaagtcttagagggaaaagagactgagcgagggaaagagagaggcaaagtggaaaggaccataaactggcaaagcccgctctgcgctcgctgtggatgaaagccccgtgttggtgaagcctctcctcgcgagcagcgcgcacccctccagagcaccccgcggacccgcacctcggcgtggccaccatggtcaggagagttcagccggatcggaaacagttgccactggtcctactgagattgctctgccttcttcccacaggactgcctgttcgcagcgtggattttaaccgaggcacggacaacatcaccgtgaggcagggggacacagccatcctcaggtgcgttgtagaagacaagaactcaaaggtggcctggttgaaccgttctggcatcatttttgctggacatgacaagtggtctctggacccacgggttgagctggagaaacgccattctctggaatacagcctccgaatccagaaggtggatgtctatgatgagggttcctacacttgctcagttcagacacagcatgagcccaagacctcccaagtttacttgatcgtacaagtcccaccaaagatctccaatatctcctcggatgtcactgtgaatgagggcagcaacgtgactctggtctgcatggccaatggccgtcctgaacctgttatcacctggagacaccttacaccaactggaagggaatttgaaggagaagaagaatatctggagatccttggcatcaccagggagcagtcaggcaaatatgagtgcaaagctgccaacgaggtctcctcggcggatgtcaaacaagtcaaggtcactgtgaactatcctcccactatcacagaatccaagagcaatgaagccaccacaggacgacaagcttcactcaaatgtgaggcctcggcagtgcctgcacctgactttgagtggtaccgggatgacactaggataaatagtgccaatggccttgagattaagagcacggagggccagtcttccctgacggtgaccaacgtcactgaggagcactacggcaactacacctgtgtggctgccaacaagctgggggtcaccaatgccagcctagtccttttcagacctgggtcggtgagaggaataaatggatccatcagtctggccgtaccactgtggctgctggcagcatctctgctctgccttctcagcaaatgttaatagaataaaaatttaaaaataatttaaaaaacacacaaaaatgcgtcacacagaatacagagagagagagacagagagagagagagagagagagatgggggagaccgtttatttcacaactttgtgtgtttatacatgaagggggaaataagaaagtgaagaagaaaatacaacatttaaaacaattttacagtccatcattaaaaatttatgtatcattcaggatggagaaggttctactgggatatgtttatatctactaagcaaatgtatgctgtgtaaagactacaccacactaaggacatctggatgctgtaaaaataagagaagaaccagatggatattaagccccccaacacacactttatccttccttccttcatcttttttcatctgtggggaagaaaataaggtcttgcctttggtgtttatatttccataaccttttaattctatttttcatttgagctgacttgtagccacttcagactatcaatggaatcttatgttgagcctttctctggctttccttcctccactatctctccaactttagagatcatcccctctccctccagtgcgttctatctcccccacacccaccctagatactcccttttcacccacctttcctccctcacctctcctcacctccaccccctccccagagcactagtcatgccgcaaatgctaggaagtgccattttcattttctccactgtgcgtgtgtgctcaagtctttcgctctcacgtgggtgtacatgtgtgtgagcgtgtgtgtgtctctctctaaagcatgccaagggaatggtccatgtgtacatagactcattgtgctgtagatactgtcctgcattgtaattgtgagatgcggctgtaacaagttgctgggggagatggcggggaaagaggcaaggagcagagtcctccctacatccatggctgtcacatggcatcagtgtgtattcaaaccaagctatgctccttccaagggcaggaccccatattcctcctagtcccatcatcagaaccgagtggggagtcactcagaatatcactgtaaatgaaagtgcctactatcgatggggtaagcaaacagcataaggaattatgacgtggacgaggtgacctaggagagaaaatttcagattttactctcatttcatgagtctgagggattcttatatttcctggcatttaacagggtaggccctgctccactgtgaaaatgagcagcatgtgttgagtaaatccccagaaacaggaaggtctccaagtgtcaactcccagtgaaagaatgatgaaccacttggagatcctaagcagccctgttttacctcctccctaatcttaaataacatttgtcccatgaattcccctgagcagagattgtttcctatttcagataaaatacagtgaaagtgagcaaggcagaaaaagtcaacagatgcccaggctcctactgtattctggagatactgtcagagctctaatacagagcactggccataatgaaaagcagttcactccttgtgctcctctgcagatgtttttcccagtgttctaggttaatgttttatttggttgcctgcataatccctgttctgtttcactgatggtgtttgcagcaccactgttcatggtggtccactgttatcctatgccagggtgctaagaattgcatgatattcatcttccctgctctatttaaatttacatctataagagtcatcttgacattaacactgaaatgtgatctaggtccttaaccaaaattgctgggcaacttgtaataaatttagacagaaattttatgagtaccacaaagcttggtgttaccacatcaccagaaggatttcttaggaaatgtcttgccgagagagctggctctctgcatatagatgtctttgtcagaaaaccaacccttgctctcacttacacagtagtaagcactgaaagtggttcagttcatgagaggacagagaattattttgagattatatttgaatgtaatcttgcagagccaaatatggtatgtcattaagttggaaccttgtaaatagctgttccatgttataaaatgagaaactttgtaactggaaaaaaagaaaggaaagaaggaaggaaggaaggaaggaaggcagggagggggggacggggaagggggggagggagggagggagggagggagggagggagggagggaggaaggaaggaaggaaggaaggaaggagaaaggaaaggaaggcaggagggagaaagatctaagtagcattgttaatttcttcaatttcttctaagggattttattgtttgttttagaagcttatcacagccttctttcatgattttgcagtttagacttgatacaaggaaaaattcagcttggggatggttaagagtgtttatagcagattctgacataggagagaaaacaaattctcatccaagaaggtagctagtaaaatatagggaaggtgagccatattcctatgcagcatcaatttattgacaatcaggtatttctcttaacagtttggtcttcttagttcaagaataaagggtatcatctttaataataagcattccccaaaaattgaagaggcagtcacacacttaagtgtgtggctttagaaaagcgcatgctaatttaaagatatacaggaagagaaaagtaggagttaagttggatgttgttagaagttggatgttagtattaccttcaggaacagatccccatggcatgtcacaggccttaattatatacctggctttcttattgtctccactttatcatgaggacaaggtcttggtttcatgggaggaacttctccattgaaataaatgtctgccatgtcagcaccgtttgttccctcagttttaatataatggaccatatattaaacataattaaacatatatttaaatgtggtgtttgcctgtgtctctagcaggatcttgaaattttaaaaatttgcttctggttcctgtttcagagaaaacattgtccccagaaatttcataggattgaaagtgttccctaagcagtgtgaacaatggaggaaaatatagtttagagaaaagtcagggaaaggtagggccagaggactgacaccaagaaatcattgaatctcaacataagacttcttggaatttagttaatcatattggaataaattccttcaagaatcttgtcccttggtaatcaaagtttgaaaccccgcactgaaaagcaccaactggttggaaataatatactgagaggagtgaaattcatcaattaatctgagtggctaatatatttaatatcctttgtatacaaagtaaaactccaccattcgtaaaaggaaatccttagacccaactttcagttaacaaaaacagaaatgactttgacccagggtgcttcctgaagaatgagaactatccagggctttacaactgcagaattgtaattatgctctgtgcaattgttgagcaaaggttttgccttgctggataaaaagtcttgtttgtttcgagacatgaaatccccatgtcttaaaagaactaaggcttatagaaaagcagatgggttttctctcaggaaggactgccccattgacctttgccttctcttccaagtcagacagacttctcgcttgccatgggcatttttttactacatagtcagactactggggctacttatagagaccttgtaaaagtactcgtgattttcacgttcttggaggaccaaacaaaaatctgtttctcctccaaaaatggacttacctcctttgcacacaaaagctaaactcctcagcatgaaattgtttgagttattactttaccaagttgtgagcttcttgaatcctccagagtcgcagattccatccctgagttggttgtggtttcactgtttctattggctattctccctgaatttttcattttgttctttgcagggctcgaattatttgtggaaaacaataatatatatgtgtgtgtattttttatctttatagatgctatatttacaataatgtatgtattataagacaaattaagaataatgttttgatcttaaaaggaagaaaagtactgaatttggttgtttagaaagaaaatctatgctcacgtagaaagacatagagccccactttttccgttttgtaattatttggcgaaaagaaatttgcttatagactatgtttaatgggattaaccatgtcctcatttttcttttcatcctcatacacttttagcctgcatttagtcttggttaccaatatcattttttaagagaaatgtaagtacagtgctatatcttacctacataaactattaatattttgaagacaaatgtgaaacacaccacaaaaatggtgagataagaaacaaaaatgcagtttaggaagcctcctccttgcttaaatgtttagaatatttcttctccaaagactgcatttgcctcagtgatgtaaattttccatcatggttggcataatatctgtaaacatctcactaaatgcaaaatggagtttacatttatgtgcatactagcagaaaagaagtaaactattctcatttgcatgtagctatgctgttcaaatgtcgccaaccaaaatttaggaaagaatttgttttcacccagcatgtacatctcacttttctcttggcaaggaagctggtgttaacgttgggtttaggtttaacatttacaccagcgaaaatgtttatgaatattatggaaaacttattttaaaccttgatttcttttgagcacatttacatgctgcgtgctgattaataaattaggcaccaatcatgtgtaaatcaatgtaaatcactagtttatgtacataatataaactatgtaaacttcatttttcatgcagtgcccaactactgctaaggtttactatgattcttaaggaaaaaaaaatcaaataaaaataaataaaaactgaaacgtttcacagttcagaatcggaagaattacgactaaagctccaaatatgaggttgccttagccaaaggaagcagacccacaggaacagttcaaggtttatatcctgctcaagtcacctctttggtctttcaggatctaagtggagattgtcccaactgttgctgtagttgtctcacccgaccccaaagcaagggaaatagagggaaaggttttaagggctatatgtctgctgtatccactcccagctatcttctttttactcctttctcaccatctaagatgtcttatttaaatagctccaaggaagtgacctaaaccttgatgagcaaaatattactcagtttttattttccattcaacaaaagcagtgggaaagcttgccatctggattctaagaaattgtgcaatataaaaaatgttatatcctcgagaaatatcttgctgagtcaccctaggaaataactaccttttatttatctggtagcctaatgtttccacacatttatcctgaatattgcaagtgagggactgaatcatttttaattgggagttatctttctcaggcatgttctcttggagtctttttgaagtgcctgacacgtgtaacaggatgacatatatatcattcctacaatatgaacaactgttacataaaaaattatcaaggagatgatttcaggaaacaagtgaactttctgcaaagacttataaaaattttaggtcaaattaacttcaggctttaaatgcactaatctacctaagagaaaaaaaaagaaaaaaaacaggaaggagttttaagggctcatgtgcctgttgtatcaacccccaagtgtcttcttggtactgcttcctcatcatctaagataaactgacaactttaaagtgaggtagaaggtgtattgaattgggagtcaggagaattgggttctaaccccaagttcagccacaaataaagctgtgagacattggcaagtcatttaactttcctgagtcttggttttctcatcctgaaagtgagggattcggctgacgtctctaaaatctctttcaactctaacctttattctgaataagaatttaatattcacttagtgctgtgcccagcactgtttgtaaacagcagctgtttgttatctctagtttggtctctgtattctcatcacttctcagaactatcattctaccgtcttcatttctaaacccaaaactgctagaatacagggactctggactgggtctgtaaattttttctgatcaaaactttatagcagtgtagagaagggacacattcaaattacactaaggacattgacatagctggggttgtttccttgtttatattataaaacctaaatgtggaactatattctaataatctttcataggaaggaaaatagccagactgggtattatgcatgtaacaaatgaggacattgtgcataagaaaggaaacattagttttctgtcatcctgggccaagtacctcattacagtaaatgtgtgtctttggaaactctttgcttgtgctgatggcggtaagcatggggtcccaggcaggttcaaaggctgaactgtaagaaatgggcaagacaatacattttgttttggaaggaatttctcatgggataagtttcccaaagcttgaattataggctatgaaataaagcaaatagatggagagaaaacaagtattgttttcaaaaagtacaagtcaattctatttaaagaagacaagctgaaaataaaacaaaaataaacacaatttaggaggttacagagttgaagacagtatgaattgttgtgaaggccaaaatcaaatgtgaaagttaggttctctgagaaaagggtaagcagaaaggatgatttctcaagcaattaataaggaattattttcttgtgccatgttctagatgcattgagcacagatcctcttgtcctaagctgtcctagaggctcaggttagcatctatccaaagttgtcctttgattttattgtctgaaagaacagaaggcatcagagtttccagtcactgaagagtagggtttgttcatcacttcccagcaatcacatcactttgtgtaggtaaggatatatgatgtgcttagattacttatgaagctctctctaagtgggagaatgacctgtccatgggacaactccccgttttcatggtcatttcagaagtacctctttttgggcagtgctcctggatctacttctacagccacattctactctgcacaatcctccctatgtaaagccaggcacagtacaaatatgcttcttgcaagtgaagaaaacccatggaagtcctagcttcatggcacgctgcagcaatcccaagctaccaggagcctcttttgaacccacttccctaagtctttgctcttcaccagagaatggaaattgttcatcctggtgaactgtggccaagttctgctccctaagtatttacttggagtagggaggttaaagggaagaaattcagggggagagaagcaaaagagaacacttccaactccctcccccatctcccaatgctccccaccttccttatcactgctctactgaagggtgtataaatcctgctcttggttagaattctccttattaacagtgttatatacatataaatatatatataaatatattccttttttcagccctgtagacatgaactgatcttcccttgaagatacaaacacatggccattttttgtttgggattttttgtttttcaaggtttttcatttttgtttattaggtggatttttttccctgggtactagctctgtgaaggagataaaaagcgcaatgtgtgttaaaaaaaaaaaattaaaattaaaatgaaaaaaagctttttttcttttctttttaaatgtatttaaattctgtttctctcttctgttactttacacgtatgaatgctctgctcttctgtgatcttaaaacaaaatgaaataaacgtgaaaag

SEQ ID NO: 149330 - DNA, 8821 bp, Homo sapiens
  Payload ID: 9479
  Gene Symbol: LSAMP
  Gene Name: limbic system-associated membrane protein
  ENST ID: ENST00000539563
  CDS Start-End: 1-867
gtcaggtgcgttgtagaagacaagaactcaaaggtggcctggttgaaccgttctggcatcatttttgctggacatgacaagtggtctctggacccacgggttgagctggagaaacgccattctctggaatacagcctccgaatccagaaggtggatgtctatgatgagggttcctacacttgctcagttcagacacagcatgagcccaagacctcccaagtttacttgatcgtacaagtcccaccaaagatctccaatatctcctcggatgtcactgtgaatgagggcagcaacgtgactctggtctgcatggccaatggccgtcctgaacctgttatcacctggagacaccttacaccaactggaagggaatttgaaggagaagaagaatatctggagatccttggcatcaccagggagcagtcaggcaaatatgagtgcaaagctgccaacgaggtctcctcggcggatgtcaaacaagtcaaggtcactgtgaactatcctcccactatcacagaatccaagagcaatgaagccaccacaggacgacaagcttcactcaaatgtgaggcctcggcagtgcctgcacctgactttgagtggtaccgggatgacactaggataaatagtgccaatggccttgagattaagagcacggagggccagtcttccctgacggtgaccaacgtcactgaggagcactacggcaactacacctgtgtggctgccaacaagctgggggtcaccaatgccagcctagtccttttcagacctgggtcggtgagaggaataaatggatccatcagtctggccgtaccactgtggctgctggcagcatctctgctctgccttctcagcaaatgttaatagaataaaaatttaaaaataatttaaaaaacacacaaaaatgcgtcacacagaatacagagagagagagacagagagagagagagagagagagatgggggagaccgtttatttcacaactttgtgtgtttatacatgaagggggaaataagaaagtgaagaagaaaatacaacatttaaaacaattttacagtccatcattaaaaatttatgtatcattcaggatggagaaggttctactgggatatgtttatatctactaagcaaatgtatgctgtgtaaagactacaccacactaaggacatctggatgctgtaaaaataagagaagaaccagatggatattaagccccccaacacacactttatccttccttccttcatcttttttcatctgtggggaagaaaataaggtcttgcctttggtgtttatatttccataaccttttaattctatttttcatttgagctgacttgtagccacttcagactatcaatggaatcttatgttgagcctttctctggctttccttcctccactatctctccaactttagagatcatcccctctccctccagtgcgttctatctcccccacacccaccctagatactcccttttcacccacctttcctccctcacctctcctcacctccaccccctccccagagcactagtcatgccgcaaatgctaggaagtgccattttcattttctccactgtgcgtgtgtgctcaagtctttcgctctcacgtgggtgtacatgtgtgtgagcgtgtgtgtgtctctctctaaagcatgccaagggaatggtccatgtgtacatagactcattgtgctgtagatactgtcctgcattgtaattgtgagatgcggctgtaacaagttgctgggggagatggcggggaaagaggcaaggagcagagtcctccctacatccatggctgtcacatggcatcagtgtgtattcaaaccaagctatgctccttccaagggcaggaccccatattcctcctagtcccatcatcagaaccgagtggggagtcactcagaatatcactgtaaatgaaagtgcctactatcgatggggtaagcaaacagcataaggaattatgacgtggacgaggtgacctaggagagaaaatttcagattttactctcatttcatgagtctgagggattcttatatttcctggcatttaacagggtaggccctgctccactgtgaaaatgagcagcatgtgttgagtaaatccccagaaacaggaaggtctccaagtgtcaactcccagtgaaagaatgatgaaccacttggagatcctaagcagccctgttttacctcctccctaatcttaaataacatttgtcccatgaattcccctgagcagagattgtttcctatttcagataaaatacagtgaaagtgagcaaggcagaaaaagtcaacagatgcccaggctcctactgtattctggagatactgtcagagctctaatacagagcactggccataatgaaaagcagttcactccttgtgctcctctgcagatgtttttcccagtgttctaggttaatgttttatttggttgcctgcataatccctgttctgtttcactgatggtgtttgcagcaccactgttcatggtggtccactgttatcctatgccagggtgctaagaattgcatgatattcatcttccctgctctatttaaatttacatctataagagtcatcttgacattaacactgaaatgtgatctaggtccttaaccaaaattgctgggcaacttgtaataaatttagacagaaattttatgagtaccacaaagcttggtgttaccacatcaccagaaggatttcttaggaaatgtcttgccgagagagctggctctctgcatatagatgtctttgtcagaaaaccaacccttgctctcacttacacagtagtaagcactgaaagtggttcagttcatgagaggacagagaattattttgagattatatttgaatgtaatcttgcagagccaaatatggtatgtcattaagttggaaccttgtaaatagctgttccatgttataaaatgagaaactttgtaactggaaaaaaagaaaggaaagaaggaaggaaggaaggaaggaaggcagggagggggggacggggaagggggggagggagggagggagggagggagggagggagggagggaggaaggaaggaaggaaggaaggaaggagaaaggaaaggaaggcaggagggagaaagatctaagtagcattgttaatttcttcaatttcttctaagggattttattgtttgttttagaagcttatcacagccttctttcatgattttgcagtttagacttgatacaaggaaaaattcagcttggggatggttaagagtgtttatagcagattctgacataggagagaaaacaaattctcatccaagaaggtagctagtaaaatatagggaaggtgagccatattcctatgcagcatcaatttattgacaatcaggtatttctcttaacagtttggtcttcttagttcaagaataaagggtatcatctttaataataagcattccccaaaaattgaagaggcagtcacacacttaagtgtgtggctttagaaaagcgcatgctaatttaaagatatacaggaagagaaaagtaggagttaagttggatgttgttagaagttggatgttagtattaccttcaggaacagatccccatggcatgtcacaggccttaattatatacctggctttcttattgtctccactttatcatgaggacaaggtcttggtttcatgggaggaacttctccattgaaataaatgtctgccatgtcagcaccgtttgttccctcagttttaatataatggaccatatattaaacataattaaacatatatttaaatgtggtgtttgcctgtgtctctagcaggatcttgaaattttaaaaatttgcttctggttcctgtttcagagaaaacattgtccccagaaatttcataggattgaaagtgttccctaagcagtgtgaacaatggaggaaaatatagtttagagaaaagtcagggaaaggtagggccagaggactgacaccaagaaatcattgaatctcaacataagacttcttggaatttagttaatcatattggaataaattccttcaagaatcttgtcccttggtaatcaaagtttgaaaccccgcactgaaaagcaccaactggttggaaataatatactgagaggagtgaaattcatcaattaatctgagtggctaatatatttaatatcctttgtatacaaagtaaaactccaccattcgtaaaaggaaatccttagacccaactttcagttaacaaaaacagaaatgactttgacccagggtgcttcctgaagaatgagaactatccagggctttacaactgcagaattgtaattatgctctgtgcaattgttgagcaaaggttttgccttgctggataaaaagtcttgtttgtttcgagacatgaaatccccatgtcttaaaagaactaaggcttatagaaaagcagatgggttttctctcaggaaggactgccccattgacctttgccttctcttccaagtcagacagacttctcgcttgccatgggcatttttttactacatagtcagactactggggctacttatagagaccttgtaaaagtactcgtgattttcacgttcttggaggaccaaacaaaaatctgtttctcctccaaaaatggacttacctcctttgcacacaaaagctaaactcctcagcatgaaattgtttgagttattactttaccaagttgtgagcttcttgaatcctccagagtcgcagattccatccctgagttggttgtggtttcactgtttctattggctattctccctgaatttttcattttgttctttgcagggctcgaattatttgtggaaaacaataatatatatgtgtgtgtattttttatctttatagatgctatatttacaataatgtatgtattataagacaaattaagaataatgttttgatcttaaaaggaagaaaagtactgaatttggttgtttagaaagaaaatctatgctcacgtagaaagacatagagccccactttttccgttttgtaattatttggcgaaaagaaatttgcttatagactatgtttaatgggattaaccatgtcctcatttttcttttcatcctcatacacttttagcctgcatttagtcttggttaccaatatcattttttaagagaaatgtaagtacagtgctatatcttacctacataaactattaatattttgaagacaaatgtgaaacacaccacaaaaatggtgagataagaaacaaaaatgcagtttaggaagcctcctccttgcttaaatgtttagaatatttcttctccaaagactgcatttgcctcagtgatgtaaattttccatcatggttggcataatatctgtaaacatctcactaaatgcaaaatggagtttacatttatgtgcatactagcagaaaagaagtaaactattctcatttgcatgtagctatgctgttcaaatgtcgccaaccaaaatttaggaaagaatttgttttcacccagcatgtacatctcacttttctcttggcaaggaagctggtgttaacgttgggtttaggtttaacatttacaccagcgaaaatgtttatgaatattatggaaaacttattttaaaccttgatttcttttgagcacatttacatgctgcgtgctgattaataaattaggcaccaatcatgtgtaaatcaatgtaaatcactagtttatgtacataatataaactatgtaaacttcatttttcatgcagtgcccaactactgctaaggtttactatgattcttaaggaaaaaaaaatcaaataaaaataaataaaaactgaaacgtttcacagttcagaatcggaagaattacgactaaagctccaaatatgaggttgccttagccaaaggaagcagacccacaggaacagttcaaggtttatatcctgctcaagtcacctctttggtctttcaggatctaagtggagattgtcccaactgttgctgtagttgtctcacccgaccccaaagcaagggaaatagagggaaaggttttaagggctatatgtctgctgtatccactcccagctatcttctttttactcctttctcaccatctaagatgtcttatttaaatagctccaaggaagtgacctaaaccttgatgagcaaaatattactcagtttttattttccattcaacaaaagcagtgggaaagcttgccatctggattctaagaaattgtgcaatataaaaaatgttatatcctcgagaaatatcttgctgagtcaccctaggaaataactaccttttatttatctggtagcctaatgtttccacacatttatcctgaatattgcaagtgagggactgaatcatttttaattgggagttatctttctcaggcatgttctcttggagtctttttgaagtgcctgacacgtgtaacaggatgacatatatatcattcctacaatatgaacaactgttacataaaaaattatcaaggagatgatttcaggaaacaagtgaactttctgcaaagacttataaaaattttaggtcaaattaacttcaggctttaaatgcactaatctacctaagagaaaaaaaaagaaaaaaaacaggaaggagttttaagggctcatgtgcctgttgtatcaacccccaagtgtcttcttggtactgcttcctcatcatctaagataaactgacaactttaaagtgaggtagaaggtgtattgaattgggagtcaggagaattgggttctaaccccaagttcagccacaaataaagctgtgagacattggcaagtcatttaactttcctgagtcttggttttctcatcctgaaagtgagggattcggctgacgtctctaaaatctctttcaactctaacctttattctgaataagaatttaatattcacttagtgctgtgcccagcactgtttgtaaacagcagctgtttgttatctctagtttggtctctgtattctcatcacttctcagaactatcattctaccgtcttcatttctaaacccaaaactgctagaatacagggactctggactgggtctgtaaattttttctgatcaaaactttatagcagtgtagagaagggacacattcaaattacactaaggacattgacatagctggggttgtttccttgtttatattataaaacctaaatgtggaactatattctaataatctttcataggaaggaaaatagccagactgggtattatgcatgtaacaaatgaggacattgtgcataagaaaggaaacattagttttctgtcatcctgggccaagtacctcattacagtaaatgtgtgtctttggaaactctttgcttgtgctgatggcggtaagcatggggtcccaggcaggttcaaaggctgaactgtaagaaatgggcaagacaatacattttgttttggaaggaatttctcatgggataagtttcccaaagcttgaattataggctatgaaataaagcaaatagatggagagaaaacaagtattgttttcaaaaagtacaagtcaattctatttaaagaagacaagctgaaaataaaacaaaaataaacacaatttaggaggttacagagttgaagacagtatgaattgttgtgaaggccaaaatcaaatgtgaaagttaggttctctgagaaaagggtaagcagaaaggatgatttctcaagcaattaataaggaattattttcttgtgccatgttctagatgcattgagcacagatcctcttgtcctaagctgtcctagaggctcaggttagcatctatccaaagttgtcctttgattttattgtctgaaagaacagaaggcatcagagtttccagtcactgaagagtagggtttgttcatcacttcccagcaatcacatcactttgtgtaggtaaggatatatgatgtgcttagattacttatgaagctctctctaagtgggagaatgacctgtccatgggacaactccccgttttcatggtcatttcagaagtacctctttttgggcagtgctcctggatctacttctacagccacattctactctgcacaatcctccctatgtaaagccaggcacagtacaaatatgcttcttgcaagtgaagaaaacccatggaagtcctagcttcatggcacgctgcagcaatcccaagctaccaggagcctcttttgaacccacttccctaagtctttgctcttcaccagagaatggaaattgttcatcctggtgaactgtggccaagttctgctccctaagtatttacttggagtagggaggttaaagggaagaaattcagggggagagaagcaaaagagaacacttccaactccctcccccatctcccaatgctccccaccttccttatcactgctctactgaagggtgtataaatcctgctcttggttagaattctccttattaacagtgttatatacatataaatatatatataaatatattccttttttcagccctgtagacatgaactgatcttcccttgaagatacaaacacatggccattttttgtttgggattttttgtttttcaaggtttttcatttttgtttattaggtggatttttttccctgggtactagctctgtgaaggagataaaaagcgcaatgtgtgttaaaaaaaaaaaattaaaattaaaatgaaaaaaagctttttttcttttctttttaaatgtatttaaattctgtttctctcttctgttactttacacgtatgaatgctctgctcttctgtgatcttaaaacaaaatgaaataaacgtgaaaaggagatgtgtcttcattgacctgtca

SEQ ID NO: 149331 - DNA, 3458 bp, Homo sapiens
  Payload ID: 9480
  Gene Symbol: LIN28A
  Gene Name: lin-28 homolog A (C. elegans)
  Uniprot ID: Q9H9Z2
  ENST ID: ENST00000254231
  CDS Start-End: 76-705
cctttgccttcggacttctccggggccagcagccgcccgaccaggggcccggggccacgggctcagccgacgaccatgggctccgtgtccaaccagcagtttgcaggtggctgcgccaaggcggcagaagaggcgcccgaggaggcgccggaggacgcggcccgggcggcggacgagcctcagctgctgcacggtgcgggcatctgtaagtggttcaacgtgcgcatggggttcggcttcctgtccatgaccgcccgcgccggggtcgcgctcgaccccccagtggatgtctttgtgcaccagagtaagctgcacatggaagggttccggagcttgaaggagggtgaggcagtggagttcacctttaagaagtcagccaagggtctggaatccatccgtgtcaccggacctggtggagtattctgtattgggagtgagaggcggccaaaaggaaagagcatgcagaagcgcagatcaaaaggagacaggtgctacaactgtggaggtctagatcatcatgccaaggaatgcaagctgccaccccagcccaagaagtgccacttctgccagagcatcagccatatggtagcctcatgtccgctgaaggcccagcagggccctagtgcacagggaaagccaacctactttcgagaggaagaagaagaaatccacagccctaccctgctcccggaggcacagaattgagccacaatgggtgggggctattcttttgctatcaggaagttttgaggagcaggcagagtggagaaagtgggaatagggtgcattggggctagttggcactgccatgtatctcaggcttgggttcacaccatcaccctttcttccctctaggtggggggaaagggtgagtcaaaggaactccaaccatgctctgtccaaatgcaagtgagggttctgggggcaaccaggaggggggaatcaccctacaacctgcatactttgagtctccatccccagaatttccagcttttgaaagtggcctggatagggaagttgttttccttttaaagaaggatatataataattcccatgccagagtgaaatgattaagtataagaccagattcatggagccaagccactacattctgtggaaggagatctctcaggagtaagcattgtttttttttcacatcttgtatcctcatacccacttttgggatagggtgctggcagctgtcccaagcaatgggtaatgatgatggcaaaaagggtgtttgggggaacagctgcagacctgctgctctatgctcacccccgccccattctgggccaatgtgattttatttatttgctcccttggatactgcaccttgggtcccactttctccaggatgccaactgcactagctgtgtgcgaatgacgtatcttgtgcattttaactttttttccttaatataaatattctggttttgtatttttgtatattttaatctaaggccctcatttcctgcactgtgttctcaggtacatgagcaatctcagggatagccagcagcagctccaggtctgcgcagcaggaattactttttgttgtttttgccaccgtggagagcaactatttggagtgcacagcctattgaactacctcatttttgccaataagagctggcttttctgccatagtgtcctcttgaaaccccctctgccttgaaaatgttttatgggagactaggttttaactgggtggccccatgacttgattgccttctactggaagattgggaattagtctaaacaggaaatggtggtacacagaggctaggagaggctgggcccggtgaaaaggccagagagcaagccaagattaggtgagggttgtctaatcctatggcacaggacgtgctttacatctccagatctgttcttcaccagattaggttaggcctaccatgtgccacagggtgtgtgtgtgtttgtaaaactagagttgctaaggataagtttaaagaccaatacccctgtacttaatcctgtgctgtcgagggatggatatatgaagtaaggtgagatccttaacctttcaaaattttcgggttccagggagacacacaagcgagggttttgtggtgcctggagcctgtgtcctgccctgctacagtagtgattaatagtgtcatggtagctaaaggagaaaaagggggtttcgtttacacgctgtgagatcaccgcaaacctaccttactgtgttgaaacgggacaaatgcaatagaacgcattgggtggtgtgtgtctgatcctgggttcttgtctcccctaaatgctgccccccaagttactgtatttgtctgggctttgtaggacttcactacgttgattgctaggtggcctagtttgtgtaaatataatgtattggtctttctccgtgttctttgggggttttgtttacaaacttctttttgtattgagagaaaaatagccaaagcatctttgacagaaggttctgcaccaggcaaaaagatctgaaacattagtttggggggccctcttcttaaagtggggatcttgaaccatcctttcttttgtattccccttcccctattacctattagaccagatcttctgtcctaaaaacttgtcttctaccctgccctcttttctgttcacccccaaaagaaaacttacacacccacacacatacacatttcatgcttggagtgtctccacaactcttaaatgatgtatgcaaaaatactgaagctaggaaaaccctccatcccttgttcccaacctcctaagtcaagaccattaccatttctttctttcttttttttttttttttaaaatggagtctcactgtgtcacccaggcagaggttgcagtgagctgagatcgcaccactgcactccagcctggttacagagcaagactctgtctcaaacaaaacaaaacaaaacaaaaacacactactgtattttggatggatcaaacctccttaattttaatttctaatcctaaagtaaagagatgcaattgggggccttccatgtagaaagtggggtcaggaggccaagaaagggaatatgaatgtatatccaagtcactcaggaacttttatgcaggtgctagaaactttatgtcaaagtggccacaagattgtttaataggagacgaacgaatgtaactccatgtttactgctaaaaaccaaagctttgtgtaaaatcttgaatttatggggcgggagggtaggaaagcctgtacctgtctgtttttttcctgatccttttccctcattcctgaactgcaggagactgagcccctttgggctttggtgaccccatcactggggtgtgtttatttgatggttgattttgctgtactgggtacttcctttcccattttctaatcattttttaacacaagctgactcttcccttcccttctcctttccctgggaaaatacaatgaataaataaagacttattggtacgc

SEQ ID NO: 149332 - DNA, 4008 bp, Homo sapiens
  Payload ID: 9480
  Gene Symbol: LIN28A
  Gene Name: lin-28 homolog A (C. elegans)
  Uniprot ID: Q9H9Z2
  ENST ID: ENST00000326279
  CDS Start-End: 115-744
gtgcgggggaagatgtagcagcttcttctccgaaccaaccctttgccttcggacttctccggggccagcagccgcccgaccaggggcccggggccacgggctcagccgacgaccatgggctccgtgtccaaccagcagtttgcaggtggctgcgccaaggcggcagaagaggcgcccgaggaggcgccggaggacgcggcccgggcggcggacgagcctcagctgctgcacggtgcgggcatctgtaagtggttcaacgtgcgcatggggttcggcttcctgtccatgaccgcccgcgccggggtcgcgctcgaccccccagtggatgtctttgtgcaccagagtaagctgcacatggaagggttccggagcttgaaggagggtgaggcagtggagttcacctttaagaagtcagccaagggtctggaatccatccgtgtcaccggacctggtggagtattctgtattgggagtgagaggcggccaaaaggaaagagcatgcagaagcgcagatcaaaaggagacaggtgctacaactgtggaggtctagatcatcatgccaaggaatgcaagctgccaccccagcccaagaagtgccacttctgccagagcatcagccatatggtagcctcatgtccgctgaaggcccagcagggccctagtgcacagggaaagccaacctactttcgagaggaagaagaagaaatccacagccctaccctgctcccggaggcacagaattgagccacaatgggtgggggctattcttttgctatcaggaagttttgaggagcaggcagagtggagaaagtgggaatagggtgcattggggctagttggcactgccatgtatctcaggcttgggttcacaccatcaccctttcttccctctaggtggggggaaagggtgagtcaaaggaactccaaccatgctctgtccaaatgcaagtgagggttctgggggcaaccaggaggggggaatcaccctacaacctgcatactttgagtctccatccccagaatttccagcttttgaaagtggcctggatagggaagttgttttccttttaaagaaggatatataataattcccatgccagagtgaaatgattaagtataagaccagattcatggagccaagccactacattctgtggaaggagatctctcaggagtaagcattgtttttttttcacatcttgtatcctcatacccacttttgggatagggtgctggcagctgtcccaagcaatgggtaatgatgatggcaaaaagggtgtttgggggaacagctgcagacctgctgctctatgctcacccccgccccattctgggccaatgtgattttatttatttgctcccttggatactgcaccttgggtcccactttctccaggatgccaactgcactagctgtgtgcgaatgacgtatcttgtgcattttaactttttttccttaatataaatattctggttttgtatttttgtatattttaatctaaggccctcatttcctgcactgtgttctcaggtacatgagcaatctcagggatagccagcagcagctccaggtctgcgcagcaggaattactttttgttgtttttgccaccgtggagagcaactatttggagtgcacagcctattgaactacctcatttttgccaataagagctggcttttctgccatagtgtcctcttgaaaccccctctgccttgaaaatgttttatgggagactaggttttaactgggtggccccatgacttgattgccttctactggaagattgggaattagtctaaacaggaaatggtggtacacagaggctaggagaggctgggcccggtgaaaaggccagagagcaagccaagattaggtgagggttgtctaatcctatggcacaggacgtgctttacatctccagatctgttcttcaccagattaggttaggcctaccatgtgccacagggtgtgtgtgtgtttgtaaaactagagttgctaaggataagtttaaagaccaatacccctgtacttaatcctgtgctgtcgagggatggatatatgaagtaaggtgagatccttaacctttcaaaattttcgggttccagggagacacacaagcgagggttttgtggtgcctggagcctgtgtcctgccctgctacagtagtgattaatagtgtcatggtagctaaaggagaaaaagggggtttcgtttacacgctgtgagatcaccgcaaacctaccttactgtgttgaaacgggacaaatgcaatagaacgcattgggtggtgtgtgtctgatcctgggttcttgtctcccctaaatgctgccccccaagttactgtatttgtctgggctttgtaggacttcactacgttgattgctaggtggcctagtttgtgtaaatataatgtattggtctttctccgtgttctttgggggttttgtttacaaacttctttttgtattgagagaaaaatagccaaagcatctttgacagaaggttctgcaccaggcaaaaagatctgaaacattagtttggggggccctcttcttaaagtggggatcttgaaccatcctttcttttgtattccccttcccctattacctattagaccagatcttctgtcctaaaaacttgtcttctaccctgccctcttttctgttcacccccaaaagaaaacttacacacccacacacatacacatttcatgcttggagtgtctccacaactcttaaatgatgtatgcaaaaatactgaagctaggaaaaccctccatcccttgttcccaacctcctaagtcaagaccattaccatttctttctttcttttttttttttttttaaaatggagtctcactgtgtcacccaggctggagtgcagtggcatgatcggctcactgcagcctctgcctcttgggttcaagtgattctcctgcctcagcctcctgagtagctgggatttcaggcacccgccacactcagctaatttttgtatttttagtagagacggggtttcaccatgttgtccaggctggtctggaactcctgacctcaggtgatctgcccaccttggcttcccaaagtgctgggattacaggcatgagccaccatgctgggccaaccatttcttggtgtattcatgccaaacacttaagacactgctgtagcccaggcgcggtggctcacacctgtaatcccagcactttggaaggctgaggcgggcggatcacaaggtcacgagttcaaaactatcctggccaacacagtgaaaccccgtctctactaaaatacaaaaaaattagccgggtgtggtggtgcatgcctttagtcctagctattcaggaggctgaggcaggggaatcgcttgaacccgagaggcagaggttgcagtgagctgagatcgcaccactgcactccagcctggttacagagcaagactctgtctcaaacaaaacaaaacaaaacaaaaacacactactgtattttggatggatcaaacctccttaattttaatttctaatcctaaagtaaagagatgcaattgggggccttccatgtagaaagtggggtcaggaggccaagaaagggaatatgaatgtatatccaagtcactcaggaacttttatgcaggtgctagaaactttatgtcaaagtggccacaagattgtttaataggagacgaacgaatgtaactccatgtttactgctaaaaaccaaagctttgtgtaaaatcttgaatttatggggcgggagggtaggaaagcctgtacctgtctgtttttttcctgatccttttccctcattcctgaactgcaggagactgagcccctttgggctttggtgaccccatcactggggtgtgtttatttgatggttgattttgctgtactgggtacttcctttcccattttctaatcattttttaacacaagctgactcttcccttcccttctcctttccctgggaaaatacaatgaataaataaagacttattggtacgcaaa

SEQ ID NO: 149333 - DNA, 5505 bp, Homo sapiens
  Payload ID: 9481
  Gene Symbol: LIN28B
  Gene Name: lin-28 homolog B (C. elegans)
  Uniprot ID: Q6ZN17
  ENST ID: ENST00000345080
  CDS Start-End: 204-956
aattgacaaagtcacgtgtgctcagggggccagaaactggagagaggagagaaaaaaatcaaaagaaggaaagcacattagaccatgcgagctaaatttgtgatcgcacaaaatcaagatgttagattgatgcagaagatcactccgttccaaagggaaagttttcatctcacgagtttggagctgagggcccgtggggcaacatggccgaaggcggggctagcaaaggtggtggagaagagcccgggaagctgccggagccggcagaggaggaatcccaggttttgcgcggaactggccactgtaagtggttcaatgtgcgcatgggatttggattcatctccatgataaaccgagagggaagccccttggatattccagtcgatgtatttgtacaccaaagcaaactattcatggaaggatttagaagcctaaaagaaggagaaccagtggaattcacatttaaaaaatcttccaaaggccttgagtcaatacgggtaacaggacctggtgggagcccctgtttaggaagtgaaagaagacccaaagggaagacactacagaaaagaaaaccaaagggagatagatgctacaactgtggtggccttgatcatcatgctaaggaatgtagtctacctcctcagccaaagaagtgccattactgtcagagcatcatgcacatggtggcaaactgcccacataaaaatgttgcacagccacccgcgagttctcagggaagacaggaagcagaatcccagccatgcacttcaactctccctcgagaagtgggaggcgggcatggctgtacatcaccaccgtttcctcaggaggctagggcagagatctcagaacggtcaggcaggtcacctcaagaagcttcctccacgaagtcatctatagcaccagaagagcaaagcaaaaaggggccttcagttcaaaaaaggaaaaagacataacaggtcttcttcatatgttctttcctttacccggttgcaaagtctacctcatgcaagtataggggaacagtatttcacaagcagtagctgacctgggattttaactactattggggaactgtgaattttttaaacagacaaatcactctaagcaaattacatttgagcagggtgtcatgttttatgttaattcagagaataagatactatgtctgtcaatatgtgcatgtgtgagagggagagagcctgagtctgtgtgtgtacatgaggatttttatataggaatgtagacacatatataaagaggctttgtctttatatatttgtgtatagatcaaagcacacaccctctctcatataattggatatttccaagaattgaaaacccatgtgaagcattatagatagttttaaatttaacccactggagttttcttgaaataccacttcttttatattatataaaactaaaaacacgactgttaccttttgtgtgaaccaaaggatacttcagatctcagagctgccaattatggggtactaaaggtttttaagacatccagttctcccgaatttgggattgcctctttttcttgaaatctctggagtagtaatttttttcccccttttttgaaggcagtaccttaacttcatatgcctctgactgccataagcttttttgattctgggataacataactccagaaaagacaatgaatgtgtaatttgggccgatatttcactgttttaaattctgtgtttaattgtaaaattagatgcctattaagagaaatgaaggggaggatcatcttagtggcttgttttcagtagtattttaatatcagcttcttgtaaccttttccatgttgtgagggttgtaagggattgtgtggcaacagcagcttcccttggctaactcaatcttctacccattgcttagagcagggagccctccttatttactactgaagaccttagagaactccaattgtttggcatatatttttggtggtggtttttattcctcctggagagttatctaatttgtttctaaaacaaacaagcagcaaagaaatgaattaaatactggggttgagaattaaaattaagtggatgttcacagttgcccaatatatatgacctgcaaatgatacgaaaaagtgcagcatttagtggcagttaacaagagtgacaagcctggggcagaggtaccaaacctctcccaccagagagctagaagtattttatacagtaactttgatcttatggaagtgaccttcaatgcttattctgaagtaacctatatggtggatacaggatgaacattcagtgccagggagaatcttctcaggttggttctcgttagagtgataaactggctaggggccatagtattggtcctgttaggtttcggtcatggaaaaaaaaattattttggggtcatcctggctctagatgttatgggcaaatttctgaaacatctgcaagaaggtaccagttaattatagtgcttaatattgggaataagattaagcattataattataatgtatgggcctgttggtgtaagctcagataattaaataaaaatagcatgactcaaatgagacatattctgctgaacagtttctacttcctctcccgcctgtcctgtcatgggagacgtgtatagttgctgctgtttcagcaaaccaccataagacgaaaatgcctcaggttgggttgccagtcctttacaactcagcttgaatttcacaacagtgattgtgagaatctgcgtggtatacactgaaatatcggtgtgctgtgatgcaaagcttacctttgacgatattgaatgtgatatagctgtagagaagtacttccttgccttatgtgaggatttcaaacttatttaaattatgtagacaaatcaaagtggcattgcttaatttttagcaggcataataagcaagttaacagtaaaatgcaaaacatgataagcgttgctcaatttttagcaggtataataagcaggttaacagtaaaaatgcaaaacatgatagataagtcactttgaaaattcaaaccaaagttccttcaccttatggaaataggaaattatggacttcaaaattggacacttcctgtttacaaaaagaaattcagagctaaaatcatggtaaaaaaaaatagaaacacttgagaactatggtctttatgggtgcaatttgaaatccttttcatcatcttaccagactaaactaagagcacataccaaacctatcttatggttgaaagttggggtttattttttatatgagaatattatcactattacataacatactcaggacaaagaactttgctcagggaacataccatgtaatatttttgttgtttctttacagactagtctacagtcctgcttactcaaaacaaaccaaataacttatacctttatataagtattatgtactgatgatagtaactacctctgagtttgacacagatcaaaatttttgaatatcagatatcagttatcctatttttatttcatgtgaaaactcctctaaagcagattccctcaactctgtgcatatgtgaatatcactgatgtgaacacattgttcatttacataggtaaaatattactctgtttacagcaaaaggctacctcatagttgatacatagcacacctgtatgtatgctgttccagccttacaggtggctgataattctctggtacagaacctttttatctgtattataaatagcaattcacaactgcatgtttctgacaaacacttgtgaataatgaagcatctcgttttagttagcaaagtctccaaacatttccttaaaataatcatgtatttagtttaaagaattatgggcactgttcaacttaagcaaaacagaacacggaagcagtcttagaagcaccactttgcccagaggtggaggttggaaggggtagcagggagaggggttggtgtatgcaggtattcatgctaggcaaagagtttaaaagacgccaatgtccttcatttactgtctgtgctgccctgaagccaagcgtattgcagcattatagccccaggcacataactaactagcactggcttgccaaggaatgaacatgcaatgccattactagctattgagggaaaagggtctgtgtgaagcatcactttgcagggattactaatggtggggcagcaggtctgtgaattaagttatctcttgacctcaccctcatgtcaacacaaatgtaattcctaaacaagatgcattgccagtctcttagccctgtaagctgatcttttgctacatggcagactataatgaaaacatttttatacttgggtttctagtcttcactagaaggccttggatgtatttttgcagttgaaagatttagaaagatttttacctgcttataacttggaagtttagagtgcaatgtaagaaaaaagatcaagaaatgtcatgttattagcatcagtccacctccaatattgccgatactttttttattctggctcagttttattttgcaccagtgcggccccaagttactgctggttgtatttagtttgtgaataggagcccataagtgttaatagactttgtaacattcactataagatgaattatacaggacatgggaaatctcattaagtcttaaagttaatttaaattaatttatctgttttctctaagaaatgtttatcataaaatatatatgtgtatttcccctttggttataaaatttgggaaagtatgtacaagtgcagctgcactgactttaattttctagatgtcttaatgagatttatttgttttagagaagaacatcttgttaaaagcatcaaactctgtcttacatagctgtcaacagcctctttaagatgtggtggttgtatgatctgtgtcttaattgttcagttagagtgagaagttgacctatgattcatttttaaattttatatttggaacaaagctgcaagttatggtaaagtactgtactgtgagaagtattatgatatttaatgcatctgtggcttaacacttgtgagagttaccagcttgaaaatgatggtgttgactacctcttgaatcacatctatcaaccactggcacctaccaccaagctggcttcaattagtatgtgttgctttttggtattaacaactaaccgtactagagaccaaagtgaaccctgatttttatatgtctttaataatggtgttttatctagtgtttttaaattatcctgtgtagtatttagattacctcattgtccattttgactcatgttgtttacaagtgaaaataaaaacacttgaactgtatgtttttaaaagacaaaaaaggggtagatgtttggaatgcgtttcactcgcatgcagtcatctggagggactgaagcactgtttgcctttctgtacactctgggttttatattctcatttcatgcctaatgtcttattctgtcaattatggatatgttgaggtttaaaaaaattacttgattaaaaataaaacatataacgttggcattta

SEQ ID NO: 149334 - DNA, 1150 bp, Homo sapiens
  Payload ID: 9482
  Gene Symbol: LIN37
  Gene Name: lin-37 DREAM MuvB core complex component
  Uniprot ID: Q96GY3
  ENST ID: ENST00000301159
  CDS Start-End: 365-1105
tactcagggtgagtctgggaagctggaactacacctcccaggaagctagggggtagatggtttgtttccggaagcaaagccccaggtgggtgggacctaaagctgggagactacggaggcagctctcaattggtcaggatgcgagattgacggctgcaataactaataggaacaagctactgccgaaggggcccgcccacagaagggtggtggccacggtccaggctggacacaaccaaaggcggaggacccgtggcccacgaagctcatctttgaactgtccccgccttctcccgccttgacttgtgaccctaggccctttggggcgcctctgacccagctagccagatcccggacccaaaccatgttccctgtgaaggtgaaagtggagaaatcagagctggagatggccaaagcccggaaccaactggatgctgtcttgcagtgtctgctggagaagagtcacatggacagggagcgtctggatgaggaagctgggaaaacaccctcagacacccacaataaggactgctccatcgcagccactggcaaaaggccatctgcccgcttcccccaccagcggaggaagaagaggagggagatggatgatgggctggctgagggagggccgcagcgatccaacacatatgtgatcaagctgttcgaccggagcgtggacttggcccagttcagcgagaacacgccactgtacccaatctgccgcgcctggatgcgcaacagcccctctgtgcgcgagcgtgaatgctctcccagctcacccctgcccccgctgcctgaggatgaggagggctcagaggtaaccaacagcaagagtcgtgatgtgtacaagctgccgccacccacacccccggggccacccggagatgcctgcagatcccgcatcccatctccactgcagcctgagatgcagggcacccctgacgatgagccctctgagcccgagccctcaccctccacactcatctatcgcaacatgcagcgctggaaacgcatccgccagaggtggaaggaggcctctcatcggaaccagcttcgttactcagaaagcatgaagatcctacgagagatgtacgaacgacagtgatgttcccaggtccccccacaccagtaaacatcccccagctccaca

SEQ ID NO: 149335 - DNA, 291 bp, Homo sapiens
  Payload ID: 9482
  Gene Symbol: LIN37
  Gene Name: lin-37 DREAM MuvB core complex component
  ENST ID: ENST00000587751
  CDS Start-End: 235-291
tcgggaccatcgggttgacagggtgtggagtcccggtggaagggagtatcgcggaaaggggactgcacgacttttccctgaagcccacctgacaatcgctgtatcaggcagcgagcgttgcctgccaccttcacaccctcccggtgtgcgcttgaagtcgctttgagattgaatggggtggctcgggcaatgacgtgcgtggtaggacatggggaatcctgagccgagctggagatggccaaagcccggaaccaactggatgctgtcttgcagtgtctgctggagaagagt

SEQ ID NO: 149336 - DNA, 532 bp, Homo sapiens
  Payload ID: 9482
  Gene Symbol: LIN37
  Gene Name: lin-37 DREAM MuvB core complex component
  ENST ID: ENST00000591163
  CDS Start-End: 1-491
ggccatctgcccgcttcccccaccagcggaggaagaagaggagggagatggatgatgggctggctgagggagggccgcagcgatccaacacatatgtgatcaagctgttcgaccggagcgtggacttggcccagttcagcgagaacacgccactgtacccaatctgccgcgcctggatgcgcaacagcccctctggctcagaggtaaccaacagcaagagtcgtgatgtgtacaagctgccgccacccacacccccggggccacccggagatgcctgcagatcccgcatcccatctccactgcagcctgagatgcagggcacccctgacgatgagccctctgagcccgagccctcaccctccacactcatctatcgcaacatgcagcgctggaaacgcatccgccagaggtggaaggaggcctctcatcggaaccagcttcgttactcagaaagcatgaagatcctacgagagatgtacgaacgacagtgatgttcccaggtccccccacaccagtaaacatcccccagctc

SEQ ID NO: 149337 - DNA, 1635 bp, Homo sapiens
  Payload ID: 9482
  Gene Symbol: LIN37
  Gene Name: lin-37 DREAM MuvB core complex component
  ENST ID: ENST00000595455
  CDS Start-End: 119-283
ggacccgtggcccacgaagctcatctttgaactgtccccgccttctcccgccttgacttgtgaccctaggccctttggggcgcctctgacccagctagccagatcccggacccaaaccatgttccctgtgaaggtgaaagtggagaaatcagagctggagatggccaaagcccggaaccaactggatgctgtcttgcagtgtctgctggagaagagtcacatggacagggagcgtctggatgaggaagctgggaaaacaccctcagacacccacaataagtgatcctgacactccctctccctacgcaggccatctgcccgcttcccccaccagcggaggaagaagaggagggagatggatgatgggctggctgagggagggccgcagcgatccaacacatatgtgatcaagctgttcgaccggagcgtggacttggcccagttcagcgagaacacgccactgtacccaatctgccgcgcctggatgcgcaacagcccctctgtgcgcgagcgtgaatgctctcccagctcacccctgcccccgctgcctgaggatgaggaggtgggatgggtagtgggtcccagcccagcagcctggtgccagggcagtgggtggataggctcaaaggatcctgcccctaagctagtgggatagacagacacaggtccctcacgtgaatcctggatcaggctaggcacacagatgtgcactcttaggttggggtgtggatcagagtccctagggaagacatacgtaaccacctggcctgggagacagggaacagggttaccctggacagttagatgtggacctccaagatcaggggttcccaagagccgaggggctagacaagggtccttagtacagacagaagtggccaccaggccttgaggagcaggggctgggcaggaatggatgggagtctataagccatctgacccagcggggtagacaagggtccccaggacagacatataggacccttcagacatataggactgtcagaaatggacagagcttcctaggtggcacagacgtgaccccctagacaggattccctgaggcaggcagacgcgactccctgggctgacaggtgtagatggagtctctgggctggataggagaagacaggggtccctggggcaggcacacttgacccgctggctggttgaggtgtctgcccttcatacatgcctcctgtctgagtcccttagcgagcccctcatgccatttgttgctgggaaaggcaggagggatgaatgtggattcccagcccctctgctttgactctcttgggcctggcatggggcccttgtgtccccagggctcagaggtaaccaacagcaagagtcgtgatgtgtacaagctgccgccacccacacccccggggccacccggagatgcctgcagatcccgcatcccatctccactgcagcctgagatgcagggcacccctgacgatgagccctctgagcccgagccctcaccctccacactcatctatcgcaacatgcagcgctggaaacgcatccgccagaggtggaaggaggcctctcatcggaaccagcttcgttactcagaaagcatgaagatcctacgagagatgtacgaacgacagtgatgttcccaggtcc

SEQ ID NO: 149338 - DNA, 2776 bp, Homo sapiens
  Payload ID: 9483
  Gene Symbol: LIN52
  Gene Name: lin-52 DREAM MuvB core complex component
  Uniprot ID: Q52LA3
  ENST ID: ENST00000555028
  CDS Start-End: 168-518
aacatccgcgtaaggggcgtggctatacttaggggcggggctaggcaaagattgccctatgaggcgagggaatgagactgggctgcgagttggggatagggtttctctttgggggcgtggcttatggaacctcgttttcccgccgacggttggccacgtcacgtgacatgggttggaagatggcgtctcccacagacgggacagatctggaagcatctttgctaagttttgaaaaacttgaccgtgcctcaccagatctttggccagaacaattaccaggtgttgctgaatttgcagcttccttcaaaagtcctattactagttctccacccaaatggatggctgagatagaacgtgatgacatcgacatgttgaaagaactggggagtctcaccacggctaatttgatggagaaggttcgaggcctacagaacctagcctatcagctggggctggatgagtccagagagatgacacgggggaaattcctcaatattctagagaagcccaagaagtagcagctgcttgcggacaggatgtcctggggtccgaaaccaagctcccttcccggtgcacctctaacaatgcacacctcactgcttgcttgggagaggccagagggtgtacctccaggactgccctctcccctgctcctggcactctacacgtctgaggacattcagcagcaagagaagaatctgctctacccaaggatcattgcagttactcaatcaactttcagacttgaaccttcttagcctcggatattggtaacagctgagggcatatcattcttaaaggtcgaagtcctgctttctcatttctggaagtgattcaggagccccaggatcttacggttgatttgactcagtcatggcagtcagttgtgacatgttgattggatgggttcttttgaattgttcttgatctcttagaaagtgtttacgatgtgaggagaccagagaccaagtagattctggaccagaccatgcagcctgacctgtgaactctccagtatatactaagttcccagaatccccagctgaagaaaccagaatcttctcgaaatgtatatctgttttttaaaacttctatacctcttatgatagtcccatttgcttttcattccttacttcccagccccaccttctagttctgacttcgggcagagggatccctgagtccctcctggaattagcttgtatagtgaaaggcccatccaaggttgtctaaagaccaatgtgaaggtgacagaaaggacttttgagttctaattaatctgttacagcttcaagcaagaaagtcagtatagcctgaaagacaagagaaacgggatggtttataggagttcccatttggttgaaagctagaagccctaattgaccttaaagtaacatgctatgggatggtgggattgtcccctctgacagcacatatgaaatagttcatctatataatagaaacgcacacacacgaaaaagaatcttctgacttaaatacaactttcatggagttcttcaccacttatctgtctctgttaaaatctgaaaatctagcccatggctaaaatctattatatgtgttctccatatttcttgtataagccagtccccagcatctgatgttttgagaagtgcatggagtttcctaaactttgcacaaaagaatatcctggggccgggcatggtggctcacgcctgtaatcccagcactttgggaggccgaggcaggtggatcataggtcaaaagatcgagaccatcctggccaatatggtgaaaccctgtctctactaaaatacaaaaattagctgggcatgatggtgcatgcctatagtcccagctacttgggggcctgaggcacgagaatcgcttgaattcgggaggtggaggttgcagtgagccgaaattatgccactgcactccagcctgggcaacagagtgagactctgtctcagaaaaaaaaaaaaaaaaaaaaaaaaaaaaagaatatccctgtggcaatagtctgatggtgtttggacacaagaaaagttatggttttgagtcgtgagtgtttgctagggcatggcactcttcagtttaacagctgatccattaaaccttttctgacatttgtgccttgttctcatgctagaattaatgctggatttttctctcatttgaccatcaatgtagttttacttattgaaaggaaaaaagacttaacacaagataggaaagatgagtatgagaagtaaaacattctgctggggtgctacatagaaggttaggttgtaggggctttgattttaatttaaacttattatcgattgatatttctgtatctcactaaatgcggttgaagagtgtgtgtgtgtgtgtgcgcgcgcgcatgtggccaaaaaatagtgccataatgtcaaattcttcctttgctctgtttttgagagttgatgacatcaggcacttttcagtgtttggggaaattgattgggatacctcccccaaaccaactcaagtctgtaactggaagccaggtggttggttttctggtccgctttgtcctctttcttttaccgtcatcctattcaccagcacttaatgtaagtagatgttttagaattgcaatatttattggtttagtatttgtcatccttagaaatgttaatgatgtatttttatattgataatataaatttatgtacagtatgtgtgtatatgtatttcaggatgttatagtattgtactttgtatgtgatggtttttgtgtcttcataataaatatgtcccttttaca

SEQ ID NO: 149339 - DNA, 566 bp, Homo sapiens
  Payload ID: 9483
  Gene Symbol: LIN52
  Gene Name: lin-52 DREAM MuvB core complex component
  ENST ID: ENST00000554938
  CDS Start-End: 1-292
acgtgacatgggttggaagatggcgtctcccacagacgggacagatctggaagcatctttgctaagttttgaaaaacttgaccgtgcctcaccagatctttggccagaacaatttttgtttttctttttagtaccaggtgttgctgaatttgcagcttccttcaaaagtcctattactagttctccacccaaatggatggctgagatagaacgtgatgacatcgacatgttgaaagccagagagatgacacgggggaaattcctcaatattctagagaagcccaagaagtagcagctgcttgcggacaggatgtcctggggtccgaaaccaagctcccttcccggtgcacctctaacaatgcacacctcactgcttgcttgggagaggccagagggtgtacctccaggactgccctctcccctgctcctggcactctacacgtctgaggacattcagcagcaagagaagaatctgctctacccaaggatcattgcagttactcaatcaactttcagacttgaaccttcttagcctcggatattggtaacagctgagggcatatcat

SEQ ID NO: 149340 - DNA, 6127 bp, Homo sapiens
  Payload ID: 9484
  Gene Symbol: LIN54
  Gene Name: lin-54 DREAM MuvB core complex component
  Uniprot ID: Q6MZP7
  ENST ID: ENST00000340417
  CDS Start-End: 379-2628
gaggttactggtggtggcggcggcggcggcggcccgggctccggctgtcggggaagctgctgagctgtgatggtgatgacgaggtgaaaatggcggatctttcgaaatacaatcccggcccctgacataccagaggcggcggcgacggcgacgtcgccaccccggctcccttctcggtccccgggtaccctggagcgctccagtttggacaaactgggaaaggaagctgctggccagagctatcgtgcacgggcaaaacaagccccgccggggctcgggattgcccaggaccttctggagcccctacctcggagcccgagggaggagaaagcggcagccgctggagtgcctgatcaactttctagcgggagaacgatcatggaggtggtgccagctgaggtgaatagtttgcttccagaggaaataatggacactggtataactttagtggatgatgatagtattgaggctgttattgtttcatccccaattcccatggagacagaactggaagaaattgtcaacataaattctactggtgactctacagccacgcccatttccacggaaccaatcacagtgtacagtaaccacactaaccaagttgcagtgaataccacaattactaaagcagattctaataccacagtgaaaccagcttttccaagtggccttcaaaaacttggtgctcagactcctgtgactatatcagccaatcagattattttaaacaaagtatcacagacatctgatcttaaacttggcaatcagacccttaaaccagatggacagaagttaattttaacaactttgggcaagtctggttcaccaattgttttagcactaccccatagccaactaccccaggctcagaaagttacaactcaggcccagtcaggagatgctaagttaccaccgcagcaaattaaagtagttaccattggagggaggccagaggtgaaacctgtcattggtgtctcagcattgaccccaggaagtcaactgattaatactacaactcagccctctgtgttacagacccaacagttaaaaacagtacagattgctaagaagcctcgaacgccaacctctggtccagtaatcacgaagctgatctttgcaaaaccaattaatagtaaagcagttacaggacagacaactcaagtttcaccaccagttattgcaggtagggttctttcacagtctactcccggaactccatcaaagaccataacaatatctgaaagtggtgttattggatcaactttaaattctacaacacagacaccaaataaaatagccatctcacctttgaaatcgccaaataaggcagtgaaatcaactgtgcagaccatcactgttggaggagtgagcacatcacagtttaagacaattattcctctggcaactgctcccaatgtccagcagattcaagtgcctggaagcaagtttcattatgtccgacttgttactgccacatcagccagtagctcaacccagccagttagtcagaatcccagtacaaacactcagcctcttcagcaagcaaagccagtggttgttaatacaaccccagtgcggatgtcagttccaattgtctcagctcaggctgtcaaacaagttgttccaaaaccaatcaatccaacttcacaaatagtaactactagccagccacagcaacggcttatcatgcctgccacaccactgccacagatccagcccaacctcactaacctgccaccaggcactgtcctggcaccagctccgggaacagggaatgtgggttatgcagtgcttccagctcagtatgttactcagctacagcagtcttcatatgtatcaatagcaagcaactctacctttactggaacatctggtatccagacccaggcacggcttccattcaatggcataatcccatcagagtcggccagtcggccccgaaagccctgtaattgtacaaaatcactgtgtttgaaattgtattgtgattgctttgcaaatggtgaattttgcaacaactgcaattgtactaattgttacaacaatttggaacatgaaaatgaaaggcaaaaagcaataaaggcatgccttgacagaaatccagaagcctttaagcctaagatagggaaaggaaaggagggagaatctgatcgacgtcatagcaaagggtgtaattgcaaacgatcaggatgtcttaaaaactactgtgaatgctatgaggcaaaaataatgtgttcctcaatatgcaaatgtattggctgtaagaattttgaagaaagcccggaaaggaagacattgatgcatttggcagatgcagctgaagtaagggtacagcaacaaacagcagccaagacgaagttatcctctcaaatttcagacttgcttactaggccaacaccagctttaaatagtggaggcggaaaattgccatttacatttgtaactaaggaagtagctgaagccacatgtaattgcctccttgcccaggcagagcaggcagacaagaagggaaaatcaaaggcagcagcggaacggatgatacttgaggaattcggacgatgtttgatgagtgtcatcaactctgcaggaaaggcaaaaagtgacccttgtgccatgaattgctaactcttgcacaaaagactgataaatggaactgtacagaaaatttaaggtgcagggacacttgattttctggaagaaaaacaattactgtattttaattcagtccttgttttaaaagacctgaaattataatactgaaggagaagaaattttaaatgaggaaattagtacattttaaatcttagttaaatctgcttatgccccttctaaattgaatttttctttattatatagattttttaatttgcttgggtttcttaagaattagatgttctctttctgatacctttgacaaaaaatgtttataaattcatataatttataatgtatggtgttgtatgactttgttaatagaaaagccaaagcagcagtggttagcacccattctttgggacttgatctagaatatctgcagacagaatgttacataaacaaattcttatgaaacacattcaaatgacattttgtatttagaaaaggactatcttttaaagaaaaagcagccttttagggccgattctggaataatatcctgttgtcactttgggaatgtcagaaggggaaacaatccccaggcacactaaaaattttttaaagttatttaaaaaaacatataaaatattaaaggacagtaaatctcagaggatgggcaatgtgtttctataataaggaaaggctaacagatgctctgggctgtctccattttctttcaaagaggtggtatgtatttgaagtaataaattgtcaaagtgattactgggtactattaaaatgataggtggatataaatggaagtaaacattatgtagtgataatatagaacctcacatagtaatcaagtataaaatttggcatgggtggagaaacaaagaatagggaagctgcaaaagatgaatttagagaagttttcatctatacaatcaattatttttacagacttttttttttttttttttgagacggagtctcgctgtgtagcccaggctggagtgcaatggtgagatctcagctcactgcaacgcctctgcctcccaggttcaagcgattctcctgcctcagcctcccgtgtagctgggactacaggtgcatgccaccatgcccggctcattttttgtatttttagtagagacggggtttcaccgtgttagccaggatggtctcgatctcctgacctcgtgattcgcccgcctcggcctcccaaagtgctgggattacaggcataagccgccgtgccaggccctttttatagacttttgaactaagaggtttcaaaccaaatcgcaactcttacttgatttacagaaatgggcctcctaacaaaattttcaaaattgtggtgggatttctttttataagggaagtttaatatggcattattttcagccagtgatttggaaggtctgttttcctataattactaaaataacctaaatcattttcagtattcaaaaactctatgaatttaagagcctgttgtgacaggactcttgattttatgacaagaaaaaaccatgttggaattcaggcattttgttaggtaccttaatcatcagtaattagtatatgattatttcatttcctacaaggactctatagttgtatgtattaagtgtgtatatatgttcatatgaacatgcaagatataggcaatagaaattaagtaatccaaaagaggattccgttattcactaaagtatcttccttttaaatttggatttataaaatcatagtgcagtaactttaaatgtagatagttcaaacattcttagcacctcaatctagtatgtttaattaaaatttgtataaatgtaaattagtgtaagagggtaaaataataatcaagttatttttcaaaagattgcaataagtttttggtctaaacttaaactttgttcattttgtacatactctgtgttaattctaattgcacctttgtgatgtgtatttatatacagtgtgcagaaaatgttcgtgaaattttgattacaattgtagattatgtatgatggcattgcttacgaatgttttgcttgtaaaaaaatttcaaggtgcaatcaaatgctactagtttttctgattttcaaaaatctatctatctaaaatattaagccttttccttcctgtgtagtacttactaaataactttttgtattcaggcatttgcatcaaattgctgaacaagatgaatagccacattaattcaatgattttaaaagactatttggggagggttgggtatataattttttagctctatttacatcccaaagtagaaagattaaatttatatttactagagctattcaaagaatacacttttctatattgtaaaaacaggacagcaaagtaaatcatacagaaaataaacatttatactattctgtaaaaaaggttttgcattttttctttagtataataacaccactttattaaccatttaatatgcaaaaaaccttttaaattatctgaagtaaatttgacattacttctgaaaacacacaactaaaaaattctatcattttgctcagttattactaacataaattgctttgaaatgagaatatgtcttctctttttttccccactgtttcttttaagagcagaaactcagccgggcatggtggctcacgcctgtaattccagcactttgggaggtcaaggcgggtgaatcacttgagtccaggagttctagaccagcccaggctacatggtgaaaccctgtctctactaaaaatataaaaaaattcactgcgtgtggtggcgcacacctgcagtcctcgctactttgaaggcctgagcctgcagaggttgaggctgtagtgagtcaaaattacaccactgcactccagcctggcaatcagagtgagaccttgtctcaaaaacaaaaatacctagaaaatcaatctactctgtcttttaatgtgaaatgttcttatgatagctatctttcttagtttcctttttttctgaagcactaaacacaacctgtaggtcttatctctggggtctgggaaacagaaccttaatgttacaggtacaaaagcaaacagagtgattagttccccattttctggtagtgaacaactgacattttttcaatcttatgtaaaatgtgaataaaaataattttagaaaagttatctatttttattgttctgtaacacaaatagttaagaaaatgaatacttgttatgtaaatgaagcttcacagcaggacctccggccataactttgatcatgttgtatctcttaagcattttatataggaattctggtgtggctacccaaagcagaagggaaggcaatcaactaaaaatccctttctattggagttattttcatcatgtaaattacttcaggcttttcttgttagggcttcttgaatgcacattttgtcattatctgtataccaaaggtgagcttttttttttaatccatgtgattttatgagttgaaagctataaggttttttttaattaaaaatttccttctaaatggcaaa

SEQ ID NO: 149341 - DNA, 4254 bp, Homo sapiens
  Payload ID: 9484
  Gene Symbol: LIN54
  Gene Name: lin-54 DREAM MuvB core complex component
  Uniprot ID: Q6MZP7
  ENST ID: ENST00000442461
  CDS Start-End: 281-1867
ctttcgaaatacaatcccggcccctgacataccagaggcggcggcgacggcgacgtcgccaccccggctcccttctcggtccccgggtaccctggagcgctccagtttggacaaactgggaaaggaagctgctggccagagctatcgtgcacgggcaaaacaagccccgccggggctcgggattgcccaggaccttctggagcccctacctcggagcccgagggaggagaaagcggcagccgctggagtgcctgatcaactttctagcgggagaacgatcatggaggtggtgccagctgagattgctaagaagcctcgaacgccaacctctggtccagtaatcacgaagctgatctttgcaaaaccaattaatagtaaagcagttacaggacagacaactcaagtttcaccaccagttattgcaggtagggttctttcacagtctactcccggaactccatcaaagaccataacaatatctgaaagtggtgttattggatcaactttaaattctacaacacagacaccaaataaaatagccatctcacctttgaaatcgccaaataaggcagtgaaatcaactgtgcagaccatcactgttggaggagtgagcacatcacagtttaagacaattattcctctggcaactgctcccaatgtccagcagattcaagtgcctggaagcaagtttcattatgtccgacttgttactgccacatcagccagtagctcaacccagccagttagtcagaatcccagtacaaacactcagcctcttcagcaagcaaagccagtggttgttaatacaaccccagtgcggatgtcagttccaattgtctcagctcaggctgtcaaacaagttgttccaaaaccaatcaatccaacttcacaaatagtaactactagccagccacagcaacggcttatcatgcctgccacaccactgccacagatccagcccaacctcactaacctgccaccaggcactgtcctggcaccagctccgggaacagggaatgtgggttatgcagtgcttccagctcagtatgttactcagctacagcagtcttcatatgtatcaatagcaagcaactctacctttactggaacatctggtatccagacccaggcacggcttccattcaatggcataatcccatcagagtcggccagtcggccccgaaagccctgtaattgtacaaaatcactgtgtttgaaattgtattgtgattgctttgcaaatggtgaattttgcaacaactgcaattgtactaattgttacaacaatttggaacatgaaaatgaaaggcaaaaagcaataaaggcatgccttgacagaaatccagaagcctttaagcctaagatagggaaaggaaaggagggagaatctgatcgacgtcatagcaaagggtgtaattgcaaacgatcaggatgtcttaaaaactactgtgaatgctatgaggcaaaaataatgtgttcctcaatatgcaaatgtattggctgtaagaattttgaagaaagcccggaaaggaagacattgatgcatttggcagatgcagctgaagtaagggtacagcaacaaacagcagccaagacgaagttatcctctcaaatttcagacttgcttactaggccaacaccagctttaaatagtggaggcggaaaattgccatttacatttgtaactaaggaagtagctgaagccacatgtaattgcctccttgcccaggcagagcaggcagacaagaagggaaaatcaaaggcagcagcggaacggatgatacttgaggaattcggacgatgtttgatgagtgtcatcaactctgcaggaaaggcaaaaagtgacccttgtgccatgaattgctaactcttgcacaaaagactgataaatggaactgtacagaaaatttaaggtgcagggacacttgattttctggaagaaaaacaattactgtattttaattcagtccttgttttaaaagacctgaaattataatactgaaggagaagaaattttaaatgaggaaattagtacattttaaatcttagttaaatctgcttatgccccttctaaattgaatttttctttattatatagattttttaatttgcttgggtttcttaagaattagatgttctctttctgatacctttgacaaaaaatgtttataaattcatataatttataatgtatggtgttgtatgactttgttaatagaaaagccaaagcagcagtggttagcacccattctttgggacttgatctagaatatctgcagacagaatgttacataaacaaattcttatgaaacacattcaaatgacattttgtatttagaaaaggactatcttttaaagaaaaagcagccttttagggccgattctggaataatatcctgttgtcactttgggaatgtcagaaggggaaacaatccccaggcacactaaaaattttttaaagttatttaaaaaaacatataaaatattaaaggacagtaaatctcagaggatgggcaatgtgtttctataataaggaaaggctaacagatgctctgggctgtctccattttctttcaaagaggtggtatgtatttgaagtaataaattgtcaaagtgattactgggtactattaaaatgataggtggatataaatggaagtaaacattatgtagtgataatatagaacctcacatagtaatcaagtataaaatttggcatgggtggagaaacaaagaatagggaagctgcaaaagatgaatttagagaagttttcatctatacaatcaattatttttacagacttttttttttttttttttgagacggagtctcgctgtgtagcccaggctggagtgcaatggtgagatctcagctcactgcaacgcctctgcctcccaggttcaagcgattctcctgcctcagcctcccgtgtagctgggactacaggtgcatgccaccatgcccggctcattttttgtatttttagtagagacggggtttcaccgtgttagccaggatggtctcgatctcctgacctcgtgattcgcccgcctcggcctcccaaagtgctgggattacaggcataagccgccgtgccaggccctttttatagacttttgaactaagaggtttcaaaccaaatcgcaactcttacttgatttacagaaatgggcctcctaacaaaattttcaaaattgtggtgggatttctttttataagggaagtttaatatggcattattttcagccagtgatttggaaggtctgttttcctataattactaaaataacctaaatcattttcagtattcaaaaactctatgaatttaagagcctgttgtgacaggactcttgattttatgacaagaaaaaaccatgttggaattcaggcattttgttaggtaccttaatcatcagtaattagtatatgattatttcatttcctacaaggactctatagttgtatgtattaagtgtgtatatatgttcatatgaacatgcaagatataggcaatagaaattaagtaatccaaaagaggattccgttattcactaaagtatcttccttttaaatttggatttataaaatcatagtgcagtaactttaaatgtagatagttcaaacattcttagcacctcaatctagtatgtttaattaaaatttgtataaatgtaaattagtgtaagagggtaaaataataatcaagttatttttcaaaagattgcaataagtttttggtctaaacttaaactttgttcattttgtacatactctgtgttaattctaattgcacctttgtgatgtgtatttatatacagtgtgcagaaaatgttcgtgaaattttgattacaattgtagattatgtatgatggcattgcttacgaatgttttgcttgtaaaaaaatttcaaggtgcaatcaaatgctactagtttttctgattttcaaaaatctatctatctaaaatattaagccttttccttcctgtgtagtacttactaaataactttttgtattcaggcatttgcatcaaattgctgaacaagatgaatagccacattaattcaatgattttaaaagactatttggggagggttgggtatataattttttagctctatttacatcccaaagtagaaagattaaatttatatttactagagctattcaaagaatacacttttctatattgtaaaaacaggacagcaaagtaaatcatacagaaaataaacatttatactattctgtaaaaaa

SEQ ID NO: 149342 - DNA, 4083 bp, Homo sapiens
  Payload ID: 9484
  Gene Symbol: LIN54
  Gene Name: lin-54 DREAM MuvB core complex component
  Uniprot ID: Q6MZP7
  ENST ID: ENST00000446851
  CDS Start-End: 110-1696
actggtggtggcggcggcggcggcggcccgggctccggctgtcggggaagctgctgagctgtgatggtgatgacgagtgcctgatcaactttctagcgggagaacgatcatggaggtggtgccagctgagattgctaagaagcctcgaacgccaacctctggtccagtaatcacgaagctgatctttgcaaaaccaattaatagtaaagcagttacaggacagacaactcaagtttcaccaccagttattgcaggtagggttctttcacagtctactcccggaactccatcaaagaccataacaatatctgaaagtggtgttattggatcaactttaaattctacaacacagacaccaaataaaatagccatctcacctttgaaatcgccaaataaggcagtgaaatcaactgtgcagaccatcactgttggaggagtgagcacatcacagtttaagacaattattcctctggcaactgctcccaatgtccagcagattcaagtgcctggaagcaagtttcattatgtccgacttgttactgccacatcagccagtagctcaacccagccagttagtcagaatcccagtacaaacactcagcctcttcagcaagcaaagccagtggttgttaatacaaccccagtgcggatgtcagttccaattgtctcagctcaggctgtcaaacaagttgttccaaaaccaatcaatccaacttcacaaatagtaactactagccagccacagcaacggcttatcatgcctgccacaccactgccacagatccagcccaacctcactaacctgccaccaggcactgtcctggcaccagctccgggaacagggaatgtgggttatgcagtgcttccagctcagtatgttactcagctacagcagtcttcatatgtatcaatagcaagcaactctacctttactggaacatctggtatccagacccaggcacggcttccattcaatggcataatcccatcagagtcggccagtcggccccgaaagccctgtaattgtacaaaatcactgtgtttgaaattgtattgtgattgctttgcaaatggtgaattttgcaacaactgcaattgtactaattgttacaacaatttggaacatgaaaatgaaaggcaaaaagcaataaaggcatgccttgacagaaatccagaagcctttaagcctaagatagggaaaggaaaggagggagaatctgatcgacgtcatagcaaagggtgtaattgcaaacgatcaggatgtcttaaaaactactgtgaatgctatgaggcaaaaataatgtgttcctcaatatgcaaatgtattggctgtaagaattttgaagaaagcccggaaaggaagacattgatgcatttggcagatgcagctgaagtaagggtacagcaacaaacagcagccaagacgaagttatcctctcaaatttcagacttgcttactaggccaacaccagctttaaatagtggaggcggaaaattgccatttacatttgtaactaaggaagtagctgaagccacatgtaattgcctccttgcccaggcagagcaggcagacaagaagggaaaatcaaaggcagcagcggaacggatgatacttgaggaattcggacgatgtttgatgagtgtcatcaactctgcaggaaaggcaaaaagtgacccttgtgccatgaattgctaactcttgcacaaaagactgataaatggaactgtacagaaaatttaaggtgcagggacacttgattttctggaagaaaaacaattactgtattttaattcagtccttgttttaaaagacctgaaattataatactgaaggagaagaaattttaaatgaggaaattagtacattttaaatcttagttaaatctgcttatgccccttctaaattgaatttttctttattatatagattttttaatttgcttgggtttcttaagaattagatgttctctttctgatacctttgacaaaaaatgtttataaattcatataatttataatgtatggtgttgtatgactttgttaatagaaaagccaaagcagcagtggttagcacccattctttgggacttgatctagaatatctgcagacagaatgttacataaacaaattcttatgaaacacattcaaatgacattttgtatttagaaaaggactatcttttaaagaaaaagcagccttttagggccgattctggaataatatcctgttgtcactttgggaatgtcagaaggggaaacaatccccaggcacactaaaaattttttaaagttatttaaaaaaacatataaaatattaaaggacagtaaatctcagaggatgggcaatgtgtttctataataaggaaaggctaacagatgctctgggctgtctccattttctttcaaagaggtggtatgtatttgaagtaataaattgtcaaagtgattactgggtactattaaaatgataggtggatataaatggaagtaaacattatgtagtgataatatagaacctcacatagtaatcaagtataaaatttggcatgggtggagaaacaaagaatagggaagctgcaaaagatgaatttagagaagttttcatctatacaatcaattatttttacagacttttttttttttttttttgagacggagtctcgctgtgtagcccaggctggagtgcaatggtgagatctcagctcactgcaacgcctctgcctcccaggttcaagcgattctcctgcctcagcctcccgtgtagctgggactacaggtgcatgccaccatgcccggctcattttttgtatttttagtagagacggggtttcaccgtgttagccaggatggtctcgatctcctgacctcgtgattcgcccgcctcggcctcccaaagtgctgggattacaggcataagccgccgtgccaggccctttttatagacttttgaactaagaggtttcaaaccaaatcgcaactcttacttgatttacagaaatgggcctcctaacaaaattttcaaaattgtggtgggatttctttttataagggaagtttaatatggcattattttcagccagtgatttggaaggtctgttttcctataattactaaaataacctaaatcattttcagtattcaaaaactctatgaatttaagagcctgttgtgacaggactcttgattttatgacaagaaaaaaccatgttggaattcaggcattttgttaggtaccttaatcatcagtaattagtatatgattatttcatttcctacaaggactctatagttgtatgtattaagtgtgtatatatgttcatatgaacatgcaagatataggcaatagaaattaagtaatccaaaagaggattccgttattcactaaagtatcttccttttaaatttggatttataaaatcatagtgcagtaactttaaatgtagatagttcaaacattcttagcacctcaatctagtatgtttaattaaaatttgtataaatgtaaattagtgtaagagggtaaaataataatcaagttatttttcaaaagattgcaataagtttttggtctaaacttaaactttgttcattttgtacatactctgtgttaattctaattgcacctttgtgatgtgtatttatatacagtgtgcagaaaatgttcgtgaaattttgattacaattgtagattatgtatgatggcattgcttacgaatgttttgcttgtaaaaaaatttcaaggtgcaatcaaatgctactagtttttctgattttcaaaaatctatctatctaaaatattaagccttttccttcctgtgtagtacttactaaataactttttgtattcaggcatttgcatcaaattgctgaacaagatgaatagccacattaattcaatgattttaaaagactatttggggagggttgggtatataattttttagctctatttacatcccaaagtagaaagattaaatttatatttactagagctattcaaagaatacacttttctatattgtaaaaacaggacagcaaagtaaatcatacagaaaataaacatttatactattctgtaaaaaa

SEQ ID NO: 149343 - DNA, 2257 bp, Homo sapiens
  Payload ID: 9484
  Gene Symbol: LIN54
  Gene Name: lin-54 DREAM MuvB core complex component
  Uniprot ID: Q6MZP7
  ENST ID: ENST00000510557
  CDS Start-End: 129-1715
accctggtctgtgtctcggaggcgccgccgccgccgctgctgctgggagcccagggagcgccgcgcgaccaggaggcggcggcgccgccggctttgtgcctgatcaactttctagcgggagaacgatcatggaggtggtgccagctgagattgctaagaagcctcgaacgccaacctctggtccagtaatcacgaagctgatctttgcaaaaccaattaatagtaaagcagttacaggacagacaactcaagtttcaccaccagttattgcaggtagggttctttcacagtctactcccggaactccatcaaagaccataacaatatctgaaagtggtgttattggatcaactttaaattctacaacacagacaccaaataaaatagccatctcacctttgaaatcgccaaataaggcagtgaaatcaactgtgcagaccatcactgttggaggagtgagcacatcacagtttaagacaattattcctctggcaactgctcccaatgtccagcagattcaagtgcctggaagcaagtttcattatgtccgacttgttactgccacatcagccagtagctcaacccagccagttagtcagaatcccagtacaaacactcagcctcttcagcaagcaaagccagtggttgttaatacaaccccagtgcggatgtcagttccaattgtctcagctcaggctgtcaaacaagttgttccaaaaccaatcaatccaacttcacaaatagtaactactagccagccacagcaacggcttatcatgcctgccacaccactgccacagatccagcccaacctcactaacctgccaccaggcactgtcctggcaccagctccgggaacagggaatgtgggttatgcagtgcttccagctcagtatgttactcagctacagcagtcttcatatgtatcaatagcaagcaactctacctttactggaacatctggtatccagacccaggcacggcttccattcaatggcataatcccatcagagtcggccagtcggccccgaaagccctgtaattgtacaaaatcactgtgtttgaaattgtattgtgattgctttgcaaatggtgaattttgcaacaactgcaattgtactaattgttacaacaatttggaacatgaaaatgaaaggcaaaaagcaataaaggcatgccttgacagaaatccagaagcctttaagcctaagatagggaaaggaaaggagggagaatctgatcgacgtcatagcaaagggtgtaattgcaaacgatcaggatgtcttaaaaactactgtgaatgctatgaggcaaaaataatgtgttcctcaatatgcaaatgtattggctgtaagaattttgaagaaagcccggaaaggaagacattgatgcatttggcagatgcagctgaagtaagggtacagcaacaaacagcagccaagacgaagttatcctctcaaatttcagacttgcttactaggccaacaccagctttaaatagtggaggcggaaaattgccatttacatttgtaactaaggaagtagctgaagccacatgtaattgcctccttgcccaggcagagcaggcagacaagaagggaaaatcaaaggcagcagcggaacggatgatacttgaggaattcggacgatgtttgatgagtgtcatcaactctgcaggaaaggcaaaaagtgacccttgtgccatgaattgctaactcttgcacaaaagactgataaatggaactgtacagaaaatttaaggtgcagggacacttgattttctggaagaaaaacaattactgtattttaattcagtccttgttttaaaagacctgaaattataatactgaaggagaagaaattttaaatgaggaaattagtacattttaaatcttagttaaatctgcttatgccccttctaaattgaatttttctttattatatagattttttaatttgcttgggtttcttaagaattagatgttctctttctgatacctttgacaaaaaatgtttataaattcatataatttataatgtatggtgttgtatgactttgttaatagaaaagccaaagcagcagtggttagcacccattctttgggacttgatctagaatatctgcagacagaatgttacataaacaaattcttatgaaacacattcaaatgacattttgtatttagaaaaggactatcttttaaagaaaaagcagccttttagggccgattctggaataatatcctgttgtcacttt

SEQ ID NO: 149344 - DNA, 4507 bp, Homo sapiens
  Payload ID: 9484
  Gene Symbol: LIN54
  Gene Name: lin-54 DREAM MuvB core complex component
  ENST ID: ENST00000510877
  CDS Start-End: 371-559
tggtggtggcggcggcggcggcggcccgggctccggctgtcggggaagctgctgagctgtgatggtgatgacgaggtgaaaatggcggatctttcgaaatacaatcccggcccctgacataccagaggcggcggcgacggcgacgtcgccaccccggctcccttctcggtccccgggtaccctggagcgctccagtttggacaaactgggaaaggaagctgctggccagagctatcgtgcacgggcaaaacaagccccgccggggctcgggattgcccaggaccttctggagcccctacctcggagcccgagggaggagaaagcggcagccgctggagtgcctgatcaactttctagcgggagaacgatcatggaggtggtgccagctgagattgctaagaagcctcgaacgccaacctctggtccagtaatcacgaagctgatctttgcaaaaccaattaatagtaaagcagttacaggacagacaactcaagtttcaccaccagttattgcagggttctttcacagtctactcccggaactccatcaaagaccataacaatatctgaaagtggtgttattggatcaactttaaattctacaacacagacaccaaataaaatagccatctcacctttgaaatcgccaaataaggcagtgaaatcaactgtgcagaccatcactgttggaggagtgagcacatcacagtttaagacaattattcctctggcaactgctcccaatgtccagcagattcaagtgcctggaagcaagtttcattatgtccgacttgttactgccacatcagccagtagctcaacccagccagttagtcagaatcccagtacaaacactcagcctcttcagcaagcaaagccagtggttgttaatacaaccccagtgcggatgtcagttccaattgtctcagctcaggctgtcaaacaagttgttccaaaaccaatcaatccaacttcacaaatagtaactactagccagccacagcaacggcttatcatgcctgccacaccactgccacagatccagcccaacctcactaacctgccaccaggcactgtcctggcaccagctccgggaacagggaatgtgggttatgcagtgcttccagctcagtatgttactcagctacagcagtcttcatatgtatcaatagcaagcaactctacctttactggaacatctggtatccagacccaggcacggcttccattcaatggcataatcccatcagagtcggccagtcggccccgaaagccctgtaattgtacaaaatcactgtgtttgaaattgtattgtgattgctttgcaaatggtgaattttgcaacaactgcaattgtactaattgttacaacaatttggaacatgaaaatgaaaggcaaaaagcaataaaggcatgccttgacagaaatccagaagcctttaagcctaagatagggaaaggaaaggagggagaatctgatcgacgtcatagcaaagggtgtaattgcaaacgatcaggatgtcttaaaaactactgtgaatgctatgaggcaaaaataatgtgttcctcaatatgcaaatgtattggctgtaagaattttgaagaaagcccggaaaggaagacattgatgcatttggcagatgcagctgaagtaagggtacagcaacaaacagcagccaagacgaagttatcctctcaaatttcagacttgcttactaggccaacaccagctttaaatagtggaggcggaaaattgccatttacatttgtaactaaggaagtagctgaagccacatgtaattgcctccttgcccaggcagagcaggcagacaagaagggaaaatcaaaggcagcagcggaacggatgatacttgaggaattcggacgatgtttgatgagtgtcatcaactctgcaggaaaggcaaaaagtgacccttgtgccatgaattgctaactcttgcacaaaagactgataaatggaactgtacagaaaatttaaggtgcagggacacttgattttctggaagaaaaacaattactgtattttaattcagtccttgttttaaaagacctgaaattataatactgaaggagaagaaattttaaatgaggaaattagtacattttaaatcttagttaaatctgcttatgccccttctaaattgaatttttctttattatatagattttttaatttgcttgggtttcttaagaattagatgttctctttctgatacctttgacaaaaaatgtttataaattcatataatttataatgtatggtgttgtatgactttgttaatagaaaagccaaagcagcagtggttagcacccattctttgggacttgatctagaatatctgcagacagaatgttacataaacaaattcttatgaaacacattcaaatgacattttgtatttagaaaaggactatcttttaaagaaaaagcagccttttagggccgattctggaataatatcctgttgtcactttgggaatgtcagaaggggaaacaatccccaggcacactaaaaattttttaaagttatttaaaaaaacatataaaatattaaaggacagtaaatctcagaggatgggcaatgtgtttctataataaggaaaggctaacagatgctctgggctgtctccattttctttcaaagaggtggtatgtatttgaagtaataaattgtcaaagtgattactgggtactattaaaatgataggtggatataaatggaagtaaacattatgtagtgataatatagaacctcacatagtaatcaagtataaaatttggcatgggtggagaaacaaagaatagggaagctgcaaaagatgaatttagagaagttttcatctatacaatcaattatttttacagacttttttttttttttttttgagacggagtctcgctgtgtagcccaggctggagtgcaatggtgagatctcagctcactgcaacgcctctgcctcccaggttcaagcgattctcctgcctcagcctcccgtgtagctgggactacaggtgcatgccaccatgcccggctcattttttgtatttttagtagagacggggtttcaccgtgttagccaggatggtctcgatctcctgacctcgtgattcgcccgcctcggcctcccaaagtgctgggattacaggcataagccgccgtgccaggccctttttatagacttttgaactaagaggtttcaaaccaaatcgcaactcttacttgatttacagaaatgggcctcctaacaaaattttcaaaattgtggtgggatttctttttataagggaagtttaatatggcattattttcagccagtgatttggaaggtctgttttcctataattactaaaataacctaaatcattttcagtattcaaaaactctatgaatttaagagcctgttgtgacaggactcttgattttatgacaagaaaaaaccatgttggaattcaggcattttgttaggtaccttaatcatcagtaattagtatatgattatttcatttcctacaaggactctatagttgtatgtattaagtgtgtatatatgttcatatgaacatgcaagatataggcaatagaaattaagtaatccaaaagaggattccgttattcactaaagtatcttccttttaaatttggatttataaaatcatagtgcagtaactttaaatgtagatagttcaaacattcttagcacctcaatctagtatgtttaattaaaatttgtataaatgtaaattagtgtaagagggtaaaataataatcaagttatttttcaaaagattgcaataagtttttggtctaaacttaaactttgttcattttgtacatactctgtgttaattctaattgcacctttgtgatgtgtatttatatacagtgtgcagaaaatgttcgtgaaattttgattacaattgtagattatgtatgatggcattgcttacgaatgttttgcttgtaaaaaaatttcaaggtgcaatcaaatgctactagtttttctgattttcaaaaatctatctatctaaaatattaagccttttccttcctgtgtagtacttactaaataactttttgtattcaggcatttgcatcaaattgctgaacaagatgaatagccacattaattcaatgattttaaaagactatttggggagggttgggtatataattttttagctctatttacatcccaaagtagaaagattaaatttatatttactagagctattcaaagaatacacttttctatattgtaaaaacaggacagcaaagtaaatcatacagaaaataaacatttatactattctgtaaaaaaggttttgcattttttctttagtataataacaccactttattaaccatttaatatgcaaaaaaccttttaaattatctgaagtaaatttgacattacttctgaaaacacacaactaaaaaattctatcattttgctcagttattactaacataaattgctttgaaatg

SEQ ID NO: 149345 - DNA, 2757 bp, Homo sapiens
  Payload ID: 9484
  Gene Symbol: LIN54
  Gene Name: lin-54 DREAM MuvB core complex component
  Uniprot ID: Q6MZP7
  ENST ID: ENST00000506560
  CDS Start-End: 259-2241
cctgacataccagaggcggcggcgacggcgacgtcgccaccccggctcccttctcggtccccgggtaccctggagcgctccagtttggacaaactgggaaaggaagctgctggccagagctatcgtgcacgggcaaaacaagccccgccggggctcgggattgcccaggaccttctggagcccctacctcggagcccgagggaggagaaagcggcagccgctggagtgcctgatcaactttctagcgggagaacgatcatggaggtggtgccagctgaggtgaatagtttgcttccagaggaaataatggacactggtataactttagtggatgatgatagtattgaggctgttattgtttcatccccaattcccatggagacagaactggaagaaattgtcaacataaattctactggtgactctacagccacgcccatttccacggaaccaatcacagtgtacagtaaccacactaaccaagttgcagtgaataccacaattactaaagcagattctaataccacagtgaaaccagcttttccaagtggccttcaaaaacttggtgctcagactcctgtgactatatcagccaatcagattattttaaacaaagtatcacagacatctgatcttaaacttggcaatcagacccttaaaccagatggacagaagttaattttaacaactttgggcaagtctggttcaccaattgttttagcactaccccatagccaactaccccaggctcagaaagttacaactcaggcccagtcaggagatgctaagttaccaccgcagcaaattaaagtagttaccattggagggaggccagaggtgaaacctgtcattggtgtctcagcattgaccccaggaagtcaactgattaatactacaactcagccctctgtgttacagacccaacagttaaaaacagtacaggcagtgaaatcaactgtgcagaccatcactgttggaggagtgagcacatcacagtttaagacaattattcctctggcaactgctcccaatgtccagcagattcaagtgcctggaagcaagtttcattatgtccgacttgttactgccacatcagccagtagctcaacccagccagttagtcagaatcccagtacaaacactcagcctcttcagcaagcaaagccagtggttgttaatacaaccccagtgcggatgtcagttccaattgtctcagctcaggctgtcaaacaagttgttccaaaaccaatcaatccaacttcacaaatagtaactactagccagccacagcaacggcttatcatgcctgccacaccactgccacagatccagcccaacctcactaacctgccaccaggcactgtcctggcaccagctccgggaacagggaatgtgggttatgcagtgcttccagctcagtatgttactcagctacagcagtcttcatatgtatcaatagcaagcaactctacctttactggaacatctggtatccagacccaggcacggcttccattcaatggcataatcccatcagagtcggccagtcggccccgaaagccctgtaattgtacaaaatcactgtgtttgaaattgtattgtgattgctttgcaaatggtgaattttgcaacaactgcaattgtactaattgttacaacaatttggaacatgaaaatgaaaggcaaaaagcaataaaggcatgccttgacagaaatccagaagcctttaagcctaagatagggaaaggaaaggagggagaatctgatcgacgtcatagcaaagggtgtaattgcaaacgatcaggatgtcttaaaaactactgtgaatgctatgaggcaaaaataatgtgttcctcaatatgcaaatgtattggctgtaagaattttgaagaaagcccggaaaggaagacattgatgcatttggcagatgcagctgaagtaagggtacagcaacaaacagcagccaagacgaagttatcctctcaaatttcagacttgcttactaggccaacaccagctttaaatagtggaggcggaaaattgccatttacatttgtaactaaggaagtagctgaagccacatgtaattgcctccttgcccaggcagagcaggcagacaagaagggaaaatcaaaggcagcagcggaacggatgatacttgaggaattcggacgatgtttgatgagtgtcatcaactctgcaggaaaggcaaaaagtgacccttgtgccatgaattgctaactcttgcacaaaagactgataaatggaactgtacagaaaatttaaggtgcagggacacttgattttctggaagaaaaacaattactgtattttaattcagtccttgttttaaaagacctgaaattataatactgaaggagaagaaattttaaatgaggaaattagtacattttaaatcttagttaaatctgcttatgccccttctaaattgaatttttctttattatatagattttttaatttgcttgggtttcttaagaattagatgttctctttctgatacctttgacaaaaaatgtttataaattcatataatttataatgtatggtgttgtatgactttgttaatagaaaagccaaagcagcagtggttagcacccattctttgggacttgatctagaatatctgcagacagaatgttacataaacaaattcttatgaaacacattcaaatgacattttgtatttagaaaaggactatcttttaaagaaaaagcagccttttagggccgatt

SEQ ID NO: 149346 - DNA, 2742 bp, Homo sapiens
  Payload ID: 9484
  Gene Symbol: LIN54
  Gene Name: lin-54 DREAM MuvB core complex component
  Uniprot ID: Q6MZP7
  ENST ID: ENST00000505397
  CDS Start-End: 168-2417
gcggcggtggaatggggctgggcgcgtgattttgaacaaaccctggtctgtgtctcggaggcgccgccgccgccgctgctgctgggagcccagggagcgccgcgcgaccaggaggcggcggcgccgccggctttgtgcctgatcaactttctagcgggagaacgatcatggaggtggtgccagctgaggtgaatagtttgcttccagaggaaataatggacactggtataactttagtggatgatgatagtattgaggctgttattgtttcatccccaattcccatggagacagaactggaagaaattgtcaacataaattctactggtgactctacagccacgcccatttccacggaaccaatcacagtgtacagtaaccacactaaccaagttgcagtgaataccacaattactaaagcagattctaataccacagtgaaaccagcttttccaagtggccttcaaaaacttggtgctcagactcctgtgactatatcagccaatcagattattttaaacaaagtatcacagacatctgatcttaaacttggcaatcagacccttaaaccagatggacagaagttaattttaacaactttgggcaagtctggttcaccaattgttttagcactaccccatagccaactaccccaggctcagaaagttacaactcaggcccagtcaggagatgctaagttaccaccgcagcaaattaaagtagttaccattggagggaggccagaggtgaaacctgtcattggtgtctcagcattgaccccaggaagtcaactgattaatactacaactcagccctctgtgttacagacccaacagttaaaaacagtacagattgctaagaagcctcgaacgccaacctctggtccagtaatcacgaagctgatctttgcaaaaccaattaatagtaaagcagttacaggacagacaactcaagtttcaccaccagttattgcaggtagggttctttcacagtctactcccggaactccatcaaagaccataacaatatctgaaagtggtgttattggatcaactttaaattctacaacacagacaccaaataaaatagccatctcacctttgaaatcgccaaataaggcagtgaaatcaactgtgcagaccatcactgttggaggagtgagcacatcacagtttaagacaattattcctctggcaactgctcccaatgtccagcagattcaagtgcctggaagcaagtttcattatgtccgacttgttactgccacatcagccagtagctcaacccagccagttagtcagaatcccagtacaaacactcagcctcttcagcaagcaaagccagtggttgttaatacaaccccagtgcggatgtcagttccaattgtctcagctcaggctgtcaaacaagttgttccaaaaccaatcaatccaacttcacaaatagtaactactagccagccacagcaacggcttatcatgcctgccacaccactgccacagatccagcccaacctcactaacctgccaccaggcactgtcctggcaccagctccgggaacagggaatgtgggttatgcagtgcttccagctcagtatgttactcagctacagcagtcttcatatgtatcaatagcaagcaactctacctttactggaacatctggtatccagacccaggcacggcttccattcaatggcataatcccatcagagtcggccagtcggccccgaaagccctgtaattgtacaaaatcactgtgtttgaaattgtattgtgattgctttgcaaatggtgaattttgcaacaactgcaattgtactaattgttacaacaatttggaacatgaaaatgaaaggcaaaaagcaataaaggcatgccttgacagaaatccagaagcctttaagcctaagatagggaaaggaaaggagggagaatctgatcgacgtcatagcaaagggtgtaattgcaaacgatcaggatgtcttaaaaactactgtgaatgctatgaggcaaaaataatgtgttcctcaatatgcaaatgtattggctgtaagaattttgaagaaagcccggaaaggaagacattgatgcatttggcagatgcagctgaagtaagggtacagcaacaaacagcagccaagacgaagttatcctctcaaatttcagacttgcttactaggccaacaccagctttaaatagtggaggcggaaaattgccatttacatttgtaactaaggaagtagctgaagccacatgtaattgcctccttgcccaggcagagcaggcagacaagaagggaaaatcaaaggcagcagcggaacggatgatacttgaggaattcggacgatgtttgatgagtgtcatcaactctgcaggaaaggcaaaaagtgacccttgtgccatgaattgctaactcttgcacaaaagactgataaatggaactgtacagaaaatttaaggtgcagggacacttgattttctggaagaaaaacaattactgtattttaattcagtccttgttttaaaagacctgaaattataatactgaaggagaagaaattttaaatgaggaaattagtacattttaaatcttagttaaatctgcttatgccccttctaaattgaatttttctttattatatagattttttaatttgcttgggtttcttaagaattagatgttctctttctgatacctttgacaaaaaatgtttataaattcatataatttataatgt

SEQ ID NO: 149347 - DNA, 2684 bp, Homo sapiens
  Payload ID: 9484
  Gene Symbol: LIN54
  Gene Name: lin-54 DREAM MuvB core complex component
  Uniprot ID: Q6MZP7
  ENST ID: ENST00000508171
  CDS Start-End: 260-991
ccctgacataccagaggcggcggcgacggcgacgtcgccaccccggctcccttctcggtccccgggtaccctggagcgctccagtttggacaaactgggaaaggaagctgctggccagagctatcgtgcacgggcaaaacaagccccgccggggctcgggattgcccaggaccttctggagcccctacctcggagcccgagggaggagaaagcggcagccgctggagtgcctgatcaactttctagcgggagaacgatcatggaggtggtgccagctgaggtgaatagtttgcttccagaggaaataatggacactggtataactttagtggatgatgatagtattgaggctgttattgtttcatccccaattcccatggagacagaactggaagaaattgtcaacataaattctactggtgactctacagccacgcccatttccacggaaccaatcacagtgtacagtaaccacactaaccaagttgcagtgaataccacaattactaaagcagattctaataccacagtgaaaccagcttttccaagtggccttcaaaaacttggtgctcagactcctgtgactatatcagccaatcagattattttaaacaaagtatcacagacatctgatcttaaacttggcaatcagacccttaaaccagatggacagaagttaattttaacaactttgggcaagtctggttcaccaattgttttagcactaccccatagccaactaccccaggctcagaaagttacaactcaggcccagtcaggagatgctaagttaccaccgcagcaaattaaagtagttaccattggagggaggccagaggtgaaacctgtcattggtgtctcagcattgaccccaggaagtcaactgattaatactacaactcagccctctgtgttacagacccaacagttaaaaacagtacaggtagggttctttcacagtctactcccggaactccatcaaagaccataacaatatctgaaagtggtgttattggatcaactttaaattctacaacacagacaccaaataaaatagccatctcacctttgaaatcgccaaataagcaaagccagtggttgttaatacaaccccagtgcggatgtcagttccaattgtctcagctcaggctgtcaaacaagttgttccaaaaccaatcaatccaacttcacaaatagtaactactagccagccacagcaacggcttatcatgcctgccacaccactgccacagatccagcccaacctcactaacctgccaccaggcactgtcctggcaccagctccgggaacagggaatgtgggttatgcagtgcttccagctcagtatgttactcagctacagcagtcttcatatgtatcaatagcaagcaactctacctttactggaacatctggtatccagacccaggcacggcttccattcaatggcataatcccatcagagtcggccagtcggccccgaaagccctgtaattgtacaaaatcactgtgtttgaaattgtattgtgattgctttgcaaatggtgaattttgcaacaactgcaattgtactaattgttacaacaatttggaacatgaaaatgaaaggcaaaaagcaataaaggcatgccttgacagaaatccagaagcctttaagcctaagatagggaaaggaaaggagggagaatctgatcgacgtcatagcaaagggtgtaattgcaaacgatcaggatgtcttaaaaactactgtgaatgctatgaggcaaaaataatgtgttcctcaatatgcaaatgtattggctgtaagaattttgaagaaagcccggaaaggaagacattgatgcatttggcagatgcagctgaagtaagggtacagcaacaaacagcagccaagacgaagttatcctctcaaatttcagacttgcttactaggccaacaccagctttaaatagtggaggcggaaaattgccatttacatttgtaactaaggaagtagctgaagccacatgtaattgcctccttgcccaggcagagcaggcagacaagaagggaaaatcaaaggcagcagcggaacggatgatacttgaggaattcggacgatgtttgatgagtgtcatcaactctgcaggaaaggcaaaaagtgacccttgtgccatgaattgctaactcttgcacaaaagactgataaatggaactgtacagaaaatttaaggtgcagggacacttgattttctggaagaaaaacaattactgtattttaattcagtccttgttttaaaagacctgaaattataatactgaaggagaagaaattttaaatgaggaaattagtacattttaaatcttagttaaatctgcttatgccccttctaaattgaatttttctttattatatagattttttaatttgcttgggtttcttaagaattagatgttctctttctgatacctttgacaaaaaatgtttataaattcatataatttataatgtatggtgttgtatgactttgttaatagaaaagccaaagcagcagtggttagcacccattctttgggacttgatctagaatatctgcagacagaatgttacataaacaaattcttatgaaacacattcaaatgacattttgtatttagaaaaggactatcttttaaagaaaaagcagccttttagggccgatt

SEQ ID NO: 149348 - DNA, 989 bp, Homo sapiens
  Payload ID: 9485
  Gene Symbol: LIN7A
  Gene Name: lin-7 homolog A (C. elegans)
  ENST ID: ENST00000261203
  CDS Start-End: 59-364
tccctctccacccccgcccccaatctcctcctttttttctcactacgagcggttgctgatgctgaagccgagcgtcacttcggctcccacggcagacatggcgacattgacagtggtccagccgctcaccctggacagagatgttgcaagagcaattgaattactggaaaaactacaggaatctggagaagtaccagtgcacaagctacaatccctcaaaaaagtgcttcagagtgagttttgtacagctattcgagaggtgtatcaatatatgcatgaaacgataactgttaatggctgtcccgaattccgtgcgagggcaacagcaaaggtattctcgtgtgtacactgtaagagaatttagacatcagtggcagcccagagtctagaaccagtactacttctcaggcaacagttgcagcttttgcagctagtgaaggccactcccaccctcgagtagttgaactgccaaagactgatgaaggccttggttttaatgtgatgggaggaaaggagcaaaattcccccatttatatctctcgcataattcctggaggggtggctgaaagacacggaggcctcaaaagaggagaccagctgctatcagtgaacggagtgagtgtggaaggagaacaccatgagaaagctgtggaactactcaaggctgctaaagacagcgtcaagctggtggtgcgatacaccccaaaagttctggaagaaatggaggctcgctttgaaaagctacgaacagccaggcgtcggcagcagcagcaattgctaattcagcagcagcaacagcagcagcagcaacaaacacaacaaaaccacatgtcataggcccttgagggaaagctacttgatcaaacatccgatagtcacaaatttgaaaccgtgcttcagaatcccagcacatagtaaaagacaacactgataattatacctgtcaagaagctgtgaacacatggtgtataaattctttaccaaggcaa

SEQ ID NO: 149349 - DNA, 6112 bp, Homo sapiens
  Payload ID: 9485
  Gene Symbol: LIN7A
  Gene Name: lin-7 homolog A (C. elegans)
  Uniprot ID: O14910
  ENST ID: ENST00000552864
  CDS Start-End: 204-905
cggatacctgctcagctccgcaccgcaactgaagatctgccgccgcggaacagttgcgtctccatctggctaccaacccacccaagctttcttctccaccaccaccaccttccttccttccccctcctccccctcctttccgtcttccctctccacccccgcccccaatctcctcctttttttctcactacgagcggttgctgatgctgaagccgagcgtcacttcggctcccacggcagacatggcgacattgacagtggtccagccgctcaccctggacagagatgttgcaagagcaattgaattactggaaaaactacaggaatctggagaagtaccagtgcacaagctacaatccctcaaaaaagtgcttcagagtgagttttgtacagctattcgagaggtgtatcaatatatgcatgaaacgataactgttaatggctgtcccgaattccgtgcgagggcaacagcaaaggcaacagttgcagcttttgcagctagtgaaggccactcccaccctcgagtagttgaactgccaaagactgatgaaggccttggttttaatgtgatgggaggaaaggagcaaaattcccccatttatatctctcgcataattcctggaggggtggctgaaagacacggaggcctcaaaagaggagaccagctgctatcagtgaacggagtgagtgtggaaggagaacaccatgagaaagctgtggaactactcaaggctgctaaagacagcgtcaagctggtggtgcgatacaccccaaaagttctggaagaaatggaggctcgctttgaaaagctacgaacagccaggcgtcggcagcagcagcaattgctaattcagcagcagcaacagcagcagcagcaacaaacacaacaaaaccacatgtcataggcccttgagggaaagctacttgatcaaacatccgatagtcacaaatttgaaaccgtgcttcagaatcccagcacatagtaaaagacaacactgataattatacctgtcaagaagctgtgaacacatggtgtataaattctttaccaaggcaactcaacaccttctttctctgggcttgaaccgccactgctcacgtgggctttacatacattgaccttccattcactgcagtgggaattctcagtgtgcagagggagaggttttctagtctgcaaactgaaacagtgtaagaagaataaagtctatgacttttaaataaatcaccagggccaagattgagtgaatcttgggtccatagcttttccagatattagcaaacccctcattaggctataattcaaactgcatcagttcaaagtgaaacctacacattgctccttaccctcacctgctccacaatccatagtgctgagttgtctgaattggaattccagttaattgcaagttcaacctgttttcctcttgaaaatcgcaaggtatcatactatatttatattttcttcaggttctagaagcaatcggctttttcttttgtttccatgaattttattatgcattaatagaatggaccaattttagctcaacttttagtttgttagaagcaagtgtaggaactctagcactgtagtttttaattattgcttgtatctattattattaattccaacagagtataatgtatatttattctataaaatatatattatcagagtgcatttgttacaacttaggttcttttcttaccaagtattaagaatctagtaagagaatactagcaaaggacctagccctgtgaacagattctcgtatgttatatacataaacccactctcaatattttttgagttttatactttttgattgataaacactgaagaaatctaaactctactcacactgatgtgctgtcatagaagcctatttcatattttaaagcttagcaaaactaaattatatgtgcatatatattcaaatatttgtgtcacacaaagtttaggtcaatttccccaaatataaaccagatatttttggcactctcagataaacaagtattatttctcttataattgggcaggtggaaaccagtgatatcaatattgtgaatggcagatgctgcttcctctagaaaaataaaataaaatcaccaactttaatatattcccataggtaaatagacaatgagatatcatttttcagaaaatatcattcactggaaaataatctgttataactacatttacaggtcataatttttggtttatggtaaatctaggcacctaagtctgattttactttatgaaataaataggaagcaataattgtttgggcatttgaataccttaagcacataaatgaacctaagaaaagaataattgcttagttgaagtattcaaaatagatcagtaaaccacaggcaaatatttgaatgttcccttttctcaaatacagaaattgattccccaagatacaatacaatttgacacttcagataatcccccaaaatagaaatgtatgaagctcagtttagactgtcttcttgaaaataaaacaaaaccaatcaaaactacccagcacattttattatgccctgttgggtgatagtattgtcaataccaggttttccctgctcttcacaatgcatccctcaccagaggaaaaacagcaagaaaactaggacatttgctaatttcaacaatacacccctgtgataacagattcccatccttgaatacatatcattttttactagagagaacgggggtggtgaggtgggggcagttaggaccctgtatgttatgtaaaatagatttacaaaaaggacaagcatgataaaagggaatgaatggagacgatgtattattcagtttgaaagagatagttcacatttttataagaaaaatttaataaaacatatattttagttatcatttaacaaagatatattaaagctattcaggcaatgccacaggattctcatgaagggaaatcactgaacccttgtcatgagaaaatggtcatttcaacacatttcaatacattgtataaatttggagcttaaggtgagtgagtatgttttcacttagtcataaatgtttggtcaaaattaaagttatcatatggtttcacatcaatacaaatattgtcacagtgttacagaaacaactatcaaatggtaagatagtttacatttgtgttttctagaaacctttgtatttatgcttcatttggttaatgttaagtgctgataaaggcataccagattgtttgtcaaagtaaagaagcaatccatcacacctaggacatctaaggatggattatacgtcagagtggtctcatatacaaatgaccattttccttcagtaaaatcttgttggttgaaatgtaagtcttttcctaaagttttaatcagaggtagccatcactaagacttaagccacctgtggttctcttaagtttcactgaagccagaagaaggaaattaccacaacttgtattatactaattatcttcattattaacgatcatattagagccactgacatgtcccaaattatattaaaataaaaacctgcattgctctgacatgaagctcaattcaatgtaataaacaaattaggtattaaacgttataatttaaaaaacttctacgatatcaccagaaatcctggtgaaatttaattttttcccttttttaggtcagtggccggtgggatagatttttctaaactttttcctgctatgattttgaaggcaaatacatagagcacagttcagtaaaagagtttccaagccttttcactggagcatttacattttgattctgttgtcatttgaaatagaacatctgcagggagataatgagcttaagttacaattgactttggaaagaataacagacttttgtgtttcctcaatcatgtagtcaatagggaattctccagttatgtgaacaatcacagtcttttaagacaatacttagatctaaatgcaaaatctagcatgcagaggctttttaaggattttagactgtctccaaagaacttggctcgagatggattacacagatttacaaatgcagttttcaactgtgacatcaaactgatcttatctcatttcatgttactcaactgtgcccgtaggaccccaagaggtggaatattttgtctacattattttaaacatctatagatatgtgtggatgtgtgaataatgcctaaatttctcatcttttaactagtttgtttttatcatacagacacagcctgttcataagaccagctttagacaacttagaactcaatgctctgaagattcagggaggccaacatagaaaaagatcttccaaaatatggggtggtccaacccatctcatccctctctagctggaaaactatagagaaagggctgtgactgccttgaccactgcctggcacaatgtaggcactcggtatttgttggatgaataagtggctgaatcagtgaatagacaaaaaacatggattttgccttctgaaaatctcacaaattttaccagcttatattatactgattgtcactatgatttctaagtttcatggttagaaccatattttgagtctatataaaaactttttagatgtatgaatttgaaatttcattaattactttaaaggcttcaaagatttgaggacatttgaacagtggataaggaacaatgtttggggatacagagtttttatgctgagttgaactcaacctttctagttctttatacaagcttcctgaattatctggcaggaatgattcaaacataaaaccccatttttaaattttataaaagatattttcatttttatataaaaagatcatcaggcatattatcccctttgatatttattaacaaccattctctaagaaattcataataattggagacaccatccctaaatctcttcctattttcaaaagatcatttatcctttcatatttgattcctggaatacactaagctgaagtttaatcacatacttactcagatgtttccatgtgtttattcatttaacaaatacttattgtgtacctagtgcatgctaggttctggaaatgcaacagcaaacaagacagacacaatccctcttggaggttactgtgagaaactctccaacatttactctagcaataactagagagtttactgtccattgggtcctcttcacacctgatagaaaaaataaaattcctcaccccatggaagtcatgaaatactccctgcacagatttgtgtgagcttgcttttctaaaaccactgctcaaaaatgctgcttagtttatctataaaccacggttataccccagtgaggtaggtaagtaatttattcataactaacatttatgcagctctattttctagccactgtgctgagtgcttttatggactatctcaccaaatcccttcaacaactctattcagtaggttccattttatagatacaaaaactgaagcacagatatattatgtgacttgtccaaggtcacacagctagcaggtggaactgggatttgaacccatgcaatctgacacaagagttcatgtgtctaatcattatctgtggtttgggggacaccattacattaaaatgaatgagtcactaagtgagtcactgtatataaaatacttggaaattgtaaagtaatatacaaaagatattaacaaagtattattcatggtaaacaaatcacatcagtagcaaacacagggtgggaactcaatcttatgttatagcttactcttaagaagaatatgtgaagccaggaacatggttaaaggtacagaccagaaaatttctgacatgtgataaatatttcagtgacttttcagatttatttcttgttagccgctgtgtctatttggtgctacaaaaactgaaagaaacaaaatccctgatgtaagggcttataataaatacacagtttggagatgaactaaggatattttacatttacgggaaaggattggacaatagtatcattttctcaccatttgcatgtacatcatgtctttccaattgttttcattatttttctgaaagagctgcaaaattgtgcagtggttcaacctgaccaaagtggtattatgctgctgggaagtaaaagtattagacaccaaa

SEQ ID NO: 149350 - DNA, 546 bp, Homo sapiens
  Payload ID: 9485
  Gene Symbol: LIN7A
  Gene Name: lin-7 homolog A (C. elegans)
  ENST ID: ENST00000552093
  CDS Start-End: 1-392
tactggaaaaactacaggaatctggagaagtaccagtgcacaagctacaatccctcaaaaaagtgcttcagagtgagttttgtacagctattcgagaggtgtatcaatatatgcatgaaacgataactgttaatggctgtcccgaattccgtgcgagggcaacagcaaaggcaacagttgcagcttttgcagctagtgaaggccactcccaccctcgagtagttgaactgccaaagactgatgaaggccttggttttaatgtgatgggaggaaaggagcaaaattcccccatttatatctctcgcataattcctggaggggtggctgaaagacacggaggcctcaaaagaggagaccagctgctatcagtgaacggagtggtatgtttataaaataaccagagattttctccttaagcacattctttttttttgccccctgctattactgaagtcaacgttgaaaacctagaataaatattcattttatgtctaaccagctttctaagcattgatggatattaaacctataaaagctgcaatctaa

SEQ ID NO: 149351 - DNA, 905 bp, Homo sapiens
  Payload ID: 9485
  Gene Symbol: LIN7A
  Gene Name: lin-7 homolog A (C. elegans)
  ENST ID: ENST00000549417
  CDS Start-End: 1-543
acttcggctcccacggcagacatggcgacattgacagtggtccagccgctcaccctggacagagatgttgcaagagcaattgaattactggaaaaactacaggaatctggagaagtaccagtgcacaagctacaatccctcaaaaaagtgcttcagagtgagttttgtacagctattcgagaggtgtatcaatatatgcatgaaacgataactgttaatggctgtcccgaattccgtgcgagggcaacagcaaaggcaacagttgcagcttttgcagctagtgaaggccactcccaccctcgagtagttgaactgccaaagactgatgaaggccttggttttaatgtgatgggaggaaaggagcaaaattcccccatttatatctctcgcataattcctggaggggtggctgaaagacacggaggcctcaaaagaggagaccagctgctatcagtgaacggagtgcttctaagaagtcaaaaacagatggaaactcatgtcagctcagcaatcattgggagagaaaattttttctatccctaggcaccaagagaaatttcccatgggaatgttacaaatgagacattgaaccacctaatacaattccatagaaaatacagaggcctttggtgtatggctacttcttatatcaatcctcagtgaaaccttacaactgaatgctgaattaaaatttaacattaataggaggtcaaaatgttacagtaagaatttatagctttctaatgatctccttttcacccttttatgctcaagtgttttctccgcaattttaagagagaactcaaggactatttataagggttgcagccaatgtggagccagcggcaaccgtaaatatatttagtgatagagtcaggatataaaaagtctcaatagaatggtac

SEQ ID NO: 149352 - DNA, 755 bp, Homo sapiens
  Payload ID: 9486
  Gene Symbol: LIN7B
  Gene Name: lin-7 homolog B (C. elegans)
  Uniprot ID: Q9HAP6
  ENST ID: ENST00000221459
  CDS Start-End: 45-668
gccggcgccagggcaggcgggcggctggcagctgtggcgccgacatggctgcgctggtggagccgctggggctggagcgggacgtgtcccgggcggttgagctcctcgagcggctccagcgcagcggggagctgccgccgcagaagctgcaggccctccagcgagttctgcagagccgcttctgctccgctatccgagaggtgtatgagcagctttatgacacgctggacatcaccggcagcgccgagatccgagcccatgccacagccaaggccacagtggctgccttcacagccagcgagggccacgcacatcccagggtagtggagctacccaagacggatgagggcctaggcttcaacatcatgggtggcaaagagcaaaactcgcccatctacatctcccgggtcatcccagggggtgtggctgaccgccatggaggcctcaagcgtggggatcaactgttgtcggtgaacggtgtgagcgttgagggtgagcagcatgagaaggcggtggagctgctgaaggcggcccagggctcggtgaagctggttgtccgttacacaccgcgagtgctggaggagatggaggcccggttcgagaagatgcgctctgcccgccggcgccaacagcatcagagctactcgtccttggagtctcgaggttgaaaccacagatctggacgttcacgtgcactctcttcctgtacagtatttattgttcctggcactttatttaaagatatttgaccctca

SEQ ID NO: 149353 - DNA, 582 bp, Homo sapiens
  Payload ID: 9486
  Gene Symbol: LIN7B
  Gene Name: lin-7 homolog B (C. elegans)
  Uniprot ID: Q9HAP6
  ENST ID: ENST00000391864
  CDS Start-End: 82-495
ggcccggggcgtggcctcgcgcagccccgccctcctcgccggcgccagggcaggcgggcggctggcagctgtggcgccgacatggctgcgctggtggagccgctggggctggagcgggacgtgtcccgggcggttgagctcctcgagcggctccagcgcagcggggagctgccgccgcagaagctgcaggccctccagcgagttctgcagagccgcttctgctccgctatccgagaggtgtatgagcagctttatgacacgctggacatcaccggcagcgccgagatccgagcccatgccacagccaagagcgttgagggtgagcagcatgagaaggcggtggagctgctgaaggcggcccagggctcggtgaagctggttgtccgttacacaccgcgagtgctggaggagatggaggcccggttcgagaagatgcgctctgcccgccggcgccaacagcatcagagctactcgtccttggagtctcgaggttgaaaccacagatctggacgttcacgtgcactctcttcctgtacagtatttattgttcctggcactttatttaaagatatttgaccctca

SEQ ID NO: 149354 - DNA, 795 bp, Homo sapiens
  Payload ID: 9486
  Gene Symbol: LIN7B
  Gene Name: lin-7 homolog B (C. elegans)
  ENST ID: ENST00000595200
  CDS Start-End: 1-398
ctgcgctggtggagccgctggggctggagcgggacgtgtcccgggcggttgagctcctcgagcggctccagcgcagcggggagctgccgccgcagaagctgcaggccctccagcgagttctgcagagccgcttctgctccgctatccgagaggtgtatgagcagctttatgacacgctggacatcaccggcagcgccgagatccgagcccatgccacagccaagaaatacaaaaaaaaaaaaaaagaaagaaaaagccgagcgtggtggcgagtgcctgtaatcccagctggattacaactccggaggctgagacaggagaatcgcttgaacccaggaggccgaggttgcagtgagccgagatcatgccattgcactccagcctgggcaacagagtgagacttcatctcaaaaaaaaaaaaaaagccacagtggctgccttcacagccagcgagggccacgcacatcccagggtagtggagctacccaagacggatgagggcctaggcttcaacatcatgggtggcaaagagcaaaactcgcccatctacatctcccgggtcatcccagggggtgtggctgaccgccatggaggcctcaagcgtggggatcaactgttgtcggtgaacggtgtgagcgttgagggtgagcagcatgagaaggcggtggagctgctgaaggcggcccagggctcggtgaagctggttgtccgttacacaccgcgagtgctggaggagatggaggcccggttcgagaagatgcgctctgcccgccggcgccaacagcatcagagcta

SEQ ID NO: 149355 - DNA, 367 bp, Homo sapiens
  Payload ID: 9486
  Gene Symbol: LIN7B
  Gene Name: lin-7 homolog B (C. elegans)
  ENST ID: ENST00000486217
  CDS Start-End: 1-347
cgctggggctggagcgggacgtgtcccgggcggttgagctcctcgagcggctccagcgcagcggggagctgccgccgcagaagctgcaggccctccagcgagttctgcagagccgcttctgctccgctatccgagaggtgtatgagcagctttatgacacgctggacatcaccggcagcgccgagatccgagcccatgccacagccaaggtgggccccgcaccccattgctcctggtgtctatttaactgcctagtcgaactcaatatctccttcatgccagtcatttctgtttcctccctcatgatttttgctaaatctatgtgccaccttactattagtaaataatcgcacatttttaacttaaa

SEQ ID NO: 149356 - DNA, 4688 bp, Homo sapiens
  Payload ID: 9487
  Gene Symbol: LIN7C
  Gene Name: lin-7 homolog C (C. elegans)
  Uniprot ID: Q9NUP9
  ENST ID: ENST00000278193
  CDS Start-End: 22-615
gtctgtaggttaagggagaagatggcggcgctaggggaacccgtgcggctggagagagatatttgtagagcaattgaattattggaaaaactacaaaggagtggagaagtaccaccacagaaacttcaggctttgcaaagagtccttcaaagtgaattctgcaatgctgtgagagaggtatatgaacatgtctatgagactgtggacatcagtagcagtcctgaagtgagagcgaacgctactgcaaaggctactgttgctgcatttgctgccagtgaaggacattctcatcctcgagttgttgagctaccaaaaacagaagagggccttggattcaatattatgggaggcaaagaacaaaactctccaatctatatatcccgaataattccaggtggaattgctgatagacatgggggcctcaaacgtggagatcaactcctctctgttaatggagtgagtgttgaaggagaacatcatgaaaaagctgtagaactgctgaaagccgcacaaggaaaggttaaattagtggtacgatacacacccaaagtcttagaagaaatggagtcgcgctttgaaaaaatgagatcagcaaaacgcaggcaacagacctaatacatttcaaaacttgatatttcattttgcgttttagctagagaagttttccttgtgacttactaatggctgcaatgccaatgattgtaagaaaacaaacaaatttatcatgaaattctccttgtcattttataaatgcctattttaacatcatttatggttccagagatgcatacacttttttctgacaagaaaaagtaaaaggtgatgagggcaattctgtcctactgtttttacaggcctttttcaaatgcagattttgtcataaagttgttatagattttttaaaatgcttttttaatattaaaatgtacttttacattcttaatctttttttagaaaggaaaagttttcttcatttagctgctgatttaaaagtaaagttctccaattctttttttttgcttactctattttttttaacctgtgaaatttctttacagttttccaagaaattaagcataacagtctcatctacggcagttcattacactgtcaatgttaacatcattgctgcattttgtactttgaacacacacataatatatataaccagtggtaaatcatgactcagtacagtgcaagttttttcacttttacttaaacataatatataatggatattcatttatactgatttatgaaagtaagtttttaaacactgaaacaatcattgctaaaatacatattcttaatatttgagcattgaggcaagaggatgtaattgatagcattacttattacatccctatttatgttcaaccgtacatcaaattataaatgcaaaacaggttcagatttcatcttttgtgatttcttttaaatactattcatttttatttaaatgcacagtatttcccctatattttagtccttccattcctagagacaaaccagttatttggtggtgggaagtagctgaagcaaagaaggaaaagtaatacctttaacctcactagcttcaagagtagacattcttactagctcaatttaaataattgattttaaataggaagaaaagaggatatatttaagatacatagaaattatgatgtgaagtattcatgagaatctgtagattccatcaaaataagtaggaactcatactaaaattgttggatttaaagaggcaacttttgtttatgattcaaatatgggaatttgagaaatatttcatttgtccactggatgtcactattttactaaaaggcagctattagtgtgggactgtgactgaggtcttaaagactgaaagagttggggttcattttctgttacaacttacaggaacatttgtactttaagaaaaatttaagtgacaaatgttagaagatgatggattgaaaaatataagtaatttggcatattgaccctatataaaaaagtgggcattttgtaacattccttcaggaagaatagaattgtatgcttttttctgcatgtttgtgatcactgtgagtctcagatgattattccagttttcaatgatttttcaaaataaaagtcaatcagcattgttatttatcattaaggtattgaacactggattgcatggttgaatgtgtctttaatccactacaaaatgtgcttgttattgataggatcatgttgttaaattgtaaattttcaaaattaattgatgttttaaaaatgttgagaccaaagtagtatagaagtatggacttaatttaattgtaaaattattagaggtatttgttgtagagctttatatattaaagagaggtattggtgcatataaaaacagtaatattattgttatgcttgtattcttgcatttcagggtaagtaaaccctgaagaaatcttattttagtatagctacagctgcagtagcttttaagtatgtatcaacatttcattataaattatagcttcctggttctgtgtctcagctgtttcagaactttcagccaagttaaatcttttttggtgttgaaacttttagtaagttgagtaagctatttttttccctacggtaatccacaatctgttctttgtgtgggttgacacctatttataattcttaaaataagggtagctcaaaggagccaagtacagtagtttagcttgctactgttgagcatgaatagcagtaggttgttttcattaatgcagttttcataatgtatcccagaattttaaatcttgaccatagaaaaatacagtcattcattggcaaagatgtacagtggtggtttagtgcagtgaggaaatgatgggaatttttatcttagaaatggatgattcgtgaataaaactaggtacatagtaagtgtatgatagatgtttgatttgtaaattacaaatataaattatcacccccatttccatttattttcttgatatatcaaaatgtgttgacttagtgattctcaatcttagctacatattagcctggcagagctttaaaaaattgatacctgggtcctattccataacaactaaatcaaaatcacccttttttttttttttgtaaagctttccaggtggttctaaaggacacctagggtcaataacccattataaaatgatctgattacactggacactcttaggaagtatcaaaatagaacagttcaatttgcagctacttaatgattaattacatttcttaggttttttttttgttttttttttggtttgtttgttttttgttttaaaagagacaggatcttgctttgtctcccaggctggaacacagtggtgtgatcatagctcactgcagcctgaaactccttggcttccacctcagcctcccaaagcattaggattataggcgtgagccactgcacctggccaagtaatttcttttaggaataaaaggtacttggcattccttatttgggaagtaattacagtcttatctttttttttcttttttcttttttttaataaaatctaccagtaatttaaatgtgagctttttatgtctgtcatcattctgccccctttgcctttaaaacttacaaaaatacgtgtttgttatttgagaaagcatgtttaaaaattgcagatgagaaatattgtcgttaataattatgtactgtcttaatgtgggcacttcatttgttagtataatactagataatagcagcctagttctttaggatttgacgattcaaattttttttttgttttttgtttttgtttttttttgagacagagtcttgctctgttgcccaggctggcgtgcagtggtgtgatctcggctcacttcagcctccgccacctcaaggcagttcaagcaattctcctgcctcagcctcccgagtagctaggactacaggcgtgtgccacctctcccggctaatttttttgtatttttagtagagacggggtttcaccgtgttagccaggatgatctcgatctcctgacctcgtgattcgcccgcctcggcctcccaaagtgctggaattactggcgtgagccaccatgcccagcctcaaatatgtttttaaaaaatatcattgtcctcctcctcttaagatttttttaagttattttgctcaagtacttaagtagtctggctcaagtactttgtttacaattaaaatggatattatagcatttaatagaagaaatggttatggcttatccaaaaagaatgtcagcatgacctggtgtagacttaaaaaactacatgtttgtgaatattttataatgtggaatgatcattgaaatatcaaggattctagtaattgtatttcctgaataaatgtatgtttatgaattttctaacttacattttgttgtgtcctctgccaacaatctggttttataattgttgtctaaagtttgctagtagtgtttcttcaaaggttattccaggtatggttaagtagtgagaaaaatcacttattaattttcaagaactttgagactaatttgtattgactcggttttttaaaataactggcaaatgctatgcttctacttttaaaatttgtggtaatacccagaatggatgtaaaataacatttttcaatagattacttcatttatcaatttaattctgattttaaggcttatttaaaataaatttgtatgagtta

SEQ ID NO: 149357 - DNA, 4290 bp, Homo sapiens
  Payload ID: 9487
  Gene Symbol: LIN7C
  Gene Name: lin-7 homolog C (C. elegans)
  ENST ID: ENST00000524596
  CDS Start-End: 18-539
gtaggttaagggagaagatggcggcgctaggggaacccgtgcggctggagagagatatttgtagagcaattgaattattggaaaaactacaaaggagtggagaagtaccaccacagaaacttcaggctttgcaaagagtccttcaaagtgaattctgcaatgctgtgagagaggctactgttgctgcatttgctgccagtgaaggacattctcatcctcgagttgttgagctaccaaaaacagaagagggccttggattcaatattatgggaggcaaagaacaaaactctccaatctatatatcccgaataattccaggtggaattgctgatagacatgggggcctcaaacgtggagatcaactcctctctgttaatggagtgagtgttgaaggagaacatcatgaaaaagctgtagaactgctgaaagccgcacaaggaaaggttaaattagtggtacgatacacacccaaagtcttagaagaaatggagtcgcgctttgaaaaaatgagatcagcaaaacgcaggcaacagacctaatacatttcaaaacttgatatttcattttgcgttttagctagagaagttttccttgtgacttactaatggctgcaatgccaatgattgtaagaaaacaaacaaatttatcatgaaattctccttgtcattttataaatgcctattttaacatcatttatggttccagagatgcatacacttttttctgacaagaaaaagtaaaaggtgatgagggcaattctgtcctactgtttttacaggcctttttcaaatgcagattttgtcataaagttgttatagattttttaaaatgcttttttaatattaaaatgtacttttacattcttaatctttttttagaaaggaaaagttttcttcatttagctgctgatttaaaagtaaagttctccaattctttttttttgcttactctattttttttaacctgtgaaatttctttacagttttccaagaaattaagcataacagtctcatctacggcagttcattacactgtcaatgttaacatcattgctgcattttgtactttgaacacacacataatatatataaccagtggtaaatcatgactcagtacagtgcaagttttttcacttttacttaaacataatatataatggatattcatttatactgatttatgaaagtaagtttttaaacactgaaacaatcattgctaaaatacatattcttaatatttgagcattgaggcaagaggatgtaattgatagcattacttattacatccctatttatgttcaaccgtacatcaaattataaatgcaaaacaggttcagatttcatcttttgtgatttcttttaaatactattcatttttatttaaatgcacagtatttcccctatattttagtccttccattcctagagacaaaccagttatttggtggtgggaagtagctgaagcaaagaaggaaaagtaatacctttaacctcactagcttcaagagtagacattcttactagctcaatttaaataattgattttaaataggaagaaaagaggatatatttaagatacatagaaattatgatgtgaagtattcatgagaatctgtagattccatcaaaataagtaggaactcatactaaaattgttggatttaaagaggcaacttttgtttatgattcaaatatgggaatttgagaaatatttcatttgtccactggatgtcactattttactaaaaggcagctattagtgtgggactgtgactgaggtcttaaagactgaaagagttggggttcattttctgttacaacttacaggaacatttgtactttaagaaaaatttaagtgacaaatgttagaagatgatggattgaaaaatataagtaatttggcatattgaccctatataaaaaagtgggcattttgtaacattccttcaggaagaatagaattgtatgcttttttctgcatgtttgtgatcactgtgagtctcagatgattattccagttttcaatgatttttcaaaataaaagtcaatcagcattgttatttatcattaaggtattgaacactggattgcatggttgaatgtgtctttaatccactacaaaatgtgcttgttattgataggatcatgttgttaaattgtaaattttcaaaattaattgatgttttaaaaatgttgagaccaaagtagtatagaagtatggacttaatttaattgtaaaattattagaggtatttgttgtagagctttatatattaaagagaggtattggtgcatataaaaacagtaatattattgttatgcttgtattcttgcatttcagggtaagtaaaccctgaagaaatcttattttagtatagctacagctgcagtagcttttaagtatgtatcaacatttcattataaattatagcttcctggttctgtgtctcagctgtttcagaactttcagccaagttaaatcttttttggtgttgaaacttttagtaagttgagtaagctatttttttccctacggtaatccacaatctgttctttgtgtgggttgacacctatttataattcttaaaataagggtagctcaaaggagccaagtacagtagtttagcttgctactgttgagcatgaatagcagtaggttgttttcattaatgcagttttcataatgtatcccagaattttaaatcttgaccatagaaaaatacagtcattcattggcaaagatgtacagtggtggtttagtgcagtgaggaaatgatgggaatttttatcttagaaatggatgattcgtgaataaaactaggtacatagtaagtgtatgatagatgtttgatttgtaaattacaaatataaattatcacccccatttccatttattttcttgatatatcaaaatgtgttgacttagtgattctcaatcttagctacatattagcctggcagagctttaaaaaattgatacctgggtcctattccataacaactaaatcaaaatcacccttttttttttttttgtaaagctttccaggtggttctaaaggacacctagggtcaataacccattataaaatgatctgattacactggacactcttaggaagtatcaaaatagaacagttcaatttgcagctacttaatgattaattacatttcttaggttttttttttgttttttttttggtttgtttgttttttgttttaaaagagacaggatcttgctttgtctcccaggctggaacacagtggtgtgatcatagctcactgcagcctgaaactccttggcttccacctcagcctcccaaagcattaggattataggcgtgagccactgcacctggccaagtaatttcttttaggaataaaaggtacttggcattccttatttgggaagtaattacagtcttatctttttttttcttttttcttttttttaataaaatctaccagtaatttaaatgtgagctttttatgtctgtcatcattctgccccctttgcctttaaaacttacaaaaatacgtgtttgttatttgagaaagcatgtttaaaaattgcagatgagaaatattgtcgttaataattatgtactgtcttaatgtgggcacttcatttgttagtataatactagataatagcagcctagttctttaggatttgacgattcaaattttttttttgttttttgtttttgtttttttttgagacagagtcttgctctgttgcccaggctggcgtgcagtggtgtgatctcggctcacttcagcctccgccacctcaaggcagttcaagcaattctcctgcctcagcctcccgagtagctaggactacaggcgtgtgccacctctcccggctaatttttttgtatttttagtagagacggggtttcaccgtgttagccaggatgatctcgatctcctgacctcgtgattcgcccgcctcggcctcccaaagtgctggaattactggcgtgagccaccatgcccagcctcaaatatgtttttaaaaaatatcattgtcctcctcctcttaagatttttttaagttattttgctcaagtacttaagtagtctggctcaagtactttgtttacaattaaaatggatattatagcatttaatagaagaaatggttatggcttatccaaaaagaatgtcagcatgacctggtgtagacttaaaaaactacatgtttgtgaatattttataatgtggaatgatcattgaaatatcaaggattctagtaattgtatttcctgaataaatgtatgtttatgaa

SEQ ID NO: 149358 - DNA, 3567 bp, Homo sapiens
  Payload ID: 9488
  Gene Symbol: LIN9
  Gene Name: lin-9 DREAM MuvB core complex component
  Uniprot ID: Q5TKA1
  ENST ID: ENST00000328205
  CDS Start-End: 547-2223
gctgggaccgagtcccggacgtcgcgacgcgcagggggctgctgcggccggcggtctcgggaaaagtgaggggacggaggcgcccaagcaacgtgggtttcgggaactgtgagtatttcactttgcgtagagccccctcgggcaatgcgacccagaaccgagggcttctttccccccgccggggcctccctcccgttctccactcggaacaaacagcctgcagttcccgcagctgcagcgcgggccgcggaacatgcgccgggagcggggcccgggcgggactccggagctggtactgctccccccgcgctccggcgccgggcctcgccgtgcggcctccttcctcccttcctcccgcccggctcggccggaggcggcggcggaggggcgaggcgcggccccccttcggcggcacctcctccccgggcaggcgcgggcggagccgggcccgcctcagccagccgcggcgggagcagcgcagcgcggcgccgcgggcagcgagctccgcattcgaacctccctcgcaaagacagtctccgccccacaatgcaccgcggcgggcagcctttgaaaaagcggcgcggctcgttcaagatggcggagctcgaccagttgcctgacgagagctcttcagcaaaagcccttgtcagtttaaaagaaggaagcttatctaacacgtggaatgaaaagtacagttctttacagaaaacacctgtttggaaaggcaggaatacaagctctgctgtggaaatgcctttcagaaattcaaaacgaagtcgacttttttctgatgaagatgataggcaaataaatacaaggtcacctaaaagaaaccagagggttgcaatggttccacagaaatttacagcaacaatgtcaacaccagataagaaagcttcacagaagattggttttcgattacgtaatctgctcaagcttcctaaagcacataaatggtgtatatacgagtggttctattcaaatatagataaaccactttttgaaggtgataatgacttctgtgtatgtctaaaggaatcttttcctaatttgaaaacaagaaagttaacaagagtagaatggggaaaaattcggcggcttatgggaaaaccacggagatgttcttctgcattttttgaggaagagagatcagcattaaaacagaaacggcagaaaataaggctcttacaacaaaggaaagttgcagatgtttcacaattcaaagatctcccagatgaaattcctttgcctctggttattggaacgaaagttacagcacgattacgtggtgttcatgatggtttgttcactggacaaatagatgctgtggatactcttaatgctacttatagagtaacttttgataggacagggcttggaacccataccatccctgactatgaagttctcagtaatgaacctcatgagacaatgccaattgctgcctttggacaaaaacagcggccttctcgattttttatgaccccaccacggttacattatactcctcctctccagtcaccaattatagataatgatcctttattaggacagtcgccgtggagaagtaaaatttctggctctgacactgaaacattaggtggttttccagtagaatttcttatccaagtgaccagattatcaaaaattctcatgattaaaaaggaacatatcaagaaattaagggaaatgaacacagaagcagaaaaattgaaatcatattccatgcccatcagcattgaatttcagcggagatatgcaacaattgttctggagcttgaacagctgaacaaggacctaaacaaagttttgcataaagttcaacagtattgctatgagcttgctccagaccaggggctccagcctgcagatcagccaacagatatgagacgcaggtgtgaggaagaagcacaggaaattgttcggcatgcaaattcctcaacaggacagccctgcgttgaaaatgaaaatctgacagacttaatttccaggcttacagctattttgttacaaattaagtgtctagcagaaggaggagacctgaattcctttgaattcaaatcacttacagactcattaaatgatatcaagagtacaatagacgcttctaatatcagttgctttcagaataatgtagaaatccatgttgcacatattcagagtggcctgagccagatgggaaacttacatgcctttgcagcaaataacaccaacagagactgagtaaagatttcattattccaactgcacgggacattgtttttgagaagttcttttcctttatataggcttccaacaccaaataacctaactgctggaaaacaagggaaatttaaatctccaaataaggcattttaatagactgtactgcttcttaaaccagcattgctgaccagcattatatttatttttcttttattattcagatgcagtagcattgcttatgttacatatgtttatattcacaaatatttttaaactgaaatatctgaacataatataatttcgtggaagaatacattgaccattttttttaatgtgcatgaattcaccgcaacacatgcagacaactgctgcaatggagagtatgaagaaacctggtctttttattcatgtcggtggcagtgtggaaattccatccagaaaattacaactccacttgatttagttgatcaccatctcagtcttcaaaagataacatcatgaggtgtgggaagtcctagttttaaggaaaccactgaaatatagatgggaaatgtggactttacaagtatatgttatatatacttgcaatgtgacatggttctgtagatcattttataataataaatattttaatttatcataacatataaaagaaacctttgttgtttgttgaaagaaaatgaaggaacagggggaaaaaaggtgcaaaatgctaaatttctaaaaatggatttggcatgtcttcccatcagttcaggtcaaaagtgcattgttgtgagatttattaaaaaaaaaatgataacacactattttcatatttttttgtttatttgcacaacttttaaaccagattactggttaaaatccaacagtacacaatttataaagtaaaaagattttataaggaaaacaaatataataaccagtgctgtgaaatgcagaagaaaggcttgttttggttgtttttcttttttaggaaaacgctgcctaaaatgttaatcttgtaaaaagtatgtatttggaattttcttcgttttaatagaatattataaactcaaaatataaatttttttcaaatttggagtttaagatatagctgtagaggtggttttaattcctttagatgtctcataaaatgagactttttatatgttaatgtataataaaactgaaacaagattattttccatttgaaatttttgtatagtttaaaaaggcttccgtattctttgttggtattgtgccactgcagaactttagtgcagagtttatatttagctaaactgttatgttaattaagaaatgcataaatcttctattcttaatatttgtaattctaaataaattgatctatgaaaatta

SEQ ID NO: 149359 - DNA, 686 bp, Homo sapiens
  Payload ID: 9488
  Gene Symbol: LIN9
  Gene Name: lin-9 DREAM MuvB core complex component
  ENST ID: ENST00000359525
  CDS Start-End: 474-686
ctgctgcttgcccagcggttgcaccggccgggacggacggccgtgccctccgctgggcaggtgggctgactgccagccccactgtggtcccctagtcctcccactccggtgttgccgccgcgtcgccgcctttgttatggtgtctgtgtgttggtttctggggttgtgtgagcgccagggccggaaaccgagagcccgggagtccagcctgtgccaggcggaggcggtggctgctcccctggcgccactccggcccccagccgaggtggagggaagagcggcccctgggcgcgggggctgtcctcgccgcctgcaccactcgcccggcgccgagagacgcccgccggggctcttcagcaaaagcccttgtcagtttaaaagaaggaagcttatctaacacgtggaatgaaaagtacagttctttacagaaaacacctgtttggaaaggcaggaatacaagctctgctgtggaaatgcctttcagaaattcaaaacgaagtcgacttttttctgatgaagatgataggcaaataaatacaaggtcacctaaaagaaaccagagggttgcaatggttccacagaaatttacagcaacaatgtcaacaccagataagaaagcttcacagaagattggttttcgattacgtaatctgctcaagcttcctaaagcacataaatggtgtata

SEQ ID NO: 149360 - DNA, 3186 bp, Homo sapiens
  Payload ID: 9488
  Gene Symbol: LIN9
  Gene Name: lin-9 DREAM MuvB core complex component
  ENST ID: ENST00000366808
  CDS Start-End: 1-1842
gaaacagctgagcagaacagttctttagctgtcggcctaaatgaccaacttcatgacctctcaaggtctcgctccccggctgcacgcagctcagcttccaacattcgggaaaggcgtgcccggatcgcgaggggccgctgggaccgagtcccggacgtcgcgacgcgcagggggctgctgcggccggcggtctcgggaaaagtgaggggacggaggcgcccaagcaacgtgggtttcgggaactgctcttcagcaaaagcccttgtcagtttaaaagaaggaagcttatctaacacgtggaatgaaaagtacagttctttacagaaaacacctgtttggaaaggcaggaatacaagctctgctgtggaaatgcctttcagaaattcaaaacgaagtcgacttttttctgatgaagatgataggcaaataaatacaaggtcacctaaaagaaaccagagggttgcaatggttccacagaaatttacagcaacaatgtcaacaccagataagaaagcttcacagaagattggttttcgattacgtaatctgctcaagcttcctaaagcacataaatggtgtatatacgagtggttctattcaaatatagataaaccactttttgaaggtgataatgacttctgtgtatgtctaaaggaatcttttcctaatttgaaaacaagaaagttaacaagagtagaatggggaaaaattcggcggcttatgggaaaaccacggagatgttcttctgcattttttgaggaagagagatcagcattaaaacagaaacggcagaaaataaggctcttacaacaaaggaaagttgcagatgtttcacaattcaaagatctcccagatgaaattcctttgcctctggttattggaacgaaagttacagcacgattacgtggtgttcatgatggtttgttcactggacaaatagatgctgtggatactcttaatgctacttatagagtaacttttgataggacagggcttggaacccataccatccctgactatgaagttctcagtaatgaacctcatgagacaatgccaattgctgcctttggacaaaaacagcggccttctcgattttttatgaccccaccacggttacattatactcctcctctccagtcaccaattatagataatgatcctttattaggacagtcgccgtggagaagtaaaatttctggctctgacactgaaacattaggtggttttccagtagaatttcttatccaagtgaccagattatcaaaaattctcatgattaaaaaggaacatatcaagaaattaagggaaatgaacacagaagcagaaaaattgaaatcatattccatgcccatcagcattgaatttcagcggagatatgcaacaattgttctggagcttgaacagctgaacaaggacctaaacaaagttttgcataaagttcaacagtattgctatgagcttgctccagaccaggggctccagcctgcagatcagccaacagatatgagacgcaggtgtgaggaagaagcacaggaaattgttcggcatgcaaattcctcaacaggacagccctgcgttgaaaatgaaaatctgacagacttaatttccaggcttacagctattttgttacaaattaagtgtctagcagaaggaggagacctgaattcctttgaattcaaatcacttacagactcattaaatgatatcaagagtacaatagacgcttctaatatcagttgctttcagaataatgtagaaatccatgttgcacatattcagagtggcctgagccagatgggaaacttacatgcctttgcagcaaataacaccaacagagactgagtaaagatttcattattccaactgcacgggacattgtttttgagaagttcttttcctttatataggcttccaacaccaaataacctaactgctggaaaacaagggaaatttaaatctccaaataaggcattttaatagactgtactgcttcttaaaccagcattgctgaccagcattatatttatttttcttttattattcagatgcagtagcattgcttatgttacatatgtttatattcacaaatatttttaaactgaaatatctgaacataatataatttcgtggaagaatacattgaccattttttttaatgtgcatgaattcaccgcaacacatgcagacaactgctgcaatggagagtatgaagaaacctggtctttttattcatgtcggtggcagtgtggaaattccatccagaaaattacaactccacttgatttagttgatcaccatctcagtcttcaaaagataacatcatgaggtgtgggaagtcctagttttaaggaaaccactgaaatatagatgggaaatgtggactttacaagtatatgttatatatacttgcaatgtgacatggttctgtagatcattttataataataaatattttaatttatcataacatataaaagaaacctttgttgtttgttgaaagaaaatgaaggaacagggggaaaaaaggtgcaaaatgctaaatttctaaaaatggatttggcatgtcttcccatcagttcaggtcaaaagtgcattgttgtgagatttattaaaaaaaaaatgataacacactattttcatatttttttgtttatttgcacaacttttaaaccagattactggttaaaatccaacagtacacaatttataaagtaaaaagattttataaggaaaacaaatataataaccagtgctgtgaaatgcagaagaaaggcttgttttggttgtttttcttttttaggaaaacgctgcctaaaatgttaatcttgtaaaaagtatgtatttggaattttcttcgttttaatagaatattataaactcaaaatataaatttttttcaaatttggagtttaagatatagctgtagaggtggttttaattcctttagatgtctcataaaatgagactttttatatgttaatgtataataaaactgaaacaagattattttccatttgaaatttttgtatagtttaaaaaggcttccgtattctttgttggtattgtgccactgcagaactttagtgcagagtttatatttagctaaactgttatgttaattaagaaatgcataaatcttctattcttaatatttgtaattctaaataaattgatctatgaaaatta

SEQ ID NO: 149361 - DNA, 2909 bp, Homo sapiens
  Payload ID: 9488
  Gene Symbol: LIN9
  Gene Name: lin-9 DREAM MuvB core complex component
  ENST ID: ENST00000460719
  CDS Start-End: 1-1557
cagcctttgaaaaagcggcgcggctcgttcaagatggcggagctcgaccagttgcctgacgagagctcttcagcaaaagcccttgtcagtttaaaagaaggaagcttatctaacacgtggaatgaaaagtacagttctttacagaaaacacctgtttggaaaggcaggaatacaagctctgctgtggaaatgaaatttacagcaacaatgtcaacaccagataagaaagcttcacagaagattggttttcgattacgtaatctgctcaagcttcctaaagcacataaatggtgtatatacgagtggttctattcaaatatagataaaccactttttgaaggtgataatgacttctgtgtatgtctaaaggaatcttttcctaatttgaaaacaagaaagttaacaagagtagaatggggaaaaattcggcggcttatgggaaaaccacggagatgttcttctgcattttttgaggaagagagatcagcattaaaacagaaacggcagaaaataaggctcttacaacaaaggaaagttgcagatgtttcacaattcaaagatctcccagatgaaattcctttgcctctggttattggaacgaaagttacagcacgattacgtggtgttcatgatggtttgttcactggacaaatagatgctgtggatactcttaatgctacttatagagtaacttttgataggacagggcttggaacccataccatccctgactatgaagttctcagtaatgaacctcatgagacaatgccaattgctgcctttggacaaaaacagcggccttctcgattttttatgaccccaccacggttacattatactcctcctctccagtcaccaattatagataatgatcctttattaggacagtcgccgtggagaagtaaaatttctggctctgacactgaaacattaggtggttttccagtagaatttcttatccaagtgaccagattatcaaaaattctcatgattaaaaaggaacatatcaagaaattaagggaaatgaacacagaagcagaaaaattgaaatcatattccatgcccatcagcattgaatttcagcggagatatgcaacaattgttctggagcttgaacagctgaacaaggacctaaacaaagttttgcataaagttcaacagtattgctatgagcttgctccagaccaggggctccagcctgcagatcagccaacagatatgagacgcaggtgtgaggaagaagcacaggaaattgttcggcatgcaaattcctcaacaggacagccctgcgttgaaaatgaaaatctgacagacttaatttccaggcttacagctattttgttacaaattaagtgtctagcagaaggaggagacctgaattcctttgaattcaaatcacttacagactcattaaatgatatcaagagtacaatagacgcttctaatatcagttgctttcagaataatgtagaaatccatgttgcacatattcagagtggcctgagccagatgggaaacttacatgcctttgcagcaaataacaccaacagagactgagtaaagatttcattattccaactgcacgggacattgtttttgagaagttcttttcctttatataggcttccaacaccaaataacctaactgctggaaaacaagggaaatttaaatctccaaataaggcattttaatagactgtactgcttcttaaaccagcattgctgaccagcattatatttatttttcttttattattcagatgcagtagcattgcttatgttacatatgtttatattcacaaatatttttaaactgaaatatctgaacataatataatttcgtggaagaatacattgaccattttttttaatgtgcatgaattcaccgcaacacatgcagacaactgctgcaatggagagtatgaagaaacctggtctttttattcatgtcggtggcagtgtggaaattccatccagaaaattacaactccacttgatttagttgatcaccatctcagtcttcaaaagataacatcatgaggtgtgggaagtcctagttttaaggaaaccactgaaatatagatgggaaatgtggactttacaagtatatgttatatatacttgcaatgtgacatggttctgtagatcattttataataataaatattttaatttatcataacatataaaagaaacctttgttgtttgttgaaagaaaatgaaggaacagggggaaaaaaggtgcaaaatgctaaatttctaaaaatggatttggcatgtcttcccatcagttcaggtcaaaagtgcattgttgtgagatttattaaaaaaaaaatgataacacactattttcatatttttttgtttatttgcacaacttttaaaccagattactggttaaaatccaacagtacacaatttataaagtaaaaagattttataaggaaaacaaatataataaccagtgctgtgaaatgcagaagaaaggcttgttttggttgtttttcttttttaggaaaacgctgcctaaaatgttaatcttgtaaaaagtatgtatttggaattttcttcgttttaatagaatattataaactcaaaatataaatttttttcaaatttggagtttaagatatagctgtagaggtggttttaattcctttagatgtctcataaaatgagactttttatatgttaatgtataataaaactgaaacaagattattttccatttgaaatttttgtatagtttaaaaaggcttccgtattctttgttggtattgtgccactgcagaactttagtgcagagtttatatttagctaaactgttatgttaattaagaaatgcataaatcttctattcttaatatttgtaattctaaataaattgatctatgaaaattattattttc

SEQ ID NO: 149362 - DNA, 1916 bp, Homo sapiens
  Payload ID: 9488
  Gene Symbol: LIN9
  Gene Name: lin-9 DREAM MuvB core complex component
  ENST ID: ENST00000481685
  CDS Start-End: 68-1537
agcgcggcgccgcgggcagcgagctccgcattcgaacctccctcgcaaagacagtctccgccccacaatgcaccgcggcgggcagcctttgaaaaagcggcgcggctcgttcaagatggcggagctcgaccagttgcctgacgagagctcttcagcaaaagcccttgtcagtttaaaagaaggaagcttatctaacacgtggaatgaaaagtacagttctttacagaaaacacctgtttggaaaggcaggaatacaagctctgctgtggaaatgaaatttacagcaacaatgtcaacaccagataagaaagcttcacagaagattggttttcgattacgtaatctgctcaagcttcctaaagcacataaatggtgtatatacgagtggttctattcaaatatagataaaccactttttgaaggtgataatgacttctgtgtatgtctaaaggaatcttttcctaatttgaaaacaagaaagttaacaagagtagaatggggaaaaattcggcggcttatgggaaaaccacggagatgttcttctgcattttttgaggaagagagatcagcattaaaacagaaacggcagaaaataaggctcttacaacaaaggaaagttgcagatgtttcacaattcaaagatctcccagatgaaattcctttgcctctggttattggaacgaaagttacagcacgattacgtggtgttcatgatggtttgttcactggacaaatagatgctgtggatactcttaatgctacttatagagtaacttttgataggacagggcttggaacccataccatccctgactatgaagttctcagtaatgaacctcatgagacaatgccaattgctgcctttggacaaaaacagcggccttctcgattttttatgaccccaccacggttacattatactcctcctctccagtcaccaattatagataatgatcctttattaggacagtcgccgtggagaagtaaaatttctggctctgacactgaaacattaggtggttttccagtagaatttcttatccaagtgaccagattatcaaaaattctcatgattaaaaaggaacatatcaagaaattaagggaaatgaacacagaagcagaaaaattgaaatcatattccatgcccatcagcattgaatttcagcggagatatgcaacaattgttctggagcttgaacagctgaacaaggacctaaacaaagttttgcataaagttcaacagtattgctatgagcttgctccagaccaggggctccagcctgcagatcagccaacagatatgagacgcaggtgtgaggaagaagcacaggaaattgttcggcatgcaaattcctcaacaggacagccctgcgttgaaaatgaaaatctgacagacttaatttccaggcttacagctattttgttacaaattaagtgtctagcagaaggaggagacctgaattcctttgaattcaaatcacttacagactcattaaatgatatcaagagtacaatagacgcttctaatatcaggtaattcgttaggtatactctaatcattttaatgtgaagttcatagtaattttcagtccaggttttaagaattatgcatatttgtgaagtactcatatattattatccgttaaatatatttgtaagagcttttcacttatatccagcctatggacagaatagaaatttcacatggattttgtatataaagaaatcaggacatatatttaggtttggggtcagcatggaggttgagcttagaggtagagcttccccagtcagtgagagactcatcttctccttccagccccccgtggctcctttgcttctttagagcatatttgttcaactactactgaagtagaattatggctaatatattagaggagatttattccttccct

SEQ ID NO: 149363 - DNA, 3849 bp, Homo sapiens
  Payload ID: 9489
  Gene Symbol: L1TD1
  Gene Name: LINE-1 type transposase domain containing 1
  Uniprot ID: Q5T7N2
  ENST ID: ENST00000498273
  CDS Start-End: 296-2893
gagatcgggaatcctctcagtccttagttacaaggctccatcctcactttgttcgctcctcagtcgtccaggcggattcctttttcgccaggcaccaaggcacagcttagagtagacccgagtcctgctctgcggagttcgtcttcccagcgaaggtacagaggcggatgaactgctgagacttgattgacgtattttaagatttttttaacttctgaagtctagcaggcctgtaagaacaaaaatcattctgtaggaattaaaaacagaatccagtcttgacaacatatccacaatgtctgatgtatctactagtgtacaatcaaaatttgctagacttgcaaagaaaaaggaaaatatcacctatatgaaaagagagcagttaacagaaactgataaggacatagctccggtattagatttaaaatgcaaggacgtatcagcaattatgaataagtttaaggtcttaatggaaattcaagacctgatgtttgaggagatgagggaaactcttaaaaatgacctaaaagcagttttagggggaaaagctacaatacctgaggtaaagaattcagagaactccagtagtaggacagagtttcagcaaataatcaatttagcattacaaaaaacagggatggtagggaaaatagaaggagaaaactctaaaataggtgatgataatgaaaatttaacctttaaattagaagtaaatgagctgagtggtaaattagacaacactaacgaatacaatagtaatgatggtaagaaattaccccagggtgaatcacgaagttacgaagtcatgggaagtatggaagaaaccttatgcaatatagatgacagagatggaaatcgcaatgtccatttagaatttacagaaagagagagtaggaaggatggagaggatgaatttgtcaaagaaatgagagaggaaagaaaatttcagaaattgaagaataaagaggaggttttaaaagcctccagagaagaaaaagtgttgatggatgaaggagcagtacttaccctggtagccgacctttcatcagcaacactggatattagtaagcaatggagtaatgtcttcaacattctgagagaaaatgattttgaacctaaatttctgtgtgaagttaaattagcatttaaatgtgatggtgaaataaagacattttcagatctgcaaagccttagaaaatttgccagccaaaaatcttctgtgaaagaattactgaaagatgtactcccacaaaaggaagaaataaatcaaggaggaagaaaatatggaattcaagaaaaaagggataaaaccctaatagactcaaagcatagagctggagaaataaccagtgatggcttgagcttcctatttcttaaagaagtaaaagttgctaagccagaggagatgaaaaacttagagactcaagaggaagagttttccgagctagaggagctggatgaagaggcctcagggatggaggatgatgaagatacctcagggctggaggaggaggaggaagagccctcagggctggaggaggaagaagaagaagaggcttcagggttggaggaggatgaggcctcagggctagaggaggaagaggaacagacttcagaacaggactcaacctttcagggtcatactttggtagatgcaaagcatgaagttgagataaccagtgatggcatggaaactactttcattgactctgtagaggattctgaatcagaggaggaagaagaaggaaagagctctgaaacaggaaaggtaaagactacctccctgactgagaaaaaagcctcacgtagacaaaaagaaattccctttagttatttggttggggactctgggaagaaaaagttggtgaaacaccaggtggtgcacaaaacccaggaggaagaggaaacagctgtgcccacaagtcaaggaactggcacaccctgtctgaccttatgtttggcctctccctcaaagtcactagagatgagtcatgatgagcataaaaagcattcacatacaaatttgagtatttcaacaggagtcaccaaacttaagaaaacagaagaaaagaaacacagaactctgcacacagaagaactaacatccaaagaagcagacttaacagaggaaacagaagaaaacttgagaagtagtgtgattaatagcatcagagagataaaagaggagattggaaatttgaaaagttcccattcaggtgtcttggaaattgaaaattcagtagatgatctgagtagcagaatggacatacttgaagaaagaatagacagtctagaagatcaaattgaagaattctctaaggatacaatgcaaatgaccaaacagataattagtaaagaaaggcaaagagatatagaggagagatctagaagttgcaacattcgtttgataggaattccagaaaaggagagttatgagaatagggcagaggacataattaaagaaataattgatgaaaactttgcagaactaaagaaaggttcaagtcttgagattgtcagtgcttgtcgagtacctagtaaaattgatgaaaagagactgactcctagacacatcttggtgaaattttggaattctagtgataaagagaaaataataagggcttctagagagagaagagaaattacctaccaaggaacaagaatcaggttgacagcagacttatcactggacacactggatgctagaagtaaatggagcaatgtcttcaaagttctgctggaaaaaggctttaatcctagaatcctatatccagccaaaatggcatttgattttaggggtaaaacaaaggtatttcttagtattgaagaatttagagattatgttttgcatatgcccaccttgagagaattactggggaataatataccttagcacgccagggtgactacaaacaatatgctttcctcccccagcatgcatccaaaaatcaacaagtaaaacgaaaatacacttctacccagaaggatggacagctaatagcgtacttggggatgaggagcaaggaatattacagatattacctagatgttaataaagggtatgtttaaaaaaaataggctggtctcaatgtagtgagttatttcagttgatcacagtcagttacagatagaattccttgttttacttcccccccaccacctccctactgcagttgactagtctttttagaatttatattatctggctgggcacggtggctcacacctgtaatcccagcactttgggaggccgaggcgggtggatcacgaggtcaggagatcgagaccatcctggctaacacagtgaaaccccgtctctactaaaaataaaaaaaattagccgggcatggtggcgggcgcctgtagtcccagctacttgggaggctgaggcaggagaatggcgtgaacccaggaggcggagcttgcagtgagccgagatcacaccactgcactccagccggagccacagagcgacactccgtctcaaaaaaaagtatattgtgctagcttgtctaagaataaacttctatactgttgggggagggctgcacctgtcaagataacctgtcaatgtagtaggaaaacaggaggggacagtaacagaaaagcacgggaaaagatggcaaggttagttaaaatagaaaagtgctcagttcctcatacctgtaatcccagcagtttagggggccaaggcaggtgggtcacttgagcccaagagttcaaggccatcctgggcaatgtggcgaaagtgtctacaaaaaaatacaaaaagaggaagaaatgatatttcacaagtttgtatcatttgtcatgatgtgactcgaatatattaaatctttttcctttgaa

SEQ ID NO: 149364 - DNA, 4821 bp, Homo sapiens
  Payload ID: 9490
  Gene Symbol: LINS1
  Gene Name: lines homolog 1
  Uniprot ID: Q8NG48
  ENST ID: ENST00000314742
  CDS Start-End: 224-2497
ctctgcgcatgcgggaggaggtgccagcttgtactttctgtgaactacggtggcccagagcgggcatttgtgttccctcaaatggcggtgtgaagagagttcgcctgagccagatcccaggtttcactgaagaaacttcttagagattcattgcacttctgagatttaatgtttacaacttggagttgtcgaccttcttataagatacattttggaagtcaaaatgaaagttttctgtgaagttttagaagagttatacaagaaggtacttcttggagccacacttgaaaatgacagccatgattacatcttttatctcaacccagcagtttcagatcaagattgttctacagccacctccttagaatgggcaaacacctgtggtatccagggcaggcatcagcccatctctgttggtgtggctcccattgctgtagcacctgtgtgtttgaagaccaactctcagatgagcggttccagagaagtaatgctccttcagttaacagtgatcaaagtgatgacaacccggatattgtctgtcaaaaccgagttccatgcaaaggagcagtacagagatgtaattaaaattctcttagaatcagccaaagtcgattctaaattaatctgcatgttccaaaattcagataaattgttatctcacatggctgcacagtgccttgcattgcttctatatttccaattgagagaaaagataaccttaagtaattcctggattgctttttgccagaaaaatctttctgaatactctgagagtaataaagcaatatactgcctctggactcttacagcaataataaaagaaatctttaaagattcatgttcacagaaaacagaaattctaaagcagttcctgactcatttcgacaccatttttgaagtgttttacaattccttattctctcagcattttgaaaactgccgggatacttctaaaatagtaaacatcctgatgtgtttcctggatttgcttgagcttctcatcgcctccagaatccacctgaagttacatttcacttgccagaggattttatttttgaaaccatcttgcatgctagaagttattacctggcctattcaggcttttgttaaaaggaaggtcatcatattcctcaaaaagtgccttctctgtaaagtgggtgaagacctctgtcgtggatctgtgcctgccttaatgccgccagaccatcatgtagcggtggacatgctggctttagctaatgctgttttgcaagctgtgaattcggggttgttgaagacactgtctgtttatgaaaaacattccttttttggaggtgatgaagttcaacctgaatgtgaacttatcactagtccagatcatgtgatccttagagcagcaagcttagttataatgaaatccttagaaatcaagtttcaaaattattcttcagcaagtgaagtgaaagttgacttacagaggttcatgtctgagttactgaccttcttaaagcctcatcttcagccctctctgcaattacacaatccgtgcaaatggctgtctcgggttttcatagaacaagacgatgacatgctggaggctgccaaggcatcactgggcatctacttaacactgaccagaggatgtgaagccactgaaagcttgactcagggaaaagaaatgtgggaccatcacacacatgaaaatggctataatcctcactgtattttcttgttcttcttgaaaaatataggatttgattccacagttcttcttgactttttgatttcatcagaaacctgttttcttgaatattttgttagatatttaaaattactgcaaaaggactgggataattttttcaccatttgcaataactttgatgcaactgaatctaaatatgacataagtatttgtggctgtgtcccctcacttgtccaagaccaaagctccaaccaaacaataccccatcgtttgactgctcctcatagtcacagagatgtgtgtgctcggcactcctgggcttccgatgctccctctgaaccactgaaagctgtgatgtccaagggggctcacaccatgtgtgcttctagtctgtcttccccccgggcctctcaaagtctggtagattacgacagctctgacgattctgacgtggaatccacagagcagtgtttagctaacagtaaacagacatctttacaccagcaagcaactaaggagattcaggatgcagctgggacaagcagggataaaaaagaatttagccttgagcctccatcaaggcctctggttctgaaagaatttgatactgccttctcctttgattgtgaagtagccccaaatgatgtcgtctctgaagtgggaatattttacagaatagtaaaatgcttccaggaactacaagatgccatctgccgtttgcaaaagaaaaatcttttcccatataatccaactgcacttttgaagttgttaaaatacatagaggtgataagtaataaaactatgaacactttgtaaaacattgacattttattttccaggtattgtttttccttaatataaattatgtctcaatgaggtaatagtataaaatcatcaccataaaagggttttcttttttttttttttttttgagacagaatctcattctgtcgctcaggccggagtgcagtggcgtgactcgactcactgcaacctccacctcctgggttcaagcaattctcctgcctcagtctcccgagtagctggaattacaggtgcccgccaccacgcccagctaatttttgtatttttagtagagacgggggtttcaccatgttgccaggctggtctcaaactcctgacctcaagtgatccgcctgtccgccctcccgaagtgctgggattacaggcatgagccactgtgcccggctgggttttctagacaagttcttactttttgccttattggaagcaacctagtgactgaaaaagagacatcaagtgacaagtcactcattatagctatataccactggagatttatggcagttctaagtgacacaaaatcgggggtggtgattgcgttcctcagctagggctgccgtaacaacttgccacgtgtgccgcagcttcagacacctggaattatcctcatagttttggaggccagaatccaaactcaggcttcagcagggcaatgccctcagggtctggagaagaatcccaccctgcccctttctggcttctggtggcagccagccagccatggtgtcccttgtcttgtagtggcgtcactccagttcctgcctcacatggcattttcctgtgtctgtgtccagtttccctcctacaaggacatcggtcattggactaggacctaccctcatccagtatgatctcaacttgatgacagctgcaaagaccctaatcccagatatggccactttcatgtgtccttgatggacttgaatccaggagagtcactaaccaaatacagttactatttccttctggggtatttacacagaaagcgatatattacaaatgtaaaatcttagccgtttctttgagaagtgattatacctggcctactgtatgaacatgattctttctaaaaaaaaatttaatcactaattttcctatttaaaattgtgacatgaataattatgttccatattcttgaggggaagccgtaaattccattgtaatatgtttgtgtaataggagcaatagctatattgtgctgcgaagtctggcattaaggcagtctaaaatattgcctgtacatttttttttaatgatctctttgcagagaaacagaacaaagactaaacctaccgcacattaaaatatatattaaggctatggtattcgaaacagtttagtacttaattcaggtagacatggaaaaatcagtggagctaaatagaaggttgccgattaaaataacagcgaagtaccagtgttagccaaatagcaatgcaaaggtcaaaaggtttgcgttttaacatgctgtcggtgaggctatgcgttaaggcagtttctaccgtaattgaaaaagcacgtcaaagaatgtgtattcaaggatgccacatagtttgtaaaaaatgttaaggttttagagttttactagaaatacctggtaaagtaagtcagaatttgtatagtcagtggaatggtagatgcgttctatgcacgtttgtggatgtgaaacatctccagtaaaaaacaagtaaatacatggggcttgcaattatttagggaaagaagcagggcgggagtaatacacattcatatatatgcttttgtgcatgtataaaatatgtatgtaagactacataagaaagtcataatagtggttgccttgggagacaggtctgatgtggaagacaaagtctcatctttttgtactatttttagtgggatacatgcagcactgcattaggatgtttcaataacagaccacatagtacagtggtcccataagactatcaagccgttatttttactgtgactgtcctatgtttaggcatgtttagatacacgcatacttactattgtgttacagttgcctacagtattcagtacagtaacatgctgtgtacaggtttgtagcctaggagcaatgggctataccatatagcctaggtgtgtagtaggctatgccatctaggtttgttgagtatactctgtgacatacatgacatgacaacaaaattgccttacagctcatttctcagaacatgtccctgtcatgtgacacatggctgttttttgatggaaataactgggaaaaaaaaatcgactcttgttcctaagggtacataaatgttgaatgcattataactcatgcttatgca

SEQ ID NO: 149365 - DNA, 872 bp, Homo sapiens
  Payload ID: 9490
  Gene Symbol: LINS1
  Gene Name: lines homolog 1
  ENST ID: ENST00000559736
  CDS Start-End: 277-872
agagcgggcatttgtgttccctcaaatggcggtgtgaagagagttcgcctgagccagatcccagttttaacaagggaggcatgagacatcaatcaagatatgtaaaatgaacattggttcagtccagaaaggtgggacaactcttaagctgggagggggcttccaggtcacaggtttcactgaagaaacttcttagagattcattgcacttctgagatttaatgtttacaacttggagttgtcgaccttcttataagatacattttggaagtcaaaatgaaagttttctgtgaagttttagaagagttatacaagaaggtacttcttggagccacacttgaaaatgacagccatgattacatcttttatctcaacccagcagtttcagatcaagattgttctacagccacctccttagaatgggcaaacacctgtggtatccagggcaggcatcagcccatctctgttggtgtggctcccattgctgtagcacctgtgtgtttgaagaccaactctcagatgagcggttccagagaagtaatgctccttcagttaacagtgatcaaagtgatgacaacccggatattgtctgtcaaaaccgagttccatgcaaaggagcagtacagagatgtaattaaaattctcttagaatcagccaaagtcgattctaaattaatctgcatgttccaaaattcagataaattgttatctcacatggctgcacagtgccttgcattgcttctatatttccaattgagagaaaagataaccttaagtaattcctggattgctttttgccagaaaaatctttctgaatactctgagagtaataaagcaatatactgcctctggactcttacagcaataataaa

SEQ ID NO: 149366 - DNA, 558 bp, Homo sapiens
  Payload ID: 9490
  Gene Symbol: LINS1
  Gene Name: lines homolog 1
  ENST ID: ENST00000560272
  CDS Start-End: 172-558
agagcgggcatttgtgttccctcaaatggcggtgtgaagagagttcgcctgagccagatcccaggcaggtttcactgaagaaacttcttagagattcattgcacttctgagatttaatgtttacaacttggagttgtcgaccttcttataagatacattttggaagtcaaaatgaaagttttctgtgaagttttagaagagttatacaagaaggtacttcttggagccacacttgaaaatgacagccatgattacatcttttatctcaacccagcagtttcagatcaagattgttctacagccacctccttagaatgggcaaacacctgtggtatccagggcaggcatcagcccatctctgttggtgtggctcccattgctgtagcacctgtgtgtttgaagaccaactctcagatgagcggttccagagaagtaatgctccttcagttaacagtgatcaaagtgatgacaacccggatattgtctgtcaaaaccgagttccatgcaaaggagcagtacagagatgtaattaaaattctcttagaatcagccaaagtc

SEQ ID NO: 149367 - DNA, 827 bp, Homo sapiens
  Payload ID: 9490
  Gene Symbol: LINS1
  Gene Name: lines homolog 1
  ENST ID: ENST00000559577
  CDS Start-End: 254-827
ggcggtgtgaagagagttcgcctgagccagatcccaggcagttttaacaagggaggcatgagacatcaatcaagatatgtaaaatgaacattggttcagtccagaaaggtgggacaactcttaagctgggagggggcttccaggtcacaggtttcactgaagaaacttcttagagattcattgcacttctgagatttaatgtttacaacttggagttgtcgaccttcttataagatacattttggaagtcaaaatgaaagttttctgtgaagttttagaagagttatacaagaaggtacttcttggagccacacttgaaaatgacagccatgattacatcttttatctcaacccagcagtttcagatcaagattgttctacagccacctccttagaatgggcaaacacctgtggtatccagggcaggcatcagcccatctctgttggtgtggctcccattgctgtagcacctgtgtgtttgaagaccaactctcagatgagcggttccagagaagtaatgctccttcagttaacagtgatcaaagtgatgacaacccggatattgtctgtcaaaaccgagttccatgcaaaggagcagtacagagatgtaattaaaattctcttagaatcagccaaagtcgattctaaattaatctgcatgttccaaaattcagataaattgttatctcacatggctgcacagtgccttgcattgcttctatatttccaattgagagaaaagataaccttaagtaattcctggattgctttttgccagaaaaatctttctgaatactctgagagtaataaagcaatatactgcctct

SEQ ID NO: 149368 - DNA, 562 bp, Homo sapiens
  Payload ID: 9490
  Gene Symbol: LINS1
  Gene Name: lines homolog 1
  ENST ID: ENST00000560934
  CDS Start-End: 131-562
gttaatctggaactgccatagcttcaggtttcactgaagaaacttcttagagattcattgcacttctgagatttaatgtttacaacttggagttgtcgaccttcttataagatacattttggaagtcaaaatgaaagttttctgtgaagttttagaagagttatacaagaaggtacttcttggagccacacttgaaaatgacagccatgattacatcttttatctcaacccagcagtttcagatcaagattgttctacagccacctccttagaatgggcaaacacctgtggtatccagggcaggcatcagcccatctctgttggtgtggctcccattgctgtagcacctgtgtgtttgaagaccaactctcagatgagcggttccagagaagtaatgctccttcagttaacagtgatcaaagtgatgacaacccggatattgtctgtcaaaaccgagttccatgcaaaggagcagtacagagatgtaattaaaattctcttagaatcagccaaagtcgattctaaattaatctgcatgttccaaaattcagataaattgtta

SEQ ID NO: 149369 - DNA, 1612 bp, Homo sapiens
  Payload ID: 9490
  Gene Symbol: LINS1
  Gene Name: lines homolog 1
  Uniprot ID: Q8NG48
  ENST ID: ENST00000561308
  CDS Start-End: 155-1465
gtgttccctcaaatggcggtgtgaagagagttcgcctgagccagatcccaggtttcactgaagaaacttcttagagattcattgcacttctgagatttaatgtttacaacttggagttgtcgaccttcttataagatacattttggaagtcaaaatgaaagttttctgtgaagttttagaagagttatacaagaaggtacttcttggagccacacttgaaaatgacagccatgattacatcttttatctcaacccagcagtttcagatcaagattgttctacagccacctccttagaatgggcaaacacctgtggtatccagggcaggcatcagcccatctctgttggtgtggctcccattgctgtagcacctgtgtgtttgaagaccaactctcagatgagcggttccagagaagtaatgctccttcagttaacagtgatcaaagtgatgacaacccggatattgtctgtcaaaaccgagttccatgcaaaggagcagtacagagatgtaattaaaattctcttagaatcagccaaagtcgattctaaattaatctgcatgttccaaaattcagataaattgttatctcacatggctgcacagtgccttgcattgcttctatatttccaattgagagaaaagataaccttaagtaattcctggattgctttttgccagaaaaatctttctgaatactctgagagtaataaagcaatatactgcctctggactcttacagcaataataaaagaaatctttaaagattcatgttcacagaaaacagaaattctaaagcagttcctgactcatttcgacaccatttttgaagtgttttacaattccttattctctcagcattttgaaaactgccgggatacttctaaaatagtaaacatcctgatgtgtttcctggatttgcttgagcttctcatcgcctccagaatccacctgaagttacatttcacttgccagaggattttatttttgaaaccatcttgcatgctagaagttattacctggcctattcaggcttttgttaaaaggaaggtcatcatattcctcaaaaagtgccttctctgtaaagtgggtgaagacctctgtcgtggatctgtgcctgccttaatgccgccagaccatcatgtagcggtggacatgctggctttagctaatgctgttttgcaagctgtgaattcggggttgttgaagacactgtctgtttatgaaaaacattccttttttggaggtgatgaagttcaacctgaatgtgaacttatcactagtccagatcatgtgatccttagagcagcaagcttagttataatgaaatccttagaaatcaagtttcaaaattattcttcagcaagtgaagtgaaaggtaattctccaaactccttttgtatgcagtgtgtaattatttacttaagtacagtaattcataattatcaaatctcaggactagtttaaattccagtaatttaagctgtatgttatcctatttgtaacttattacattttcaaaaaaaaaaaaaagaactggatttacctttaagaaacatgtcagctttttgtgcctacaatgaatttgtaaagcataaggaatgatttaggttt

SEQ ID NO: 149370 - DNA, 1196 bp, Homo sapiens
  Payload ID: 9490
  Gene Symbol: LINS1
  Gene Name: lines homolog 1
  ENST ID: ENST00000560133
  CDS Start-End: 158-1111
tttgtgttccctcaaatggcggtgtgaagagagttcgcctgagccagatcccaggtttcactgaagaaacttcttagagattcattgcacttctgagatttaatgtttacaacttggagttgtcgaccttcttataagatacattttggaagtcaaaatgaaagttttctgtgaagttttagaagagttatacaagaagatctgcatgttccaaaattcagataaattgttatctcacatggctgcacagtgccttgcattgcttctatatttccaattgagagaaaagataaccttaagtaattcctggattgctttttgccagaaaaatctttctgaatactctgagagtaataaagcaatatactgcctctggactcttacagcaataataaaagaaatctttaaagattcatgttcacagaaaacagaaattctaaagcagttcctgactcatttcgacaccatttttgaagtgttttacaattccttattctctcagcattttgaaaactgccgggatacttctaaaatagtaaacatcctgatgtgtttcctggatttgcttgagcttctcatcgcctccagaatccacctgaagttacatttcacttgccagaggattttatttttgaaaccatcttgcatgctagaagttattacctggcctattcaggcttttgttaaaaggaaggtcatcatattcctcaaaaagtgccttctctgtaaagtgggtgaagacctctgtcgtggatctgtgcctgccttaatgccgccagaccatcatgtagcggtggacatgctggctttagctaatgctgttttgcaagctgtgaattcggggttgttgaagacactgtctgtttatgaaaaacattccttttttggaggtgatgaagttcaacctgaatgtgaacttatcactagtccagatcatgtgatccttagagcagcaagcttagttataatgaaatccttagaaatcaagtttcaaaattattcttcagcaagtgaagtgaaaggtaattctccaaactccttttgtatgcagtgtgtaattatttacttaagtacagtaattcataattatcaaatctcaggactagtttaaattccagtaatttaagctgtatgttatcctatttgtaacttattacattttcaaaaaaaaaaaaaagaactggatttacctttaa

SEQ ID NO: 149371 - DNA, 588 bp, Homo sapiens
  Payload ID: 9490
  Gene Symbol: LINS1
  Gene Name: lines homolog 1
  ENST ID: ENST00000560941
  CDS Start-End: 192-588
tttgtgttccctcaaatggcggtgtgaagagagttcgcctgagccagatcccagtttcagatcaagattgttctacagccacctccttagaatgggcaaacacctgtggtatccagggcaggcatcagcccatctctgttggtgtggctcccattgctgtagcacctgtgtgtttgaagaccaactctcagatgagcggttccagagaagtaatgctccttcagttaacagtgatcaaagtgatgacaacccggatattgtctgtcaaaaccgagttccatgcaaaggagcagtacagagatgtaattaaaattctcttagaatcagccaaagtcgattctaaattaatctgcatgttccaaaattcagataaattgttatctcacatggctgcacagtgccttgcattgcttctatatttccaattgagagaaaagataaccttaagtaattcctggattgctttttgccagaaaaatctttctgaatactctgagagtaataaagcaatatactgcctctggactcttacagcaataataaaagaaatctttaaagattcatgttcacagaaaacagaaattctaa

SEQ ID NO: 149372 - DNA, 511 bp, Homo sapiens
  Payload ID: 9490
  Gene Symbol: LINS1
  Gene Name: lines homolog 1
  ENST ID: ENST00000560783
  CDS Start-End: 1-208
tgtgaattcggggttgttgaagacactgtctgtttatgaaaaacattccttttttggaggtgatgaagttcaacctgaatgtgaacttatcactagtccagatcatgtgatccttagagcagcaagcttagttataatgaaatccttagaaatcaagtttcaaaattattcttcagcaagtgaagtgaaagacatggagattaagtagcttgcccaagatcacccagccagtaaagtggcagagctgaagtaatggattcagacacccactaacaacaagaaagaggccaaatcacaagcaacaagacacatgcggacaaaatggaaaaggagaaaacaattttggaagctcaaagtctgctgtggaggatggccaaggcctgcctctagtgaagatgtgtcattccagttgttataggccaatggtgacatacccaatgtgggaggctggattcacaaacacagcagcatgccatttggaatagtgatatgtagaacagacgatgctggg

SEQ ID NO: 149373 - DNA, 1459 bp, Homo sapiens
  Payload ID: 9491
  Gene Symbol: LAT
  Gene Name: linker for activation of T cells
  Uniprot ID: O43561
  ENST ID: ENST00000360872
  CDS Start-End: 79-867
accccatcttcatctggccttgactctgcccttgaggggcctaggggtgcagccagcctgctccgagctcccctgcagatggaggaggccatcctggtcccctgcgtgctggggctcctgctgctgcccatcctggccatgttgatggcactgtgtgtgcactgccacagactgccaggctcctacgacagcacatcctcagatagtttgtatccaaggggcatccagttcaaacggcctcacacggttgccccctggccacctgcctacccacctgtcacctcctacccacccctgagccagccagacctgctccccatcccaagatccccgcagccccttgggggctcccaccggacgccatcttcccggcgggattctgatggtgccaacagtgtggcgagctacgagaacgagggtgcgtctgggatccgaggtgcccaggctgggtggggagtctggggtccgtcctggactaggctgacccctgtgtcgttacccccagaaccagcctgtgaggatgcggatgaggatgaggacgactatcacaacccaggctacctggtggtgcttcctgacagcaccccggccactagcactgctgccccatcagctcctgcactcagcacccctggcatccgagacagtgccttctccatggagtccattgatgattacgtgaacgttccggagagcggggagagcgcagaagcgtctctggatggcagccgggagtatgtgaatgtgtcccaggaactgcatcctggagcggctaagactgagcctgccgccctgagttcccaggaggcagaggaagtggaggaagagggggctccagattacgagaatctgcaggagctgaactgagggcctgtggaggccgagtctgtcctggaaccaggcttgcctgggacggctgagctgggcagctggaagtggctctggggtcctcacatggcgtcctgcccttgctccagcctgacaacagcctgagaaatccccccgtaacttattatcactttggggttcggcctgtgtcccccgaacgctctgcaccttctgacgcagcctgagaatgacctgccctggccccagccctactctgtgtaatagaataaaggcctgcgtgtgtctgtgttgagcgtgcgtctgtgtgtgcctgtgtgcgagtctgagtcagagatttggagatgtctctgtgtgtttgtgtgtatctgtgggtctccatcctccatgggggctcagccaggtgctgtgacaccccccttctgaatgaagccttctgacctgggctggcactgctgggggtgaggacacattgccccatgagacagtcccagaacacggcagctgctggctgtgacaatggtttcaccatccttagaccaagggatgggacctgatgacctgggaggactctcttagttcttaccttttgtggttctcaataaaacagaac

SEQ ID NO: 149374 - DNA, 1616 bp, Homo sapiens
  Payload ID: 9491
  Gene Symbol: LAT
  Gene Name: linker for activation of T cells
  Uniprot ID: O43561
  ENST ID: ENST00000395456
  CDS Start-End: 323-1024
cgggcgccgaggaggggcaggtagggctgggacgcaggggtaactggatcccccgacttcagcccaggccctggtctgaccaccctgggagcagggactttccacagtcagctggacgcacactcagcccagtaaaagaggggacccatcccgggagccccggggagggcacagctgcctcctcccgggctcccctgccacctggtgcctacctgccccctgctccctgccgggtccggtcctcaccccatcttcatctggccttgactctgcccttgaggggcctaggggtgcagccagcctgctccgagctcccctgcagatggaggaggccatcctggtcccctgcgtgctggggctcctgctgctgcccatcctggccatgttgatggcactgtgtgtgcactgccacagactgccaggctcctacgacagcacatcctcagatagtttgtatccaaggggcatccagttcaaacggcctcacacggttgccccctggccacctgcctacccacctgtcacctcctacccacccctgagccagccagacctgctccccatcccaagatccccgcagccccttgggggctcccaccggacgccatcttcccggcgggattctgatggtgccaacagtgtggcgagctacgagaacgaggaaccagcctgtgaggatgcggatgaggatgaggacgactatcacaacccaggctacctggtggtgcttcctgacagcaccccggccactagcactgctgccccatcagctcctgcactcagcacccctggcatccgagacagtgccttctccatggagtccattgatgattacgtgaacgttccggagagcggggagagcgcagaagcgtctctggatggcagccgggagtatgtgaatgtgtcccaggaactgcatcctggagcggctaagactgagcctgccgccctgagttcccaggaggcagaggaagtggaggaagagggggctccagattacgagaatctgcaggagctgaactgagggcctgtggaggccgagtctgtcctggaaccaggcttgcctgggacggctgagctgggcagctggaagtggctctggggtcctcacatggcgtcctgcccttgctccagcctgacaacagcctgagaaatccccccgtaacttattatcactttggggttcggcctgtgtcccccgaacgctctgcaccttctgacgcagcctgagaatgacctgccctggccccagccctactctgtgtaatagaataaaggcctgcgtgtgtctgtgttgagcgtgcgtctgtgtgtgcctgtgtgcgagtctgagtcagagatttggagatgtctctgtgtgtttgtgtgtatctgtgggtctccatcctccatgggggctcagccaggtgctgtgacaccccccttctgaatgaagccttctgacctgggctggcactgctgggggtgaggacacattgccccatgagacagtcccagaacacggcagctgctggctgtgacaatggtttcaccatccttagaccaagggatgggacctgatgacctgggaggactctcttagttcttaccttttgtggttctcaataaaacagaac

SEQ ID NO: 149375 - DNA, 1448 bp, Homo sapiens
  Payload ID: 9491
  Gene Symbol: LAT
  Gene Name: linker for activation of T cells
  Uniprot ID: O43561
  ENST ID: ENST00000395461
  CDS Start-End: 37-846
gggcctccctgctcgctgcctccccgggtcctggatatggaggccacggctgccagctggcaggtggctgtccccgtcttggggggggccagcagacccttggggcctaggggtgcagccagcctgctccgagctcccctgcagatggaggaggccatcctggtcccctgcgtgctggggctcctgctgctgcccatcctggccatgttgatggcactgtgtgtgcactgccacagactgccaggctcctacgacagcacatcctcagatagtttgtatccaaggggcatccagttcaaacggcctcacacggttgccccctggccacctgcctacccacctgtcacctcctacccacccctgagccagccagacctgctccccatcccaagatccccgcagccccttgggggctcccaccggacgccatcttcccggcgggattctgatggtgccaacagtgtggcgagctacgagaacgaggaaccagcctgtgaggatgcggatgaggatgaggacgactatcacaacccaggctacctggtggtgcttcctgacagcaccccggccactagcactgctgccccatcagctcctgcactcagcacccctggcatccgagacagtgccttctccatggagtccattgatgattacgtgaacgttccggagagcggggagagcgcagaagcgtctctggatggcagccgggagtatgtgaatgtgtcccaggaactgcatcctggagcggctaagactgagcctgccgccctgagttcccaggaggcagaggaagtggaggaagagggggctccagattacgagaatctgcaggagctgaactgagggcctgtggaggccgagtctgtcctggaaccaggcttgcctgggacggctgagctgggcagctggaagtggctctggggtcctcacatggcgtcctgcccttgctccagcctgacaacagcctgagaaatccccccgtaacttattatcactttggggttcggcctgtgtcccccgaacgctctgcaccttctgacgcagcctgagaatgacctgccctggccccagccctactctgtgtaatagaataaaggcctgcgtgtgtctgtgttgagcgtgcgtctgtgtgtgcctgtgtgcgagtctgagtcagagatttggagatgtctctgtgtgtttgtgtgtatctgtgggtctccatcctccatgggggctcagccaggtgctgtgacaccccccttctgaatgaagccttctgacctgggctggcactgctgggggtgaggacacattgccccatgagacagtcccagaacacggcagctgctggctgtgacaatggtttcaccatccttagaccaagggatgggacctgatgacctgggaggactctcttagttcttaccttttgtggttctcaataaaacagaacttaaaaaatt

SEQ ID NO: 149376 - DNA, 1262 bp, Homo sapiens
  Payload ID: 9491
  Gene Symbol: LAT
  Gene Name: linker for activation of T cells
  Uniprot ID: O43561
  ENST ID: ENST00000454369
  CDS Start-End: 296-994
tgggacgcaggggtaactggatcccccgacttcagcccaggccctggtctgaccaccctgggagcagggactttccacagtcagctggacgcacactcagcccagtaaaagaggggacccatcccgggagccccggggagggcacagctgcctcctcccgggctcccctgccacctggtgcctacctgccccctgctccctgccgggtccggtcctcaccccatcttcatctggccttgactctgcccttgaggggcctaggggtgcagccagcctgctccgagctcccctgcagatggaggaggccatcctggtcccctgcgtgctggggctcctgctgctgcccatcctggccatgttgatggcactgtgtgtgcactgccacagactgccaggctcctacgacagcacatcctcagatagtttgtatccaaggggcatccagttcaaacggcctcacacggttgccccctggccacctgcctacccacctgtcacctcctacccacccctgagccagccagacctgctccccatcccatccccgcagccccttgggggctcccaccggacgccatcttcccggcgggattctgatggtgccaacagtgtggcgagctacgagaacgaggaaccagcctgtgaggatgcggatgaggatgaggacgactatcacaacccaggctacctggtggtgcttcctgacagcaccccggccactagcactgctgccccatcagctcctgcactcagcacccctggcatccgagacagtgccttctccatggagtccattgatgattacgtgaacgttccggagagcggggagagcgcagaagcgtctctggatggcagccgggagtatgtgaatgtgtcccaggaactgcatcctggagcggctaagactgagcctgccgccctgagttcccaggaggcagaggaagtggaggaagagggggctccagattacgagaatctgcaggagctgaactgagggcctgtggaggccgagtctgtcctggaaccaggcttgcctgggacggctgagctgggcagctggaagtggctctggggtcctcacatggcgtcctgcccttgctccagcctgacaacagcctgagaaatccccccgtaacttattatcactttggggttcggcctgtgtcccccgaacgctctgcaccttctgacgcagcctgagaatgacctgccctggccccagccctactctgtgtaatagaataaaggcctgcgtgtgtctg

SEQ ID NO: 149377 - DNA, 816 bp, Homo sapiens
  Payload ID: 9491
  Gene Symbol: LAT
  Gene Name: linker for activation of T cells
  ENST ID: ENST00000562701
  CDS Start-End: 1-258
atggaggaggccatcctggtcccctgcgtgctggggctcctgctgctgcccatcctggccatgttgatggcactgtgtgtgcactgccacagactgccaggctcctacgacagcacatcctcagatagtttgtatccaaggggcatccagttcaaacggcctcacacggttgccccctggccacctgcctacccacctgtcacctcctacccacccctgagccagccagacctgctccccatcccgcatgacccctgacctttgactcccagaagatccccgcagccccttgggggctcccaccggacgccatcttcccggcgggattctgatggtgccaacagtgtggcgagctacgagaacgagggtgcgtctgggatccgaggtgcccaggctgggtggggagtctggggtccgtcctggactaggctgacccctgtgtcgttacccccagaaccagcctgtgaggatgcggatgaggatgaggacgactatcacaacccaggctacctggtggtgcttcctgacagcaccccggccactagcactgctgccccatcagctcctgcactcagcacccctggcatccgagacagtgccttctccatggagtccattgatgattacgtgaacgttccggagagcggggagagcgcagaagcgtctctggatggcagccgggagtatgtgaatgtgtcccaggaactgcatcctggagcggctaagactgagcctgccgccctgagttcccaggaggcagaggaagtggaggaagagggggctccagattacgagaatctgcaggagctgaactga

SEQ ID NO: 149378 - DNA, 707 bp, Homo sapiens
  Payload ID: 9491
  Gene Symbol: LAT
  Gene Name: linker for activation of T cells
  ENST ID: ENST00000570232
  CDS Start-End: 1-501
atcccaagatccccgcagccccttgggggctcccaccggacgccatcttcccggcgggattctgatggtgccaacagtgtggcgagctacgagaacgaggaaccagcctgtgaggatgcggatgaggatgaggacgactatcacaacccaggctacctggtggtgcttcctgacagcaccccggccactagcactgctgccccatcagctcctgcactcagcacccctggcatccgagacagtgccttctccatggagtccattgatgattacgtgaacgttccggagagcggggagagcgcagaagcgtctctggatggcagccgggagtatgtgaatgtgtcccaggaactgcatcctggagcggctaagactgagcctgtggaggccgagtctgtcctggaaccaggcttgcctgggacggctgagctgggcagctggaagtggctctggggtcctcacatggcgtcctgcccttgctccagcctgacaacagcctgagaaatccccccgtaacttattatcactttggggttcggcctgtgtcccccgaacgctctgcaccttctgacgcagcctgagaatgacctgccctggccccagccctactctgtgtaatagaataaaggcctgcgtgtgtctgtgttgagcgtgcgtctgtgtgtgcctgtgtgcgagtctgagtcagagatttggagatgtctctg

SEQ ID NO: 149379 - DNA, 786 bp, Homo sapiens
  Payload ID: 9491
  Gene Symbol: LAT
  Gene Name: linker for activation of T cells
  Uniprot ID: O43561
  ENST ID: ENST00000566177
  CDS Start-End: 1-786
atggaggaggccatcctggtcccctgcgtgctggggctcctgctgctgcccatcctggccatgttgatggcactgtgtgtgcactgccacagactgccaggctcctacgacagcacatcctcagatagtttgtatccaaggggcatccagttcaaacggcctcacacggttgccccctggccacctgcctacccacctgtcacctcctacccacccctgagccagccagacctgctccccatcccatccccgcagccccttgggggctcccaccggacgccatcttcccggcgggattctgatggtgccaacagtgtggcgagctacgagaacgagggtgcgtctgggatccgaggtgcccaggctgggtggggagtctggggtccgtcctggactaggctgacccctgtgtcgttacccccagaaccagcctgtgaggatgcggatgaggatgaggacgactatcacaacccaggctacctggtggtgcttcctgacagcaccccggccactagcactgctgccccatcagctcctgcactcagcacccctggcatccgagacagtgccttctccatggagtccattgatgattacgtgaacgttccggagagcggggagagcgcagaagcgtctctggatggcagccgggagtatgtgaatgtgtcccaggaactgcatcctggagcggctaagactgagcctgccgccctgagttcccaggaggcagaggaagtggaggaagagggggctccagattacgagaatctgcaggagctgaactga

SEQ ID NO: 149380 - DNA, 921 bp, Homo sapiens
  Payload ID: 9491
  Gene Symbol: LAT
  Gene Name: linker for activation of T cells
  Uniprot ID: O43561
  ENST ID: ENST00000564277
  CDS Start-End: 216-914
agcttcctgccgcaggcgggcgggagggcgggcacggagaggcgggcgccgaggaggggcaggtagggctgggacgcaggggtaactggatcccccgacttcagcccaggccctggtctgaccaccctgggagcagggactttccacagtcagctggacgcacactcagcccagggcctaggggtgcagccagcctgctccgagctcccctgcagatggaggaggccatcctggtcccctgcgtgctggggctcctgctgctgcccatcctggccatgttgatggcactgtgtgtgcactgccacagactgccaggctcctacgacagcacatcctcagatagtttgtatccaaggggcatccagttcaaacggcctcacacggttgccccctggccacctgcctacccacctgtcacctcctacccacccctgagccagccagacctgctccccatcccatccccgcagccccttgggggctcccaccggacgccatcttcccggcgggattctgatggtgccaacagtgtggcgagctacgagaacgaggaaccagcctgtgaggatgcggatgaggatgaggacgactatcacaacccaggctacctggtggtgcttcctgacagcaccccggccactagcactgctgccccatcagctcctgcactcagcacccctggcatccgagacagtgccttctccatggagtccattgatgattacgtgaacgttccggagagcggggagagcgcagaagcgtctctggatggcagccgggagtatgtgaatgtgtcccaggaactgcatcctggagcggctaagactgagcctgccgccctgagttcccaggaggcagaggaagtggaggaagagggggctccagattacgagaatctgcaggagctgaactgagggcctg

SEQ ID NO: 149381 - DNA, 610 bp, Homo sapiens
  Payload ID: 9491
  Gene Symbol: LAT
  Gene Name: linker for activation of T cells
  ENST ID: ENST00000630764
  CDS Start-End: 353-610
caggcgggcgggagggcgggcacggagaggcgggcgccgaggaggggcaggtagggctgggacgcaggggtaactggatcccccgacttcagcccaggccctggtctgaccaccctgggagcagggactttccacagtcagctggacgcacactcagcccagtaaaagaggggacccatcccgggagccccggggagggcacagctgcctcctcccgggctcccctgccacctggtgcctacctgccccctgctccctgccgggtccggtcctcaccccatcttcatctggccttgactctgcccttgaggggcctaggggtgcagccagcctgctccgagctcccctgcagatggaggaggccatcctggtcccctgcgtgctggggctcctgctgctgcccatcctggccatgttgatggcactgtgtgtgcactgccacagactgccaggctcctacgacagcacatcctcagatagtttgtatccaaggggcatccagttcaaacggcctcacacggttgccccctggccacctgcctacccacctgtcacctcctacccacccctgagccagccagacctgctccccatcccgcatgacccctga

SEQ ID NO: 149382 - DNA, 1869 bp, Homo sapiens
  Payload ID: 9492
  Gene Symbol: LAT2
  Gene Name: linker for activation of T cells family, member 2
  Uniprot ID: Q9GZY6
  ENST ID: ENST00000275635
  CDS Start-End: 232-963
agtgtcagtggtgttggcatcagcttgggcaggtgtgcgggctcaggatggggcggccgtggtgaggaaccctggactctcagagatggaatttcaccgtgttgcctaggctggtctggagctcttgatctcaagcgatcctccctgcctcggcctcccaacgtgctgggattataggcgtgagccaccgctcctggccaggcatcacaagaggcaacaccaggagccaacatgagctcggggactgaactgctgtggcccggagcagcgctgctggtgctgttgggggtggcagccagtctgtgtgtgcgctgctcacgcccaggtgcaaagaggtcagagaaaatctaccagcagagaagtctgcgtgaggaccaacagagctttacggggtcccggacctactccttggtcgggcaggcatggccaggacccctggcggacatggcacccacaaggaaggacaagctgttgcaattctaccccagcctggaggatccagcatcttccaggtaccagaacttcagcaaaggaagcagacacgggtcggaggaagcctacatagaccccattgccatggagtattacaactgggggcggttctcgaagcccccagaagatgatgatgccaattcctacgagaatgtgctcatttgcaagcagaaaaccacagagacaggtgcccagcaggagggcataggtggcctctgcagaggggacctcagcctgtcactggccctgaagactggccccacttctggtctctgtccctctgcctccccggaagaagatgaggaatctgaggattatcagaactcagcatccatccatcagtggcgcgagtccaggaaggtcatggggcaactccagagagaagcatcccctggcccggtgggaagcccagacgaggaggacggggaaccggattacgtgaatggggaggtggcagccacagaagcctagggcagaccaagaagaaaggagccaaggcaaagagggaccactgtgctcatggacccatcgctgccttccaaggaccatttcccagagctactcaacttttaagcccctgccatggttgctcctggaaggagaaccagccaccctgaggaccacctggccatgcgtgcacagcctgggaaaagacagttactcacgggagctgcaggcccgtcaccaagccctctcccgacccaggctttgtggggcaggcacctggtaccaagggtaacccggctcctggtatggacggatgcgcaggatttaggataagctgtcacccagtccccataacaaaaccactgtccaacactggtatctgtgttcttttgtgctatgaatttggattcctaattgctattgttggttgctggggttttaaatgattgataagcttgtacagttaacttatagagggggagccatatttaacattctggatttcagagtagagatttctgtgttgtctcctagaaagcattacatgtagtttatttcagcatccttgttgggtggggccctggctctcttcccctttggtgggacctcccctttctttgggcttcagttcactcaggaagaaatgaggctgtcgccatctttatgtgcttccagtggaaatgtcacttgctacagacaatagtgcatgagagtctagagaagtagtgaccagaacagggcagagtaggtcccctccatggccctgaatcctcctctgctccagggctggcctctgcagagctgattaaacagtgttgtgactgtctcatgggaagagctggggcccagagggaccttgagtcagaaatgttgccagaaaaagtatctcctccaaccaaaacatctcaataaaaccattttagttgaaaa

SEQ ID NO: 149383 - DNA, 2363 bp, Homo sapiens
  Payload ID: 9492
  Gene Symbol: LAT2
  Gene Name: linker for activation of T cells family, member 2
  Uniprot ID: Q9GZY6
  ENST ID: ENST00000344995
  CDS Start-End: 723-1454
attatcttgctccctgtctattggagtgtatctctcttcctctctgtgtgactttttgtgtttatgtgtgtgtttagtgtgtgtccatattttcctgttctcttgtgtctctctgctgtgtctctctctttttctttctgttttttgagacggagtctccctctgtcacccaggctggagtgcagtggtgcgatctcggctcactgcaacctctgcttctgaggttcaaacgattctcctgcctcagcctcccgagtagctggaattacagacacatgccaccatgcccagctaattttgtatttttaatagagacggggtttcaccatgttggccaggctggtcttaaactcttgaccttacgtgatccacccgcctcggcctcccaaagtttttggattacaggtgtgagccacctcgcccggtcctatctctctttcttctctttctccctctcactttgtttctcttctctctctctctcccgcctccttcccccgtctcccctcccttccccccaccgccctcttcatagctgagcctgtccggcagtgcggcggatgtacggatgattcagtggctggcaggaagcccgccctgcccgcccgccagtgtcagtggtgttggcatcagcttgggcaggtgtgcgggctcaggatggggcggccgtggtgaggaaccctggactctcagcatcacaagaggcaacaccaggagccaacatgagctcggggactgaactgctgtggcccggagcagcgctgctggtgctgttgggggtggcagccagtctgtgtgtgcgctgctcacgcccaggtgcaaagaggtcagagaaaatctaccagcagagaagtctgcgtgaggaccaacagagctttacggggtcccggacctactccttggtcgggcaggcatggccaggacccctggcggacatggcacccacaaggaaggacaagctgttgcaattctaccccagcctggaggatccagcatcttccaggtaccagaacttcagcaaaggaagcagacacgggtcggaggaagcctacatagaccccattgccatggagtattacaactgggggcggttctcgaagcccccagaagatgatgatgccaattcctacgagaatgtgctcatttgcaagcagaaaaccacagagacaggtgcccagcaggagggcataggtggcctctgcagaggggacctcagcctgtcactggccctgaagactggccccacttctggtctctgtccctctgcctccccggaagaagatgaggaatctgaggattatcagaactcagcatccatccatcagtggcgcgagtccaggaaggtcatggggcaactccagagagaagcatcccctggcccggtgggaagcccagacgaggaggacggggaaccggattacgtgaatggggaggtggcagccacagaagcctagggcagaccaagaagaaaggagccaaggcaaagagggaccactgtgctcatggacccatcgctgccttccaaggaccatttcccagagctactcaacttttaagcccctgccatggttgctcctggaaggagaaccagccaccctgaggaccacctggccatgcgtgcacagcctgggaaaagacagttactcacgggagctgcaggcccgtcaccaagccctctcccgacccaggctttgtggggcaggcacctggtaccaagggtaacccggctcctggtatggacggatgcgcaggatttaggataagctgtcacccagtccccataacaaaaccactgtccaacactggtatctgtgttcttttgtgctatgaatttggattcctaattgctattgttggttgctggggttttaaatgattgataagcttgtacagttaacttatagagggggagccatatttaacattctggatttcagagtagagatttctgtgttgtctcctagaaagcattacatgtagtttatttcagcatccttgttgggtggggccctggctctcttcccctttggtgggacctcccctttctttgggcttcagttcactcaggaagaaatgaggctgtcgccatctttatgtgcttccagtggaaatgtcacttgctacagacaatagtgcatgagagtctagagaagtagtgaccagaacagggcagagtaggtcccctccatggccctgaatcctcctctgctccagggctggcctctgcagagctgattaaacagtgttgtgactgtctcatgggaagagctggggcccagagggaccttgagtcagaaatgttgccagaaaaagtatctcctccaaccaaaacatctcaataaaaccattttagttgaaaagca

SEQ ID NO: 149384 - DNA, 581 bp, Homo sapiens
  Payload ID: 9492
  Gene Symbol: LAT2
  Gene Name: linker for activation of T cells family, member 2
  ENST ID: ENST00000361082
  CDS Start-End: 391-581
agtgtcagtggtgttggcatcagcttgggcaggtgtgcgggctcaggatggggcggccgtggtgaggaaccctggactctcagagatggaatttcaccgtgttgcctaggctggtctggagctcttgatctcaagcgatcctccctgcctcggcctcccaacgtgctgggattataggcgtgagccaccgctcctggccagggtctgttcctagttgcaacagttcttggaaacccactcgagagggccacgcctccattcaccaggccacggtgggtggtgtgcgtatgttttgctgaggcctggtcatcacgctgtggctccaaggctgggaccagccacagaccgagaagccggtcagcatcacaagaggcaacaccaggagccaacatgagctcggggactgaactgctgtggcccggagcagcgctgctggtgctgttgggggtggcagccagtctgtgtgtgcgctgctcacgcccaggtgcaaagaggtcagagaaaatctaccagcagagaagtctgcgtgaggaccaacagagctttacggggtcccggacctactccttggtcgggcaggc

SEQ ID NO: 149385 - DNA, 2453 bp, Homo sapiens
  Payload ID: 9492
  Gene Symbol: LAT2
  Gene Name: linker for activation of T cells family, member 2
  Uniprot ID: Q9GZY6
  ENST ID: ENST00000398475
  CDS Start-End: 138-869
aggaagcccgccctgcccgcccgccagtgtcagtggtgttggcatcagcttgggcaggtgtgcgggctcaggatggggcggccgtggtgaggaaccctggactctcagcatcacaagaggcaacaccaggagccaacatgagctcggggactgaactgctgtggcccggagcagcgctgctggtgctgttgggggtggcagccagtctgtgtgtgcgctgctcacgcccaggtgcaaagaggtcagagaaaatctaccagcagagaagtctgcgtgaggaccaacagagctttacggggtcccggacctactccttggtcgggcaggcatggccaggacccctggcggacatggcacccacaaggaaggacaagctgttgcaattctaccccagcctggaggatccagcatcttccaggtaccagaacttcagcaaaggaagcagacacgggtcggaggaagcctacatagaccccattgccatggagtattacaactgggggcggttctcgaagcccccagaagatgatgatgccaattcctacgagaatgtgctcatttgcaagcagaaaaccacagagacaggtgcccagcaggagggcataggtggcctctgcagaggggacctcagcctgtcactggccctgaagactggccccacttctggtctctgtccctctgcctccccggaagaagatgaggaatctgaggattatcagaactcagcatccatccatcagtggcgcgagtccaggaaggtcatggggcaactccagagagaagcatcccctggcccggtgggaagcccagacgaggaggacggggaaccggattacgtgaatggggaggtggcagccacagaagcctagggcagaccaagaagaaaggggcgtcaggcagggaattctggtgacttcaggggcaaagaagtgggcaccgggtgggtctcccaactccactgcatcctcctggctgcgaccttggaccaagtgacaacctcccagaacttagttcctcacttggtgcccacctctcagagaagacatcgcacacacggccgggcacggtggctcacgcctgtaatcccggcactttgggaggccgaggcaggcagatcacctgaggtcacgagttcgagaccagcctggccaacatggtgaaacttcatctctactaaaaacacaaaaaattagccaggcatggtggtgggtgcctgtagtcccagttagttgggaggctgaggcaggagaatcatttgaaccctgaaggcggaggttgcggtgagttaagatcacatgcactcaaccctgggtgacagagcgagactccgtctcaataaataaataaaaaaacagacattgcacacaaagcctcagcccagcaggcactcggtcaatgctggaaacagacaggaggcagggacgttgggaaatgtaacagtggctgagacgcgctgaggagccaccgcaggccagtgagatggtgcggcgctaagcgctcacacgtgcaccatctcttagcacccaaagccacagagcagttaagccacctgcccaaggccacatcttgaagtaaggggaggaggagatggaatccccagtggtcagacatcagacatcaaagcctaggctgggtctactgcttgggaagcacgatggacccccagagggccttgaaggctgcccaaagtccccatctgggagacccaggccgtcatctcagcgagcaggctggagggtggaaaccacagtgaacctgggtggtcaagagtcagccccagaggcaggtgcaggagtttgagccaaatgtgcagagccccacgtcattcattcaaccagtatccactgggcccctgctacgggcaagtcctgctctaggtgctgggaacaccaacataaagaacagcaaacccctgaccccttagaacttgcattctggtaggagagagaaaacagatagggctggacacagcggtcatgcctataaatcccagcacttcgggaggctgaggcgggaggatcctttgagcctctgagtttgaggccagcctgggcaacatagcaagacctctctctctacaaaaactttttttttttttttttgagacagagtatcactgtcactcaggctggagtgcagtggcgccatctcggctcactgcaacctccacctcctgggttcaagcgattctcgtgcctcagccttccaagtagctgggattacaggcacacgccaccatgtccagcctctataaaaacatttaaaattagccaggcatggtggtggatgccctagagtcccactgacttgggaggctgaggtgggaagatcacttgagcctgggaggtcaaggttgcaatgagccatggttgctgcagtgagctgtggtcgtgccactgcactcaagcctgggcaacagagcaagaccccatctcaaaaaaaaaatttaaaaa

SEQ ID NO: 149386 - DNA, 561 bp, Homo sapiens
  Payload ID: 9492
  Gene Symbol: LAT2
  Gene Name: linker for activation of T cells family, member 2
  ENST ID: ENST00000475494
  CDS Start-End: 261-561
ggatgtacggatgattcagtggctggcaggaagcccgccctgcccgcccgccagtgtcagtggtgttggcatcagcttgggcaggtgtgcgggctcaggatggggcggccgtggtgaggaaccctggactctcagagatggaatttcaccgtgttgcctaggctggtctggagctcttgatctcaagcgatcctccctgcctcggcctcccaacgtgctgggattataggccatcacaagaggcaacaccaggagccaacatgagctcggggactgaactgctgtggcccggagcagcgctgctggtgctgttgggggtggcagccagtctgtgtgtgcgctgctcacgcccaggtgcaaagaggtcagagaaaatctaccagcagagaagtctgcgtgaggaccaacagagctttacggggtcccggacctactccttggtcgggcaggcatggccaggacccctggcggacatggcacccacaaggaaggacaagctgttgcaattctaccccagcctggaggatccagcatcttccaggtaccagaacttcagcaaag

SEQ ID NO: 149387 - DNA, 586 bp, Homo sapiens
  Payload ID: 9492
  Gene Symbol: LAT2
  Gene Name: linker for activation of T cells family, member 2
  ENST ID: ENST00000470709
  CDS Start-End: 285-586
catcagcttgggcaggtgtgcgggctcaggatggggcggccgtggtgaggaaccctggactctcagagatggaatttcaccgtgttgcctaggctggtctggagctcttgatctcaagcgatcctccctgcctcggcctcccaacgtgctgggattataggcgtgagccaccgctcctggccagggtctgttcctagttgcaacagttcttggaaacccactcgagagggccacgcctccattcaccaggccacgcatcacaagaggcaacaccaggagccaacatgagctcggggactgaactgctgtggcccggagcagcgctgctggtgctgttgggggtggcagccagtctgtgtgtgcgctgctcacgcccaggtgcaaagaggcgtgaggaccaacagagctttacggggtcccggacctactccttggtcgggcaggcatggccaggacccctggcggacatggcacccacaaggaaggacaagctgttgcaattctaccccagcctggaggatccagcatcttccaggtaccagaacttcagcaaaggaagcagacacgggtcggaggaagcctacat

SEQ ID NO: 149388 - DNA, 2527 bp, Homo sapiens
  Payload ID: 9492
  Gene Symbol: LAT2
  Gene Name: linker for activation of T cells family, member 2
  Uniprot ID: Q9GZY6
  ENST ID: ENST00000460943
  CDS Start-End: 890-1621
ggagtgtatctctcttcctctctgtgtgactttttgtgtttatgtgtgtgtttagtgtgtgtccatattttcctgttctcttgtgtctctctgctgtgtctctctctttttctttctgttttttgagacggagtctccctctgtcacccaggctggagtgcagtggtgcgatctcggctcactgcaacctctgcttctgaggttcaaacgattctcctgcctcagcctcccgagtagctggaattacagacacatgccaccatgcccagctaattttgtatttttaatagagacggggtttcaccatgttggccaggctggtcttaaactcttgaccttacgtgatccacccgcctcggcctcccaaagtttttggattacaggtgtgagccacctcgcccggtcctatctctctttcttctctttctccctctcactttgtttctcttctctctctctctcccgcctccttcccccgtctcccctcccttccccccaccgccctcttcatagctgagcctgtccggcagtgcggcggatgtacggatgattcagtggctggcaggaagcccgccctgcccgcccgccagtgtcagtggtgttggcatcagcttgggcaggtgtgcgggctcaggatggggcggccgtggtgaggaaccctggactctcagagatggaatttcaccgtgttgcctaggctggtctggagctcttgatctcaagcgatcctccctgcctcggcctcccaacgtgctgggattataggcgtgagccaccgctcctggccagggtctgttcctagttgcaacagttcttggaaacccactcgagagggccacgcctccattcaccaggccacgcatcacaagaggcaacaccaggagccaacatgagctcggggactgaactgctgtggcccggagcagcgctgctggtgctgttgggggtggcagccagtctgtgtgtgcgctgctcacgcccaggtgcaaagaggtcagagaaaatctaccagcagagaagtctgcgtgaggaccaacagagctttacggggtcccggacctactccttggtcgggcaggcatggccaggacccctggcggacatggcacccacaaggaaggacaagctgttgcaattctaccccagcctggaggatccagcatcttccaggtaccagaacttcagcaaaggaagcagacacgggtcggaggaagcctacatagaccccattgccatggagtattacaactgggggcggttctcgaagcccccagaagatgatgatgccaattcctacgagaatgtgctcatttgcaagcagaaaaccacagagacaggtgcccagcaggagggcataggtggcctctgcagaggggacctcagcctgtcactggccctgaagactggccccacttctggtctctgtccctctgcctccccggaagaagatgaggaatctgaggattatcagaactcagcatccatccatcagtggcgcgagtccaggaaggtcatggggcaactccagagagaagcatcccctggcccggtgggaagcccagacgaggaggacggggaaccggattacgtgaatggggaggtggcagccacagaagcctagggcagaccaagaagaaaggagccaaggcaaagagggaccactgtgctcatggacccatcgctgccttccaaggaccatttcccagagctactcaacttttaagcccctgccatggttgctcctggaaggagaaccagccaccctgaggaccacctggccatgcgtgcacagcctgggaaaagacagttactcacgggagctgcaggcccgtcaccaagccctctcccgacccaggctttgtggggcaggcacctggtaccaagggtaacccggctcctggtatggacggatgcgcaggatttaggataagctgtcacccagtccccataacaaaaccactgtccaacactggtatctgtgttcttttgtgctatgaatttggattcctaattgctattgttggttgctggggttttaaatgattgataagcttgtacagttaacttatagagggggagccatatttaacattctggatttcagagtagagatttctgtgttgtctcctagaaagcattacatgtagtttatttcagcatccttgttgggtggggccctggctctcttcccctttggtgggacctcccctttctttgggcttcagttcactcaggaagaaatgaggctgtcgccatctttatgtgcttccagtggaaatgtcacttgctacagacaatagtgcatgagagtctagagaagtagtgaccagaacagggcagagtaggtcccctccatggccctgaatcctcctctgctccagggctggcctctgcagagctgattaaacagtgttgtgactgtctcatgggaagagctggggcccagagggaccttgagtcagaaatgttgccagaaaaagtatctcctccaaccaaaacatctcaataaaaccattttagttgaaaa

SEQ ID NO: 149389 - DNA, 585 bp, Homo sapiens
  Payload ID: 9492
  Gene Symbol: LAT2
  Gene Name: linker for activation of T cells family, member 2
  ENST ID: ENST00000465116
  CDS Start-End: 411-585
atatcctgttctttccttcaccgtgggagacgagctgagcctgtccggcagtgcggcggatgtacggatgattcagtggctggcaggaagcccgccctgcccgcccgccagtgtcagtggtgttggcatcagcttgggcaggtgtgcgggctcaggatggggcggccgtggtgaggaaccctggactctcagagatggaatttcaccgtgttgcctaggctggtctggagctcttgatctcaagcgatcctccctgcctcggcctcccaacgtgctgggattataggcgtgagccaccgctcctggccagggtctgttcctagttgcaacagttcttggaaacccactcgagagggccacgcctccattcaccaggccacgcatcacaagaggcaacaccaggagccaacatgagctcggggactgaactgctgtggcccggagcagcgctgctggtgctgttgggggtggcagccagtctgtgtgtgcgctgctcacgcccaggtgcaaagaggtcagagaaaatctaccagcagagaagtctgcgtgaggaccaacagagctttacggggtcccggacctact

SEQ ID NO: 149390 - DNA, 1694 bp, Homo sapiens
  Payload ID: 9492
  Gene Symbol: LAT2
  Gene Name: linker for activation of T cells family, member 2
  Uniprot ID: Q9GZY6
  ENST ID: ENST00000488266
  CDS Start-End: 113-448
agtgtcagtggtgttggcatcagcttgggcaggtgtgcgggctcaggatggggcggccgtggtgaggaaccctggactctcagcatcacaagaggcaacaccaggagccaacatgagctcggggactgaactgctgtggcccggagcagcgctgctggtgctgttgggggtggcagccagtctgtgtgtgcgctgctcacgcccaggtgcaaagaggtcagagaaaatctaccagcagagaagtctgcgtgaggaccaacagagctttacggggtcccggacctactccttggtcgggcaggcatggccaggacccctggcggacatggcacccacaaggaaggacaagctgttgcaattctaccccagcctggaggatccagcatcttccaggtaccagaacttcagcaaaggaagcagacacgggtcggaggaagcctacatatgatgatgccaattcctacgagaatgtgctcatttgcaagcagaaaaccacagagacaggtgcccagcaggagggcataggtggcctctgcagaggggacctcagcctgtcactggccctgaagactggccccacttctggtctctgtccctctgcctccccggaagaagatgaggaatctgaggattatcagaactcagcatccatccatcagtggcgcgagtccaggaaggtcatggggcaactccagagagaagcatcccctggcccggtgggaagcccagacgaggaggacggggaaccggattacgtgaatggggaggtggcagccacagaagcctagggcagaccaagaagaaaggagccaaggcaaagagggaccactgtgctcatggacccatcgctgccttccaaggaccatttcccagagctactcaacttttaagcccctgccatggttgctcctggaaggagaaccagccaccctgaggaccacctggccatgcgtgcacagcctgggaaaagacagttactcacgggagctgcaggcccgtcaccaagccctctcccgacccaggctttgtggggcaggcacctggtaccaagggtaacccggctcctggtatggacggatgcgcaggatttaggataagctgtcacccagtccccataacaaaaccactgtccaacactggtatctgtgttcttttgtgctatgaatttggattcctaattgctattgttggttgctggggttttaaatgattgataagcttgtacagttaacttatagagggggagccatatttaacattctggatttcagagtagagatttctgtgttgtctcctagaaagcattacatgtagtttatttcagcatccttgttgggtggggccctggctctcttcccctttggtgggacctcccctttctttgggcttcagttcactcaggaagaaatgaggctgtcgccatctttatgtgcttccagtggaaatgtcacttgctacagacaatagtgcatgagagtctagagaagtagtgaccagaacagggcagagtaggtcccctccatggccctgaatcctcctctgctccagggctggcctctgcagagctgattaaacagtgttgtgactgtctcatgggaagagctggggcccagagggaccttgagtcagaaatgttgccagaaaaagtatctcctccaaccaaaacatctcaataaaaccattttagttgaaaa

SEQ ID NO: 149391 - DNA, 753 bp, Homo sapiens
  Payload ID: 9493
  Gene Symbol: LIPA
  Gene Name: lipase A, lysosomal acid, cholesterol esterase
  ENST ID: ENST00000282673
  CDS Start-End: 96-753
agctcctgattctgcagaaaacacgaaactgagctgtacaaagatgctgatgaggggctgcagcatgcaattcacttcaccagcagtcactaagaatgaaaatgcggttcttggggttggtggtctgtttggttctctggaccctgcattctgaggggtctggagggaaactgacagctgtggatcctgaaacaaacatgaatgtgagtgaaattatctcttactggggattccctagtgaggaatacctagttgagacagaagatggatatattctgtgccttaaccgaattcctcatgggaggaagaaccattctgacaaaggtcccaaaccagttgtcttcctgcaacatggcttgctggcagattctagtaactgggtcacaaaccttgccaacagcagcctgggcttcattcttgctgatgctggttttgacgtgtggatgggcaacagcagaggaaatacctggtctcggaaacataagacactctcagtttctcaggatgaattctgggctttcagttatgatgagatggcaaaatatgacctaccagcttccattaacttcattctgaataaaactggccaagaacaagtgtattatgtgggtcattctcaaggcaccactataggttttatagcattttcacagatccctgagctggctaaaaggattaaaatgttttttgccctgggtcctgtggcttccgtcgccttctgtactagccctatggccaaattaggacgattac

SEQ ID NO: 149392 - DNA, 2782 bp, Homo sapiens
  Payload ID: 9493
  Gene Symbol: LIPA
  Gene Name: lipase A, lysosomal acid, cholesterol esterase
  Uniprot ID: P38571
  ENST ID: ENST00000336233
  CDS Start-End: 324-1523
gcgtaggcgacgcgctggtagagctgtggacctgccagcctgcgaggcggaggacgggctccatctcttagaaacgcctacggcgcatgctctatggggtcaactggggggctggcaagcggcagcgctggtctggggcggagtctccgaggcacttcccggtggctggctgctctgattggctgaacaaatagtccgagggtggtgggcatccgccctcccgacaaggcagaccaggccccctgcaggtcccctatccgcaccccggcccctgagagctggcactgcgactcgagacagcggcccggcaggacagctccagaatgaaaatgcggttcttggggttggtggtctgtttggttctctggaccctgcattctgaggggtctggagggaaactgacagctgtggatcctgaaacaaacatgaatgtgagtgaaattatctcttactggggattccctagtgaggaatacctagttgagacagaagatggatatattctgtgccttaaccgaattcctcatgggaggaagaaccattctgacaaaggtcccaaaccagttgtcttcctgcaacatggcttgctggcagattctagtaactgggtcacaaaccttgccaacagcagcctgggcttcattcttgctgatgctggttttgacgtgtggatgggcaacagcagaggaaatacctggtctcggaaacataagacactctcagtttctcaggatgaattctgggctttcagttatgatgagatggcaaaatatgacctaccagcttccattaacttcattctgaataaaactggccaagaacaagtgtattatgtgggtcattctcaaggcaccactataggttttatagcattttcacagatccctgagctggctaaaaggattaaaatgttttttgccctgggtcctgtggcttccgtcgccttctgtactagccctatggccaaattaggacgattaccagatcatctcattaaggacttatttggagacaaagaatttcttccccagagtgcgtttttgaagtggctgggtacccacgtttgcactcatgtcatactgaaggagctctgtggaaatctctgttttcttctgtgtggatttaatgagagaaatttaaatatgtctagagtggatgtatatacaacacattctcctgctggaacttctgtgcaaaacatgttacactggagccaggctgttaaattccaaaagtttcaagcctttgactggggaagcagtgccaagaattattttcattacaaccagagttatcctcccacatacaatgtgaaggacatgcttgtgccgactgcagtctggagcgggggtcacgactggcttgcagatgtctacgacgtcaatatcttactgactcagatcaccaacttggtgttccatgagagcattccggaatgggagcatcttgacttcatttggggcctggatgccccttggaggctttataataaaattattaatctaatgaggaaatatcagtgaaagctggacttgagctgtgtaccaccaagtcaatgattatgtcatgtgaaaatgtgtttgcttcatttctgtaaaacacttgtttttctttcccaggtcttttgtttttttatatccaagaaaatgataactttgaagatgcccagttcactctagtttcaattagaaacatactagctattttttctttaattagggctggaataggaagccagtgtctcaaccatagtattgtctctttaagtcttttaaatatcactgatgtgtaaaaaggtcattatatccattctgtttttaaaatttaaaatatattgactttttgcccttcataggacaaagtaatatatgtgttggaattttaaaattgtgttgtcattggtaaatctgtcactgacttaagcgaggtataaaagtacgcagttttcatgtccttgccttaaagagctctctagtctaacggtcttgtagttagagatctaaatgacattttatcatgttttcctgcagcaggtgcatagtcaaatccagaaatatcacagctgtgccagtaataaggatgctaacaattaattttatcaaacctaactgtgacagctgtgatttgacacgttttaattgctcaggttaaatgaaatagttttccggcgtcttcaaaaacaaattgcactgataaaacaaaaacaaaagtatgttttaaatgctttgaagactgatacactcaaccatctatattcatgagctctcaatttcatggcaggccatagttctacttatctgagaagcaaatccctgtggagactataccactattttttctgagattaatgtactcttggagcccgctactgtcgttattgatcacatctgtgtgaagccaaagccccgtggttgcccatgagaagtgtccttgttcattttcacccaaatgaagtgtgaacgtgatgttttcggatgcaaactcagctcagggattcattttgtgtcttagttttatatgcatccttatttttaatacacctgcttcacgtccctatgttgggaagtccatatttgtctgcttttcttgcagcatcatttccttacaatactgtccggtggacaaaatgacaattgatatgtttttctgatataattactttagctgcactaacagtacaatgcttgttaatggttaatataggcagggcgaatactactttgtaacttttaaagtcttaaacttttcaataaaattgagtgagacttataggcccaaagaa

SEQ ID NO: 149393 - DNA, 2513 bp, Homo sapiens
  Payload ID: 9493
  Gene Symbol: LIPA
  Gene Name: lipase A, lysosomal acid, cholesterol esterase
  Uniprot ID: P38571
  ENST ID: ENST00000371837
  CDS Start-End: 223-1254
aaatcgaaactaaacgtaagcttcagaaaccgaaacttaatagaagagctcaagagccgcggccagacgtttgcggagtccagggtctttcggagttgaatttgcagctgggctccttcactttggtctcggcttttatctgcctccctgataggtttttggtcttggtgacttcaagaatgaagctgcggactctcgctgtgagtgctacagttgttaaagatggcgtgtctggagtttgttcctttcgatgttcagatgtgtctggagtttcttccttctggtcccaaaccagttgtcttcctgcaacatggcttgctggcagattctagtaactgggtcacaaaccttgccaacagcagcctgggcttcattcttgctgatgctggttttgacgtgtggatgggcaacagcagaggaaatacctggtctcggaaacataagacactctcagtttctcaggatgaattctgggctttcagttatgatgagatggcaaaatatgacctaccagcttccattaacttcattctgaataaaactggccaagaacaagtgtattatgtgggtcattctcaaggcaccactataggttttatagcattttcacagatccctgagctggctaaaaggattaaaatgttttttgccctgggtcctgtggcttccgtcgccttctgtactagccctatggccaaattaggacgattaccagatcatctcattaaggacttatttggagacaaagaatttcttccccagagtgcgtttttgaagtggctgggtacccacgtttgcactcatgtcatactgaaggagctctgtggaaatctctgttttcttctgtgtggatttaatgagagaaatttaaatatgtctagagtggatgtatatacaacacattctcctgctggaacttctgtgcaaaacatgttacactggagccaggctgttaaattccaaaagtttcaagcctttgactggggaagcagtgccaagaattattttcattacaaccagagttatcctcccacatacaatgtgaaggacatgcttgtgccgactgcagtctggagcgggggtcacgactggcttgcagatgtctacgacgtcaatatcttactgactcagatcaccaacttggtgttccatgagagcattccggaatgggagcatcttgacttcatttggggcctggatgccccttggaggctttataataaaattattaatctaatgaggaaatatcagtgaaagctggacttgagctgtgtaccaccaagtcaatgattatgtcatgtgaaaatgtgtttgcttcatttctgtaaaacacttgtttttctttcccaggtcttttgtttttttatatccaagaaaatgataactttgaagatgcccagttcactctagtttcaattagaaacatactagctattttttctttaattagggctggaataggaagccagtgtctcaaccatagtattgtctctttaagtcttttaaatatcactgatgtgtaaaaaggtcattatatccattctgtttttaaaatttaaaatatattgactttttgcccttcataggacaaagtaatatatgtgttggaattttaaaattgtgttgtcattggtaaatctgtcactgacttaagcgaggtataaaagtacgcagttttcatgtccttgccttaaagagctctctagtctaacggtcttgtagttagagatctaaatgacattttatcatgttttcctgcagcaggtgcatagtcaaatccagaaatatcacagctgtgccagtaataaggatgctaacaattaattttatcaaacctaactgtgacagctgtgatttgacacgttttaattgctcaggttaaatgaaatagttttccggcgtcttcaaaaacaaattgcactgataaaacaaaaacaaaagtatgttttaaatgctttgaagactgatacactcaaccatctatattcatgagctctcaatttcatggcaggccatagttctacttatctgagaagcaaatccctgtggagactataccactattttttctgagattaatgtactcttggagcccgctactgtcgttattgatcacatctgtgtgaagccaaagccccgtggttgcccatgagaagtgtccttgttcattttcacccaaatgaagtgtgaacgtgatgttttcggatgcaaactcagctcagggattcattttgtgtcttagttttatatgcatccttatttttaatacacctgcttcacgtccctatgttgggaagtccatatttgtctgcttttcttgcagcatcatttccttacaatactgtccggtggacaaaatgacaattgatatgtttttctgatataattactttagctgcactaacagtacaatgcttgttaatggttaatataggcagggcgaatactactttgtaacttttaaagtcttaaacttttcaataaaattgagtgagacttataggcccaaagaa

SEQ ID NO: 149394 - DNA, 1055 bp, Homo sapiens
  Payload ID: 9493
  Gene Symbol: LIPA
  Gene Name: lipase A, lysosomal acid, cholesterol esterase
  ENST ID: ENST00000428800
  CDS Start-End: 184-1055
taaaatttaaaaattccttattctcctttcagatatggctggagtcatttgtttcatattttcctttcaccttttacttgccctaaatctggttcagaactttttgtgggagcattaagttaccagaatatttttgtgtagtaaaattcaagcaaataataatagactgttttattatacagaatgaaaatgcggttcttggggttggtggtctgtttggttctctggaccctgcattctgaggggtctggagggaaactgacagctgtggatcctgaaacaaacatgaatgtgagtgaaattatctcttactggggattccctagtgaggaatacctagttgagacagaagatggatatattctgtgccttaaccgaattcctcatgggaggaagaaccattctgacaaaggtcccaaaccagttgtcttcctgcaacatggcttgctggcagattctagtaactgggtcacaaaccttgccaacagcagcctgggcttcattcttgctgatgctggttttgacgtgtggatgggcaacagcagaggaaatacctggtctcggaaacataagacactctcagtttctcaggatgaattctgggctttcagttatgatgagatggcaaaatatgacctaccagcttccattaacttcattctgaataaaactggccaagaacaagtgtattatgtgggtcattctcaaggcaccactataggttttatagcattttcacagatccctgagctggctaaaaggattaaaatgttttttgccctgggtcctgtggcttccgtcgccttctgtactagccctatggccaaattaggacgattaccagatcatctcattaaggacttatttggagacaaagaatttcttccccagagtgcgtttttgaagtggctgggtacccacgtttgcactcatgtcatactgaaggagctctgtggaaatctctgttttcttctgtgtggatttaatgagagaaatttaaatatgtctagagtggatgtatatacaacacattctcctgctggaacttctgtgca

SEQ ID NO: 149395 - DNA, 2527 bp, Homo sapiens
  Payload ID: 9493
  Gene Symbol: LIPA
  Gene Name: lipase A, lysosomal acid, cholesterol esterase
  ENST ID: ENST00000456827
  CDS Start-End: 423-1274
agagctgtggacctgccagcctgcgaggcggaggacgggctccatctcttagaaacgcctacggcgcatgctctatggggtcaactggggggctggcaagcggcagcgctggtctggggcggagtctccgaggcacttcccggtggctggctgctctgattggctgaacaaatagtccgagggtggtgggcatccgccctcccgacaaggcagaccaggccccctgcaggtcccctatccgcaccccggcccctgagagctggcactgcgactcgagacagcggcccggcaggacagctccaggtcccaaaccagttgtcttcctgcaacatggcttgctggcagattctagtaactgggtcacaaaccttgccaacagcagcctgggcttcattcttgctgatgctggttttgacgtgtggatgggcaacagcagaggaaatacctggtctcggaaacataagacactctcagtttctcaggatgaattctgggctttcagttatgatgagatggcaaaatatgacctaccagcttccattaacttcattctgaataaaactggccaagaacaagtgtattatgtgggtcattctcaaggcaccactataggttttatagcattttcacagatccctgagctggctaaaaggattaaaatgttttttgccctgggtcctgtggcttccgtcgccttctgtactagccctatggccaaattaggacgattaccagatcatctcattaaggacttatttggagacaaagaatttcttccccagagtgcgtttttgaagtggctgggtacccacgtttgcactcatgtcatactgaaggagctctgtggaaatctctgttttcttctgtgtggatttaatgagagaaatttaaatatgtctagagtggatgtatatacaacacattctcctgctggaacttctgtgcaaaacatgttacactggagccaggctgttaaattccaaaagtttcaagcctttgactggggaagcagtgccaagaattattttcattacaaccagagttatcctcccacatacaatgtgaaggacatgcttgtgccgactgcagtctggagcgggggtcacgactggcttgcagatgtctacgacgtcaatatcttactgactcagatcaccaacttggtgttccatgagagcattccggaatgggagcatcttgacttcatttggggcctggatgccccttggaggctttataataaaattattaatctaatgaggaaatatcagtgaaagctggacttgagctgtgtaccaccaagtcaatgattatgtcatgtgaaaatgtgtttgcttcatttctgtaaaacacttgtttttctttcccaggtcttttgtttttttatatccaagaaaatgataactttgaagatgcccagttcactctagtttcaattagaaacatactagctattttttctttaattagggctggaataggaagccagtgtctcaaccatagtattgtctctttaagtcttttaaatatcactgatgtgtaaaaaggtcattatatccattctgtttttaaaatttaaaatatattgactttttgcccttcataggacaaagtaatatatgtgttggaattttaaaattgtgttgtcattggtaaatctgtcactgacttaagcgaggtataaaagtacgcagttttcatgtccttgccttaaagagctctctagtctaacggtcttgtagttagagatctaaatgacattttatcatgttttcctgcagcaggtgcatagtcaaatccagaaatatcacagctgtgccagtaataaggatgctaacaattaattttatcaaacctaactgtgacagctgtgatttgacacgttttaattgctcaggttaaatgaaatagttttccggcgtcttcaaaaacaaattgcactgataaaacaaaaacaaaagtatgttttaaatgctttgaagactgatacactcaaccatctatattcatgagctctcaatttcatggcaggccatagttctacttatctgagaagcaaatccctgtggagactataccactattttttctgagattaatgtactcttggagcccgctactgtcgttattgatcacatctgtgtgaagccaaagccccgtggttgcccatgagaagtgtccttgttcattttcacccaaatgaagtgtgaacgtgatgttttcggatgcaaactcagctcagggattcattttgtgtcttagttttatatgcatccttatttttaatacacctgcttcacgtccctatgttgggaagtccatatttgtctgcttttcttgcagcatcatttccttacaatactgtccggtggacaaaatgacaattgatatgtttttctgatataattactttagctgcactaacagtacaatgcttgttaatggttaatataggcagggcgaatactactttgtaacttttaaagtcttaaacttttcaataaaattgagtgagacttataggccc

SEQ ID NO: 149396 - DNA, 2621 bp, Homo sapiens
  Payload ID: 9494
  Gene Symbol: LMF1
  Gene Name: lipase maturation factor 1
  Uniprot ID: Q96S06
  ENST ID: ENST00000262301
  CDS Start-End: 20-1723
gagtgcgccctccccgcacatgcgccctgacagcccaacaatggcggcgcccgcggagtcgctgaggaggcggaagactgggtactcggatccggagcctgagtcgccgcccgcgccggggcgtggccccgcaggctctccggcccatctccacacgggcaccttctggctgacccggatcgtgctcctgaaggccctagccttcgtgtacttcgtggcattcctggtggctttccatcagaacaagcagctcatcggtgacagggggctgcttccctgcagagtgttcctgaagaacttccagcagtacttccaggacaggacgagctgggaagtcttcagctacatgcccaccatcctctggctgatggactggtcagacatgaactccaacctggacttgctggctcttctcggactgggcatctcgtctttcgtactgatcacgggctgcgccaacatgcttctcatggctgccctgtggggcctctacatgtccctggttaatgtgggccatgtctggtactctttcggatgggagtcccagcttctggagacggggttcctggggatcttcctgtgccctctgtggacgctgtcaaggctgccccagcatacccccacatcccggattgtcctgtggggcttccggtggctgatcttcaggatcatgcttggagcaggcctgatcaagatccggggggaccggtgctggcgagacctcacctgcatggacttccactatgagacccagccgatgcccaatcctgtggcgtactacctgcaccactcaccctggtggttccatcgcttcgagacgctcagcaaccacttcatcgagctcctggtgcccttcttcctcttcctcggccggcgggcgtgcatcatccacggggtgctgcagatcctgttccaggccgtcctcatcgtcagcgggaacctcagcttcctgaactggctgactatggtgcccagcctggcctgctttgatgacgccaccctgggattcttgttcccctctgggccaggcagcctgaaggaccgagttctgcagatgcagagggacatccgaggggcccggcccgagcccagattcggctccgtggtgcggcgtgcagccaacgtctcgctgggcgtcctgctggcctggctcagcgtgcccgtggtcctcaacttgctgagctccaggcaggtcatgaacacccacttcaactctcttcacatcgtcaacacttacggggccttcggaagcatcaccaaggagcgggcggaggtgatcctgcagggcacagccagctccaacgccagcgcccccgatgccatgtgggaggactacgagttcaagtgcaagccaggtgaccccagcagacggccctgcctcatctccccgtaccactaccgcctggactggctgatgtggttcgcggccttccagacctacgagcacaacgactggatcatccacctggctggcaagctcctggccagcgacgccgaggccttgtccctgctggcacacaaccccttcgcgggcaggcccccgcccaggtgggtccgaggagagcactacaggtacaagttcagccgtcctgggggcaggcacgccgccgagggcaagtggtgggtgcggaagaggatcggagcctacttccctccgctcagcctggaggagctgaggccctacttcagggaccgtgggtggcctctgcccgggcccctctagacgtgcaccagaaataaaggcgaagacccagcccctcggcggctcagcaacgtttgcccttccctgcgcccagcccaagctgggcatcgccaagagagacgtggagaggagagcggtgggacccagcccccagcacgggggtccagggtggggtctgttgtcacatactgtggcggctcccaggccctgcccacctggggccccacatccaggccaacccttgtcccaggcgccaggggctctgatctcccatccatcccaccctcctcccagaggcccagcctggggctgtgccgcccacaggagttgagacaatggccatcctgacaccttcctccactacagccctgaccatagacccagccaggtagctcttggggtctctagcgtcccagggcctggtttctgttccctcttcaatggtgtgttcccagccaggtcctgaccctcagagccaagtccctgtcacgtctggggcagccaaaccctcgccccacagggacctggacacgcccggccaggatgtggggttggatgggccattttctgtcctatccctcatctccacccccgccacagcctacacgcatcccacacatgcaggcacacacagcctgtgcacacatgtgttcttggcccggtttcatccccccatgactggtgtctgtgaggtgcagatggacacagcgcacacccagaccctccaccaggctgtgacctcgctgcctctgaggccttgacaaggcccctcaatcggaggacagccggccgtgcacactttcatcatcgtcggacaaacagcgtctactgcacatttttcttattcctattcttgagccatagctatggcatattcttctactattcctattataccacttaccagcttactcgaaaa

SEQ ID NO: 149397 - DNA, 2103 bp, Homo sapiens
  Payload ID: 9494
  Gene Symbol: LMF1
  Gene Name: lipase maturation factor 1
  Uniprot ID: Q96S06
  ENST ID: ENST00000543238
  CDS Start-End: 222-1214
aatggcggcgcccgcggagtcgctgaggaggcggaagactgggtactcggatccggagcctgagtcgccgcccgcgccggggcgtggccccgcaggctctccggcccatctccacacgggcaccttctggctgacccggatcgtgctcctgaaggccctagccttcgtgtactggcctgatcaagatccggggggaccggtgctggcgagacctcacctgcatggacttccactatgagacccagccgatgcccaatcctgtggcgtactacctgcaccactcaccctggtggttccatcgcttcgagacgctcagcaaccacttcatcgagctcctggtgcccttcttcctcttcctcggccggcgggcgtgcatcatccacggggtgctgcagatcctgttccaggccgtcctcatcgtcagcgggaacctcagcttcctgaactggctgactatggtgcccagcctggcctgctttgatgacgccaccctgggattcttgttcccctctgggccaggcagcctgaaggaccgagttctgcagatgcagagggacatccgaggggcccggcccgagcccagattcggctccgtggtgcggcgtgcagccaacgtctcgctgggcgtcctgctggcctggctcagcgtgcccgtggtcctcaacttgctgagctccaggcaggtcatgaacacccacttcaactctcttcacatcgtcaacacttacggggccttcggaagcatcaccaaggagcgggcggaggtgatcctgcagggcacagccagctccaacgccagcgcccccgatgccatgtgggaggactacgagttcaagtgcaagccaggtgaccccagcagacggccctgcctcatctccccgtaccactaccgcctggactggctgatgtggttcgcggccttccagacctacgagcacaacgactggatcatccacctggctggcaagctcctggccagcgacgccgaggccttgtccctgctggcacacaaccccttcgcgggcaggcccccgcccaggtgggtccgaggagagcactacaggtacaagttcagccgtcctgggggcaggcacgccgccgagggcaagtggtgggtgcggaagaggatcggagcctacttccctccgctcagcctggaggagctgaggccctacttcagggaccgtgggtggcctctgcccgggcccctctagacgtgcaccagaaataaaggcgaagacccagcccctcggcggctcagcaacgtttgcccttccctgcgcccagcccaagctgggcatcgccaagagagacgtggagaggagagcggtgggacccagcccccagcacgggggtccagggtggggtctgttgtcacatactgtggcggctcccaggccctgcccacctggggccccacatccaggccaacccttgtcccaggcgccaggggctctgatctcccatccatcccaccctcctcccagaggcccagcctggggctgtgccgcccacaggagttgagacaatggccatcctgacaccttcctccactacagccctgaccatagacccagccaggtagctcttggggtctctagcgtcccagggcctggtttctgttccctcttcaatggtgtgttcccagccaggtcctgaccctcagagccaagtccctgtcacgtctggggcagccaaaccctcgccccacagggacctggacacgcccggccaggatgtggggttggatgggccattttctgtcctatccctcatctccacccccgccacagcctacacgcatcccacacatgcaggcacacacagcctgtgcacacatgtgttcttggcccggtttcatccccccatgactggtgtctgtgaggtgcagatggacacagcgcacacccagaccctccaccaggctgtgacctcgctgcctctgaggccttgacaaggcccctcaatcggaggacagccggccgtgcacactttcatcatcgtcggacaaacagcgtctactgcacatttttcttattcctattcttgagccatagctatggcatattcttctactattcctattataccacttaccagctt

SEQ ID NO: 149398 - DNA, 2731 bp, Homo sapiens
  Payload ID: 9494
  Gene Symbol: LMF1
  Gene Name: lipase maturation factor 1
  ENST ID: ENST00000545827
  CDS Start-End: 309-596
ctctctctctctctcacacacacacacacacacacagcccgtctcgcgcctgaggtctcgcccgcaggccggtggcgcggggtcagctgctgcctgcggtccaggacagggtcggttccgccgcgcagcgcccaggcccagctcgtccagagtctgcggacagcgcacgtccagtcgtggcattcctggtggctttccatcagaacaagcagctcatcggtgacagggggctgcttccctgcagagtgttcctgaagaacttccagcagtacttccaggacaggacgagctgggaagtcttcagctacatgcccaccatcctctggctgatggactggtcagacatgaactccaacctggacttgctggctcttctcggactgggcatctcgtctttcgtactgatcacgggctgcgccaacatgcttctcatggctgccctgtggggcctctacatgtccctggttaatgtgggccatgtctggtactctttcgcggctcagcacgtcactttggactgtcgcgcagaaattcagaagactcgtagtagcttcggcagtgctctccctgccttccgagcagccatgcgtctttgaactgtcttcccttccctgatcttggagaacatagagctgccagttactgaggatgggagtcccagcttctggagacggggttcctggggatcttcctgtgccctctgtggacgctgtcaaggctgccccagcatacccccacatcccggattgtcctgtggggcttccggtggctgatcttcaggatcatgcttggagcaggcctgatcaagatccggggggaccggtgctggcgagacctcacctgcatggacttccactatgagacccagccgatgcccaatcctgtggcgtactacctgcaccactcaccctggtggttccatcgcttcgagacgctcagcaaccacttcatcgagctcctggtgcccttcttcctcttcctcggccggcgggcgtgcatcatccacggggtgctgcagatcctgttccaggccgtcctcatcgtcagcgggaacctcagcttcctgaactggctgactatggtgcccagcctggcctgctttgatgacgccaccctgggattcttgttcccctctgggccaggcagcctgaaggaccgagttctgcagatgcagagggacatccgaggggcccggcccgagcccagattcggctccgtggtgcggcgtgcagccaacgtctcgctgggcgtcctgctggcctggctcagcgtgcccgtggtcctcaacttgctgagctccaggcaggtcatgaacacccacttcaactctcttcacatcgtcaacacttacggggccttcggaagcatcaccaaggagcgggcggaggtgatcctgcagggcacagccagctccaacgccagcgcccccgatgccatgtgggaggactacgagttcaagtgcaagccaggtgaccccagcagacggccctgcctcatctccccgtaccactaccgcctggactggctgatgtggttcgcggccttccagacctacgagcacaacgactggatcatccacctggctggcaagctcctggccagcgacgccgaggccttgtccctgctggcacacaaccccttcgcgggcaggcccccgcccaggtgggtccgaggagagcactacaggtacaagttcagccgtcctgggggcaggcacgccgccgagggcaagtggtgggtgcggaagaggatcggagcctacttccctccgctcagcctggaggagctgaggccctacttcagggaccgtgggtggcctctgcccgggcccctctagacgtgcaccagaaataaaggcgaagacccagcccctcggcggctcagcaacgtttgcccttccctgcgcccagcccaagctgggcatcgccaagagagacgtggagaggagagcggtgggacccagcccccagcacgggggtccagggtggggtctgttgtcacatactgtggcggctcccaggccctgcccacctggggccccacatccaggccaacccttgtcccaggcgccaggggctctgatctcccatccatcccaccctcctcccagaggcccagcctggggctgtgccgcccacaggagttgagacaatggccatcctgacaccttcctccactacagccctgaccatagacccagccaggtagctcttggggtctctagcgtcccagggcctggtttctgttccctcttcaatggtgtgttcccagccaggtcctgaccctcagagccaagtccctgtcacgtctggggcagccaaaccctcgccccacagggacctggacacgcccggccaggatgtggggttggatgggccattttctgtcctatccctcatctccacccccgccacagcctacacgcatcccacacatgcaggcacacacagcctgtgcacacatgtgttcttggcccggtttcatccccccatgactggtgtctgtgaggtgcagatggacacagcgcacacccagaccctccaccaggctgtgacctcgctgcctctgaggccttgacaaggcccctcaatcggaggacagccggccgtgcacactttcatcatcgtcggacaaacagcgtctactgcacatttttcttattcctattcttgagccatagctatggcatattcttctactattcctattataccacttaccagcttactcg

SEQ ID NO: 149399 - DNA, 882 bp, Homo sapiens
  Payload ID: 9494
  Gene Symbol: LMF1
  Gene Name: lipase maturation factor 1
  ENST ID: ENST00000570014
  CDS Start-End: 288-882
acacacacacacacagcccgtctcgcgcctgaggtctcgcccgcaggccggtggcgcggggtcagctgctgcctgcggtccaggacagggtcggttccgccgcgcagcgcccaggcccagctcgtccagagtctgcggacagcgcacgtccagtcgtggcattcctggtggctttccatcagaacaagcagctcatcggtgacagggggctgcttccctgcagagtgttcctgaagaacttccagcagtacttccaggacaggacgagctgggaagtcttcagctacatgcccaccatcctctggctgatggactggtcagacatgaactccaacctggacttgctggctcttctcggactgggcatctcgtctttcgtactgatcacgggctgcgccaacatgcttctcatggctgccctgtggggcctctacatgtccctggttaatgtgggccatgtctggtactctttcggatgggagtcccagcttctggagacggggttcctggggatcttcctgtgccctctgtggacgctgtcaaggctgccccagcatacccccacatcccggattgtcctgtggggcttccggtggctgatcttcaggatcatgcttggagcaggcctgatcaagatccggggggaccggtgctggcgagacctcacctgcatggacttccactatgagacccagccgatgcccaatcctgtggcgtactacctgcaccactcaccctggtggttccatcgcttcgagacgctcagcaaccacttcatcgagctcctggtgcccttcttcctcttcctcggccggcgggcgtgcatcatccacggggtgctgcagatcctgttccaggccgtcctcatcgtcagcgggaacc

SEQ ID NO: 149400 - DNA, 694 bp, Homo sapiens
  Payload ID: 9494
  Gene Symbol: LMF1
  Gene Name: lipase maturation factor 1
  ENST ID: ENST00000566627
  CDS Start-End: 244-694
aaagatcctctccagaaacttggaccaaagtcaggacacctcaggggtcctccttcctgtggcgggagctgcccttggagcttccttcctgggcaggacggatggtggctccacttcaaagagtactgagagcagcgccagggctggaggggacgctgggaggccgccagcacccagggacaccgccctcggtgcttcatttctcactgacgatgaacagcatgtttgggctccaggacttcaatgtactctttcggatgggagtcccagcttctggagacggggttcctggggatcttcctgtgccctctgtggacgctgtcaaggctgccccagcatacccccacatcccggattgtcctgtggggcttccggtggctgatcttcaggatcatgcttggagcaggcctgatcaagatccggggggaccggtgctggcgagacctcacctgcatggacttccactatgagacccagccgatgcccaatcctgtggcgtactacctgcaccactcaccctggtggttccatcgcttcgagacgctcagcaaccacttcatcgagctcctggtgcccttcttcctcttcctcggccggcgggcgtgcatcatccacggggtgctgcagatcctgttccaggccgtcctcatcgtcagcgggaacctcagcttcctgaactggctgactatggtgc

SEQ ID NO: 149401 - DNA, 551 bp, Homo sapiens
  Payload ID: 9494
  Gene Symbol: LMF1
  Gene Name: lipase maturation factor 1
  ENST ID: ENST00000562380
  CDS Start-End: 1-405
atttatcggccatgcctgctgttggctgctcgggcgacacggtatttcctcggtatttcctcgttgcagctcccagtcgtggcattcctggtggctttccatcagaacaagcagctcatcggtgacagggggctgcttccctgcagagtgttcctgaagaacttccagcagtacttccaggacaggacgagctgggaagtcttcagctacatgcccaccatcctctggctgatggactggtcagacatgaactccaacctggacttgctggctcttctcggactgggcatctcgtctttcgtactgatcacgggctgcgccaacatgcttctcatggctgccctgtggggcctctacatgtccctggttaatgtgggccatgtctggtactctttcggtaagtgagatgcatttagagaaagctctgcgagagttgagcgttgtgtgtttggatgggagtcccagcttctggagacggggttcctggggatcttcctgtgccctctgtggacgctgtcaaggctgccccagcatacccccacatcccggat

SEQ ID NO: 149402 - DNA, 1088 bp, Homo sapiens
  Payload ID: 9494
  Gene Symbol: LMF1
  Gene Name: lipase maturation factor 1
  ENST ID: ENST00000562226
  CDS Start-End: 3-557
acatgcgccctgacagcccaacaatggcggcgcccgcggagtcgctgaggaggcggaagactgggtactcggatccggagcctgagtcgccgcccgcgccggggcgtggccccgcaggctctccggcccatctccacacgggcaccttctggctgacccggatcgtgctcctgaaggccctagccttcgtgtacttcgtggcattcctggtggctttccatcagaacaagcagctcatcggtgacagggggctgcttccctgcagagtgttcctgaagaacttccagcagtacttccaggacaggacgagctgggaagtcttcagctacatgcccaccatcctctggctgatggactggtcagacatgaactccaacctggacttgctggctcttctcggactgggcatctcgtctttcgtactgatcacgggctgcgccaacatgcttctcatggctgccctgtggggcctctacatgtccctggttaatgtgggccatgtctggtactctttcgcctctgccatcagccttcccagtatgcacggagggcagtgatgggcgcttgtgatctgatccgtgcctcctccctggatgtgggagctcctgggcttccaggccccgggcacctagagacggatggtcgcacgcatgattgtcggcatctcacagcggctcagcacgtcactttggactgtcgcgcagaaattcagaagactcgtagtagcttcggcagtgctctccctgccttccgagcagccatgcgtctttgaactgtcttcccttccctgatcttggagaacatagagctgccagttactgaggatgggagtcccagcttctggagacggggttcctggggatcttcctgtgccctctgtggacgctgtcaaggctgccccagcatacccccacatcccggattgtcctgtggggcttccggtggctgatcttcaggatcatgcttggagcaggcctgatcaagatccggggggaccggtgctggcgagacctcacctgcatggacttccactatgagacccagccgatgcccaatcctgtggcgtactacctgcaccactcaccctg

SEQ ID NO: 149403 - DNA, 1181 bp, Homo sapiens
  Payload ID: 9494
  Gene Symbol: LMF1
  Gene Name: lipase maturation factor 1
  ENST ID: ENST00000565276
  CDS Start-End: 1-450
ccttcgcgggcaggcccccgcccaggcgcctcagggaccctcctccacccagagggtctctgtcttcccggttttcctggcgtaattcagacttggggagagaagaatcatcatccatcacacacccagacccaaagagactcaaagccaggaggagccgggtggacccagaggccctcaccctgccagcctaaggggcatggcccaaggtctccacccccagcccccagagcacagctgtgtgcaggtcaccagaagccccaaataatgacagcagcccagacagtcgctaccgggccctggtgcagtgtgaagcctctggcacctgcctgggctcattccaggggccatgagagggtcctgttatggctgcaccatcacacccaccgggcagctggggcccagctctgccatggatcccagccaggcagcagccgccctgtgggctgagaagcttccgctcctgctgcacaactgcgaaggggcctggagggccgggagcttgtgacggtgacaattcctcctggcgcctcctcctccggggcagccgagcaaccctggacatgagggggcttcgtcccacccccaggagaaaatgcccagtcctccgagagtccagtgagggcttgccagccagggaccaagacccagtatggcctaaaccaggcctggtcaccaggggtcaggcgggaccttatacagggctcagcagagagacctgcccgctaccctgctccaggggagatgggggtgggggccttcatcccactcgggcatgacagaggagagcagccagccagcatctgcacgtctcaggcagggaagggcctgaagccctgggaagcagaggctccgccctcaggaaacaggtcccggcctggctccctcacagcctcggactgccccgtggaccgaaacccccaggcaccttgcgccaggactggcctgatggtggagacgccacaccatgagcagtgggtccgaggagagcactacaggtacaagttcagccgtcctgggggcaggcacgccgccgagggcaagtggtgggtgcggaagaggatcggagcctacttccctccgctcagcctggaggagctgaggccctacttcagggaccgtgggtggcctctgcccgggcccctctagacgtgcaccagaaataaaggcgaagacccagc

SEQ ID NO: 149404 - DNA, 853 bp, Homo sapiens
  Payload ID: 9494
  Gene Symbol: LMF1
  Gene Name: lipase maturation factor 1
  ENST ID: ENST00000568964
  CDS Start-End: 1-505
aacaatggcggcgcccgcggagtcgctgaggaggcggaagactgggtactcggatccggagcctgagtcgccgcccgcgccggggcgtggccccgcaggctctccggcccatctccacacgggcaccttctggctgacccggatcgtgctcctgaaggccctagccttcgtgtacttcgtggcattcctggtggctttccatcagaacaagcagctcatcggtgacagggggctgcttccctgcagagtgttcctgaagaacttccagcagtacttccaggacaggacgagctgggaagtcttcagctacatgcccaccatcctctggctgatggactggtcagacatgaactccaacctggacttgctggctcttctcggactgggcatctcgtctttcgtactgatcacgggctgcgccaacatgcttctcatggctgccctgtggggcctctacatgtccctggttaatgtgggccatgtctggtactctttcggtaagtgagatgcatttagagaaagctctgcgagagttgagcgttgtgtgtttggatgggagtcccagcttctggagacggggttcctggggatcttcctgtgccctctgtggacgctgtcaaggctgccccagcatacccccacatcccggattgtcctgtggggcttccggtggctgatcttcaggatcatgcttggagcaggcctgatcaagatccggggggaccggtgctggcgagacctcacctgcatggacttccactatgaggagaagtttgcaggctgtttcctgaggtctgggccagcagcaccgccatgccctgacccaccattcccctggccgcgggctgagtgt

SEQ ID NO: 149405 - DNA, 663 bp, Homo sapiens
  Payload ID: 9494
  Gene Symbol: LMF1
  Gene Name: lipase maturation factor 1
  ENST ID: ENST00000567595
  CDS Start-End: 1-485
atccggagcctgagtcgccgcccgcgccggggcgtggccccgcaggctctccggcccatctccacacgggcaccttctggctgacccggatcgtgctcctgaaggccctagccttcgtgtacttcgtggcattcctggtggctttccatcagaacaagcagctcatcggtgacagggggctgcttccctgcagagtgttcctgaagaacttccagcagtacttccaggacaggacgagctgggaagtcttcagctacatgcccaccatcctctggctgatggactggtcagacatgaactccaacctggacttgctggctcttctcggactgggcatctcgtctttcgtactgatcacgggctgcgccaacatgcttctcatggctgccctgtggggcctctacatgtccctggttaatgtgggccatgtctggtactctttcgcctctgccatcagccttcccagtatgcacggagggcagtgatgggcgcttgtgatctgatccgtgcctcctccctggatgtgggagctcctgggcttccaggccccgggcacctagagacggatggtcgcacgcatgattgtcggcatctcacaggatgggagtcccagcttctggagacggggttcctggggatcttcctgtgccctctgtggacgct

SEQ ID NO: 149406 - DNA, 1603 bp, Homo sapiens
  Payload ID: 9494
  Gene Symbol: LMF1
  Gene Name: lipase maturation factor 1
  ENST ID: ENST00000568897
  CDS Start-End: 531-1583
ggctctccggcccatctccacacgggcaccttctggctgacccggatcgtgctcctgaaggccctagccttcgtgtacttcgtggcattcctggtggctttccatcagaacaagcagctcatcggtgacagggggctgcttccctgcagagtgttcctgaagaacttccagcagtacttccaggacaggacgagctgggaagtcttcagctacatgcccaccatcctctggctgatggactggtcagacatgaactccaacctggacttgctggctcttctcggactgggcatctcgtctttcgtactgatcacgggctgcgccaacatgcttctcatggctgccctgtggggcctctacatgtccctggttaatgtgggccatgtctggtgagatgggagtcccagcttctggagacggggttcctggggatcttcctgtgccctctgtggacgctgtcaaggctgccccagcatacccccacatcccggattgtcctgtggggcttccggtggctgatcttcaggatcatgcttggagcaggcctgatcaagatccggggggaccggtgctggcgagacctcacctgcatggacttccactatgagacccagccgatgcccaatcctgtggcgtactacctgcaccactcaccctggtggttccatcgcttcgagacgctcagcaaccacttcatcgagctcctggtgcccttcttcctcttcctcggccggcgggcgtgcatcatccacggggtgctgcagatcctgttccaggccgtcctcatcgtcagcgggaacctcagcttcctgaactggctgactatggtgcccagcctggcctgctttgatgacgccaccctgggattcttgttcccctctgggccaggcagcctgaaggaccgagttctgcagatgcagagggacatccgaggggcccggcccgagcccagattcggctccgtggtgcggcgtgcagccaacgtctcgctgggcgtcctgctggcctggctcagcgtgcccgtggtcctcaacttgctgagctccaggcaggtcatgaacacccacttcaactctcttcacatcgtcaacacttacggggccttcggaagcatcaccaaggagcgggcggaggtgatcctgcagggcacagccagctccaacgccagcgcccccgatgccatgtgggaggactacgagttcaagtgcaagccaggtgaccccagcagacggccctgcctcatctccccgtaccactaccgcctggactggctgatgtggttcgcggccttccagacctacgagcacaacgactggatcatccacctggctggcaagctcctggccagcgacgccgaggccttgtccctgctggcacacaaccccttcgcgggcaggcccccgcccaggtgggtccgaggagagcactacaggtacaagttcagccgtcctgggggcaggcacgccgccgagggcaagtggtgggtgcggaagaggatcggagcctacttccctccgctcagcctggaggagctgaggccctacttcagggaccgtgggtggcctctgcccgggcccctctagacgtgcaccagaaataaagg

SEQ ID NO: 149407 - DNA, 2658 bp, Homo sapiens
  Payload ID: 9495
  Gene Symbol: LMF2
  Gene Name: lipase maturation factor 2
  Uniprot ID: Q9BU23
  ENST ID: ENST00000216080
  CDS Start-End: 170-2218
gtagcggacatggcgggctcccggctcccgcggcagctcttcctccagggcgtggcggccgtcttcatgtttgctttcgcttccctctacacgcaaatcccaggctgggggatctgcaggccctgactcagaggtagtctagtctgcaagggctgtccagggcctggccatgacatgccctcccacaggcctgtatggccccgagggcatcctacctgcaaggaggacgctgcggcctcagggcaaggggcgctggcagcagctgtgggagaccccgacgctgctgtgggaagcgccgagactggggctggacacggcccagggcctggagctgctgagcctgctgggtgcactagtggccctgggagccctgctgctgagcccactgcgccaccctgtcatctacttgctgctttgggccgcctacctgtcagcctgccaggtgggccaggtgttcctttatttccagtgggactccctgctgctagagactggcttcctggccgtgctggtggccccgctgaggccagcctcccaccgcaaggaggccccccagggcaggcaggcaggggccctgccccacgaagacctccccttctggctggtgcgatggctgctgttccgcctcatgttcgcctcaggcgtggtcaagctgaccagccgctgccctgcgtggtgggggctcactgccctcacctaccactacgagacccagtgcctgcccacgcccgccgcctggttcgcacaccacctgccggtctggctgcacaagctcagcgtggtggccaccttcctaattgagatcgctgtgccgcccctgttcttcgcccccattcgacgcctgcgcttggctgctttctactcgcaggtgctgctgcaggtcctgattatcatcaccggcaactacaacttcttcaacctgatgacgctggtgcttaccactgcgctgctggacgaccagcacctggctgctgagcctggccacggcagccgcaagaagacggccacctcctggcccaaggccctgctggccaccctgtcgctgctgctggaactagccgtctacgggcttctggcctatggcactgtgcactactttggcctggaggttgactggcagcagcgcaccatccactccagaaccactttcaccttccaccagttttctcagtggctgaagacactgacgctgcccactgtgtggctgggtgtggcctccctggtctgggagctgctgagtgccctgtggaggtggacccaggtgcggggctggctacggaagctcagtgctgtagtccaactgtcccttgtgggcactgcgaccgtggccttgttcctgattagcctggtgccgtactcctacgtggagcccgggacccacgggcgcctctggaccggggcccaccgcctgtttggtgccgtggagcacctacagctggccaactcctacggcctcttccgccgcatgactgggcttggtggacggcctgaggtggtgctggagggcagttacgacggccaccactggacggagatcgagttcatgtacaagcctgggaacctgagccggccgcccccggttgtggtgccccaccagccacgcctggactggcagatgtggtttgcagccctgggcccacacacgcacagcccgtggttcacaagcctggtcttgcgcctgctgcagggcaaggagccagtgatccgccttgtccagagccaagtggccaggtatcccttccacaagcagccgcccacctacgtccgagcccagcgctacaagtactggttctcccagcctggggagcagggccagtggtggcggcgccagtgggtggaggagttcttcccatccgtgtccctgggggaccccacgctggagacgctgctcaggcagtttggactacaggagaaaagcccacctcgcacccgcagcgccaacagcaccctggcccaggccctccactggactcgctctcagctgtctcccctggaggcccccgccctgctctgggggctcctcatggccgtgggggctgtcagatttgtgcaagccctgctagcaccctgttctctccggtcctccccgctggcaccagtcagcggggagaagcgcaggccagcctcccagaaagactccggagctgcctccgaacaggccaccgcagcccccaacccctgctccagtagttcgaggaccacccggcgaaagaagtagctgtgttctcccagctgcacgtcctgagagggccaggtcgccgggagtgctctggcctccggcaggacaggacccagccactgtgccttagctgaccctgcagggccaggcacaggttggggggctgcccctggggtttgcagggtgctgcattgagggctccaggccccacccccacgccagccatgcccctccccaggactcccactattgcctctgtgattggcccaggaggaaaacacgaccaagctcaagacccttcccctgccctgggctgtgggggtctgagtctagagcccccaaccctaggccccgtgccagaggggaagaggctgactcccaggggaagaggggaagcactgtcatcttccacgtcatcttcacaccagcccatcctgccctttagatctgggcaccaataaaggcgtcttttgtgcttg

SEQ ID NO: 149408 - DNA, 2582 bp, Homo sapiens
  Payload ID: 9495
  Gene Symbol: LMF2
  Gene Name: lipase maturation factor 2
  Uniprot ID: Q9BU23
  ENST ID: ENST00000474879
  CDS Start-End: 17-2140
gggccgcgtagcggacatggcgggctcccggctcccgcggcagctcttcctccagggcgtggcggccgtcttcatgtttgctttcgcttccctctacacgcaaatcccaggcctgtatggccccgagggcatcctacctgcaaggaggacgctgcggcctcagggcaaggggcgctggcagcagctgtgggagaccccgacgctgctgtgggaagcgccgagactggggctggacacggcccagggcctggagctgctgagcctgctgggtgcactagtggccctgggagccctgctgctgagcccactgcgccaccctgtcatctacttgctgctttgggccgcctacctgtcagcctgccaggtgggccaggtgttcctttatttccagtgggactccctgctgctagagactggcttcctggccgtgctggtggccccgctgaggccagcctcccaccgcaaggaggccccccagggcaggcaggcaggggccctgccccacgaagacctccccttctggctggtgcgatggctgctgttccgcctcatgttcgcctcaggcgtggtcaagctgaccagccgctgccctgcgtggtgggggctcactgccctcacctaccactacgagacccagtgcctgcccacgcccgccgcctggttcgcacaccacctgccggtctggctgcacaagctcagcgtggtggccaccttcctaattgagatcgctgtgccgcccctgttcttcgcccccattcgacgcctgcgcttggctgctttctactcgcaggtgctgctgcaggtcctgattatcatcaccggcaactacaacttcttcaacctgatgacgctggtgcttaccactgcgctgctggacgaccagcacctggctgctgagcctggccacggcagccgcaagaagacggccacctcctggcccaaggccctgctggccaccctgtcgctgctgctggaactagccgtctacgggcttctggcctatggcactgtgcactactttggcctggaggttgactggcagcagcgcaccatccactccagaaccactttcaccttccaccagttttctcagtggctgaagacactgacgctgcccactgtgtggctgggtgtggcctccctggtctgggagctgctgagtgccctgtggaggtggacccaggtgcggggctggctacggaagctcagtgctgtagtccaactgtcccttgtgggcactgcgaccgtggccttgttcctgattagcctggtgccgtactcctacgtggagcccgggacccacgggcgcctctggaccggggcccaccgcctgtttggtgccgtggagcacctacagctggccaactcctacggcctcttccgccgcatgactgggcttggtggacggcctgaggtggtgctggagggcagttacgacggccaccactggacggagatcgagttcatgtacaagcctgggaacctgagccggccgcccccggttgtggtgccccaccagccacgcctggactggcagatgtggtttgcagccctgggcccacacacgcacagcccgtggttcacaagcctggtcttgcgcctgctgcagggcaaggagccagtgatccgccttgtccagagccaagtggccaggtatcccttccacaagcagccgcccacctacgtccgagcccagcgctacaagtactggttctcccagcctggggagcagggccagtggtggcggcgccagtgggtggaggagttcttcccatccgtgtccctgggggaccccacgctggagacgctgctcaggcagtttggactacaggagaaaagcccacctcgcacccgcagcgccaacagcaccctggcccaggccctccactggactcgctctcagctgtctcccctggaggcccccgccctgctctgggggctcctcatggccgtgggggctgtcagatttgtgcaagccctgctagcaccctgttctctccggtcctccccgctggcaccagtcagcggggagaagcgcaggccagcctcccagaaagactccggagctgcctccgaacaggccaccgcagcccccaacccctgctccagtagttcgaggaccacccggcgaaagaagtagctgtgttctcccagctgcacgtcctgagagggccaggtcgccgggagtgctctggcctccggcaggacaggacccagccactgtgccttagctgaccctgcagggccaggcacaggttggggggctgcccctggggtttgcagggtgctgcattgagggctccaggccccacccccacgccagccatgcccctccccaggactcccactattgcctctgtgattggcccaggaggaaaacacgaccaagctcaagacccttcccctgccctgggctgtgggggtctgagtctagagcccccaaccctaggccccgtgccagaggggaagaggctgactcccaggggaagaggggaagcactgtcatcttccacgtcatcttcacaccagcccatcctgccctttagatctgggcaccaataaaggcgtcttttgtgcttggc

SEQ ID NO: 149409 - DNA, 10441 bp, Homo sapiens
  Payload ID: 9496
  Gene Symbol: LIPG
  Gene Name: lipase, endothelial
  Uniprot ID: Q9Y5X9
  ENST ID: ENST00000261292
  CDS Start-End: 279-1781
aaaaactacctctataggagcgtgacagcagcgagtccttgcctcccggcggctcaggacgagggcagatctcgttctggggcaagccgttgacactcgctccctgccaccgcccgggctccgtgccgccaagttttcattttccaccttctctgcctccagtcccccagcccctggccgagagaagggtcttaccggccgggattgctggaaacaccaagaggtggtttttgttttttaaaacttctgtttcttgggagggggtgtggcggggcaggatgagcaactccgttcctctgctctgtttctggagcctctgctattgctttgctgcggggagccccgtaccttttggtccagagggacggctggaagataagctccacaaacccaaagctacacagactgaggtcaaaccatctgtgaggtttaacctccgcacctccaaggacccagagcatgaaggatgctacctctccgtcggccacagccagcccttagaagactgcagtttcaacatgacagctaaaacctttttcatcattcacggatggacgatgagcggtatctttgaaaactggctgcacaaactcgtgtcagccctgcacacaagagagaaagacgccaatgtagttgtggttgactggctccccctggcccaccagctttacacggatgcggtcaataataccagggtggtgggacacagcattgccaggatgctcgactggctgcaggagaaggacgatttttctctcgggaatgtccacttgatcggctacagcctcggagcgcacgtggccgggtatgcaggcaacttcgtgaaaggaacggtgggccgaatcacaggtttggatcctgccgggcccatgtttgaaggggccgacatccacaagaggctctctccggacgatgcagattttgtggatgtcctccacacctacacgcgttccttcggcttgagcattggtattcagatgcctgtgggccacattgacatctaccccaatgggggtgacttccagccaggctgtggactcaacgatgtcttgggatcaattgcatatggaacaatcacagaggtggtaaaatgtgagcatgagcgagccgtccacctctttgttgactctctggtgaatcaggacaagccgagttttgccttccagtgcactgactccaatcgcttcaaaaaggggatctgtctgagctgccgcaagaaccgttgtaatagcattggctacaatgccaagaaaatgaggaacaagaggaacagcaaaatgtacctaaaaacccgggcaggcatgcctttcagagtttaccattatcagatgaaaatccatgtcttcagttacaagaacatgggagaaattgagcccaccttttacgtcaccctttatggcactaatgcagattcccagactctgccactggaaatagtggagcggatcgagcagaatgccaccaacaccttcctggtctacaccgaggaggacttgggagacctcttgaagatccagctcacctgggagggggcctctcagtcttggtacaacctgtggaaggagtttcgcagctacctgtctcaaccccgcaaccccggacgggagctgaatatcaggcgcatccgggtgaagtctggggaaacccagcggaaactgacattttgtacagaagaccctgagaacaccagcatatccccaggccgggagctctggtttcgcaagtgtcgggatggctggaggatgaaaaacgaaaccagtcccactgtggagcttccctgagggtgcccgggcaagtcttgccagcaaggcagcaagacttcctgctatccaagcccatggaggaaagttactgctgaggacccacccaatggaaggattcttctcagccttgaccctggagcactgggaacaactggtctcctgtgatggctgggactcctcgcgggaggggactgcgctgctatagctcttgctgcctctcttgaatagctctaactccaaacctctgtccacacctccagagcaccaagtccagatttgtgtgtaagcagctgggtgcctggggcctctcgtgcacactggattggtttctcagttgctgggcgagcctgtactctgcctgacgaggaacgctggctccgaagaggccctgtgtagaaggctgtcagctgctcagcctgctttgagcctcagtgagaagtccttccgacaggagctgactcatgtcaggatggcaggcctggtatcttgctcgggccctagctgttggggttctcatgggttgcactgaccatactgcttacgtcttagccattccgtcctgctccccagctcactctctgaagcacacatcattggctttcctatttttctgttcattttttaattgagcaaatgtctattgaacacttaaaattaattagaatgtggtaatggacatattactgagcctctccatttggaacccagtggagttgggatttctagaccctctttctgtttggatggtgtatgtgtatatgcatggggaaaggcacctggggcctgggggaggctataggatataagcattagggaccctgaggctttaagtggtttctatttcttcttagttattatgtgccaccttcttagttattatgtgccacctcccctatgagtgacgtgtttgatcactagcagaatagcaagcagagtatcattcatgctggggccagaatgatggccggttgccagatataactgctttggagcaaatctcttctgtttagagagatagaagttatgacatatgtaatacacatctgtgtacacagaaaccggcacctgccagacagagctggttctaagatttaatacagtgctttttttcctctttgaaatattttactttaataccagtgccttttcttgttgaacttcttggaaaagccaccaattctagatcttgatttgaattaatacacacaatatctgagacacttacacttttcaaaagatttgtgtatgcattgcctaattagagtagggggagaagggcaactattattatccctattttacaaaactgaggcttagtgaggttcagccacatgcctagacttatatactagttagtggtgcagccagggagaggactcagatttcctggaggcaaagtctatctctgaaactccatgaagacttttgcagccagttcccaccaatatgccccagacgtgagacaaacaaggacttttttttttatatagagccatccataaaatcctaagcccttttattaatgtataaccaggagaacatctgtgccaacggttggactttttatggctgagattcgggaggaagtgtgacaccaagcaggagaggaagaatgattttctttgtacttaggttttctaaggacattgttttaatctgtatcgtgccaaagttgtatcactgttaaacttctgaagacataaccagttgagtcttatttcaagatatgttctcaagccaattgtgtgcttctcttgtttctgtgattgctttctagccaaagcgaagcttgtacaggttgagtatcccttatccaaaatgcttggaaccagaagtgtttcaaattttagattattttcagattttggaatgtttgcatatacataatgagatattttgggaataggacccgagcctaaacacaaaattcattgatgtgtcagttacaccttatccacatagcctgagggtaattttatacgatattttaaatagttgtgtacatgaagcatggtttgtggtaacttatgtgaggggttttcccattttttgtcttgttggtgctcaaaaagttttggattttggagcatttcggattttggatttttggattagggttgctcaacccatattattggctgtacatcctggtcacttctgacttctgtttttactaatggaagctttgcaaattgaattctcagtgagttgtatatttatacacctggcttgaagccttaattgtatataatgatgctttttaaaaaatgctatttggaagactatttatttctcgtgtatataatgtatataaaaaaatatggttagtgtttacctaaggttaaccaatttcaagattaaaatttttaaatagtaaaataataaaaaattataaagttcttaatggtctgacaactcaattttttttttttttttttttttttttgagacagagcctctctctgtcacccaggctggagtgcagtggcaatcttggctcactacaacctctgcctcctgggctcaggtggtcctcccacctcagccttctgagtagctgggattacagagatgcgtcaccatgtctggctaatttttgtatttttagtagagatggggtttcgccatgttggccaggctggtcaggctgggttcgaactcctggcctcaagtgatccgcctgcctcagcctctgaaagttctgagattataggtgtgagccaccgtgcctggccaattcttaaagtttgaaagaatatagctgccccaacctagagtctgacaaaaagttactctaatataaggcatattctttatttgacactcatcgttagcagaagtggacagcaattcactaaagaaccagaacaagaacatcatttcactgaagacgagaagaaaaattatttcaattgtagcagcttgaaggcctgaaggtggatgttaggaagaacagggagcatggctggacactggggagcattagtgagattattaggtttggttgaattggaactagatatcagtgacttagaccagagggaagctgatttctctattggttaaagtcccagctggtagtaaggttctattctacaggccaagagggctgcaggttcttagtttttcactgtgccattcatggggtattcctcgcatccccacagcccaggggtcccctaccagccaatggaaagccagaaaagggaagggatgaacagtctcctcttaaagacatgactgagaagttgcttacattctattggccagaaataaatccatggtcacatgacaggctgggaaatacagtctttatttagggtgcccatgggccctgctgaagatccaattactatttatttaaaattgacatataataattgtacatatttgtggggaaaatagtgatgtttcgatacatacaaggtatagtgatcatgttggaataattagcatacccatcctttcaaacatgtatcatttctttgtgttgggaacattcaatatcctccttctagttacttgaaaccatattttattaactctagttttacccttcagtggtataggacactagaatttattcctcctgtctagctgtaatcttgtttgtttcgtttggtgttttttgtttttttgtttttttttgagatggagtcttgctctgtagcccaggctggagtgcaggggcatgatcttggcccactgcaacctccgcctcctgggttcaagtgattctcctgcctcagcctcccaagtagctgggattacaggcatgcaccaccacacccagctaatttttgtatttttagtagagacaaggtttcaccatgttggccaggctggtcttgaactcctgacctcaagtgatccacctacctcagccttccaaactgtcgggattaccggtgtgagccaccgggcccagccactagctgtaattttgtatcttttaacaattccgtccctatttcccctttccccctaccaattactatttattaaaagggaaattggatcttgccatccgtttatcaggaattagttttttctctgctaaagccagcgagatagaccagagtaccctttaaatgattaaatcctgtagtcaatttttagtaatcttaaattgatctatgactatgaagtataatgcattacatcagtttgactttatttctggtcttaagtgtgaaaacatttctaaatgacaaggaagctctttataaagggctttagtgatggtggaaactccactgtccatctctaccaggacattctgaaaccaggcttgataatggctgtagggagttgggttagacaataagagataagttcttaacttggttcagatgtcagaggaaagcagaaaatggtgtctctggcatagtaaagaaaattgttgaaatttcccaaaggaagagtcatagcctggatgactgcaagtgccttctttggcttgggggttcagttactagttagagtcaggggaacttccacaggacttcctttgactctccaaacaagctgaagccccagaccccttggaaggatggatacaaagtaggtactagaacagtctttgtcatcaaatatggtatttctcaggtgtcacctctgtgttcagagctaccctgagccctctgccatgtaagctctctgatggcacagatttttatctggcttgttttctgccgttatcttagaagctagaatagtgtctggaacatcatgggtattcaatgaatatttaaataaatagatgaaattagatataagaaactaggtgcttaaacaggcaggaggtaatctgggaaaagagcagttagtttggaatcagaattcttggtgtgtcatccagcattatgtgagttttaggctaaatacagcctttctgagtctctatctgctcatttaagaaacagagacaatactgctcagggttgttgtgaatgttaaaggtacatggtaaaaaagaaagtatttgtgttttgtaaacatttgaattgataagaggacagtgtgagacaaaaataaaatcctgggtgggcacggtggctcacccctgtaatctcagcactttgggaggctgagatgggaggatcacgaggtcaggagtgcgagaccagcctggccaatatggtgaaaccacgtctctgctaaaaatacaaaaattagctgggcgtggtggcacgtgcctgtagtcccagctacgccggaggctgaggcagaagaatcgctcgaacctgggagatggagtttgcagtgagctgagatcacgccactgcactccagcctaggcaactgagtgagactccatctcaaaataaaataaaatagaatagaataaaataaaatcctttccacatatatgcggaaattttatgtatgataaaaggggcctattagtctttgggaaaggaatggatggatgatgagaaagtaggctcatttgacaaagagaaacaaaattagattcctattttaacacgcaacaaagatgaattccaaaatacctattgggtactatgcttattacctgagtgacgaaataatctgtacagcaaactcctgtgacacaccatttaactacataacaaacctgcatacgtacccctgaaactaaagtagaagttaaaaccatcaacccccccaaaacaaaaatgaattccatctgaataaaaggtataaatgtgaaagtcatcatgctaatagatattatgaaatataaattcaaaacctgtataaaaactgaaaaaatgtaaaacgtcacaattagaataagaaaatttaaatagaacaatgaatattaaataaactaaaatgctaataaaatgtactccttagggccaggtgcggtggctcacacctgtaatcccagcactttgggaggccgaggtgggtggatcacctgaggtcaggagtttgagaccagcctggccaatgtggtgaaaccctgtctctactaaaaatacaaaaagttagccaggtgtgatggtgggcacctgtaatcccagctacttgggaggctgaggtaggaaaatcacttgaacccagaaggcagaagttgcagtgagcctagatcacggcactacactccagcctgggcaacaagagcaaatctctatctcaaaaaaaaaaaaaaaaaaaaaaaggccacagaaatgtccatccagcaggtggacaattacccttttgtcagccgttcctctgttgctgaccattagatccacatttcttttctgtccgccctggtcccctggtgccccctttcctggcccctgtgacatattgtcatgtagctccaagtatttccccccctcatatccctcaagtgctccattttccaaatgcatttgacttcctactctcttagccccagctctctggtattctgtgtagctgacttccacaagggatctgttgggagcttgtaactgaactgaagtcatgcacattgtcaatggctagtagacctttacctggtccagagttgtctgcattgtttaaagaagacgtttgttaatccaaattaatctttgatttgcatggaggcagtaggtcaaatcaaaaggaaattttcctctccctagcaagcaaactcagaaacaaacaaacaaacgaaaaccaagaaacaaaaggaaaggttcctgttgggatagagaaacagtggagcagggcagccaccttacacataggctagatctgcttgggaatctttcttctaatcgaggcccctaaaatattcctgattttcacagttgatttcatttcttccctcctgaacttacagagcctttcagtaaacaccagtatttgtccctccccgtgtatgcccagtggtttccatggcagcaacggttgccatagagaggtgaagagaggtgtcggtgccctcttttgtaactgtgggttatctatagattgggggtggcctctcctaaaaaagactaatatgtaaataaaaggaataagaatcaaacaaatataaatcagggctcaagtcatttgttttcctaaacctttgtggttatccataccatttaaccttgactttccttaaatcataccggtgcgtgtgtgtgtgcagagggaaagggctgcaagaagactctggaagctaggacaggtctcagcaggtgagggctcaggcccagaggccagctggggcagcagggagcagagttatctgggccatttgctaattatctcagcccagacgagtctgcacgctatgtggtttaataccttcaccagaggcaaatggttttggactcacaagaattgctcatggccagaggcaatggacagatgccatatgagaaagggctgaggccaggaacagaggcagggttatctcactggaatggagaagctaaaatgacattatctttacttctgccctggttattatcccaaggcaacttcagtgggcttgttttgaagtcaaagcctcaactatttattgtgagggagataattcattttcattttcctgccagagatgtcagtcttactattcatcctgtatcctctattagatacacagagcttcttccttctgcttaggctgccccaaattccatataggattctttttgaagaatatatatcatccaaaaagaggtcctaggaaatgtggcttcacaaccctggggtttgtttccctggctgctgtctctctctctctcttttttaattttttttggagacacggtatcactgtgtggcccaggctggagtgtggtggcgccatcactgctcactgcagcctcgacctcctgggctcaagcagtcctcccacttcagcctcccaaatagctgggactacaggtgtactccactatgcctggctacattttgaattttttgtagagatggggttttgccatgttgctcaggttggtctcaaactcctgggctcaagcaatccacccaacttggcctcccaaagtgctgggattagaggcatgagccatcaggcctggccatgctgcctctctctccttcaaggtagacttcctctttccttccccttctccctgcttctttctccttctcctctccttctcctcttctccttcttcttctcacagctttttattgacttataacaggcacacaataaactgcacacaggtaaatcatataatttgacattttggtacaggaaatcatcatgaaactgaaagcattaccacatcgagattgtgaacataccaccaccagaagttttcttgtgcccctttgtaattcttcccactgccctctccccaggttgtccctgatctgctttttgtccttgtagattagttgcattttctagaattttgtataagtggagtgtatctacagtatgttctcttttgtgtctgccttcttgtactcagcataattattttgagattcatccacgtctttgcatggatcagtcatctgttccattttattgctaagcagtattccactgtatagataaataacattttgtttatccgtttacttgttgatgaactttaagttgtttccagttttgagttattagagtaatgctactatgaacatttgcatatgaatccttgtatggacatgaactttcatttcttttgggagtaggatagctggatcatatggaatgtatatgtttaacttttaaataaactgccaaactgttttcc

SEQ ID NO: 149410 - DNA, 1760 bp, Homo sapiens
  Payload ID: 9496
  Gene Symbol: LIPG
  Gene Name: lipase, endothelial
  ENST ID: ENST00000427224
  CDS Start-End: 250-1530
agcgagtccttgcctcccggcggctcaggacgagggcagatctcgttctggggcaagccgttgacactcgctccctgccaccgcccgggctccgtgccgccaagttttcattttccaccttctctgcctccagtcccccagcccctggccgagagaagggtcttaccggccgggattgctggaaacaccaagaggtggtttttgttttttaaaacttctgtttcttgggagggggtgtggcggggcaggatgagcaactccgttcctctgctctgtttctggagcctctgctattgctttgctgcggggagccccgtaccttttggtccagagggacggctggaagataagctccacaaacccaaagctacacagactgaggtcaaaccatctgtgaggtttaacctccgcacctccaaggacccagagcatgaaggatgctacctctccgtcggccacagccagcccttagaagactgcagtttcaacatgacagctaaaacctttttcatcattcacggatggacgatgagcggtatctttgaaaactggctgcacaaactcgtgtcagccctgcacacaagagagaaagacgccaatgtagttgtggttgactggctccccctggcccaccagctttacacggatgcggtcaataataccagggtggtgggacacagcattgccaggatgctcgactggctgcaggagaaggacgatttttctctcgggaatgtccacttgatcggctacagcctcggagcgcacgtggccgggtatgcaggcaacttcgtgaaaggaacggtgggccgaatcacagcaatcacagaggtggtaaaatgtgagcatgagcgagccgtccacctctttgttgactctctggtgaatcaggacaagccgagttttgccttccagtgcactgactccaatcgcttcaaaaaggggatctgtctgagctgccgcaagaaccgttgtaatagcattggctacaatgccaagaaaatgaggaacaagaggaacagcaaaatgtacctaaaaacccgggcaggcatgcctttcagagtttaccattatcagatgaaaatccatgtcttcagttacaagaacatgggagaaattgagcccaccttttacgtcaccctttatggcactaatgcagattcccagactctgccactggaaatagtggagcggatcgagcagaatgccaccaacaccttcctggtctacaccgaggaggacttgggagacctcttgaagatccagctcacctgggagggggcctctcagtcttggtacaacctgtggaaggagtttcgcagctacctgtctcaaccccgcaaccccggacgggagctgaatatcaggcgcatccgggtgaagtctggggaaacccagcggaaactgacattttgtacagaagaccctgagaacaccagcatatccccaggccgggagctctggtttcgcaagtgtcgggatggctggaggatgaaaaacgaaaccagtcccactgtggagcttccctgagggtgcccgggcaagtcttgccagcaaggcagcaagacttcctgctatccaagcccatggaggaaagttactgctgaggacccacccaatggaaggattcttctcagccttgaccctggagcactgggaacaactggtctcctgtgatggctgggactcctcgcgggaggggactgcgctgctatagctcttgctgcctctcttgaatagctctaactccaaacctctgt

SEQ ID NO: 149411 - DNA, 1453 bp, Homo sapiens
  Payload ID: 9496
  Gene Symbol: LIPG
  Gene Name: lipase, endothelial
  Uniprot ID: Q9Y5X9
  ENST ID: ENST00000580036
  CDS Start-End: 223-1287
ggacgagggcagatctcgttctggggcaagccgttgacactcgctccctgccaccgcccgggctccgtgccgccaagttttcattttccaccttctctgcctccagtcccccagcccctggccgagagaagggtcttaccggccgggattgctggaaacaccaagaggtggtttttgttttttaaaacttctgtttcttgggagggggtgtggcggggcaggatgagcaactccgttcctctgctctgtttctggagcctctgctattgctttgctgcggggagccccgtaccttttggtccagagggacggctggaagataagctccacaaacccaaagctacacagactgaggtcaaaccatctgtgaggtttaacctccgcacctccaaggacccagagcatgaaggatgctacctctccgtcggccacagccagcccttagaagactgcagtttcaacatgacagctaaaacctttttcatcattcacggatggacgatgagcggtatctttgaaaactggctgcacaaactcgtgtcagccctgcacacaagagagaaagacgccaatgtagttgtggttgactggctccccctggcccaccagctttacacggatgcggtcaataataccagggtggtgggacacagcattgccaggatgctcgactggctgcaggagaaggacgatttttctctcgggaatgtccacttgatcggctacagcctcggagcgcacgtggccgggtatgcaggcaacttcgtgaaaggaacggtgggccgaatcacaggtttggatcctgccgggcccatgtttgaaggggccgacatccacaagaggctctctccggacgatgcagattttgtggatgtcctccacacctacacgcgttccttcggcttgagcattggtattcagatgcctgtgggccacattgacatctaccccaatgggggtgacttccagccaggctgtggactcaacgatgtcttgggatcaattgcatatggaacaatcacagaggtggtaaaatgtgagcatgagcgagccgtccacctctttgttgactctctggtgaatcaggacaagccgagttttgccttccagtgcactgactccaatcgcttcaaaaaggggatctgtctgagctgccgcaagaaccgttgtaatagcattggctacaatgccaagaaaatgaggaacaagaggaacagcaaaatgtacctaaaaacccgggcaggcatgcctttcagaggtaaccttcagtccctggagtgtccctgaggaaggcccttaatacctccttcttaataccatgctgcagagcagggcacatcctagcccaggagaagtggccagcacaatccaatcaaatcgttgcaaatcagattacactgtgcatgtcctaggaaagggaatctttacaaaataaacagtgtggacccctttt

SEQ ID NO: 149412 - DNA, 565 bp, Homo sapiens
  Payload ID: 9496
  Gene Symbol: LIPG
  Gene Name: lipase, endothelial
  ENST ID: ENST00000579750
  CDS Start-End: 1-565
ctctgctattgctttgctgcggggagccccgtaccttttggtccagagggacggctggaagataagctccacaaacccaaagctacacagactgaggtcaaaccatctgtgaggtttaacctccgcacctccaaggacccagagcatgaaggatgctacctctccgtcggccacagccagcccttagaagactgcagtttcaacatgacagctaaaacctttttcatcattcacggatggacgatgagcggtatctttgaaaactggctgcacaaactcgtgtcagccctgcacacaagagagaaagacgccaatgtagttgtggttgactggctccccctggcccaccagctttacacggatgcggtcaataataccagggtggtgggacacagcattgccaggatgctcgactggctgcaggtactgggggatgagagggagtctcctgtcaccagcaggatctcaaacccaatcttcttaagaaatgcaggtcatgcatctgttgccatgaacttctggagtctgataaaaatctttgagattaaaagttttattgaattaa

SEQ ID NO: 149413 - DNA, 505 bp, Homo sapiens
  Payload ID: 9496
  Gene Symbol: LIPG
  Gene Name: lipase, endothelial
  ENST ID: ENST00000583083
  CDS Start-End: 433-505
cagacactgggctctggccacgcgtcttagactccaaatctcggctcactggtccctttgaggaggtcgcctggtgttcccgtagccctccaccccaccgtaggagagcgcctgccacgagctccgcgcctcgctaagtgctttgctacgtgaactcttagttttcccaacatccctaagccgccgatacattatcacccacgtattgcggacgagagaaccgcctcggagaagctggctggctcgcttggagttttgcagctagtggcggagcgagcattccgagcagataagctccacaaacccaaagctacacagactgaggtcaaaccatctgtgaggtttaacctccgcacctccaaggacccagagcatgaaggatgctacctctccgtcggccacagccagcccttagaagactgcagtttcaacatgacagctaaaacctttttcatcattcacggatggacgatgagcggtatctttgaaaactggctgcacaaac

SEQ ID NO: 149414 - DNA, 2323 bp, Homo sapiens
  Payload ID: 9496
  Gene Symbol: LIPG
  Gene Name: lipase, endothelial
  ENST ID: ENST00000577628
  CDS Start-End: 988-2160
aatgaggcgaggtcggaacaggatctgctggctccggctcggtttcctcgcacaggtctctccagctggatcctcgacgctagggaggaaggggcgcgggactgctgtgggggttttccctccccaggcaggggcaggacctgttccgggcgactgcagggttaagggtatcgtcttaaagagccggatcctcccggctggagcgaggctggatggcgggacgcagcctctcagcctctcgtacccgccctgcgtccgcagtggttgttggcgcagccgccccgtcggtgttccgggctcagtccccgctccccagcgccagacgcagactccgggccaagttctccctccgctcgctgctttctgccgcaggacccggatcaataaagggaaggagagccgggaggaaatgatggagaacagagagaaaggagatgcttgatttcactcgccaaggagtgagtgctcatcggcagacactgggctctggccacgcgtcttagactccaaatctcggctcactggtccctttgaggaggtcgcctggtgttcccgtagccctccaccccaccgtaggagagcgcctgccacgagctccgcgcctcgctaagtgctttgctacgtgaactcttagttttcccaacatccctaagccgccgatacattatcacccacgtattgcggacgagagaaccgcctcggagaagctggctggctcgcttggagttttgcagctagtggcggagcgagcattccgagcaggtactgtgcgatcctccagcgccggccgcagctcacagccccttagctccgccgggttattgtgcggccgcgccttctgcacctgttgcggccctcgctaggcgggaagggagggagaagaggaggacaaaggggatgaccaggtggctctcccccgacggactcccggcccagggagcggatagaccactcccagagagagtgtggctttgagccttggagaggatgctctccttctccagggatcgcctccccagcggacgcagagtttcagggaaatgtccgcctccgccacttgggatggcagtggggagaggaggatctgggtgtccggaggagggcagtgggagaaagctggagctgctggagtcgcagctgcctgcggagcgggcccgggaggaagcggggccgagcgtgcggcgtccacgcgataagctccacaaacccaaagctacacagactgaggtcaaaccatctgtgaggtttaacctccgcacctccaaggacccagagcatgaaggatgctacctctccgtcggccacagccagcccttagaagactgcagtttcaacatgacagctaaaacctttttcatcattcacggatggacgatgagcggtatctttgaaaactggctgcacaaactcgtgtcagccctgcacacaagagagaaagacgccaatgtagttgtggttgactggctccccctggcccaccagctttacacggatgcggtcaataataccagggtggtgggacacagcattgccaggatgctcgactggctgcaggagaaggacgatttttctctcgggaatgtccacttgatcggctacagcctcggagcgcacgtggccgggtatgcaggcaacttcgtgaaaggaacggtgggccgaatcacaggtttggatcctgccgggcccatgtttgaaggggccgacatccacaagaggctctctccggacgatgcagattttgtggatgtcctccacacctacacgcgttccttcggcttgagcattggtattcagatgcctgtgggccacattgacatctaccccaatgggggtgacttccagccaggctgtggactcaacgatgtcttgggatcaattgcatatggaacaatcacagaggtggtaaaatgtgagcatgagcgagccgtccacctctttgttgactctctggtgaatcaggacaagccgagttttgccttccagtgcactgactccaatcgcttcaaaaaggggatctgtctgagctgccgcaagaaccgttgtaatagcattggctacaatgccaagaaaatgaggaacaagaggaacagcaaaatgtacctaaaaacccgggcaggcatgcctttcagaggtaaccttcagtccctggagtgtccctgaggaaggcccttaatacctccttcttaataccatgctgcagagcagggcacatcctagcccaggagaagtggccagcacaatccaatcaaatcgttgcaaatcagattacactgtgcatgtcctaggaaagggaatctttacaaaataaacagtgtggacccct

SEQ ID NO: 149415 - DNA, 1484 bp, Homo sapiens
  Payload ID: 9497
  Gene Symbol: LIPJ
  Gene Name: lipase, family member J
  Uniprot ID: Q5W064
  ENST ID: ENST00000371939
  CDS Start-End: 315-1415
agagactatgagggttcactatctgtttgctggaagatatacaagacttttgaggataatacttaaatgaagatagaccggatgtataatatgctttttcttagctttcctatgactctacttagcaacttttgctaaaagaaacacaatatatgactgactactttgaagacacatatattggacacttaaaatcaacaaaagcagagaggtcccaaacgtggtatcttttcacaatgatgtattttatccgaattcttggaattactcatggtgtctttcaaaattaaagatctgtgaaacctgaagcagatatgaatattagccagattatttcctactggggctaccctgatgaagaatatgatattgtaaccgaagatggttatatccttggcctttatagaattccttattggaggacagacaataataaaaatctagctcagagggttgttgtatacttgcaacatggtttgcttacatctgccagcagctggatttccaatcttcccaacaatagtctgggcttcattctggcagatgctggttatgatgtgtggatgggaaatagcagaggaaatacctggtccaggaaacacttgtacctagaaacgagttccaaagaattctgggctttcagttttgatgagatggcaaaatatgaccttccagcctctattgatttcactgtgaagcaaaccagacaagaggaaatattttatgtaggccattcacagggtactactattggtttcataacattttctactatatcaaagatagctgaaagaatcaaaatattttttgctttagcaccagttttttccacaaagtacttaaaaagtcctttaattagaatgacatacaaatggaagtcaatagtcatggctttttcaggcaacaaagacttcttgcctaaaacctcatttaaaaaattcattggttcaaagctgtgtccactacagatttttgataagatttgcctcaatatcttgtttatgatgtttggatatgacccaaaaaacttaaatatgagtcgtttggatgtgtatttttcacacaacccagcaggaacatctgttcaaaatatgcttcattggagtcagcttttaaattctactcatttgaaagcttatgactggggcagtcctgatctgaacttggttcattataatcagacaacgtctccattatacaacatgacaaacatgaatgtggcaactgcaatttggaatggtaaaagtgacttgttggctgaccctgaagacgttaacattttacattctgaaatcacaaaccacatttattataaaactatttcttactacaatcatatagactctttgtttggattagatgtctatgatcaagtttaccatgaaatcattgatattatccaagacaatctataaagaaccatggcgctgtgtgtttaaagatctacatcattcctaatgaaatccaattcttattttttttta

SEQ ID NO: 149416 - DNA, 462 bp, Homo sapiens
  Payload ID: 9497
  Gene Symbol: LIPJ
  Gene Name: lipase, family member J
  ENST ID: ENST00000531458
  CDS Start-End: 1-462
tatgtaggccattcacagggtactactattggtttcataacattttctactatatcaaagatagctgaaagaatcaaaatattttttgctttagcaccagttttttccacaaagtacttaaaaagtcctttaattagaatgacatacaaatggaagtcaatagtcatgagtcgtttggatgtgtatttttcacacaacccagcaggaacatctgttcaaaatatgcttcattggagtcagcttttaaattctactcatttgaaagcttatgactggggcagtcctgatctgaacttggttcattataatcagacaacgtctccattatacaacatgacaaacatgaatgtggcaactgcaatttggaatggtaaaagtgacttgttggctgaccctgaagacgttaacattttacattctgaaatcacaaaccacatttattataaaactatttcttactac

SEQ ID NO: 149417 - DNA, 1230 bp, Homo sapiens
  Payload ID: 9498
  Gene Symbol: LIPK
  Gene Name: lipase, family member K
  Uniprot ID: Q5VXJ0
  ENST ID: ENST00000404190
  CDS Start-End: 1-1200
atgtggcagcttttagcagcagcatgctggatgcttcttcttggatctatgtatggttatgacaagaaaggaaacaatgcaaaccctgaagctaatatgaatattagccagattatttcttactggggttatccttatgaagagtatgatgttacaacaaaagatggttatatccttggaatttataggattccacatggaagaggatgcccagggaggacagctccaaagcctgctgtgtatttgcagcatggcttaattgcatctgccagtaactggatttgcaacctgcccaacaacagtttggctttccttctggcagatagtggttatgacgtgtggttggggaacagccgaggaaacacttggtccagaaaacaccttaaattgtcaccgaaatcaccggaatactgggccttcagtttggatgagatggctaaatatgaccttccagccacaatcaattttatcatagagaaaactggacagaagcgactctactacgtgggccactcacaaggcaccaccatagcttttatagcattttctacaaacccagaactggctaaaaagattaagatattttttgcactggctccagttgtcacagttaaatacacccaaagtcctatgaaaaaactaacaaccctttccaggcgagtagttaaggtgttgtttggtgacaaaatgttccaccctcatacattgtttgaccaattcattgccaccaaagtgtgcaatcgaaagctattccgtcgtatttgcagcaacttcctatttactctgagtggatttgatccgcaaaacttaaatatgagtcgcttggatgtttatttgtcacacaatcctgcgggaacatctgttcagaatatgctgcactgggctcaggctgttaattctggtcagctccaagcttttgattggggaaactctgatcagaacatgatgcacttccatcagcttacacctcctttatacaacattactaagatggaagttccaacagcaatatggaatggtggacaggacattgtggctgatcccaaggatgttgaaaatttacttcctcaaattgctaaccttatttattacaagctgattccacactacaatcatgtggatttttaccttggagaggatgcacctcaggaaatttaccaagacctaattatattgatggaagaatatttacaaaattaaatgcactttactttctctaagcaagtggat

SEQ ID NO: 149418 - DNA, 1439 bp, Homo sapiens
  Payload ID: 9499
  Gene Symbol: LIPM
  Gene Name: lipase, family member M
  Uniprot ID: Q5VYY2
  ENST ID: ENST00000404743
  CDS Start-End: 168-1439
ctactttgtgttctttccctaccaactaagcttgcctaatttgcttcagaattggaagagggaattgcagcaggaaaatatgtgaagagtttttaaacccacaaattcttcttactttagaattagttgttacattggcaggaaaaaataaatgcagatgttggaccatgttggaaaccttgtcaagacagtggattgtctcacacagaatggaaatgtggcttctgattctggtggcgtatatgttccagagaaatgtgaattcagtacatatgccaactaaagctgtggacccagaagcattcatgaatattagtgaaatcatccaacatcaaggctatccctgtgaggaatatgaagtcgcaactgaagatgggtatatcctttctgttaacaggattcctcgaggcctagtgcaacctaagaagacaggttccaggcctgtggtgttactgcagcatggcctagttggaggtgctagcaactggatttccaacctgcccaacaatagcctgggcttcattctggcagatgctggttttgacgtgtggatggggaacagcaggggaaacgcctggtctcgaaaacacaagacactctccatagaccaagatgagttctgggctttcagttatgatgagatggctaggtttgaccttcctgcagtgataaactttattttgcagaaaacgggccaggaaaagatctattatgtcggctattcacagggcaccaccatgggctttattgcattttccaccatgccagagctggctcagaaaatcaaaatgtattttgctttagcacccatagccactgttaagcatgcaaaaagccccgggaccaaatttttgttgctgccagatatgatgatcaagggattgtttggcaaaaaagaatttctgtatcagaccagatttctcagacaacttgttatttacctttgtggccaggtgattcttgatcagatttgtagtaatatcatgttacttctgggtggattcaacaccaacaatatgaacatgagccgagcaagtgtatatgctgcccacactcttgctggaacatctgtgcaaaatattctacactggagccaggcagtgaattctggtgaactccgggcatttgactgggggagtgagaccaaaaatctggaaaaatgcaatcagccaactcctgtaaggtacagagtcagagatatgacggtccctacagcaatgtggacaggaggtcaggactggctttcaaatccagaagacgtgaaaatgctgctctctgaggtgaccaacctcatctaccataagaatattcctgaatgggctcacgtggatttcatctggggtttggatgctcctcaccgtatgtacaatgaaatcatccatctgatgcagcaggaggagaccaacctttcccagggacggtgtgaggccgtattgtga

SEQ ID NO: 149419 - DNA, 1197 bp, Homo sapiens
  Payload ID: 9499
  Gene Symbol: LIPM
  Gene Name: lipase, family member M
  Uniprot ID: Q5VYY2
  ENST ID: ENST00000539337
  CDS Start-End: 1-1152
atgaccaggcctttagaccgcaaacagagtgaaatcatccaacatcaaggctatccctgtgaggaatatgaagtcgcaactgaagatgggtatatcctttctgttaacaggattcctcgaggcctagtgcaacctaagaagacaggttccaggcctgtggtgttactgcagcatggcctagttggaggtgctagcaactggatttccaacctgcccaacaatagcctgggcttcattctggcagatgctggttttgacgtgtggatggggaacagcaggggaaacgcctggtctcgaaaacacaagacactctccatagaccaagatgagttctgggctttcagttatgatgagatggctaggtttgaccttcctgcagtgataaactttattttgcagaaaacgggccaggaaaagatctattatgtcggctattcacagggcaccaccatgggctttattgcattttccaccatgccagagctggctcagaaaatcaaaatgtattttgctttagcacccatagccactgttaagcatgcaaaaagccccgggaccaaatttttgttgctgccagatatgatgatcaagggattgtttggcaaaaaagaatttctgtatcagaccagatttctcagacaacttgttatttacctttgtggccaggtgattcttgatcagatttgtagtaatatcatgttacttctgggtggattcaacaccaacaatatgaacatgagccgagcaagtgtatatgctgcccacactcttgctggaacatctgtgcaaaatattctacactggagccaggcagtgaattctggtgaactccgggcatttgactgggggagtgagaccaaaaatctggaaaaatgcaatcagccaactcctgtaaggtacagagtcagagatatgacggtccctacagcaatgtggacaggaggtcaggactggctttcaaatccagaagacgtgaaaatgctgctctctgaggtgaccaacctcatctaccataagaatattcctgaatgggctcacgtggatttcatctggggtttggatgctcctcaccgtatgtacaatgaaatcatccatctgatgcagcaggaggagaccaacctttcccagggacggtgtgaggccgtattgtgaagcatctgacactgacgatcttaggacaacctcctgagggatggg

SEQ ID NO: 149420 - DNA, 1197 bp, Homo sapiens
  Payload ID: 9500
  Gene Symbol: LIPN
  Gene Name: lipase, family member N
  Uniprot ID: Q5VXI9
  ENST ID: ENST00000404459
  CDS Start-End: 1-1197
atgatgtggctgcttttaacaacaacttgtttgatctgtggaactttaaatgctggtggattccttgatttggaaaatgaagtgaatcctgaggtgtggatgaatactagtgaaatcatcatctacaatggctaccccagtgaagagtatgaagtcaccactgaagatgggtatatactccttgtcaacagaattccttatgggcgaacacatgctaggagcacaggtccccggccagttgtgtatatgcagcatgccctgtttgcagacaatgcctactggcttgagaattatgctaatggaagccttggattccttctagcagatgcaggttatgatgtatggatgggaaacagtcggggaaacacttggtcaagaagacacaaaacactctcagagacagatgagaaattctgggcctttagttttgatgaaatggccaaatatgatctcccaggagtaatagacttcattgtaaataaaactggtcaggagaaattgtatttcattggacattcacttggcactacaatagggtttgtagccttttccaccatgcctgaactggcacaaagaatcaaaatgaattttgccttgggtcctacgatctcattcaaatatcccacgggcatttttaccaggttttttctacttccaaattccataatcaaggctgtttttggtaccaaaggtttctttttagaagataagaaaacgaagatagcttctaccaaaatctgcaacaataagatactctggttgatatgtagcgaatttatgtccttatgggctggatccaacaagaaaaatatgaatcagagtcgaatggatgtgtatatgtcacatgctcccactggttcatcagtacacaacattctgcatataaaacagctttaccactctgatgaattcagagcttatgactggggaaatgacgctgataatatgaaacattacaatcagagtcatccccctatatatgacctgactgccatgaaagtgcctactgctatttgggctggtggacatgatgtcctcgtaacaccccaggatgtggccaggatactccctcaaatcaagagtcttcattactttaagctattgccagattggaaccactttgattttgtctggggcctcgatgcccctcaacggatgtacagtgaaatcatagctttaatgaaggcatattcctaa

SEQ ID NO: 149421 - DNA, 1376 bp, Homo sapiens
  Payload ID: 9501
  Gene Symbol: LIPF
  Gene Name: lipase, gastric
  Uniprot ID: P07098
  ENST ID: ENST00000238983
  CDS Start-End: 47-1243
agagaaacagaatcctaactatttctgaggaaactgcaggtccaaaatgtggctgcttttaacaatggcaagtttgatatctgtactggggactacacatggtttgtttggaaaattacatcctggaagccctgaagtgactatgaacattagtcagatgattacttattggggatacccaaatgaagaatatgaagttgtgactgaagatggttatattcttgaagtcaatagaattccttatgggaagaaaaattcagggaatacaggccagagacctgttgtgtttttgcagcatggtttgcttgcatcagccacaaactggatttccaacctgccgaacaacagccttgccttcattctggcagatgctggttatgatgtgtggctgggcaacagcagaggaaacacctgggccagaagaaacttgtactattcaccagattcagttgaattctgggctttcagctttgatgaaatggctaaatatgaccttccagccacaatcgacttcattgtaaagaaaactggacagaagcagctacactatgttggccattcccagggcaccaccattggttttattgccttttccaccaatcccagcctggctaaaagaatcaaaaccttctatgctctagctcctgttgccactgtgaagtatacaaaaagccttataaacaaacttagatttgttcctcaatccctcttcaagtttatatttggtgacaaaatattctacccacacaacttctttgatcaatttcttgctactgaagtgtgctcccgtgagatgctgaatctcctttgcagcaatgccttatttataatttgtggatttgacagtaagaactttaacacgagtcgcttggatgtgtatctatcacataatccagcaggaacttctgttcaaaacatgttccattggacccaggctgttaagtctgggaaattccaagcttatgactggggaagcccagttcagaataggatgcactatgatcagtcccaacctccctactacaatgtgacagccatgaatgtaccaattgcagtgtggaacggtggcaaggacctgttggctgacccccaagatgttggccttttgcttccaaaactccccaatcttatttaccacaaggagattcctttttacaatcacttggactttatctgggcaatggatgcccctcaagaagtttacaatgacattgtttctatgatatcagaagataaaaagtagttctggatttaaagaattatccgtttgtttttccaaaatactttattctctcatacatagtattttcataatgtttgacatgcagtgcttctttctgtaattttgactttagaaatatattggcatcaacaaa

SEQ ID NO: 149422 - DNA, 1357 bp, Homo sapiens
  Payload ID: 9501
  Gene Symbol: LIPF
  Gene Name: lipase, gastric
  Uniprot ID: P07098
  ENST ID: ENST00000355843
  CDS Start-End: 97-1224
gagaaacagaatcctaactatttctgaggaaactgacttggcaacaagcattttgagaaatttattctgcccttgaacatctttgagcccattgagatgttctccaacgcaaacagcaggtccaaaatgtggctgcttttaacaatggcaagtttgatatctgtactggggactacacatggtttgtttggaaaattacatcctggaagccctgaagtgactatgaacattagtcagatgattacttattggggatacccaaatgaagaatatgaagttgtgactgaagatggttatattcttgaagtcaatagaattccttatgggaagaaaaattcagggaatacagatgctggttatgatgtgtggctgggcaacagcagaggaaacacctgggccagaagaaacttgtactattcaccagattcagttgaattctgggctttcagctttgatgaaatggctaaatatgaccttccagccacaatcgacttcattgtaaagaaaactggacagaagcagctacactatgttggccattcccagggcaccaccattggttttattgccttttccaccaatcccagcctggctaaaagaatcaaaaccttctatgctctagctcctgttgccactgtgaagtatacaaaaagccttataaacaaacttagatttgttcctcaatccctcttcaagtttatatttggtgacaaaatattctacccacacaacttctttgatcaatttcttgctactgaagtgtgctcccgtgagatgctgaatctcctttgcagcaatgccttatttataatttgtggatttgacagtaagaactttaacacgagtcgcttggatgtgtatctatcacataatccagcaggaacttctgttcaaaacatgttccattggacccaggctgttaagtctgggaaattccaagcttatgactggggaagcccagttcagaataggatgcactatgatcagtcccaacctccctactacaatgtgacagccatgaatgtaccaattgcagtgtggaacggtggcaaggacctgttggctgacccccaagatgttggccttttgcttccaaaactccccaatcttatttaccacaaggagattcctttttacaatcacttggactttatctgggcaatggatgcccctcaagaagtttacaatgacattgtttctatgatatcagaagataaaaagtagttctggatttaaagaattatccgtttgtttttccaaaatactttattctctcatacatagtattttcataatgtttgacatgcagtgcttctttctgtaattttgactttagaaatatattggcatcaacaaa

SEQ ID NO: 149423 - DNA, 1470 bp, Homo sapiens
  Payload ID: 9501
  Gene Symbol: LIPF
  Gene Name: lipase, gastric
  Uniprot ID: P07098
  ENST ID: ENST00000394375
  CDS Start-End: 114-1340
aaaatactaaccagccagagaaacagaatcctaactatttctgaggaaactgacttggcaacaagcattttgagaaatttattctgcccttgaacatctttgagcccattgagatgttctccaacgcaaacagcaggtccaaaatgtggctgcttttaacaatggcaagtttgatatctgtactggggactacacatggtttgtttggaaaattacatcctggaagccctgaagtgactatgaacattagtcagatgattacttattggggatacccaaatgaagaatatgaagttgtgactgaagatggttatattcttgaagtcaatagaattccttatgggaagaaaaattcagggaatacaggccagagacctgttgtgtttttgcagcatggtttgcttgcatcagccacaaactggatttccaacctgccgaacaacagccttgccttcattctggcagatgctggttatgatgtgtggctgggcaacagcagaggaaacacctgggccagaagaaacttgtactattcaccagattcagttgaattctgggctttcagctttgatgaaatggctaaatatgaccttccagccacaatcgacttcattgtaaagaaaactggacagaagcagctacactatgttggccattcccagggcaccaccattggttttattgccttttccaccaatcccagcctggctaaaagaatcaaaaccttctatgctctagctcctgttgccactgtgaagtatacaaaaagccttataaacaaacttagatttgttcctcaatccctcttcaagtttatatttggtgacaaaatattctacccacacaacttctttgatcaatttcttgctactgaagtgtgctcccgtgagatgctgaatctcctttgcagcaatgccttatttataatttgtggatttgacagtaagaactttaacacgagtcgcttggatgtgtatctatcacataatccagcaggaacttctgttcaaaacatgttccattggacccaggctgttaagtctgggaaattccaagcttatgactggggaagcccagttcagaataggatgcactatgatcagtcccaacctccctactacaatgtgacagccatgaatgtaccaattgcagtgtggaacggtggcaaggacctgttggctgacccccaagatgttggccttttgcttccaaaactccccaatcttatttaccacaaggagattcctttttacaatcacttggactttatctgggcaatggatgcccctcaagaagtttacaatgacattgtttctatgatatcagaagataaaaagtagttctggatttaaagaattatccgtttgtttttccaaaatactttattctctcatacatagtattttcataatgtttgacatgcagtgcttctttctgtaattttgactttagaaatatattggcatcaac

SEQ ID NO: 149424 - DNA, 1290 bp, Homo sapiens
  Payload ID: 9501
  Gene Symbol: LIPF
  Gene Name: lipase, gastric
  Uniprot ID: P07098
  ENST ID: ENST00000608620
  CDS Start-End: 63-1160
aaaatactaaccagccagagaaacagaatcctaactatttctgaggaaactgcaggtccaaaatgtggctgcttttaacaatggcaagtttgatatctgtactggggactacacatggtttgtttggaaaattacatcctggaagccctgaagtgactatgaacattagtcagatgattacttattggggatacccaaatgaagaatatgaagttgtgactgaagatggttatattcttgaagtcaatagaattccttatgggaagaaaaattcagggaatacagatgctggttatgatgtgtggctgggcaacagcagaggaaacacctgggccagaagaaacttgtactattcaccagattcagttgaattctgggctttcagctttgatgaaatggctaaatatgaccttccagccacaatcgacttcattgtaaagaaaactggacagaagcagctacactatgttggccattcccagggcaccaccattggttttattgccttttccaccaatcccagcctggctaaaagaatcaaaaccttctatgctctagctcctgttgccactgtgaagtatacaaaaagccttataaacaaacttagatttgttcctcaatccctcttcaagtttatatttggtgacaaaatattctacccacacaacttctttgatcaatttcttgctactgaagtgtgctcccgtgagatgctgaatctcctttgcagcaatgccttatttataatttgtggatttgacagtaagaactttaacacgagtcgcttggatgtgtatctatcacataatccagcaggaacttctgttcaaaacatgttccattggacccaggctgttaagtctgggaaattccaagcttatgactggggaagcccagttcagaataggatgcactatgatcagtcccaacctccctactacaatgtgacagccatgaatgtaccaattgcagtgtggaacggtggcaaggacctgttggctgacccccaagatgttggccttttgcttccaaaactccccaatcttatttaccacaaggagattcctttttacaatcacttggactttatctgggcaatggatgcccctcaagaagtttacaatgacattgtttctatgatatcagaagataaaaagtagttctggatttaaagaattatccgtttgtttttccaaaatactttattctctcatacatagtattttcataatgtttgacatgcagtgcttctttctgtaattttgactttagaaatatattggcatcaac

SEQ ID NO: 149425 - DNA, 2751 bp, Homo sapiens
  Payload ID: 9502
  Gene Symbol: LIPC
  Gene Name: lipase, hepatic
  Uniprot ID: P11150
  ENST ID: ENST00000299022
  CDS Start-End: 236-1735
ttttattctcaaaatgtgtcaggataagaagcacttctgtaaatcgacctttttaaaatagatataattagatttgcagttgggggcagtaaagaaagggtctgaacagtggataacatgttgagaggttaattattaatgggcagtcttccctaacaaagtatctaataggcattgtggtctctttggcttcagaaattaccaagaaagcctggaccccgggtgaaacggagaaatggacacaagtcccctgtgtttctccattctgttggttttatgcatctttatccaatcaagtgcccttggacaaagcctgaaaccagagccatttggaagaagagctcaagctgttgaaacaaacaaaacgctgcatgagatgaagaccagattcctgctctttggagaaaccaatcagggctgtcagattcgaatcaatcatccggacacgttacaggagtgcggcttcaactcctccctgcctctggtgatgataatccacgggtggtcggtggacggcgtgctagaaaactggatctggcagatggtggccgcgctgaagtctcagccggcccagccagtgaacgtggggctggtggactggatcaccctggcccacgaccactacaccatcgccgtccgcaacacccgccttgtgggcaaggaggtcgcggctcttctccggtggctggaggaatctgtgcaactctctcgaagccatgttcacctaattgggtacagcctgggtgcacacgtgtcaggatttgccggcagttccatcggtggaacgcacaagattgggagaatcacagggctggatgccgcgggacctttgtttgagggaagtgcccccagcaatcgtctttctccagatgatgccaattttgtggatgccattcatacctttacccgggagcacatgggcctgagcgtgggcatcaaacagcccataggacactatgacttctatcccaacgggggctccttccagcctggctgccacttcctagagctctacagacatattgcccagcacggcttcaatgccatcacccagaccataaaatgctcccacgagcgatcggtgcaccttttcatcgactccttgctgcacgccggcacgcagagcatggcctacccgtgtggtgacatgaacagcttcagccagggcctgtgcctgagctgcaagaagggccgctgcaacacgctgggctaccacgtccgccaggagccgcggagcaagagcaagaggctcttcctcgtaacgcgagcccagtcccccttcaaagtttatcattaccagttcaagatccagttcatcaaccaaactgagacaccaatacaaacaacttttaccatgtcactactcggaacaaaagagaaaatgcagaaaattcccatcactctgggcaaaggaattgctagtaataaaacgtattcctttcttatcacgctggatgtggatatcggcgagctgatcatgatcaagttcaagtgggaaaacagtgcagtgtgggccaatgtctgggacacggtccagaccatcatcccatggagcacagggccgcgccactcaggcctcgttctgaagacgatcagagtcaaagcaggagaaacccagcaaagaatgacattttgttcagaaaacacagatgacctactacttcgcccaacccaggaaaaaatcttcgtgaaatgtgaaataaagtctaaaacatcaaagcgaaagatcagatgagatttaatgaagacccagtgtaaagaataaatgaatcttactccttatctggaatggctgccttatttagaagccaaaattacataaagaatctcacacaaagcttaaataaagtttagatttaaggggggtatgtttcactctcataaactgagcttttaaaaacgatatgatataactattttccagtatcagtacaaccaaaaatgtcccaattttatctctggttaaatgttaatatatgcaaataagtacaaatgcaagagccattttagatctgttgttctaatttacaatgtcttttataattaagtttcccacatgtccttgctagtttattatgacccatttttgaaccatgctagaaagatacttttttattaggtaactagtgcttcaataaagcaagattctaattaatcaccactagttgtgtataccaaatacacatcctttaagacaatacagttcttaaaagaagaaaaattataattattctaatatttatacaaatcatataacgatttcacagaaccaaacacttacaagtagaattctactaaaactacttgtgataacagtgaaagctagacatgtggtcattttaataatggaattacaaattaaataaacataattattatatcttactaatgcttgcaacaaaagctaattttaaaaacttggaatgtctcaaagcatttgctatggactgaatgtttgagtcaccccaaaattcatatgctgaaatctaatccccaatgtgatggtgtttggaggtggggcctttgggaggtgatcaggtcatgagggtggagccctcataagtgggattagtgcccttataggggataaaggatcagaactctctgccatgtgcggatatgagaaggcaactatatgcaaaccaggaagttgaccctcacctggaagtagactaccagatctgctggcacctttatcttggacttctcagcttccagaactgtgagaaataaatgtttcttgtttaagcc

SEQ ID NO: 149426 - DNA, 2161 bp, Homo sapiens
  Payload ID: 9502
  Gene Symbol: LIPC
  Gene Name: lipase, hepatic
  Uniprot ID: P11150
  ENST ID: ENST00000356113
  CDS Start-End: 616-2115
gatgagaattgccaaggcacagcaaagcctgcagcttccatacccgtcatgagagcaaataacttatttgtaaacctaagcacttaattaactaaatggaaagcaaggcagtgagtgattcctgacatggccgaatttaagtcaagctgtgaagctccaggtgcagccagaaatggagatggacaacttgaactgaaccctgagagcttctaaaaaggctttggaccactgcttctcagcagtttttcttacggagtctctctgtgtcgcccaggctggagtacaatggcgcgatctcagttcactgcaacctccgcctcccaggttcaagcgattctcctgcctcagcttcctgagtagctgggattacaggcactcacctccacgcccagctaacttttgtatttttagtacagatggggtttcaccatgttggtcaggctggtctcgaactcctgacctcgtgatccgccctcctcgcctcccaaagtgctgtgattacaggagtgagccaccgctcctggccagaaatctcttctttattatgtctactgtccgttatccaactccagaagaaattaccaagaaagcctggaccccgggtgaaacggagaaatggacacaagtcccctgtgtttctccattctgttggttttatgcatctttatccaatcaagtgcccttggacaaagcctgaaaccagagccatttggaagaagagctcaagctgttgaaacaaacaaaacgctgcatgagatgaagaccagattcctgctctttggagaaaccaatcagggctgtcagattcgaatcaatcatccggacacgttacaggagtgcggcttcaactcctccctgcctctggtgatgataatccacgggtggtcggtggacggcgtgctagaaaactggatctggcagatggtggccgcgctgaagtctcagccggcccagccagtgaacgtggggctggtggactggatcaccctggcccacgaccactacaccatcgccgtccgcaacacccgccttgtgggcaaggaggtcgcggctcttctccggtggctggaggaatctgtgcaactctctcgaagccatgttcacctaattgggtacagcctgggtgcacacgtgtcaggatttgccggcagttccatcggtggaacgcacaagattgggagaatcacagggctggatgccgcgggacctttgtttgagggaagtgcccccagcaatcgtctttctccagatgatgccaattttgtggatgccattcatacctttacccgggagcacatgggcctgagcgtgggcatcaaacagcccataggacactatgacttctatcccaacgggggctccttccagcctggctgccacttcctagagctctacagacatattgcccagcacggcttcaatgccatcacccagaccataaaatgctcccacgagcgatcggtgcaccttttcatcgactccttgctgcacgccggcacgcagagcatggcctacccgtgtggtgacatgaacagcttcagccagggcctgtgcctgagctgcaagaagggccgctgcaacacgctgggctaccacgtccgccaggagccgcggagcaagagcaagaggctcttcctcgtaacgcgagcccagtcccccttcaaagtttatcattaccagttcaagatccagttcatcaaccaaactgagacaccaatacaaacaacttttaccatgtcactactcggaacaaaagagaaaatgcagaaaattcccatcactctgggcaaaggaattgctagtaataaaacgtattcctttcttatcacgctggatgtggatatcggcgagctgatcatgatcaagttcaagtgggaaaacagtgcagtgtgggccaatgtctgggacacggtccagaccatcatcccatggagcacagggccgcgccactcaggcctcgttctgaagacgatcagagtcaaagcaggagaaacccagcaaagaatgacattttgttcagaaaacacagatgacctactacttcgcccaacccaggaaaaaatcttcgtgaaatgtgaaataaagtctaaaacatcaaagcgaaagatcagatgagatttaatgaagacccagtgtaaagaataaatgaatcttactcctt

SEQ ID NO: 149427 - DNA, 1484 bp, Homo sapiens
  Payload ID: 9502
  Gene Symbol: LIPC
  Gene Name: lipase, hepatic
  ENST ID: ENST00000433326
  CDS Start-End: 43-1359
agaaattaccaagaaagcctggaccccgggtgaaacggagaaatggacacaagtcccctgtgtttctccattctgttggttttatgcatctttatccaatcaagtgcccttggacaaagcctgaaaccagagccatttggaagaagagctcaagctgttgaaacaaacaaaacgctgcatgagatgaagaccagattcctgctctttggagaaaccaatcagggctgtcagattcgaatcaatcatccggacacgttacaggagtgcggcttcaactcctccctgcctctggtgatgataatccacgggtggtcggaatctgtgcaactctctcgaagccatgttcacctaattgggtacagcctgggtgcacacgtgtcaggatttgccggcagttccatcggtggaacgcacaagattgggagaatcacagggctggatgccgcgggacctttgtttgagggaagtgcccccagcaatcgtctttctccagatgatgccaattttgtggatgccattcatacctttacccgggagcacatgggcctgagcgtgggcatcaaacagcccataggacactatgacttctatcccaacgggggctccttccagcctggctgccacttcctagagctctacagacatattgcccagcacggcttcaatgccatcacccagaccataaaatgctcccacgagcgatcggtgcaccttttcatcgactccttgctgcacgccggcacgcagagcatggcctacccgtgtggtgacatgaacagcttcagccagggcctgtgcctgagctgcaagaagggccgctgcaacacgctgggctaccacgtccgccaggagccgcggagcaagagcaagaggctcttcctcgtaacgcgagcccagtcccccttcaaagtttatcattaccagttcaagatccagttcatcaaccaaactgagacaccaatacaaacaacttttaccatgtcactactcggaacaaaagagaaaatgcagaaaattcccatcactctgggcaaaggaattgctagtaataaaacgtattcctttcttatcacgctggatgtggatatcggcgagctgatcatgatcaagttcaagtgggaaaacagtgcagtgtgggccaatgtctgggacacggtccagaccatcatcccatggagcacagggccgcgccactcaggcctcgttctgaagacgatcagagtcaaagcaggagaaacccagcaaagaatgacattttgttcagaaaacacagatgacctactacttcgcccaacccaggaaaaaatcttcgtgaaatgtgaaataaagtctaaaacatcaaagcgaaagatcagatgagatttaatgaagacccagtgtaaagaataaatgaatcttactccttatctggaatggctgccttatttagaagccaaaattacataaagaatctcacacaaagcttaaataaagtttagatttaa

SEQ ID NO: 149428 - DNA, 2968 bp, Homo sapiens
  Payload ID: 9502
  Gene Symbol: LIPC
  Gene Name: lipase, hepatic
  ENST ID: ENST00000414170
  CDS Start-End: 288-1787
gagaattgccaaggcacagcaaagcctgcagcttccatacccgtcatgagagcaaataacttatttgtaaacctaagcacttaattaactaaatggaaagcaaggcagtgagtgattcctgacatggccgaatttaagtcaagctgtgaagctccaggtgcagccagaaatggagatggacaacttgaactgaaccctgagagcttctaaaaaggctttggaccactgcttctcagcagtttttcttaaattaccaagaaagcctggaccccgggtgaaacggagaaatggacacaagtcccctgtgtttctccattctgttggttttatgcatctttatccaatcaagtgcccttggacaaagcctgaaaccagagccatttggaagaagagctcaagctgttgaaacaaacaaaacgctgcatgagatgaagaccagattcctgctctttggagaaaccaatcagggctgtcagattcgaatcaatcatccggacacgttacaggagtgcggcttcaactcctccctgcctctggtgatgataatccacgggtggtcggtggacggcgtgctagaaaactggatctggcagatggtggccgcgctgaagtctcagccggcccagccagtgaacgtggggctggtggactggatcaccctggcccacgaccactacaccatcgccgtccgcaacacccgccttgtgggcaaggaggtcgcggctcttctccggtggctggaggaatctgtgcaactctctcgaagccatgttcacctaattgggtacagcctgggtgcacacgtgtcaggatttgccggcagttccatcggtggaacgcacaagattgggagaatcacagggctggatgccgcgggacctttgtttgagggaagtgcccccagcaatcgtctttctccagatgatgccaattttgtggatgccattcatacctttacccgggagcacatgggcctgagcgtgggcatcaaacagcccataggacactatgacttctatcccaacgggggctccttccagcctggctgccacttcctagagctctacagacatattgcccagcacggcttcaatgccatcacccagaccataaaatgctcccacgagcgatcggtgcaccttttcatcgactccttgctgcacgccggcacgcagagcatggcctacccgtgtggtgacatgaacagcttcagccagggcctgtgcctgagctgcaagaagggccgctgcaacacgctgggctaccacgtccgccaggagccgcggagcaagagcaagaggctcttcctcgtaacgcgagcccagtcccccttcaaagtttatcattaccagttcaagatccagttcatcaaccaaactgagacaccaatacaaacaacttttaccatgtcactactcggaacaaaagagaaaatgcagaaaattcccatcactctgggcaaaggaattgctagtaataaaacgtattcctttcttatcacgctggatgtggatatcggcgagctgatcatgatcaagttcaagtgggaaaacagtgcagtgtgggccaatgtctgggacacggtccagaccatcatcccatggagcacagggccgcgccactcaggcctcgttctgaagacgatcagagtcaaagcaggagaaacccagcaaagatctcccaacaggatcaatctgggaagattaaactgctcgctcctcttctgcactgagctcttctcacatgactctttggcccattggagcagcgctgcttctgagctctgaccctgcccagatgctcttagctggagagtaattcctcagtttaggtggctgctcaccctgacaatcccatgtggcttgacctgaaagggtggctaaagcacaacactaccttctccactggggcacacccatgtggtacggaagaagaaatgaggagagggaggggcctggcccttccagggctcccacacggggtgagcattgaagcaggtgctccatggcattggtctcacgtgatctttgctgtgatcctgaaatgggtagtattggctgtgcagattaggaacctgaggctcacagaagttacacagcttgaggacattgctcaaaattgtcccagtccagatttgactgggatttgtctgatttattacccatttgttgggggtgtgctgtttccaacagttccttcttccattagttttggttccattaatctgaattttctcagtctaatctagcagagttgcagtgctggacattaacatatgtatgcatcaaacccatccttagggctgtaggaggtactgtatgcgggttatgggagctataattttttttaggttgtaaataccgagtgcctcctctgtgtctacacagtgccaggtactatcggagaatacaaaaaaaaaaaaaaaaatctgagttgtggctcttggtagaaataaactccaggacctaaccaggaaaataagatgaattaattttactaacggtgtggtccatcccagggcttctcaaactttcacgagcatacaaagcatctgggaatcatgttaaaatgcaggttctgctttagtgagtctggggtgagcctgatgttctgcatttctaacaagcgaccaggcaatgctgttgctgcaggtcaacagaccacactttgaatagtgagagtccagcattacacaacccgggaagtgtaagaagaaagttcagacccgtacacttggggctgtgctgcaacatgctttgaggaggccaagaggtgttcccagggagacaggcagccggcaaagcaatatggctggcaggatcggatggactccagtgtcagccagtcctaaactcacattttaacttcactgctcacaatctgtgtagcctcaaacaataacttcactcttcaagactcagttgtttagtgataaacgagaatcataatatacatttcatgagactaa

SEQ ID NO: 149429 - DNA, 3813 bp, Homo sapiens
  Payload ID: 9503
  Gene Symbol: LIPE
  Gene Name: lipase, hormone-sensitive
  Uniprot ID: Q05469
  ENST ID: ENST00000244289
  CDS Start-End: 278-3508
cttcttgtaagagagtgctaggcacatagcctcctcctattcctaatcctcccaccaaagaaagaggcacagagttcattacttagtgggggccagctgtgatcggccaactgccagctgccttaaaaaggaagaccagtgatgctaggatggagtgaaacccaagaggaagtgccatcatgaggaatcaatgagagatctgtgaagagagagggctgggtgggagcccagaaggatagaacctggaagatcaatatctcccgtgagggaaataacaatggagccaggttctaagtcagtgtctaggtcagactggcaacctgaaccacaccagaggcctataaccccgctagagcctgggccagaaaagacacccatagcccagccagaatcgaagactctgcagggatccaatacccaacagaagcctgcttcaaaccaaagacccctcacccagcaggagacccctgcacaacatgatgctgaatcccagaaggaacctagagcccaacaaaaatctgcttcacaagaggaatttcttgccccacagaagcccgcaccacagcaatcaccttacatccaaagggtgctgctcactcaacaggaagctgcctcccagcagggacctgggctaggaaaagaatctataactcaacaggagccagcattgagacaaagacatgtagcccagccagggcctgggccaggagagccacctccagctcaacaagaagctgaatcaacacctgcggcccaggctaaacctggagccaaaagggagccatctgccccgactgaatctacgtcccaagagacacctgaacagtcagacaagcaaacaacgccagtccagggagccaaatccaagcagggatctttgacagagctgggatttctaacaaaacttcaggaactatccatacagcgatcagccctagagtggaaggcactttctgagtgggtcacagattctgagtcagaatcagatgtgggatcatcttcagacacagattctccagccacgatgggtggaatggtggcccagggagtgaagctaggcttcaaaggaaaatctggttataaagtgatgtcaggatacagtgggacgtcgccacatgagaaaaccagtgctcggaatcacagacactaccaggatacagcctcaaggctcatccacaacatggacctgcgcacaatgacacagtcgctggtgactctggcggaggacaacatagccttcttctcgagccagggtcctggggaaacggcccagcggctgtcaggcgtttttgccggtgtacgggagcaggcgctggggctggagccggccctgggccgcctgctgggtgtggcgcacctctttgacctggacccagagacaccggccaacgggtaccgcagcctagtgcacacagcccgctgctgcctggcgcacctcctgcacaaatcccgctatgtggcctccaaccgccgcagcatcttcttccgcaccagccacaacctggccgagctggaggcctacctggctgccctcacccagctccgcgctctggtctactacgcccagcgcctgctggttaccaatcggccgggggtactcttctttgagggcgacgaggggctcaccgccgacttcctccgggagtatgtcacgctgcataagggatgcttctatggccgctgcctgggcttccagttcacgcctgccatccggccattcctgcagaccatctccattgggctggtgtccttcggggagcactacaaacgcaacgagacaggcctcagtgtggccgccagctctctcttcaccagcggccgctttgccatcgaccccgagctgcgtggggctgagtttgagcggatcacacagaacctggacgtgcacttctggaaagccttctggaacatcaccgagatggaagtgctatcgtctctggccaacatggcatcggccaccgtgagggtaagccgcctgctcagcctgccacccgaagcctttgagatgccactgactgccgaccccacgctcacggtcaccatctcacccccactggcccacacaggccctgggcccgtcctcgtcaggctcatctcctatgacctgcgtgaaggacaggacagtgaggagctcagcagcctgataaagtccaacggccaacggagcctggagctgtggccgcgcccccagcaggcaccccgctcgcggtccctgatagtgcacttccacggcggtggctttgtggcccagacctccagatcccacgagccctacctcaagagctgggcccaggagctgggcgcccccatcatctccatcgactactccctggcccctgaggcccccttcccccgtgcgctggaggagtgcttcttcgcctactgctgggccatcaagcactgcgccctccttggctcaacaggggaacgaatctgccttgcgggggacagtgcaggcgggaacctctgcttcaccgtggctcttcgggcagcagcctacggggtgcgggtgccagatggcatcatggcagcctacccggccacaatgctgcagcctgccgcctctccctcccgcctgctgagcctcatggaccccttgctgcccctcagtgtgctctccaagtgtgtcagcgcctatgctggtgcaaagacggaggaccactccaactcagaccagaaagccctcggcatgatggggctggtgcggcgggacacagccctgctcctccgagacttccgcctgggtgcctcctcatggctcaactccttcctggagttaagtgggcgcaagtcccagaagatgtcggagcccatagcagagccgatgcgccgcagtgtgtctgaagcagcactggcccagccccagggcccactgggcacggattccctcaagaacctgaccctgagggacttgagcctgaggggaaactccgagacgtcgtcggacacccccgagatgtcgctgtcagctgagacacttagcccctccacaccctccgatgtcaacttcttattaccacctgaggatgcaggggaagaggctgaggccaaaaatgagctgagccccatggacagaggcctgggcgtccgtgccgccttccccgagggtttccacccccgacgctccagccagggtgccacacagatgcccctctactcctcacccatagtcaagaaccccttcatgtcgccgctgctggcacccgacagcatgctcaagagcctgccacctgtgcacatcgtggcgtgcgcgctggaccccatgctggacgactcggtcatgctcgcgcggcgactgcgcaacctgggccagccggtgacgctgcgcgtggtggaggacctgccgcacggcttcctgaccctagcggcgctgtgccgcgagacgcgccaggccgcagagctgtgcgtggagcgcatccgcctcgtcctcactcctcccgccggagccgggccgagcggggagacgggggctgcgggggtagacgggggctgcggggggcgacactaaaagcctgttgttcccatctgcgccggcctccgtcatgaatgccttccgggccgggcggaaggggacgcgggctgtgccttacttaagtcgggggtggcaagggggcggggcgggggcccgaaagctgagaccctcgccacggggagggggacgcgcacacacaccggtcaccgagacggctggacctgcacgccaccgctgccttttgctgctgctgctgcggcgaccgccgcagggacggggactggccctcccttgcaggtcggtttggtttgttgtaaataaaagtatttaattagtttggc

SEQ ID NO: 149430 - DNA, 335 bp, Homo sapiens
  Payload ID: 9503
  Gene Symbol: LIPE
  Gene Name: lipase, hormone-sensitive
  ENST ID: ENST00000601189
  CDS Start-End: 95-335
tgagagacgggaatggccgctgccaggccccaggacctagaagggaaaggaaataccttcttctaggggaacagcctcaaggctcatccacaacatggacctgcgcacaatgacacagtcgctggtgactctggcggaggacaacatagccttcttctcgagccagggtcctggggaaacggcccagcggctgtcaggcgtttttgccggtgtacgggagcaggcgctggggctggagccggccctgggccgcctgctgggtgtggcgcacctctttgacctggacccagagacaccggccaacgggtaccgcagcctagtgcacacagcccgct

SEQ ID NO: 149431 - DNA, 759 bp, Homo sapiens
  Payload ID: 9503
  Gene Symbol: LIPE
  Gene Name: lipase, hormone-sensitive
  ENST ID: ENST00000597001
  CDS Start-End: 232-759
gatcggcttgggagcagagtccggaatgcgagcttcgtggaccagggttcccgctcggattccgtattcgctgtgtgaccaagggcaacggatgccctcagtgtttcccacctggggaatgcttcaagcgccgatgttcagggctccagcgctcttgagaggataagggggaaggaggttagcaggtgttactcaaagaggaagtctagcgcctcaaggctcatccacaacatggacctgcgcacaatgacacagtcgctggtgactctggcggaggacaacatagccttcttctcgagccagggtcctggggaaacggcccagcggctgtcaggcgtttttgccggtgtacgggagcaggcgctggggctggagccggccctgggccgcctgctgggtgtggcgcacctctttgacctggacccagagacaccggccaacgggtaccgcagcctagtgcacacagcccgctgctgcctggcgcacctcctgcacaaatcccgctatgtggcctccaaccgccgcagcatcttcttccgcaccagccacaacctggccgagctggaggcctacctggctgccctcacccagctccgcgctctggtctactacgcccagcgcctgctggttaccaatcggccgggggtactcttctttgagggcgacgaggggctcaccgccgacttcctccgggagtatgtcacgctgcataagggatgcttctatggccgctgcctgggcttccagttcacgcctgcc

SEQ ID NO: 149432 - DNA, 915 bp, Homo sapiens
  Payload ID: 9503
  Gene Symbol: LIPE
  Gene Name: lipase, hormone-sensitive
  ENST ID: ENST00000597620
  CDS Start-End: 1-915
ggaggagtgcttcttcgcctactgctgggccatcaagcactgcgccctccttggtgcaaagacggaggaccactccaactcagaccagaaagccctcggcatgatggggctggtgcggcgggacacagccctgctcctccgagacttccgcctgggtgcctcctcatggctcaactccttcctggagttaagtgggcgcaagtcccagaagatgtcggagcccatagcagagccgatgcgccgcagtgtgtctgaagcagcactggcccagccccagggcccactgggcacggattccctcaagaacctgaccctgagggacttgagcctgaggggaaactccgagacgtcgtcggacacccccgagatgtcgctgtcagctgagacacttagcccctccacaccctccgatgtcaacttcttattaccacctgaggatgcaggggaagaggctgaggccaaaaatgagctgagccccatggacagaggcctgggcgtccgtgccgccttccccgagggtttccacccccgacgctccagccagggtgccacacagatgcccctctactcctcacccatagtcaagaaccccttcatgtcgccgctgctggcacccgacagcatgctcaagagcctgccacctgtgcacatcgtggcgtgcgcgctggaccccatgctggacgactcggtcatgctcgcgcggcgactgcgcaacctgggccagccggtgacgctgcgcgtggtggaggacctgccgcacggcttcctgaccctagcggcgctgtgccgcgagacgcgccaggccgcagagctgtgcgtggagcgcatccgcctcgtcctcactcctcccgccggagccgggccgagcggggagacgggggctgcgggggtagacgggggctgcggggggcgaca

SEQ ID NO: 149433 - DNA, 1367 bp, Homo sapiens
  Payload ID: 9503
  Gene Symbol: LIPE
  Gene Name: lipase, hormone-sensitive
  ENST ID: ENST00000599783
  CDS Start-End: 588-1367
agacaggagagggaaagcggggctccctcctccaacggctctcaggcacagccacgcctccagcgctggcgccccgcctcgtctttgagttggcagaggacctggcccgcccccaccccaggcagaggctcagaggcgccccactttcccccttcaaaaggcgggccgggccgcgtgctagggcatccctccctgggaaggtgagtgggatggcgagactgagccagcacatgggaggcttcccagcacgtgggaagatcgggacttccctgctggggtgctccccgcggggctccgcactagtcctgcccgaaggacgcttttcgccacccccggggttgcctttttgttggccgcgagccctttaatgcgcggtagggggcggagccagatcttaaattctggcggttgggggcggagcacggcagcggagggagaccagaattggttagggagctggacccagagaagagcaagctcgggattgggtaataggggggcccgacagtagtgtgtagcgaggattggccctccgggcagggcctcgcggctggaattggcccccgcgggaggaccgcggggaattgatggagttggccgggggaacggagcccgccgaggccgctatggccccggcctcgaagaatgccaaagagggctcaaggagccacggtcgccggcggtggcgaaaagacaaggccaaagcctcaaggctcatccacaacatggacctgcgcacaatgacacagtcgctggtgactctggcggaggacaacatagccttcttctcgagccagggtcctggggaaacggcccagcggctgtcaggcgtttttgccggtgtacgggagcaggcgctggggctggagccggccctgggccgcctgctgggtgtggcgcacctctttgacctggacccagagacaccggccaacgggtaccgcagcctagtgcacacagcccgctgctgcctggcgcacctcctgcacaaatcccgctatgtggcctccaaccgccgcagcatcttcttccgcaccagccacaacctggccgagctggaggcctacctggctgccctcacccagctccgcgctctggtctactacgcccagcgcctgctggttaccaatcggccgggggtactcttctttgagggcgacgaggggctcaccgccgacttcctccgggagtatgtcacgctgcataagggatgcttctatggccgctgcctgggcttccagttcacgcctgccatccggccattcctgcagaccatctccattgggctggtgtccttcggggagcactacaaacgcaacgagacaggcctcagtgtggccgccagctctctcttcaccagcggccgc

SEQ ID NO: 149434 - DNA, 824 bp, Homo sapiens
  Payload ID: 9503
  Gene Symbol: LIPE
  Gene Name: lipase, hormone-sensitive
  ENST ID: ENST00000599918
  CDS Start-End: 1-824
ttcgggcagcagcctacggggtgcgggtgccagatggcatcatggcagcctacccggccacaatgctgcagcctgccgcctctccctcccgcctgctgagcctcatggaccccttgctgcccctcagtgtgctctccaagtgtgtcagcgcctatgctggtgcaaagacggaggaccactccaactcagaccagaaagccctcggcatgatggggctggtgcggcgggacacagccctgctcctccgagacttccgcctgggtgcctcctcatggctcaactccttcctggagttaagtgggcgcaagtcccagaagatgtcggagcccatagcaggcctatctgctctccctctctcagagccgatgcgccgcagtgtgtctgaagcagcactggcccagccccagggcccactgggcacggattccctcaagaacctgaccctgagggacttgagcctgaggggaaactccgagacgtcgtcggacacccccgagatgtcgctgtcagctgagacacttagcccctccacaccctccgatgtcaacttcttattaccacctgaggatgcaggggaagaggctgaggccaaaaatgagctgagccccatggacagaggcctgggcgtccgtgccgccttccccgagggtttccacccccgacgctccagccagggtgccacacagatgcccctctactcctcacccatagtcaagaaccccttcatgtcgccgctgctggcacccgacagcatgctcaagagcctgccacctgtgcacatcgtggcgtgcgcgctggaccccatgctggacgactcggtcatg

SEQ ID NO: 149435 - DNA, 738 bp, Homo sapiens
  Payload ID: 9503
  Gene Symbol: LIPE
  Gene Name: lipase, hormone-sensitive
  ENST ID: ENST00000599211
  CDS Start-End: 72-738
gggtttattgccccaggctgctactggcacaagccacagaccagcagtcccagcccagggaagctcggaagatgcctaggagggcctcaaggctcatccacaacatggacctgcgcacaatgacacagtcgctggtgactctggcggaggacaacatagccttcttctcgagccagggtcctggggaaacggcccagcggctgtcaggcgtttttgccggtgtacgggagcaggcgctggggctggagccggccctgggccgcctgctgggtgtggcgcacctctttgacctggacccagagacaccggccaacgggtaccgcagcctagtgcacacagcccgctgctgcctggcgcacctcctgcacaaatcccgctatgtggcctccaaccgccgcagcatcttcttccgcaccagccacaacctggccgagctggaggcctacctggctgccctcacccagctccgcgctctggtctactacgcccagcgcctgctggttaccaatcggccgggggtactcttctttgagggcgacgaggggctcaccgccgacttcctccgggagtatgtcacgctgcataagggatgcttctatggccgctgcctgggcttccagttcacgcctgccatccggccattcctgcagaccatctccattgggctggtgtccttcggggagcactacaaacgcaacgagacaggcctcagtgtggccgccagctctctcttcacca

SEQ ID NO: 149436 - DNA, 4026 bp, Homo sapiens
  Payload ID: 9504
  Gene Symbol: LIPH
  Gene Name: lipase, member H
  Uniprot ID: Q8WWY8
  ENST ID: ENST00000296252
  CDS Start-End: 143-1498
agtccctagggaacttcctgttgtcaccacacctctgagtcgtctgagctcactgtgagcaaaatcccacagtggaaactcttaagcctctgcgaagtaaatcattcttgtgaatgtgacacacgatctctccagtttccatatgttgagattctacttattcatcagtttgttgtgcttgtcaagatcagacgcagaagaaacatgtccttcattcaccaggctgagctttcacagtgcagtggttggtacgggactaaatgtgaggctgatgctctacacaaggaaaaacctgacctgcgcacaaaccatcaactcctcagcttttgggaacttgaatgtgaccaagaaaaccaccttcattgtccatggattcaggccaacaggctcccctcctgtttggatggatgacttagtaaagggtttgctctctgttgaagacatgaacgtagttgttgttgattggaatcgaggagctacaactttaatatatacccatgcctctagtaagaccagaaaagtagccatggtcttgaaggaatttattgaccagatgttggcagaaggagcttctcttgatgacatttacatgatcggagtaagtctaggagcccacatatctgggtttgttggagagatgtacgatggatggctggggagaattacaggcctcgaccctgcaggccctttattcaacgggaaacctcaccaagacagattagatcccagtgatgcgcagtttgttgatgtcatccattccgacactgatgcactgggctacaaggagccattaggaaacatagacttctacccaaatggaggattggatcaacctggctgccccaaaacaatattgggaggatttcagtattttaaatgtgaccaccagaggtctgtatacctgtacctgtcttccctgagagagagctgcaccatcactgcgtatccctgtgactcctaccaggattataggaatggcaagtgtgtcagctgcggcacgtcacaaaaagagtcctgtccccttctgggctattatgctgataattggaaagaccatctaagggggaaagatcctccaatgacgaaggcattctttgacacagctgaggagagcccattctgcatgtatcattactttgtggatattataacatggaacaagaatgtaagaagaggggacattaccatcaaattgagagacaaagctggaaacaccacagaatccaaaatcaatcatgaacccaccacatttcagaaatatcaccaagtgagtctacttgcaagatttaatcaagatctggataaagtggctgcaatttccttgatgttctctacaggatctctaataggcccaaggtacaagctcaggattctccgaatgaagttaaggtcccttgcccatccggagaggcctcagctgtgtcggtatgatcttgtcctgatggaaaacgttgaaacagtcttccaacctattctttgcccagagttgcagttgtaactgttgccaggacacatggccataaataatagaaagaaagctacaaccacaggctgtttgaaagcttcacctcacctttctgcaaggcagaaaaagtatgaaaaaaaccaaggcttttttcagtagcgtcctatggatgtcacattgtacatcaaacaaccttgtgattataaaacgatcctgggaaggagcccctaactagggcaagtcagaaatagccaggctcgcagcagcgcagcgctgtgtctgctgtgtcctggggcctcccttgttccgacctgtcaattctgctgcctgtcacgcgggtggttctgcccatcgcggctgcgggtcaagcatcttcaagggaaggacggactggaggcctcaccgtggactcaactctgcattctccgtgccacattcctccagttcccacacgtagaagggaacgaaactgacgtctacctcatggggctgctgtgtgggtttgggaggcaaaaatctatgaagggttttttgaaatcccataggtgccacatctatgagatgtttgataaatgtgaatatgcttttacatttgggcttatctaatttgcaataagagagcctctctctatcaacaccagcttctctctcgggctgtttgctcagggaaggcaagaaagccacgtgctggccctctgccttctctaaagtgctgttggagcatggaggagctggaggagatggggatggactgacagctaagagggcggctgctgggactagatagtggatgaagaaagaaggacgaggaagccgtggggcagcctcttcacatggggacaggggatggagcatgaggcaagggaaggaaaagcagagcttatttttcacctaaggtggagaaggatcactttacaggcaacgctcattttaagcaacccttaagaaatgtttatgtttctttattaccaatgtaatctatgattattgaaggaaatttagaaaatgcgtagatacaaaattaaaaaaaaatactgtccacgatcctattagaggtaattaatgttagccttttggaacaaggctgtcacctattttgccaacacgtgaattcaaaacatgaaccggtttgcttttggagaatctgaagactccagtttgaggaatcctttgcttccctggaggtagatgctgtctgcaaatctagaatgacagcaggagtccagtcaagaggtcctgtcaggccaaggccagaaagaagggaggacaatccctggggccagatgcccagtgtgaggggaggcatgatctgtcccatggctgtggccactgcaggaaggtctgtgaaaaggaggtgacaggcccagtcacctcctcttcacccaagtgattgctccttcaactgctatctgtgaaaatagcctttgttatgaagaaattgactctctctctctttttttttttttggagttgcctaggctggagtgcaatggtacgatctcagctcactgcaacctccacctcccaggttcaattgattctcctgcctcagcctcctgagtagctgggattacaggcatgtgccaccacacccggctaatttttgtatttttattagagacagggtttcaccacgttagccaggctcgtctcgaactcctgtcctcaggtgactacccgtctcggcctcccaaagtgctgggattacaggcatgagccaccacacccggccaaaaatggattctctatgtcataaattaaagaaatctataaatgtattcctgtgtggcacatcttcttacagatttacatttgcagcaaatacagagtctgttttatttaagtgagggatgactgaactctgagtggaacaagctcttggacatgttaccatccttcctcctccttctcacatttcctcagcaattgtggatagagagatcagtgtgctgtaggccctggttttttttttttttttttttttttttttttagatggagtctccttctgttacccaggctggagtgcagtggcacgatcttggctcactgcaacctctgcctcccgggttcaagcaattctctgcctcagcctcccaagtagctgggattacaggcgcccccaccatgcctggctaatttttgtatttttagtagagacctggtttcaccatcttggccttgaactcctgaccttgtgatccactggccttggcctctcaaagttctgggattacaggtgtgagccatcgtacccggcagccctggtttcttcttagttttattggtctgtgttttgatcagcacagtcacttttttgttctctttcctggtaagcagggagtcaaaacaatagcaagaaaatgccagaaatagaatttctactactttgtaaactctaggctcgtgggtctcctagctctcagtacctggctcactgtaggatgggtagatgggtgaatgaatggataaagaaaggaagtttgttcaccggagaggagatgaatttcagtaagtttcatgtaacagtgatcaggagaaataaaggcagttataactgtg

SEQ ID NO: 149437 - DNA, 521 bp, Homo sapiens
  Payload ID: 9504
  Gene Symbol: LIPH
  Gene Name: lipase, member H
  ENST ID: ENST00000435679
  CDS Start-End: 1-221
agagcccattctgcatgtatcattactttgtggatattataacatggaacaagaatgtaagaagaggggacattaccatcaaattgagagacaaagctggaaacaccacagaatccaaaatcaatcagatctctaataggcccaaggtacaagctcaggattctccgaatgaagttaaggtcccttgcccatccggagaggcctcagctgtgtcggtatgatcttgtcctgatggaaaacgttgaaacagtcttccaacctattctttgcccagagttgcagttgtaactgttgccaggacacatggccataaataatagaaagaaagctacaaccacaggctgtttgaaagcttcacctcacctttctgcaaggcagaaaaagtatgaaaaaaaccaaggcttttttcagtagcgtcctatggatgtcacattgtacatcaaacaaccttgtgattataaaacgatcctgggaaggagcccctaactagggcaagtcagaaatagccaggctcgcagcag

SEQ ID NO: 149438 - DNA, 2065 bp, Homo sapiens
  Payload ID: 9504
  Gene Symbol: LIPH
  Gene Name: lipase, member H
  ENST ID: ENST00000424591
  CDS Start-End: 88-1341
tgagcaaaatcccacagtggaaactcttaagcctctgcgaagtaaatcattcttgtgaatgtgacacacgatctctccagtttccatatgttgagattctacttattcatcagtttgttgtgcttgtcaagatcagacgcagaagaaacatgtccttcattcaccaggctgagctttcacagtgcagtggttggtacgggactaaatgtgaggctgatgctctacacaaggaaaaacctgacctgcgcacaaaccatcaactcctcagcttttgggaacttgaatgtgaccaagaaaaccaccttcattgtccatggattcaggccaacaggctcccctcctgtttggatggatgacttagtaaagggtttgctctctgttgaagacatgaacgtagttgttgttgattggaatcgaggagctacaactttaatatatacccatgcctctagtaagaccagaaaagtagccatggtcttgaaggaatttattgaccagatgttggcagaaggagcttctcttgatgacatttacatgatcggagtaagtctaggagcccacatatctgggtttgttggagagatgtacgatggatggctggggagaattacagcactgggctacaaggagccattaggaaacatagacttctacccaaatggaggattggatcaacctggctgccccaaaacaatattgggaggatttcagtattttaaatgtgaccaccagaggtctgtatacctgtacctgtcttccctgagagagagctgcaccatcactgcgtatccctgtgactcctaccaggattataggaatggcaagtgtgtcagctgcggcacgtcacaaaaagagtcctgtccccttctgggctattatgctgataattggaaagaccatctaagggggaaagatcctccaatgacgaaggcattctttgacacagctgaggagagcccattctgcatgtatcattactttgtggatattataacatggaacaagaatgtaagaagaggggacattaccatcaaattgagagacaaagctggaaacaccacagaatccaaaatcaatcatgaacccaccacatttcagaaatatcaccaagtgagtctacttgcaagatttaatcaagatctggataaagtggctgcaatttccttgatgttctctacaggatctctaataggcccaaggtacaagctcaggattctccgaatgaagttaaggtcccttgcccatccggagaggcctcagctgtgtcggtatgatcttgtcctgatggaaaacgttgaaacagtcttccaacctattctttgcccagagttgcagttgtaactgttgccaggacacatggccataaataatagaaagaaagctacaaccacaggctgtttgaaagcttcacctcacctttctgcaaggcagaaaaagtatgaaaaaaaccaaggcttttttcagtagcgtcctatggatgtcacattgtacatcaaacaaccttgtgattataaaacgatcctgggaaggagcccctaactagggcaagtcagaaatagccaggctcgcagcagcgcagcgctgtgtctgctgtgtcctggggcctcccttgttccgacctgtcaattctgctgcctgtcacgcgggtggttctgcccatcgcggctgcgggtcaagcatcttcaagggaaggacggactggaggcctcaccgtggactcaactctgcattctccgtgccacattcctccagttcccacacgtagaagggaacgaaactgacgtctacctcatggggctgctgtgtgggtttgggaggcaaaaatctatgaagggttttttgaaatcccataggtgccacatctatgagatgtttgataaatgtgaatatgcttttacatttgggcttatctaatttgcaataagagagcctctctctatcaacaccagcttctctctcgggctgtttgctcagggaaggcaagaaagccacgtgctggccctctgccttctctaaagtgctgttggagcatggaggagctggaggagatggggatggactgaca

SEQ ID NO: 149439 - DNA, 256 bp, Homo sapiens
  Payload ID: 9504
  Gene Symbol: LIPH
  Gene Name: lipase, member H
  ENST ID: ENST00000452897
  CDS Start-End: 1-256
atgacatttacatgatcggagtaagtctaggagcccacatatctgggtttgttggagagatgtacgatggatggctggggagaattacaggatttcagtattttaaatgtgaccaccagaggtctgtatacctgtacctgtcttccctgagagagagctgcaccatcactgcgtatccctgtgactcctaccaggattataggaatggcaagtgtgtcagctgcggcacgtcacaaaaagagtcctgtccccttct

SEQ ID NO: 149440 - DNA, 556 bp, Homo sapiens
  Payload ID: 9504
  Gene Symbol: LIPH
  Gene Name: lipase, member H
  ENST ID: ENST00000429510
  CDS Start-End: 40-183
attcttgtgaatgtgacacacgatctctccagtttccatatgttgagattctacttattcatcagtttgttgtgcttgtcaagatcagatgcctctttggatatgaatgaggagtctcctctctttgaagagggttttctccagtcagaaatatgggaaataaaattaattcctccaaaatgagacgcagaagaaacatgtccttcattcaccaggctgagctttcacagtgcagtggttggtacgggactaaatgtgaggctgatgctctacacaaggaaaaacctgacctgcgcacaaaccatcaactcctcagcttttgggaacttgaatgtgaccaagaaaaccaccttcattgtccatggattcaggccaacaggctcccctcctgtttggatggatgacttagtaaagggtttgctctctgttgaagacatgaacgtagttgttgttgattggaatcgaggagctacaactttaatatatacccatgcctctagtaagaccagaaaagtagccatggtcttgaaggaatttattgaccagatgttggcag

SEQ ID NO: 149441 - DNA, 1652 bp, Homo sapiens
  Payload ID: 9505
  Gene Symbol: LIPI
  Gene Name: lipase, member I
  Uniprot ID: Q6XZB0
  ENST ID: ENST00000344577
  CDS Start-End: 27-1472
agtgaacttctgatagggtcttatttatgttgctcaaatgtttacataataacttgtgccaaaaatatagtgctcatgcttttcagttctcacccagaaatgtcctgtggcttctagttgtgtgcctgagatcagataataaaagaccatgccttgaattctctcagctaagtgtaaaggattccttcagagatttatttattccgagaatagagaccattctgatgatgtatacaaggaacaacctaaactgtgctgagccactgtttgaacaaaataactcacttaatgttaatttcaacacacaaaagaaaacagtctggcttattcacggatacagaccagtaggctccatcccattatggcttcagaacttcgtaaggattttgctgaatgaagaagatatgaatgtaattgtagtagactggagccggggtgctacaacttttatttataatagagcagttaaaaacaccagaaaagttgctgtgagtttgagtgtgcacattaaaaatcttttgaagcatggtgcatctcttgacaattttcatttcataggtgtgagcttaggggctcatatcagtggatttgttggaaagatatttcatggtcaacttggaagaataacaggtcttgaccctgctgggccaaggttctccagaaaaccaccatatagcagattagattacacggatgcaaagtttgtggatgtcatccattctgactccaatggtttaggcattcaagagcccttgggacatatagatttttatccaaatggaggaaataaacaacctggctgtcctaaatcaattttctcaggaattcaattcattaaatgcaaccaccagagagcagttcacttgttcatggcatctttagaaacaaactgcaattttatttcatttccttgtcgttcatacaaagattacaagactagcttatgtgtggactgtgactgttttaaggaaaaatcatgtcctcggctgggttatcaagccaagctatttaaaggtgttttaaaagaaaggatggaaggaagacctcttaggaccactgtgtttttggatacaagtggtacatatccattctgtacctattattttgttctcagtataattgttccagataaaactatgatggatggctcgttttcatttaaattattaaatcagcttggaatgattgaagagccaaggctttatgaaaagaacaaaccattttataaacttcaagaagtcaagattcttgctcaattttataatgactttgtaaatatttcaagcattggtttgacatatttccagagctcaaatctgcagtgttccacatgcacatacaagatccagagtctcatgttaaaatcacttacatacccagaaagaccaccactttgcaggtataatattgtacttaaagacagagaggaagtgtttcttaatccaaacacatgtacaccaaagaacacataagatgccttcttccatcaaatgcacttgcttgtgaattaatggacttgtaaatgaaacaatgcaatcagtcttttataatgcactgttcaatttgagattcaagtatttctatttcttggaaaaaattttaagaatcaaaaataaagaaaataaaaaatgcatacagttaaacattccaaa

SEQ ID NO: 149442 - DNA, 421 bp, Homo sapiens
  Payload ID: 9505
  Gene Symbol: LIPI
  Gene Name: lipase, member I
  ENST ID: ENST00000400211
  CDS Start-End: 1-421
ttataatagagcagttaaaaacaccagaaaagttgctgtgagtttgagtgtgcacattaaaaatcttttgaagcatggtgcatctcttgacaattttcatttcataggtgtgagcttaggggctcatatcagtggatttgttggaaagatatttcatggtcaacttggaagaataacaggtcttgaccctgctgggccaaggttctccagaaaaccaccatatagcagattagattacacggatgcaaagtttgtggatgtcatccattctgactccaatggaattcaattcattaaatgcaaccaccagagagcagttcacttgttcatggcatctttagaaacaaactgcaattttatttcatttccttgtcgttcatacaaagattacaagactagcttatgtgtggactgtgactgt

SEQ ID NO: 149443 - DNA, 1529 bp, Homo sapiens
  Payload ID: 9505
  Gene Symbol: LIPI
  Gene Name: lipase, member I
  Uniprot ID: Q6XZB0
  ENST ID: ENST00000536861
  CDS Start-End: 74-1429
cctttttggtgaattgagtgctgtttttgcttttctcagattccaaatgagagtatacatttttctttgtttgatgtgctgggtgagatctgataataaaagaccatgccttgaattctctcagctaagtgtaaaggattccttcagagatttatttattccgagaatagagaccattctgatgatgtatacaaggaacaacctaaactgtgctgagccactgtttgaacaaaataactcacttaatgttaatttcaacacacaaaagaaaacagtctggcttattcacggatacagaccagtaggctccatcccattatggcttcagaacttcgtaaggattttgctgaatgaagaagatatgaatgtaattgtagtagactggagccggggtgctacaacttttatttataatagagcagttaaaaacaccagaaaagttgctgtgagtttgagtgtgcacattaaaaatcttttgaagcatggtgcatctcttgacaattttcatttcataggtgtgagcttaggggctcatatcagtggatttgttggaaagatatttcatggtcaacttggaagaataacaggtcttgaccctgctgggccaaggttctccagaaaaccaccatatagcagattagattacacggatgcaaagtttgtggatgtcatccattctgactccaatggtttaggcattcaagagcccttgggacatatagatttttatccaaatggaggaaataaacaacctggctgtcctaaatcaattttctcaggaattcaattcattaaatgcaaccaccagagagcagttcacttgttcatggcatctttagaaacaaactgcaattttatttcatttccttgtcgttcatacaaagattacaagactagcttatgtgtggactgtgactgttttaaggaaaaatcatgtcctcggctgggttatcaagccaagctatttaaaggtgttttaaaagaaaggatggaaggaagacctcttaggaccactgtgtttttggatacaagtggtacatatccattctgtacctattattttgttctcagtataattgttccagataaaactatgatggatggctcgttttcatttaaattattaaatcagcttggaatgattgaagagccaaggctttatgaaaagaacaaaccattttataaacttcaagaagtcaagattcttgctcaattttataatgactttgtaaatatttcaagcattggtttgacatatttccagagctcaaatctgcagtgttccacatgcacatacaagatccagagtctcatgttaaaatcacttacatacccagaaagaccaccactttgcaggtataatattgtacttaaagacagagaggaagtgtttcttaatccaaacacatgtacaccaaagaacacataagatgccttcttccatcaaatgcacttgcttgtgaattaatggacttgtaaatgaaacaatgcaatcagtcttttataatgcactgttcaatttgagattc

SEQ ID NO: 149444 - DNA, 1439 bp, Homo sapiens
  Payload ID: 9505
  Gene Symbol: LIPI
  Gene Name: lipase, member I
  ENST ID: ENST00000614229
  CDS Start-End: 74-1339
cctttttggtgaattgagtgctgtttttgcttttctcagattccaaatgagagtatacatttttctttgtttgatgtgctgggtgagatctgataataaaagaccatgccttgaattctctcagctaagtgtaaaggattccttcagagatttatttattccgagaatagagaccattctgatgatgtatacaaggaacaacctaaactgtgctgagccactgtttgaacaaaataactcacttaatgttaatttcaacacacaaaagaaaacagtctggcttattcacggatacagaccagtaggctccatcccattatggcttcagaacttcgtaaggattttgctgaatgaagaagatatgaatgtaattgtagtagactggagccggggtgctacaacttttatttataatagagcagttaaaaacaccagaaaagttgctgtgagtttgagtgtgcacattaaaaatcttttgaagcatggtgcatctcttgacaattttcatttcataggtgtgagcttaggggctcatatcagtggatttgttggaaagatatttcatggtcaacttggaagaataacaggtcttgaccctgctgggccaaggttctccagaaaaccaccatatagcagattagattacacggatgcaaagtttgtggatgtcatccattctgactccaatggaattcaattcattaaatgcaaccaccagagagcagttcacttgttcatggcatctttagaaacaaactgcaattttatttcatttccttgtcgttcatacaaagattacaagactagcttatgtgtggactgtgactgttttaaggaaaaatcatgtcctcggctgggttatcaagccaagctatttaaaggtgttttaaaagaaaggatggaaggaagacctcttaggaccactgtgtttttggatacaagtggtacatatccattctgtacctattattttgttctcagtataattgttccagataaaactatgatggatggctcgttttcatttaaattattaaatcagcttggaatgattgaagagccaaggctttatgaaaagaacaaaccattttataaacttcaagaagtcaagattcttgctcaattttataatgactttgtaaatatttcaagcattggtttgacatatttccagagctcaaatctgcagtgttccacatgcacatacaagatccagagtctcatgttaaaatcacttacatacccagaaagaccaccactttgcaggtataatattgtacttaaagacagagaggaagtgtttcttaatccaaacacatgtacaccaaagaacacataagatgccttcttccatcaaatgcacttgcttgtgaattaatggacttgtaaatgaaacaatgcaatcagtcttttataatgcactgttcaatttgagattc

SEQ ID NO: 149445 - DNA, 2907 bp, Homo sapiens
  Payload ID: 9506
  Gene Symbol: LDAH
  Gene Name: lipid droplet associated hydrolase
  Uniprot ID: Q9H6V9
  ENST ID: ENST00000237822
  CDS Start-End: 81-1058
acctgaggggggcacttccggtctcgtgccgccttcccaggaccctcagggagagcgggcagccttccaggtggacagaaatggactcagaactcaaggaagaaattcctgtgcatgaggaattcattttgtgtggtggagccgaaacccaggttctaaaatgtgggccctggacagacctctttcatgatcaaagtgtcaaaaggcctaagctgcttattttcattattcctggtaacccaggtttttctgccttttatgtgccatttgcaaaggctttatactctttgacaaacagacgctttccagtttggactatcagtcatgctgggcatgcgttggctcccaaagacaagaagattcttacaacatcagaggattcaaacgctcaagaaattaaggacatttatggactaaatggacaaatagagcacaaactagctttcctgagaactcatgtgccaaaggacatgaaacttgtgctcattggccattcaataggcagctatttcacacttcagatgctgaagcgagtccctgagctcccggtaattcgtgcctttctgctctttccaacaattgaacgaatgtctgagtcacccaatggcagaattgccactccacttttgtgctggtttcgatatgttctctatgttactggctacttattattgaaaccgtgtcctgagacaatcaagtccttgctaatcagaaggggccttcaagtaatgaacctagagaatgaattttcaccattgaatatattagaaccattctgccttgctaatgctgcctaccttgggggccaagaaatgatggaggtggtgaagagagatgacgaaaccataaaggagcatttatgtaagcttacattttattatggtactatagatccttggtgtccaaaagagtactatgaagacattaagaaggattttccagaaggagacattcgactctgtgagaaaaacatacctcatgctttcatcacccattttaaccaggaaatggcagacatgattgctgactccctaaaggatgacttgtccaaaatgtaaattggcctgaggaacaagcccccactgccagtacatggaggcagtcagtgtactagacttagtaggtaaatgtttaattttgaagactgatattagaaatgaagaaagtgagaacctttgtcttacaaaccaactctccgctcgccatgttataggctgaagtaaacacagttgatgaatcattccataggtttaaccatacattttccaagactcagggaacacagtgatctacacagagtcttgtgtttgcacaagatgcccagtggcaccatatggtttattttggtaggcaggatctttgcagatgaaaaaaaaatctacatgtacttgattttaattgagttacattgtagaataggctcctctggaggaaattatgaaatacctactagaaaatgtaaaataaatcagtgaatgttaagagtatagttagatatgtgaagtgtatgagattatgacaaggatacactcatgttccaggagcaggaagtgaacctgggtctcctgtaagacagaagatgaagatgagcccaggctaacttagcacagatcttggctgagatcatcaatgtgacgtctaatgtacctgcactagacagagaataaagttcaccagacattactctggtcagctaaccagataaagaattgttgaaggaccccaactgtgcctcctgccacaggacaaccagcaagttctatgctgagccttagcctcccaggttataagctccctgcaggctcctcctctccagagccaggatggagaggcactgggctgtcccaaagcaggcttggatgtgccaacgtacagttgctccttctgtaattcttgcactaaaactccattaaagaccatcaatgagccaaatagtgtgctagccattgaggatggagttcttagctacttaatgattcttttcttctggaaatcttctagtgaataatttttaaaagcttcttttaaactgctcagtaaaacattgccatacattaactctccatttctgcattaacttcatttgctggaaagaaattattttgttaatgaaccaaacccagccattaagttatgtgaattcaccttctctagacacattgaggtatggcagagaagacacatattccctggcctagagtgggctgacaatattgctgcctcccctaaattgactcaatcttgagaaccacatactgcagtgacagttgatcatggatcagaaatattcctttttctcctagaggaaatccctcatggcattatcattccctaaggacaatgagatgtccctccgctcaaatcctaaagccccctgatgaaagatttggctctgatttgctgccaacttattggtaagtgctgaatgagttactgtgctttggcatagcttctacatcacagcaagtgacttctcagaggggaaaagccaagctccagacaaggagtgctgttagcccaaggggaagagctaatagatacataggccgtaagcacagggctgtacacagatcctttattggcatctgcatgagaggcctagaaatcggatgttagaagctaggaatcatggctctgagcgccttgcatacaggagatactcactgatactaaatcaaggcatgtaaacaatactgggtaaatcatacctaccagaataaagagtaacattcagagcttttcttttatctgttattttaaatgttactccatatttcaaaagtctgcacgtatgaaattgtgtcttatttctggtttttagagcctaagaaagatactcattcttaattcctatttatcatctgaaaaccaaatgaatttttgaaataaatgttttaccagcatttc

SEQ ID NO: 149446 - DNA, 2045 bp, Homo sapiens
  Payload ID: 9506
  Gene Symbol: LDAH
  Gene Name: lipid droplet associated hydrolase
  ENST ID: ENST00000381090
  CDS Start-End: 81-1193
acctgaggggggcacttccggtctcgtgccgccttcccaggaccctcagggagagcgggcagccttccaggtggacagaaatggactcagaactcaaggaagaaattcctgtgcatgaggaattcattttgtgtggtggagccgaaacccaggttctaaaatgtgggccctggacagacctctttcatgatcaaagtgtcaaaaggcctaagctgcttattttcattattcctggtaacccaggtttttctgccttttatgtgccatttgcaaaggctttatactctttgacaaacagacgctttccagtttggactatcagtcatgctgggcatgcgttggctcccaaagacaagaagattcttacaacatcagaggattcaaacgctcaagaaattaaggacatttatggactaaatggacaaatagagcacaaactagctttcctgagaactcatgtgccaaaggacatgaaacttgtgctcattggccattcaataggcagctatttcacacttcagatgctgaagcgagtccctgagctcccggtaattcgtgcctttctgctctttccaacaattgaacgaatgtctgagtcacccaatggcagaattgccactccacttttgtgctggtttcgatatgttctctatgttactggctacttattattgaaaccgtgtcctgagacaatcaagtccttgctaatcagaaggggccttcaagtaatgaacctagagaatgaattttcaccattgaatatattagaaccattctgccttgctaatgctgcctaccttgggggccaagaaatgatggaggtggtgaagagagatgacgaaaccataaaggagcatttatgtaagcttacattttattatggtactatagatccttggtgtccaaaagagtactatgaagacattaagaaggattttccagaaggagacattcgactctgtgagaaaaacatacctcatgctttcatcacccattttaaccaggaaatggcagacatgattgctgactccctaaaggatgacttgtccaaaataggaaatccctcatggcattatcattccctaaggacaatgagatgtccctccgctcaaatcctaaagccccctgatgaaagatttggctctgatttgctgccaacttattggtggaagaatcagatttcaagagactgaagttcattctgtttcattagggattagactaaaatggacaaacagtggaagaaatccattttccagaagcagctctgcctgtatgtcccagtcaaccacatggatggtctttgtgaaagttttaacttcctgcagagttaccgagtgctcagcgattgagctttgaccacacccgtgtttgttcctagtctgttcccagccataagcatctccacaagccctctgtggcttgtgtggcctgatgtccatggccaccaagggcctctcaccatacgcttctccactcaacctttggagagacacggaccaccaaaggcttgatttttcttcatcctacattatattcaaaacaaacaggctgggtgccgtagctcacacctgtgatcccagcaccttgggaggatgagctgggaagatcgtttgaggctaggagtttgagaccagcccgtgcaaaaaacgagacctcgtgtctaaaataatttttaaaaaagagcaaaaaaaaaaagcaatttcagattaaaggagactgaagagacatgacaattggacacaacatctgattctgaattggatgtttttgttataaaagacattgttgagacaatttgcacaacttgaatgaggtctgaagattagctgggagtaagatgccactgttaattttctgatttcagtggttgtactgggaagaagtaagagagtgtccttgtttgtactggagacactgaggtatctgggggtgaggggcatcatgtctgtttactgtcagatggttgaggggaaaataatgttctttgtacttgcagattttttggaagtttgagatgttttagaatttgtaaaaataattat

SEQ ID NO: 149447 - DNA, 1895 bp, Homo sapiens
  Payload ID: 9506
  Gene Symbol: LDAH
  Gene Name: lipid droplet associated hydrolase
  ENST ID: ENST00000403006
  CDS Start-End: 305-1027
ggcacttccggtctcgtgccgccttcccaggaccctcagggagagcgggcagccttccaggtggacaggtaacccaggtttttctgccttttatgtgccatttgcaaaggctttatactctttgacaaacagacgctttccagtttggactatcagtcatgctgggcatgcgttggctcccaaagacaagaagattcttacaacatcagaggattcaaacgctcaagaaattaaggacatttatggactaaatggacaaatagagcacaaactagctttcctgagaactcatgtgccaaaggacatgaaacttgtgctcattggccattcaataggcagctatttcacacttcagatgctgaagcgagtccctgagctcccggtaattcgtgcctttctgctctttccaacaattgaacgaatgtctgagtcacccaatggcagaattgccactccacttttgtgctggtttcgatatgttctctatgttactggctacttattattgaaaccgtgtcctgagacaatcaagtccttgctaatcagaaggggccttcaagtaatgaacctagagaatgaattttcaccattgaatatattagaaccattctgccttgctaatgctgcctaccttgggggccaagaaatgatggaggtggtgaagagagatgacgaaaccataaaggagcatttatgtaagcttacattttattatggtactatagatccttggtgtccaaaagagtactatgaagacattaagaaggattttccagaaggagacattcgactctgtgagaaaaacatacctcatgctttcatcacccattttaaccaggaaatggcagacatgattgctgactccctaaaggatgacttgtccaaaataggaaatccctcatggcattatcattccctaaggacaatgagatgtccctccgctcaaatcctaaagccccctgatgaaagatttggctctgatttgctgccaacttattggtggaagaatcagatttcaagagactgaagttcattctgtttcattagggattagactaaaatggacaaacagtggaagaaatccattttccagaagcagctctgcctgtatgtcccagtcaaccacatggatggtctttgtgaaagttttaacttcctgcagagttaccgagtgctcagcgattgagctttgaccacacccgtgtttgttcctagtctgttcccagccataagcatctccacaagccctctgtggcttgtgtggcctgatgtccatggccaccaagggcctctcaccatacgcttctccactcaacctttggagagacacggaccaccaaaggcttgatttttcttcatcctacattatattcaaaacaaacaggctgggtgccgtagctcacacctgtgatcccagcaccttgggaggatgagctgggaagatcgtttgaggctaggagtttgagaccagcccgtgcaaaaaacgagacctcgtgtctaaaataatttttaaaaaagagcaaaaaaaaaaagcaatttcagattaaaggagactgaagagacatgacaattggacacaacatctgattctgaattggatgtttttgttataaaagacattgttgagacaatttgcacaacttgaatgaggtctgaagattagctgggagtaagatgccactgttaattttctgatttcagtggttgtactgggaagaagtaagagagtgtccttgtttgtactggagacactgaggtatctgggggtgaggggcatcatgtctgtttactgtcagatggttgaggggaaaataatgttctttgtacttgcagattttttggaagtttgagatgttttagaatttgtaaaaataattatttttaaaaccccacca

SEQ ID NO: 149448 - DNA, 493 bp, Homo sapiens
  Payload ID: 9506
  Gene Symbol: LDAH
  Gene Name: lipid droplet associated hydrolase
  ENST ID: ENST00000402479
  CDS Start-End: 56-493
gtgccgccttcccaggaccctcagggagagcgggcagccttccaggtggacagaaatggactcagaactcaaggaagaaattcctgtgcatgaggaattcattttgtgtggtggagccgaaacccaggttctaaaatgtgggccctggacagacctctttcatgatcaaagtgtcaaaaggcctaagctgcttattttcattattcctggtgagcgtaaaagtctgggtaacccaggtttttctgccttttatgtgccatttgcaaaggctttatactctttgacaaacagacgctttccagtttggactatcagtcatgctgggcatgcgttggctcccaaagacaagaagattcttacaacatcagaggattcaaacgctcaagaaattaaggacatttatggactaaatggacaaatagagcacaaactagctttcctgagaactcatgtgccaaaggacatgaaacttgtgctcattggccattcaata

SEQ ID NO: 149449 - DNA, 3837 bp, Homo sapiens
  Payload ID: 9506
  Gene Symbol: LDAH
  Gene Name: lipid droplet associated hydrolase
  ENST ID: ENST00000435420
  CDS Start-End: 97-948
gcggtactgtgacgtcacctgaggggggcacttccggtctcgtgccgccttcccaggaccctcagggagagcgggcagccttccaggtggacagaaatggactcagaactcaaggaagaaattcctgtgcatgaggaattcattttgtgtggtggagccgaaacccaggttctaaaatgtgggccctggacagacctctttcatgatcaaagtgtcaaaaggcctaagctgcttattttcattattcctggtgagcgtaaaagtctggattcaaacgctcaagaaattaaggacatttatggactaaatggacaaatagagcacaaactagctttcctgagaactcatgtgccaaaggacatgaaacttgtgctcattggccattcaataggcagctatttcacacttcagatgctgaagcgagtccctgagctcccggtaattcgtgcctttctgctctttccaacaattgaacgaatgtctgagtcacccaatggcagaattgccactccacttttgtgctggtttcgatatgttctctatgttactggctacttattattgaaaccgtgtcctgagacaatcaagtccttgctaatcagaaggggccttcaagtaatgaacctagagaatgaattttcaccattgaatatattagaaccattctgccttgctaatgctgcctaccttgggggccaagaaatgatggaggtggtgaagagagatgacgaaaccataaaggagcatttatgtaagcttacattttattatggtactatagatccttggtgtccaaaagagtactatgaagacattaagaaggattttccagaaggagacattcgactctgtgagaaaaacatacctcatgctttcatcacccattttaaccaggaaatggcagacatgattgctgactccctaaaggatgacttgtccaaaatgtaaattggcctgaggaacaagcccccactgccagtacatggaggcagtcagtgtactagacttagtaggtaaatgtttaattttgaagactgatattagaaatgaagaaagtgagaacctttgtcttacaaaccaactctccgctcgccatgttataggctgaagtaaacacagttgatgaatcattccataggtttaaccatacattttccaagactcagggaacacagtgatctacacagagtcttgtgtttgcacaagatgcccagtggcaccatatggtttattttggtaggcaggatctttgcagatgaaaaaaaaatctacatgtacttgattttaattgagttacattgtagaataggctcctctggaggaaattatgaaatacctactagaaaatgtaaaataaatcagtgaatgttaagagtatagttagatatgtgaagtgtatgagattatgacaaggatacactcatgttccaggagcaggaagtgaacctgggtctcctgtaagacagaagatgaagatgagcccaggctaacttagcacagatcttggctgagatcatcaatgtgacgtctaatgtacctgcactagacagagaataaagttcaccagacattactctggtcagctaaccagataaagaattgttgaaggaccccaactgtgcctcctgccacaggacaaccagcaagttctatgctgagccttagcctcccaggttataagctccctgcaggctcctcctctccagagccaggatggagaggcactgggctgtcccaaagcaggcttggatgtgccaacgtacagttgctccttctgtaattcttgcactaaaactccattaaagaccatcaatgagccaaatagtgtgctagccattgaggatggagttcttagctacttaatgattcttttcttctggaaatcttctagtgaataatttttaaaagcttcttttaaactgctcagtaaaacattgccatacattaactctccatttctgcattaacttcatttgctggaaagaaattattttgttaatgaaccaaacccagccattaagttatgtgaattcaccttctctagacacattgaggtatggcagagaagacacatattccctggcctagagtgggctgacaatattgctgcctcccctaaattgactcaatcttgagaaccacatactgcagtgacagttgatcatggatcagaaatattcctttttctcctagaggaaatccctcatggcattatcattccctaaggacaatgagatgtccctccgctcaaatcctaaagccccctgatgaaagatttggctctgatttgctgccaacttattggtaagtgctgaatgagttactgtgctttggcatagcttctacatcacagcaagtgacttctcagaggggaaaagccaagctccagacaaggagtgctgttagcccaaggggaagagctaatagatacataggccgtaagcacagggctgtacacagatcctttattggcatctgcatgagaggcctagaaatcggatgttagaagctaggaatcatggctctgagcgccttgcatacaggagatactcactgatactaaatcaaggcatgtaaacaatactgggtaaatcatacctaccagaataaagagtaacattcagagcttttcttttatctgttattttaaatgttactccatatttcaaaagtctgcacgtatgaaattgtgtcttatttctggtttttagagcctaagaaagatactcattcttaattcctatttatcatctgaaaaccaaatgaatttttgaaataaatgttttaccagcatttctgacctggtctggcctgatctctgtgttgggcaagagagggtacaatttgagcagttctcctgagttagactcggctcaaagtctctcttttaaagtgaaaagccacctttctcattgcttttttcataggtggaagaatcagatttcaagagactgaagttcattctgtttcattagggattagactaaaatggacaaacagtggaagaaatccattttccagaagcagctctgcctgtatgtcccagtcaaccacatggatggtctttgtgaaagttttaacttcctgcagagttaccgagtgctcagcgattgagctttgaccacacccgtgtttgttcctagtctgttcccagccataagcatctccacaagccctctgtggcttgtgtggcctgatgtccatggccaccaagggcctctcaccatacgcttctccactcaacctttggagagacacggaccaccaaaggcttgatttttcttcatcctacattatattcaaaacaaacaggctgggtgccgtagctcacacctgtgatcccagcaccttgggaggatgagctgggaagatcgtttgaggctaggagtttgagaccagcccgtgcaaaaaacgagacctcgtgtctaaaataatttttaaaaaagagcaaaaaaaaaaagcaatttcagattaaaggagactgaagagacatgacaattggacacaacatctgattctgaattggatgtttttgttataaaagacattgttgagacaatttgcacaacttgaatgaggtctgaagattagctgggagtaagatgccactgttaattttctgatttcagtggttgtactgggaagaagtaagagagtgtccttgtttgtactggagacactgaggtatctgggggtgaggggcatcatgtctgtttactgtcagatggttgaggggaaaataatgttctttgtacttgcagattttttggaagtttgagatgttttagaatttgtaaaaataattatttttaaaaccccaccatgctatctcctgca

SEQ ID NO: 149450 - DNA, 548 bp, Homo sapiens
  Payload ID: 9506
  Gene Symbol: LDAH
  Gene Name: lipid droplet associated hydrolase
  ENST ID: ENST00000432947
  CDS Start-End: 158-548
acttccggtctcgtgccgccttcccaggaccctcagggagagcgggcagccttccaggtggacagattcaaacgctcaagaaattaaggacatttatggactaaatggacaaatagagcacaaactagctttcctgagaactcatgtgccaaaggacatgaaacttgtgctcattggccattcaataggcagctatttcacacttcagatgctgaagcgagtccctgagctcccggtaattcgtgcctttctgctctttccaacaattgaacgaatgtctgagtcacccaatggcagaattgccactccacttttgtgctggtttcgatatgttctctatgttactggctacttattattgaaaccgtgtcctgagacaatcaagtccttgctaatcagaaggggccttcaagtaatgaacctagagaatgaattttcaccattgaatatattagaaccattctgccttgctaatgctgcctaccttgggggccaagaaatgatggaggtggtgaagagagatgacgaaaccataaaggagcatttat

SEQ ID NO: 149451 - DNA, 3728 bp, Homo sapiens
  Payload ID: 9506
  Gene Symbol: LDAH
  Gene Name: lipid droplet associated hydrolase
  ENST ID: ENST00000440866
  CDS Start-End: 97-597
gcggtactgtgacgtcacctgaggggggcacttccggtctcgtgccgccttcccaggaccctcagggagagcgggcagccttccaggtggacagaaatggactcagaactcaaggaagaaattcctgtgcatgaggaattcattttgtgtggtggagccgaaacccaggttctaaaatgtgggccctggacagacctctttcatgatcaaagtgtcaaaaggcctaagctgcttattttcattattcctggtaacccaggtttttctgccttttatgtgccatttgcaaaggctttatactctttgacaaacagacgctttccagtttggactatcagtcatgctgggcatgcgttggctcccaaagacaagaagattcttacaacatcagaggattcaaacgctcaagaaattaaggacatttatggactaaatggacaaatagagcacaaactagctttcctgagaactcatgtgccaaaggacatgaaacttgtgctcattggccattcaataggcagctatttcacacttcagatgctgaagcgagtccctgagctcccgctaatgctgcctaccttgggggccaagaaatgatggaggtggtgaagagagatgacgaaaccataaaggagcatttatgtaagcttacattttattatggtactatagatccttggtgtccaaaagagtactatgaagacattaagaaggattttccagaaggagacattcgactctgtgagaaaaacatacctcatgctttcatcacccattttaaccaggaaatggcagacatgattgctgactccctaaaggatgacttgtccaaaatgtaaattggcctgaggaacaagcccccactgccagtacatggaggcagtcagtgtactagacttagtaggtaaatgtttaattttgaagactgatattagaaatgaagaaagtgagaacctttgtcttacaaaccaactctccgctcgccatgttataggctgaagtaaacacagttgatgaatcattccataggtttaaccatacattttccaagactcagggaacacagtgatctacacagagtcttgtgtttgcacaagatgcccagtggcaccatatggtttattttggtaggcaggatctttgcagatgaaaaaaaaatctacatgtacttgattttaattgagttacattgtagaataggctcctctggaggaaattatgaaatacctactagaaaatgtaaaataaatcagtgaatgttaagagtatagttagatatgtgaagtgtatgagattatgacaaggatacactcatgttccaggagcaggaagtgaacctgggtctcctgtaagacagaagatgaagatgagcccaggctaacttagcacagatcttggctgagatcatcaatgtgacgtctaatgtacctgcactagacagagaataaagttcaccagacattactctggtcagctaaccagataaagaattgttgaaggaccccaactgtgcctcctgccacaggacaaccagcaagttctatgctgagccttagcctcccaggttataagctccctgcaggctcctcctctccagagccaggatggagaggcactgggctgtcccaaagcaggcttggatgtgccaacgtacagttgctccttctgtaattcttgcactaaaactccattaaagaccatcaatgagccaaatagtgtgctagccattgaggatggagttcttagctacttaatgattcttttcttctggaaatcttctagtgaataatttttaaaagcttcttttaaactgctcagtaaaacattgccatacattaactctccatttctgcattaacttcatttgctggaaagaaattattttgttaatgaaccaaacccagccattaagttatgtgaattcaccttctctagacacattgaggtatggcagagaagacacatattccctggcctagagtgggctgacaatattgctgcctcccctaaattgactcaatcttgagaaccacatactgcagtgacagttgatcatggatcagaaatattcctttttctcctagaggaaatccctcatggcattatcattccctaaggacaatgagatgtccctccgctcaaatcctaaagccccctgatgaaagatttggctctgatttgctgccaacttattggtaagtgctgaatgagttactgtgctttggcatagcttctacatcacagcaagtgacttctcagaggggaaaagccaagctccagacaaggagtgctgttagcccaaggggaagagctaatagatacataggccgtaagcacagggctgtacacagatcctttattggcatctgcatgagaggcctagaaatcggatgttagaagctaggaatcatggctctgagcgccttgcatacaggagatactcactgatactaaatcaaggcatgtaaacaatactgggtaaatcatacctaccagaataaagagtaacattcagagcttttcttttatctgttattttaaatgttactccatatttcaaaagtctgcacgtatgaaattgtgtcttatttctggtttttagagcctaagaaagatactcattcttaattcctatttatcatctgaaaaccaaatgaatttttgaaataaatgttttaccagcatttctgacctggtctggcctgatctctgtgttgggcaagagagggtacaatttgagcagttctcctgagttagactcggctcaaagtctctcttttaaagtgaaaagccacctttctcattgcttttttcataggtggaagaatcagatttcaagagactgaagttcattctgtttcattagggattagactaaaatggacaaacagtggaagaaatccattttccagaagcagctctgcctgtatgtcccagtcaaccacatggatggtctttgtgaaagttttaacttcctgcagagttaccgagtgctcagcgattgagctttgaccacacccgtgtttgttcctagtctgttcccagccataagcatctccacaagccctctgtggcttgtgtggcctgatgtccatggccaccaagggcctctcaccatacgcttctccactcaacctttggagagacacggaccaccaaaggcttgatttttcttcatcctacattatattcaaaacaaacaggctgggtgccgtagctcacacctgtgatcccagcaccttgggaggatgagctgggaagatcgtttgaggctaggagtttgagaccagcccgtgcaaaaaacgagacctcgtgtctaaaataatttttaaaaaagagcaaaaaaaaaaagcaatttcagattaaaggagactgaagagacatgacaattggacacaacatctgattctgaattggatgtttttgttataaaagacattgttgagacaatttgcacaacttgaatgaggtctgaagattagctgggagtaagatgccactgttaattttctgatttcagtggttgtactgggaagaagtaagagagtgtccttgtttgtactggagacactgaggtatctgggggtgaggggcatcatgtctgtttactgtcagatggttgaggggaaaataatgttctttgtacttgcagattttttggaagtttgagatgttttagaatttgtaaaaataattatttttaaaaccccaccatgctatctcctgca

SEQ ID NO: 149452 - DNA, 566 bp, Homo sapiens
  Payload ID: 9506
  Gene Symbol: LDAH
  Gene Name: lipid droplet associated hydrolase
  ENST ID: ENST00000412261
  CDS Start-End: 89-566
gtgacgtcacctgaggggggcacttccggtctcgtgccgccttcccaggaccctcagggagagcgggcagccttccaggtggacagaaatggactcagaactcaaggaagaaattcctgtgcatgaggaattcattttgtgtggtggagccgaaacccaggttctaaaatgtgggccctggacagacctctttcatgatcaaagtgtcaaaaggcctaagctgcttattttcattattcctgattcaaacgctcaagaaattaaggacatttatggactaaatggacaaatagagcacaaactagctttcctgagaactcatgtgccaaaggacatgaaacttgtgctcattggccattcaataggcagctatttcacacttcagatgctgaagcgagtccctgagctcccggtaattcgtgcctttctgctctttccaacaattgaacgaatgtctgagtcacccaatggcagaattgccactccacttttgtgctggtttcgatatgttctctatgttactggctacttattattgaaaccgtgtcctgagacaatcaagtcct

SEQ ID NO: 149453 - DNA, 826 bp, Homo sapiens
  Payload ID: 9506
  Gene Symbol: LDAH
  Gene Name: lipid droplet associated hydrolase
  ENST ID: ENST00000419825
  CDS Start-End: 77-547
gaggggggcacttccggtctcgtgccgccttcccaggaccctcagggagagcgggcagccttccaggtggacagaaatggactcagaactcaaggaagaaattcctgtgcatgaggaattcattttgtgtggtggagccgaaacccaggttctaaaatgtgggccctggacagacctctttcatgatcaaagtgtcaaaaggcctaagctgcttattttcattattcctggtaacccaggtttttctgccttttatgtgccatttgcaaaggctttatactctttgacaaacagacgctttccagtttggactatcagtcatgctgggcatgcgttggctcccaaagacaagaagattcttacaacatcagagggtggcattcttgctgtcctctcgtggtggacacaggaggcaagccctcttgggactctcgcgggctctaccctcatgaccccatctgatcctaattacttcccaaagacccctctccacctcttaatagcatttgggcatagggtttcacctatggatttgggggccatataagcattcagaccattacagctggttttcacaattgaataaaatttggatttagggcatggaggtgggtgcagaggtacaacagacagaaagagtagcacagaagggagcaagatttaatagcgatgttactgctaagcagggccagtttgagagggactttgagagctggagagagagccaggactccatgctggaaggtttctaaatggaagaagtaataccatggagatgcaaactacctcctttaaatctgtgagaattctagcatgttcactgttc

SEQ ID NO: 149454 - DNA, 3807 bp, Homo sapiens
  Payload ID: 9506
  Gene Symbol: LDAH
  Gene Name: lipid droplet associated hydrolase
  Uniprot ID: Q9H6V9
  ENST ID: ENST00000541941
  CDS Start-End: 331-918
gcggtactgtgacgtcacctgaggggggcacttccggtctcgtgccgccttcccaggaccctcagggagagcgggcagccttccaggtggacaggtaacccaggtttttctgccttttatgtgccatttgcaaaggctttatactctttgacaaacagacgctttccagtttggactatcagtcatgctgggcatgcgttggctcccaaagacaagaagattcttacaacatcagaggattcaaacgctcaagaaattaaggacatttatggactaaatggacaaatagagcacaaactagctttcctgagaactcatgtgccaaaggacatgaaacttgtgctcattggccattcaataggcagctatttcacacttcagatgctgaagcgagtccctgagctcccggtaattcgtgcctttctgctctttccaacaattgaacgaatgtctgagtcacccaatggcagaattgccactccacttttgtgctggtttcgatatgttctctatgttactggctacttattattgaaaccgtgtcctgagacaatcaagtccttgctaatcagaaggggccttcaagtaatgaacctagagaatgaattttcaccattgaatatattagaaccattctgccttgctaatgctgcctaccttgggggccaagaaatgatggaggtggtgaagagagatgacgaaaccataaaggagcatttatgtaagcttacattttattatggtactatagatccttggtgtccaaaagagtactatgaagacattaagaaggattttccagaaggagacattcgactctgtgagaaaaacatacctcatgctttcatcacccattttaaccaggaaatggcagacatgattgctgactccctaaaggatgacttgtccaaaatgtaaattggcctgaggaacaagcccccactgccagtacatggaggcagtcagtgtactagacttagtaggtaaatgtttaattttgaagactgatattagaaatgaagaaagtgagaacctttgtcttacaaaccaactctccgctcgccatgttataggctgaagtaaacacagttgatgaatcattccataggtttaaccatacattttccaagactcagggaacacagtgatctacacagagtcttgtgtttgcacaagatgcccagtggcaccatatggtttattttggtaggcaggatctttgcagatgaaaaaaaaatctacatgtacttgattttaattgagttacattgtagaataggctcctctggaggaaattatgaaatacctactagaaaatgtaaaataaatcagtgaatgttaagagtatagttagatatgtgaagtgtatgagattatgacaaggatacactcatgttccaggagcaggaagtgaacctgggtctcctgtaagacagaagatgaagatgagcccaggctaacttagcacagatcttggctgagatcatcaatgtgacgtctaatgtacctgcactagacagagaataaagttcaccagacattactctggtcagctaaccagataaagaattgttgaaggaccccaactgtgcctcctgccacaggacaaccagcaagttctatgctgagccttagcctcccaggttataagctccctgcaggctcctcctctccagagccaggatggagaggcactgggctgtcccaaagcaggcttggatgtgccaacgtacagttgctccttctgtaattcttgcactaaaactccattaaagaccatcaatgagccaaatagtgtgctagccattgaggatggagttcttagctacttaatgattcttttcttctggaaatcttctagtgaataatttttaaaagcttcttttaaactgctcagtaaaacattgccatacattaactctccatttctgcattaacttcatttgctggaaagaaattattttgttaatgaaccaaacccagccattaagttatgtgaattcaccttctctagacacattgaggtatggcagagaagacacatattccctggcctagagtgggctgacaatattgctgcctcccctaaattgactcaatcttgagaaccacatactgcagtgacagttgatcatggatcagaaatattcctttttctcctagaggaaatccctcatggcattatcattccctaaggacaatgagatgtccctccgctcaaatcctaaagccccctgatgaaagatttggctctgatttgctgccaacttattggtaagtgctgaatgagttactgtgctttggcatagcttctacatcacagcaagtgacttctcagaggggaaaagccaagctccagacaaggagtgctgttagcccaaggggaagagctaatagatacataggccgtaagcacagggctgtacacagatcctttattggcatctgcatgagaggcctagaaatcggatgttagaagctaggaatcatggctctgagcgccttgcatacaggagatactcactgatactaaatcaaggcatgtaaacaatactgggtaaatcatacctaccagaataaagagtaacattcagagcttttcttttatctgttattttaaatgttactccatatttcaaaagtctgcacgtatgaaattgtgtcttatttctggtttttagagcctaagaaagatactcattcttaattcctatttatcatctgaaaaccaaatgaatttttgaaataaatgttttaccagcatttctgacctggtctggcctgatctctgtgttgggcaagagagggtacaatttgagcagttctcctgagttagactcggctcaaagtctctcttttaaagtgaaaagccacctttctcattgcttttttcataggtggaagaatcagatttcaagagactgaagttcattctgtttcattagggattagactaaaatggacaaacagtggaagaaatccattttccagaagcagctctgcctgtatgtcccagtcaaccacatggatggtctttgtgaaagttttaacttcctgcagagttaccgagtgctcagcgattgagctttgaccacacccgtgtttgttcctagtctgttcccagccataagcatctccacaagccctctgtggcttgtgtggcctgatgtccatggccaccaagggcctctcaccatacgcttctccactcaacctttggagagacacggaccaccaaaggcttgatttttcttcatcctacattatattcaaaacaaacaggctgggtgccgtagctcacacctgtgatcccagcaccttgggaggatgagctgggaagatcgtttgaggctaggagtttgagaccagcccgtgcaaaaaacgagacctcgtgtctaaaataatttttaaaaaagagcaaaaaaaaaaagcaatttcagattaaaggagactgaagagacatgacaattggacacaacatctgattctgaattggatgtttttgttataaaagacattgttgagacaatttgcacaacttgaatgaggtctgaagattagctgggagtaagatgccactgttaattttctgatttcagtggttgtactgggaagaagtaagagagtgtccttgtttgtactggagacactgaggtatctgggggtgaggggcatcatgtctgtttactgtcagatggttgaggggaaaataatgttctttgtacttgcagattttttggaagtttgagatgttttagaatttgtaaaaataattatttttaaaaccccaccatgctatctcctgca

SEQ ID NO: 149455 - DNA, 3663 bp, Homo sapiens
  Payload ID: 9506
  Gene Symbol: LDAH
  Gene Name: lipid droplet associated hydrolase
  Uniprot ID: Q9H6V9
  ENST ID: ENST00000619656
  CDS Start-End: 187-774
gcggtactgtgacgtcacctgaggggggcacttccggtctcgtgccgccttcccaggaccctcagggagagcgggcagccttccaggtggacagattcaaacgctcaagaaattaaggacatttatggactaaatggacaaatagagcacaaactagctttcctgagaactcatgtgccaaaggacatgaaacttgtgctcattggccattcaataggcagctatttcacacttcagatgctgaagcgagtccctgagctcccggtaattcgtgcctttctgctctttccaacaattgaacgaatgtctgagtcacccaatggcagaattgccactccacttttgtgctggtttcgatatgttctctatgttactggctacttattattgaaaccgtgtcctgagacaatcaagtccttgctaatcagaaggggccttcaagtaatgaacctagagaatgaattttcaccattgaatatattagaaccattctgccttgctaatgctgcctaccttgggggccaagaaatgatggaggtggtgaagagagatgacgaaaccataaaggagcatttatgtaagcttacattttattatggtactatagatccttggtgtccaaaagagtactatgaagacattaagaaggattttccagaaggagacattcgactctgtgagaaaaacatacctcatgctttcatcacccattttaaccaggaaatggcagacatgattgctgactccctaaaggatgacttgtccaaaatgtaaattggcctgaggaacaagcccccactgccagtacatggaggcagtcagtgtactagacttagtaggtaaatgtttaattttgaagactgatattagaaatgaagaaagtgagaacctttgtcttacaaaccaactctccgctcgccatgttataggctgaagtaaacacagttgatgaatcattccataggtttaaccatacattttccaagactcagggaacacagtgatctacacagagtcttgtgtttgcacaagatgcccagtggcaccatatggtttattttggtaggcaggatctttgcagatgaaaaaaaaatctacatgtacttgattttaattgagttacattgtagaataggctcctctggaggaaattatgaaatacctactagaaaatgtaaaataaatcagtgaatgttaagagtatagttagatatgtgaagtgtatgagattatgacaaggatacactcatgttccaggagcaggaagtgaacctgggtctcctgtaagacagaagatgaagatgagcccaggctaacttagcacagatcttggctgagatcatcaatgtgacgtctaatgtacctgcactagacagagaataaagttcaccagacattactctggtcagctaaccagataaagaattgttgaaggaccccaactgtgcctcctgccacaggacaaccagcaagttctatgctgagccttagcctcccaggttataagctccctgcaggctcctcctctccagagccaggatggagaggcactgggctgtcccaaagcaggcttggatgtgccaacgtacagttgctccttctgtaattcttgcactaaaactccattaaagaccatcaatgagccaaatagtgtgctagccattgaggatggagttcttagctacttaatgattcttttcttctggaaatcttctagtgaataatttttaaaagcttcttttaaactgctcagtaaaacattgccatacattaactctccatttctgcattaacttcatttgctggaaagaaattattttgttaatgaaccaaacccagccattaagttatgtgaattcaccttctctagacacattgaggtatggcagagaagacacatattccctggcctagagtgggctgacaatattgctgcctcccctaaattgactcaatcttgagaaccacatactgcagtgacagttgatcatggatcagaaatattcctttttctcctagaggaaatccctcatggcattatcattccctaaggacaatgagatgtccctccgctcaaatcctaaagccccctgatgaaagatttggctctgatttgctgccaacttattggtaagtgctgaatgagttactgtgctttggcatagcttctacatcacagcaagtgacttctcagaggggaaaagccaagctccagacaaggagtgctgttagcccaaggggaagagctaatagatacataggccgtaagcacagggctgtacacagatcctttattggcatctgcatgagaggcctagaaatcggatgttagaagctaggaatcatggctctgagcgccttgcatacaggagatactcactgatactaaatcaaggcatgtaaacaatactgggtaaatcatacctaccagaataaagagtaacattcagagcttttcttttatctgttattttaaatgttactccatatttcaaaagtctgcacgtatgaaattgtgtcttatttctggtttttagagcctaagaaagatactcattcttaattcctatttatcatctgaaaaccaaatgaatttttgaaataaatgttttaccagcatttctgacctggtctggcctgatctctgtgttgggcaagagagggtacaatttgagcagttctcctgagttagactcggctcaaagtctctcttttaaagtgaaaagccacctttctcattgcttttttcataggtggaagaatcagatttcaagagactgaagttcattctgtttcattagggattagactaaaatggacaaacagtggaagaaatccattttccagaagcagctctgcctgtatgtcccagtcaaccacatggatggtctttgtgaaagttttaacttcctgcagagttaccgagtgctcagcgattgagctttgaccacacccgtgtttgttcctagtctgttcccagccataagcatctccacaagccctctgtggcttgtgtggcctgatgtccatggccaccaagggcctctcaccatacgcttctccactcaacctttggagagacacggaccaccaaaggcttgatttttcttcatcctacattatattcaaaacaaacaggctgggtgccgtagctcacacctgtgatcccagcaccttgggaggatgagctgggaagatcgtttgaggctaggagtttgagaccagcccgtgcaaaaaacgagacctcgtgtctaaaataatttttaaaaaagagcaaaaaaaaaaagcaatttcagattaaaggagactgaagagacatgacaattggacacaacatctgattctgaattggatgtttttgttataaaagacattgttgagacaatttgcacaacttgaatgaggtctgaagattagctgggagtaagatgccactgttaattttctgatttcagtggttgtactgggaagaagtaagagagtgtccttgtttgtactggagacactgaggtatctgggggtgaggggcatcatgtctgtttactgtcagatggttgaggggaaaataatgttctttgtacttgcagattttttggaagtttgagatgttttagaatttgtaaaaataattatttttaaaaccccaccatgctatctcctgca

SEQ ID NO: 149456 - DNA, 1179 bp, Homo sapiens
  Payload ID: 9506
  Gene Symbol: LDAH
  Gene Name: lipid droplet associated hydrolase
  Uniprot ID: Q9H6V9
  ENST ID: ENST00000626491
  CDS Start-End: 68-901
acttccggtctcgtgccgccttcccaggaccctcagggagagcgggcagccttccaggtggacagaaatggactcagaactcaaggaagaaattcctgtgcatgaggaattcattttgtgtggtggagccgaaacccaggttctaaaatgtgggccctggacagacctctttcatgatcaaagtgtcaaaaggcctaagctgcttattttcattattcctgattcaaacgctcaagaaattaaggacatttatggactaaatggacaaatagagcacaaactagctttcctgagaactcatgtgccaaaggacatgaaacttgtgctcattggccattcaataggcagctatttcacacttcagatgctgaagcgagtccctgagctcccggtaattcgtgcctttctgctctttccaacaattgaacgaatgtctgagtcacccaatggcagaattgccactccacttttgtgctggtttcgatatgttctctatgttactggctacttattattgaaaccgtgtcctgagacaatcaagtccttgctaatcagaaggggccttcaagtaatgaacctagagaatgaattttcaccattgaatatattagaaccattctgccttgctaatgctgcctaccttgggggccaagaaatgatggaggtggtgaagagagatgacgaaaccataaaggagcatttatgtaagcttacattttattatggtactatagatccttggtgtccaaaagagtactatgaagacattaagaaggattttccagaaggagacattcgactctgtgagaaaaacatacctcatgctttcatcacccattttaaccaggaaatggcagacatgattgctgactccctaaaggatgacttgtccaaaatgtaaattggcctgaggaacaagcccccactgccagtacatggaggcagtcagtgtactagacttagtaggtaaatgtttaattttgaagactgatattagaaatgaagaaagtgagaacctttgtcttacaaaccaactctccgctcgccatgttataggctgaagtaaacacagttgatgaatcattccataggtttaaccatacattttccaagactcagggaacacagtgatctacacagagtcttgtgtttgcacaagatgcccagtggcaccatatg

SEQ ID NO: 149457 - DNA, 5384 bp, Homo sapiens
  Payload ID: 9507
  Gene Symbol: LPIN1
  Gene Name: lipin 1
  Uniprot ID: Q14693
  ENST ID: ENST00000256720
  CDS Start-End: 94-2766
ccgcccccgaaggcgagctgcgctgacagccggcggcgggctgggtgtttgcaatacaaaggcggccacgcgcggcgccgctcggtgcagaccatgaattacgtggggcagttagccggccaggtgtttgtcaccgtgaaggagctctacaaggggctgaatcccgccacactctcagggtgcattgacatcattgtcatccgccagcccaatggaaacctccaatgctcccctttccacgtccgctttgggaagatgggggtcctgcgctcccgagagaaagtggttgacatagaaatcaatggggaatctgtggatttgcatatgaaattgggagataatggagaagcattttttgttcaagaaacagataatgatcaggaagttatccctatgcacctggccacctcccccatcctgtcagaaggagcttcgagaatggaatgccagctgaaaaggggctctgtggacaggatgagaggcctggaccccagcacgccagcccaagtgatcgctcccagcgagacgccgtcaagcagctctgtagtaaagaagagaagaaaaaggaggagaaagtcacagctggacagcctgaagagagatgacaacatgaacacatctgaggatgaggacatgttccccatcgagatgagctcggatgaggccatggagctgctggagagcagcagaactcttcctaatgatatacctccattccaagatgatattcctgaggaaaacctctccctggctgtgatttaccctcagtcagcctcataccctaattcggatagagagtggtcacccactcccagtccttccggttcccgaccttcaacacctaaaagtgattcagaattggtcagcaagtccacggaaaggacagggcagaagaacccagaaatgctttggctgtggggagagctgccgcaggctgctaagtcttcttctccacacaagatgaaagagtccagcccattgagcagtagaaaaatttgtgataaaagtcactttcaggccattcacagcgaatcttcagacacttttagtgaccaatcgccaactctggtcggtggggcacttttggaccagaacaagcctcagacagaaatgcagtttgtgaatgaagaagacctggagaccttaggagcagcagcgccactcttgcccatgatcgaggagctcaaacccccctctgccagtgtagtccagacagcaaacaagacggattctccttccaggaaaagagataaacgaagccgacatcttggtgctgacggcgtctacttggatgacctcacagacatggatcctgaagtggcggccctgtattttcccaaaaacggagatccttccggactcgcaaaacatgcaagcgacaacggagcccggtcagccaaccagtccccgcagtcggtgggcagctcgggcgtggacagtggcgtggagagcacctcggacgggctgagggacctcccttccatcgccatctccctctgcgggggcctcagcgaccaccgggagatcacgaaagatgcattcctggagcaagctgtgtcatatcaacagtttgtggacaaccccgctattatcgatgaccccaatctcgtggtaaagattgggagtaaatattataactggacaacagcagcacccctcctcctggcaatgcaggccttccagaaacctttgccaaaggccactgtggaatctatcatgagggataaaatgcccaaaaagggaggaagatggtggttttcatggaggggaagaaacaccacaatcaaggaggaaagtaagccagagcagtgcttggctggcaaggcccatagcaccggagagcaaccgccgcagctcagcttggccaccagggtaaagcatgaatcatcctccagtgatgaggagcgcgcagctgccaagccatcaaacgcaggccacctccctcttctgcctaatgtcagctacaagaagactctccggctgacttccgagcagcttaaaagcttgaagttgaagaatggccccaacgacgtggttttcagtgtcaccacgcagtaccaaggcacgtgccgctgtgagggcaccatctatctgtggaactgggatgataaagtcatcatttctgatattgatgggacaattaccagatcagatactcttggccacattttgcccacccttgggaaggattggacccatcagggcatcgctaagctgtaccataaagtgagccagaatggatataaatttctctactgttctgcccgtgccatcgggatggcggacatgacgcggggctacctgcactgggtcaacgagaggggcacggtgctgccccaggggcccctgctgctgagtcccagcagcctcttctctgccctgcacagagaagtgattgaaaagaagccagaaaagtttaaagtccagtgtttgacagacatcaaaaacctgtttttccccaacacagaacccttttatgctgcttttggaaaccgaccagctgatgtgtattcatacaagcaagtaggagtgtctttgaatagaatatttaccgtcaaccctaaaggagagctggtacaggaacatgcaaagaccaacatctcttcgtatgtgagactctgtgaagtagtcgaccacgttttcccgttgctgaaaagaagccattcttcagactttccctgttcggataccttcagtaacttcaccttttggagagagccactgccaccttttgaaaaccaggacattcattctgcctcagcgtaaaatgtcccaagcagcctcttgccagcagtgcagagcctggttgtcacccattaaaggataggtctccccggagtgcacagctccacctgggagcctggcgcgtcatcattggcctgacagcagagagaattgagaagcatttctcccctgccccaccccggggctgacatttctaagcaagataggaagggagcactttctaggctaggagttgggtgcatttgtaccgtgaaaagcattcctcagttgtggcttaatgccagttacgacgctgcctttccggcctgctccagcaagtagctactggttcacgtgcagtttggggctgtgaaacctaggcagaaggcggctgtctgagggctgtccccgcctaggacagggtcaatcgaggaatgccagatgtgcacggtttttggcaaagtagggggcacatttccattatagcaatgttagtgccaccaccttctgaacacagtggggagggctgtgaaggctcatgtgacctggatctgaggtctctgatagaaatctggacgccaccgggtccaggcctggcctcagacttggccttgtggatgggccccttacagtatttgctgactagtctcatttttaggtgataaatttttctttaattcctttggttaaagatagtctatttcattggcatatctccccccagtttttgtggctcaaggctggaatatttatgccttaatatatctatggcagacatttaagaatgcgctttatctagctcatggtaactttgcaacgccttagattaaaatgacagtaaatattactaaggcagtattttgaatgagtttgacactgccggcttccttccatccagcgaggtggtgctgacagtgtggacttgagcacacttatgccaaatgataatgatactgacttctgttgggagctctccaaagaaactggttggttttaagaaaatagtttcaagaagttcaactatattcttttagatattatgtattgttttactctgattaggttactgtgataggcatttattcatattctttctataccactgtcattaatatattaaaaagatgtatgtgttagactatcgaaagggccttattctctctttctcatagactgaccttcttttggaatttctgagtcatttattttccttagctttttccactcaaattaagggcaagcgaaaaagtaataatttggcattctttaagcctacagaatgtgattctttcacttgtttattacactggctcgtggacagaacaatttgaaaagtgaaagaattattttggtaaaagattttgctttacttttcgaagcattatttttttaaagagtgttttactccaacgattgaaacattttcctatttaaatttcattgttagaatcacaggaggcaaaaaatggaacggttgaatgaaattttactctttctgtgaaagaaaatccacagagttgttgcctccgttgtagttggtgggccccgttagcattggatgcctttgccaaatggttcatgtggacacacaaaggcaaacagatctgccatcgatcgcagatttctgtagaaacacggatgtgcatgtgcagattcccttttgcaggtattaaaaataattaaaaatagtcctgcctgaggttgcagtgagccgagcttgcactactgcactccagcctgggtgacagagtaagactccatgtcaaaaaaaaaaaaaaaaaaaaaaaagtcctgccttaactaactcctctgcgcttgttcactagtaacctaaagaggctatattcattctttatgcaatgagggtatttttgagtgaattttaactgctctgaactaagtataagctcatgggcctgcaaaggttcagacggtttctcctttgcacccaggaggaactttggctgcgagaatggggggatgtatccctcatgcagttggcatccaggcagccctctgcagcagcacaccctgcaggcggagttttcagaggatgcaattttggatcccgaattttgatgtaccttaaacttccacatcactgcaccctgaaacagagcatgctttccagaaagtcacactctcagatctgtgtcaagttcaatgtgagccctggcaaggctggcatattaacacctgccttctggcttctgaaagtgagatttgtatatgggctgcactcacgcatatacgagttggtttatctttgtgtacatgactataacccagtgatgctgaggtcatgtgctggaatgctgtatttggaccacacatttcaaagttgccctatggaaatgaatcctacttagtgacaagtcatcaaatgtttgtcacatgtgatgaagacaaatatgtatacctggcatagagaaaaatatatacctggtacattggagaaaaataattacactttcaaagagaattccctttgcaattttatgtttggatcaccactgtaagcacactttatttgcatttgatctgtatttgtatatgctgatgcaatgataaaaatcactgtaatacttcattgtgttgtactggatgcaaagctagaaaatattgcaataaatgagaccgatgaaagacttctctgaaaa

SEQ ID NO: 149458 - DNA, 5690 bp, Homo sapiens
  Payload ID: 9507
  Gene Symbol: LPIN1
  Gene Name: lipin 1
  Uniprot ID: Q14693
  ENST ID: ENST00000396097
  CDS Start-End: 278-3076
gcgcagggcatggatgaaagcaagctggagagggagagaggatgggaggcgaggaggcagcctgagggaaggaacaggagggaagagagatgaagggcaagaccggggccagccatgcctgtcctaacagcagccacccagcagtggcccagcctgctgagaactagaaaatcagaagaaaaaggagaatccaccaggagacccaggtaactctgaagcgtgagctgccagaattcaaggccacctgcttaacagaagacaactagaaacctcatccatgagcagagtgcagaccatgaattacgtggggcagttagccggccaggtgtttgtcaccgtgaaggagctctacaaggggctgaatcccgccacactctcagggtgcattgacatcattgtcatccgccagcccaatggaaacctccaatgctcccctttccacgtccgctttgggaagatgggggtcctgcgctcccgagagaaagtggttgacatagaaatcaatggggaatctgtggatttgcatatgaaattgggagataatggagaagcattttttgttcaagaaacagataatgatcaggaagttatccctatgcacctggccacctcccccatcctgtcagaaggagcttcgagaatggaatgccagctgaaaaggggctctgtggacaggatgagaggcctggaccccagcacgccagcccaagtgatcgctcccagcgagacgccgtcaagcagctctgtagtaaagaagagaagaaaaaggaggagaaagtcacagctggacagcctgaagagagatgacaacatgaacacatctgaggatgaggacatgttccccatcgagatgagctcggatgaggccatggagctgctggagagcagcagaactcttcctaatgatatacctccattccaagatgatattcctgaggaaaacctctccctggctgtgatttaccctcagtcagcctcataccctaattcggatagagagtggtcacccactcccagtagcctggtagattgcaaaaggactgcccctcatcttgcagttgcggccgagggaggtctgtctagttcttgccctccacagtcttccctgttccatccttcggaaagtccttccggttcccgaccttcaacacctaaaagtgattcagaattggtcagcaagtccacggaaaggacagggcagaagaacccagaaatgctttggctgtggggagagctgccgcaggctgctaagtcttcttctccacacaagatgaaagagtccagcccattgagcagtagaaaaatttgtgataaaagtcactttcaggccattcacagcgaatcttcagacacttttagtgaccaatcgccaactctggtcggtggggcacttttggaccagaacaagcctcagacagaaatgcagtttgtgaatgaagaagacctggagaccttaggagcagcagcgccactcttgcccatgatcgaggagctcaaacccccctctgccagtgtagtccagacagcaaacaagacggattctccttccaggaaaagagataaacgaagccgacatcttggtgctgacggcgtctacttggatgacctcacagacatggatcctgaagtggcggccctgtattttcccaaaaacggagatccttccggactcgcaaaacatgcaagcgacaacggagcccggtcagccaaccagtccccgcagtcggtgggcagctcgggcgtggacagtggcgtggagagcacctcggacgggctgagggacctcccttccatcgccatctccctctgcgggggcctcagcgaccaccgggagatcacgaaagatgcattcctggagcaagctgtgtcatatcaacagtttgtggacaaccccgctattatcgatgaccccaatctcgtggtaaagattgggagtaaatattataactggacaacagcagcacccctcctcctggcaatgcaggccttccagaaacctttgccaaaggccactgtggaatctatcatgagggataaaatgcccaaaaagggaggaagatggtggttttcatggaggggaagaaacaccacaatcaaggaggaaagtaagccagagcagtgcttggctggcaaggcccatagcaccggagagcaaccgccgcagctcagcttggccaccagggtaaagcatgaatcatcctccagtgatgaggagcgcgcagctgccaagccatcaaacgcaggccacctccctcttctgcctaatgtcagctacaagaagactctccggctgacttccgagcagcttaaaagcttgaagttgaagaatggccccaacgacgtggttttcagtgtcaccacgcagtaccaaggcacgtgccgctgtgagggcaccatctatctgtggaactgggatgataaagtcatcatttctgatattgatgggacaattaccagatcagatactcttggccacattttgcccacccttgggaaggattggacccatcagggcatcgctaagctgtaccataaagtgagccagaatggatataaatttctctactgttctgcccgtgccatcgggatggcggacatgacgcggggctacctgcactgggtcaacgagaggggcacggtgctgccccaggggcccctgctgctgagtcccagcagcctcttctctgccctgcacagagaagtgattgaaaagaagccagaaaagtttaaagtccagtgtttgacagacatcaaaaacctgtttttccccaacacagaacccttttatgctgcttttggaaaccgaccagctgatgtgtattcatacaagcaagtaggagtgtctttgaatagaatatttaccgtcaaccctaaaggagagctggtacaggaacatgcaaagaccaacatctcttcgtatgtgagactctgtgaagtagtcgaccacgttttcccgttgctgaaaagaagccattcttcagactttccctgttcggataccttcagtaacttcaccttttggagagagccactgccaccttttgaaaaccaggacattcattctgcctcagcgtaaaatgtcccaagcagcctcttgccagcagtgcagagcctggttgtcacccattaaaggataggtctccccggagtgcacagctccacctgggagcctggcgcgtcatcattggcctgacagcagagagaattgagaagcatttctcccctgccccaccccggggctgacatttctaagcaagataggaagggagcactttctaggctaggagttgggtgcatttgtaccgtgaaaagcattcctcagttgtggcttaatgccagttacgacgctgcctttccggcctgctccagcaagtagctactggttcacgtgcagtttggggctgtgaaacctaggcagaaggcggctgtctgagggctgtccccgcctaggacagggtcaatcgaggaatgccagatgtgcacggtttttggcaaagtagggggcacatttccattatagcaatgttagtgccaccaccttctgaacacagtggggagggctgtgaaggctcatgtgacctggatctgaggtctctgatagaaatctggacgccaccgggtccaggcctggcctcagacttggccttgtggatgggccccttacagtatttgctgactagtctcatttttaggtgataaatttttctttaattcctttggttaaagatagtctatttcattggcatatctccccccagtttttgtggctcaaggctggaatatttatgccttaatatatctatggcagacatttaagaatgcgctttatctagctcatggtaactttgcaacgccttagattaaaatgacagtaaatattactaaggcagtattttgaatgagtttgacactgccggcttccttccatccagcgaggtggtgctgacagtgtggacttgagcacacttatgccaaatgataatgatactgacttctgttgggagctctccaaagaaactggttggttttaagaaaatagtttcaagaagttcaactatattcttttagatattatgtattgttttactctgattaggttactgtgataggcatttattcatattctttctataccactgtcattaatatattaaaaagatgtatgtgttagactatcgaaagggccttattctctctttctcatagactgaccttcttttggaatttctgagtcatttattttccttagctttttccactcaaattaagggcaagcgaaaaagtaataatttggcattctttaagcctacagaatgtgattctttcacttgtttattacactggctcgtggacagaacaatttgaaaagtgaaagaattattttggtaaaagattttgctttacttttcgaagcattatttttttaaagagtgttttactccaacgattgaaacattttcctatttaaatttcattgttagaatcacaggaggcaaaaaatggaacggttgaatgaaattttactctttctgtgaaagaaaatccacagagttgttgcctccgttgtagttggtgggccccgttagcattggatgcctttgccaaatggttcatgtggacacacaaaggcaaacagatctgccatcgatcgcagatttctgtagaaacacggatgtgcatgtgcagattcccttttgcaggtattaaaaataattaaaaatagtcctgcctgaggttgcagtgagccgagcttgcactactgcactccagcctgggtgacagagtaagactccatgtcaaaaaaaaaaaaaaaaaaaaaaaagtcctgccttaactaactcctctgcgcttgttcactagtaacctaaagaggctatattcattctttatgcaatgagggtatttttgagtgaattttaactgctctgaactaagtataagctcatgggcctgcaaaggttcagacggtttctcctttgcacccaggaggaactttggctgcgagaatggggggatgtatccctcatgcagttggcatccaggcagccctctgcagcagcacaccctgcaggcggagttttcagaggatgcaattttggatcccgaattttgatgtaccttaaacttccacatcactgcaccctgaaacagagcatgctttccagaaagtcacactctcagatctgtgtcaagttcaatgtgagccctggcaaggctggcatattaacacctgccttctggcttctgaaagtgagatttgtatatgggctgcactcacgcatatacgagttggtttatctttgtgtacatgactataacccagtgatgctgaggtcatgtgctggaatgctgtatttggaccacacatttcaaagttgccctatggaaatgaatcctacttagtgacaagtcatcaaatgtttgtcacatgtgatgaagacaaatatgtatacctggcatagagaaaaatatatacctggtacattggagaaaaataattacactttcaaagagaattccctttgcaattttatgtttggatcaccactgtaagcacactttatttgcatttgatctgtatttgtatatgctgatgcaatgataaaaatcactgtaatacttcattgtgttgtactggatgcaaagctagaaaatattgcaataaatgagaccgatgaaagacttctctg

SEQ ID NO: 149459 - DNA, 1761 bp, Homo sapiens
  Payload ID: 9507
  Gene Symbol: LPIN1
  Gene Name: lipin 1
  Uniprot ID: Q14693
  ENST ID: ENST00000396098
  CDS Start-End: 363-1742
agcaagctggagagggagagaggatgggaggcgaggaggcagcctgagggaaggaacaggagggaagagagatgaagggcaagaccggggccagccatgcctgtcctaacagcagccacccagcagtggcccagcctgctgagaactagaaaatcagaagaaaaaggagaatccaccaggagacccaggttcgcatgagcaggggcctttatctgaagttaatggaagctgagccaggtcctgacaatgtgccttctgatggggagatgagactttcctctgaaagctaaggtaactctgaagcgtgagctgccagaattcaaggccacctgcttaacagaagacaactagaaacctcatccatgagcagagtgcagaccatgaattacgtggggcagttagccggccaggtgtttgtcaccgtgaaggagctctacaaggggctgaatcccgccacactctcagggtgcattgacatcattgtcatccgccagcccaatggaaacctccaatgctcccctttccacgtccgctttgggaagatgggggtcctgcgctcccgagagaaagtggttgacatagaaatcaatggggaatctgtggatttgcatatgaaattgggagataatggagaagcattttttgttcaagaaacagataatgatcaggaagttatccctatgcacctggccacctcccccatcctgtcagaaggagcttcgagaatggaatgccagctgaaaaggggctctgtggacaggatgagaggcctggaccccagcacgccagcccaagtgatcgctcccagcgagacgccgtcaagcagctctgtagtaaagaagagaagaaaaaggaggagaaagtcacagctggacagcctgaagagagatgacaacatgaacacatctgaggatgaggacatgttccccatcgagatgagctcggatgaggccatggagctgctggagagcagcagaactcttcctaatgatatacctccattccaagatgatattcctgaggaaaacctctccctggctgtgatttaccctcagtcagcctcataccctaattcggatagagagtggtcacccactcccagtagcctggtagattgcaaaaggactgcccctcatcttgcagttgcggccgagggaggtctgtctagttcttgccctccacagtcttccctgttccatccttcggaaagtccttccggttcccgaccttcaacacctaaaagtgattcagaattggtcagcaagtccacggaaaggacagggcagaagaacccagaaatgctttggctgtggggagagctgccgcaggctgctaagtcttcttctccacacaagatgaaagagtccagcccattgagcagtagaaaaatttgtgataaaagtcactttcaggccattcacagcgaatcttcagacacttttagtgaccaatcgccaactctggtcggtggggcacttttggaccagaacaagcctcagacagaaatgcagtttgtgaatgaagaagacctggagaccttaggagcagcagcgccactcttgcccatgatcgaggagctcaaacccccctctgccagtgtagtccagacagcaaacaagacggattctccttccaggaaaagagataaacgaagccgacatcttggtgctgacggcgtctacttggatgacctcacagacatggatcctgaagtggcggccctgtattttcccaaaaagtaaaattcctgttaattcctca

SEQ ID NO: 149460 - DNA, 3228 bp, Homo sapiens
  Payload ID: 9507
  Gene Symbol: LPIN1
  Gene Name: lipin 1
  ENST ID: ENST00000396099
  CDS Start-End: 363-2468
agcaagctggagagggagagaggatgggaggcgaggaggcagcctgagggaaggaacaggagggaagagagatgaagggcaagaccggggccagccatgcctgtcctaacagcagccacccagcagtggcccagcctgctgagaactagaaaatcagaagaaaaaggagaatccaccaggagacccaggttcgcatgagcaggggcctttatctgaagttaatggaagctgagccaggtcctgacaatgtgccttctgatggggagatgagactttcctctgaaagctaaggtaactctgaagcgtgagctgccagaattcaaggccacctgcttaacagaagacaactagaaacctcatccatgagcagagtgcagaccatgaattacgtggggcagttagccggccaggtgtttgtcaccgtgaaggagctctacaaggggctgaatcccgccacactctcagggtgcattgacatcattgtcatccgccagcccaatggaaacctccaatgctcccctttccacgtccgctttgggaagatgggggtcctgcgctcccgagagaaagtggttgacatagaaatcaatggggaatctgtggatttgcatatgaaattgggagataatggagaagcattttttgttcaagaaacagataatgatcaggaagttatccctatgcacctggccacctcccccatcctgtcagaaggagcttcgagaatggaatgccagctgaaaaggggctctgtggacaggatgagaggcctggaccccagcacgccagcccaagtgatcgctcccagcgagacgccgtcaagcagctctgtagtaaagaagagaagaaaaaggaggagaaagtcacagctggacagcctgaagagagatgacaacatgaacacatctgaggatgaggacatgttccccatcgagatgagctcggatgaggccatggagctgctggagagcagcagaactcttcctaatgatatacctccattccaagatgatattcctgaggaaaacctctccctggctgtgatttaccctcagtcagcctcataccctaattcggatagagagtggtcacccactcccagtagcctggtagattgcaaaaggactgcccctcatcttgcagttgcggccgagggaggtctgtctagttcttgccctccacagtcttccctgttccatccttcggaaagtccttccggttcccgaccttcaacacctaaaagtgattcagaattggtcagcaagtccacggaaaggacagggcagaagaacccagaaatgctttggctgtggggagagctgccgcaggctgctaagtcttcttctccacacaagatgaaagagtccagcccattgagcagtagaaaaatttgtgataaaagtcactttcaggccattcacagcgaatcttcagacacttttagtgaccaatcgccaactctggtcggtggggcacttttggaccagaacaagcctcagacagaaatgcagtttgtgaatgaagaagacctggagaccttaggagcagcagcgccactcttgcccatgatcgaggagctcaaacccccctctgccagtgtagtccagacagcaaacaagacggattctccttccaggaaaagagataaacgaagccgacatcttggtgctgacggcgtctacttggatgacctcacagacatggatcctgaagtggcggccctgtattttcccaaaaacggagatccttccggactcgcaaaacatgcaagcgacaacggagcccggtcagccaaccagtccccgcagtcggtgggcagctcgggcgtggacagtggcgtggagagcacctcggacgggctgagggacctcccttccatcgccatctccctctgcgggggcctcagcgaccaccgggagatcacgaaagatgcattcctggagcaagctgtgtcatatcaacagtttgtggacaaccccgctattatcgatgaccccaatctcgtggtaaagattgggagtaaatattataactggacaacagcagcacccctcctcctggcaatgcaggccttccagaaacctttgccaaaggccactgtggaatctatcatgagggataaaatgcccaaaaagggaggaagatggtggttttcatggaggggaagaaacaccacaatcaaggaggaaagtaagccagagcagtgcttggctggcaaggcccatagcaccggagagcaaccgccgcagctcagcttggccaccagggtaaagcatgaatcatcctccagtgatgaggagcgcgcagctgccaagccatcaaacgcaggccacctccctcttctgcctaatgtcagctacaagaagactctccggctgacttccgagcagcttcttgaagttgaagaatggccccaacgacgtggttttcagtgtcaccacgcagtaccaaggcacgtgccgctgtgagggcaccatctatctgtggaactgggatgataaagtcatcatttctgatattgatgggacaattaccagatcagatactcttggccacattttgcccacccttgggaaggattggacccatcagggcatcgctaagctgtaccataaagtgagccagaatggatataaatttctctactgttctgcccgtgccatcgggatggcggacatgacgcggggctacctgcactgggtcaacgagaggggcacggtgctgccccaggggcccctgctgctgagtcccagcagcctcttctctgccctgcacagagaagtgattgaaaagaagccagaaaagtttaaagtccagtgtttgacagacatcaaaaacctgtttttccccaacacagaacccttttatgctgcttttggaaaccgaccagctgatgtgtattcatacaagcaagtaggagtgtctttgaatagaatatttaccgtcaaccctaaaggagagctggtacaggaacatgcaaagaccaacatctcttcgtatgtgagactctgtgaagtagtcgaccacgttttcccgttgctgaaaagaagccattcttcagactttccctgttcggataccttcagtaacttcaccttttggagagagccactgccaccttttgaaaaccaggacattcattctgcctcagcgtaaaatgtcccaagcagcctcttgccagcagtgcagagcctggttgtcacccattaaaggataggtctccccgga

SEQ ID NO: 149461 - DNA, 477 bp, Homo sapiens
  Payload ID: 9507
  Gene Symbol: LPIN1
  Gene Name: lipin 1
  ENST ID: ENST00000423495
  CDS Start-End: 394-477
gcaatacaaaggcggccacgcgcggcgccgctcgtatttgcaaccacgtggcttcacgagtccgccaaaccatcaggtgaataaacgggagaggagaagagagtctaggactcagccctggagtataagtcagagctggaaaagaagaggctccagagactggacggccactgagaggtgccacgtccctgaagggcctgaggagggttgatggcatgaccccatgaagcccagcaaggagtggagagaggagggctggaggactcccgcctgccatgacccagtccagggataagattggcacgatctcagctcactgcagcctccacctcctgggttcaagtgatcttcccacctcagcctcccaagtagctgggactacaggtgcagaccatgaattacgtggggcagttagccggccaggtgtttgtcaccgtgaaggagctctacaaggggctgaatcccgccacactctca

SEQ ID NO: 149462 - DNA, 3077 bp, Homo sapiens
  Payload ID: 9507
  Gene Symbol: LPIN1
  Gene Name: lipin 1
  Uniprot ID: Q14693
  ENST ID: ENST00000449576
  CDS Start-End: 54-2981
atttctctcctgatgctgggtgaggaggcagacagcaccatacagggcgggccatgggggaacaggacggcattcgcagctccagctgggagacctcgcagggcaagagctccccagactcggcttggtcatggattccaataatgagagaccctgggtggattcgaaatgtatggtcttcaaacattaacgtgcagaccatgaattacgtggggcagttagccggccaggtgtttgtcaccgtgaaggagctctacaaggggctgaatcccgccacactctcagggtgcattgacatcattgtcatccgccagcccaatggaaacctccaatgctcccctttccacgtccgctttgggaagatgggggtcctgcgctcccgagagaaagtggttgacatagaaatcaatggggaatctgtggatttgcatatgaaattgggagataatggagaagcattttttgttcaagaaacagataatgatcaggaagttatccctatgcacctggccacctcccccatcctgtcagaaggagcttcgagaatggaatgccagctgaaaaggggctctgtggacaggatgagaggcctggaccccagcacgccagcccaagtgatcgctcccagcgagacgccgtcaagcagctctgtagtaaagaagagaagaaaaaggaggagaaagtcacagctggacagcctgaagagagatgacaacatgaacacatctgaggatgaggacatgttccccatcgagatgagctcggatgaggccatggagctgctggagagcagcagaactcttcctaatgatatacctccattccaagatgatattcctgaggaaaacctctccctggctgtgatttaccctcagtcagcctcataccctaattcggatagagagtggtcacccactcccagtagcctggtagattgcaaaaggactgcccctcatcttgcagttgcggccgagggaggtctgtctagttcttgccctccacagtcttccctgttccatccttcggaaagtccttccggttcccgaccttcaacacctaaaagtgattcagaattggtcagcaagtccacggaaaggacagggcagaagaacccagaaatgctttggctgtggggagagctgccgcaggctgctaagtcttcttctccacacaagatgaaagagtccagcccattgagcagtagaaaaatttgtgataaaagtcactttcaggccattcacagcgaatcttcagacacttttagtgaccaatcgccaactctggtcggtggggcacttttggaccagaacaagcctcagacagaaatgcagtttgtgaatgaagaagacctggagaccttaggagcagcagcgccactcttgcccatgatcgaggagctcaaacccccctctgccagtgtagtccagacagcaaacaagacggattctccttccaggaaaagagataaacgaagccgacatcttggtgctgacggcgtctacttggatgacctcacagacatggatcctgaagtggcggccctgtattttcccaaaaacggagatccttccggactcgcaaaacatgcaagcgacaacggagcccggtcagccaaccagtccccgcagtcggtgggcagctcgggcgtggacagtggcgtggagagcacctcggacgggctgagggacctcccttccatcgccatctccctctgcgggggcctcagcgaccaccgggagatcacgaaagatgcattcctggagcaagctgtgtcatatcaacagtttgtggacaaccccgctattatcgatgaccccaatctcgtggtaaagattgggagtaaatattataactggacaacagcagcacccctcctcctggcaatgcaggccttccagaaacctttgccaaaggccactgtggaatctatcatgagggataaaatgcccaaaaagggaggaagatggtggttttcatggaggggaagaaacaccacaatcaaggaggaaagtaagccagagcagtgcttggctggcaaggcccatagcaccggagagcaaccgccgcagctcagcttggccaccagggtaaagcatgaatcatcctccagtgatgaggagcgcgcagctgccaagccatcaaacgcaggccacctccctcttctgcctaatgtcagctacaagaagactctccggctgacttccgagcagcttaaaagcttgaagttgaagaatggccccaacgacgtggttttcagtgtcaccacgcagtaccaaggcacgtgccgctgtgagggcaccatctatctgtggaactgggatgataaagtcatcatttctgatattgatgggacaattaccagatcagatactcttggccacattttgcccacccttgggaaggattggacccatcagggcatcgctaagctgtaccataaagtgagccagaatggatataaatttctctactgttctgcccgtgccatcgggatggcggacatgacgcggggctacctgcactgggtcaacgagaggggcacggtgctgccccaggggcccctgctgctgagtcccagcagcctcttctctgccctgcacagagaagtgattgaaaagaagccagaaaagtttaaagtccagtgtttgacagacatcaaaaacctgtttttccccaacacagaacccttttatgctgcttttggaaaccgaccagctgatgtgtattcatacaagcaagtaggagtgtctttgaatagaatatttaccgtcaaccctaaaggagagctggtacaggaacatgcaaagaccaacatctcttcgtatgtgagactctgtgaagtagtcgaccacgttttcccgttgctgaaaagaagccattcttcagactttccctgttcggataccttcagtaacttcaccttttggagagagccactgccaccttttgaaaaccaggacattcattctgcctcagcgtaaaatgtcccaagcagcctcttgccagcagtgcagagcctggttgtcacccattaaaggataggtctccccggagtgcacagctccacctgggagcct

SEQ ID NO: 149463 - DNA, 5582 bp, Homo sapiens
  Payload ID: 9507
  Gene Symbol: LPIN1
  Gene Name: lipin 1
  Uniprot ID: Q14693
  ENST ID: ENST00000425416
  CDS Start-End: 278-2968
gcgcagggcatggatgaaagcaagctggagagggagagaggatgggaggcgaggaggcagcctgagggaaggaacaggagggaagagagatgaagggcaagaccggggccagccatgcctgtcctaacagcagccacccagcagtggcccagcctgctgagaactagaaaatcagaagaaaaaggagaatccaccaggagacccaggtaactctgaagcgtgagctgccagaattcaaggccacctgcttaacagaagacaactagaaacctcatccatgagcagagtgcagaccatgaattacgtggggcagttagccggccaggtgtttgtcaccgtgaaggagctctacaaggggctgaatcccgccacactctcagggtgcattgacatcattgtcatccgccagcccaatggaaacctccaatgctcccctttccacgtccgctttgggaagatgggggtcctgcgctcccgagagaaagtggttgacatagaaatcaatggggaatctgtggatttgcatatgaaattgggagataatggagaagcattttttgttcaagaaacagataatgatcaggaagttatccctatgcacctggccacctcccccatcctgtcagaaggagcttcgagaatggaatgccagctgaaaaggggctctgtggacaggatgagaggcctggaccccagcacgccagcccaagtgatcgctcccagcgagacgccgtcaagcagctctgtagtaaagaagagaagaaaaaggaggagaaagtcacagctggacagcctgaagagagatgacaacatgaacacatctgaggatgaggacatgttccccatcgagatgagctcggatgaggccatggagctgctggagagcagcagaactcttcctaatgatatacctccattccaagatgatattcctgaggaaaacctctccctggctgtgatttaccctcagtcagcctcataccctaattcggatagagagtggtcacccactcccagtccttccggttcccgaccttcaacacctaaaagtgattcagaattggtcagcaagtccacggaaaggacagggcagaagaacccagaaatgctttggctgtggggagagctgccgcaggctgctaagtcttcttctccacacaagatgaaagagtccagcccattgagcagtagaaaaatttgtgataaaagtcactttcaggccattcacagcgaatcttcagacacttttagtgaccaatcgccaactctggtcggtggggcacttttggaccagaacaagcctcagacagaaatgcagtttgtgaatgaagaagacctggagaccttaggagcagcagcgccactcttgcccatgatcgaggagctcaaacccccctctgccagtgtagtccagacagcaaacaagacggattctccttccaggaaaagagataaacgaagccgacatcttggtgctgacggcgtctacttggatgacctcacagacatggatcctgaagtggcggccctgtattttcccaaaaacggagatccttccggactcgcaaaacatgcaagcgacaacggagcccggtcagccaaccagtccccgcagtcggtgggcagctcgggcgtggacagtggcgtggagagcacctcggacgggctgagggacctcccttccatcgccatctccctctgcgggggcctcagcgaccaccgggagatcacgaaagatgcattcctggagcaagctgtgtcatatcaacagtttgtggacaaccccgctattatcgatgaccccaatctcgtggtaaagattgggagtaaatattataactggacaacagcagcacccctcctcctggcaatgcaggccttccagaaacctttgccaaaggccactgtggaatctatcatgagggataaaatgcccaaaaagggaggaagatggtggttttcatggaggggaagaaacaccacaatcaaggaggaaagtaagccagagcagtgcttggctggcaaggcccatagcaccggagagcaaccgccgcagctcagcttggccaccagggtaaagcatgaatcatcctccagtgatgaggagcgcgcagctgccaagccatcaaacgcaggccacctccctcttctgcctaatgtcagctacaagaagactctccggctgacttccgagcagcttaaaagcttgaagttgaagaatggccccaacgacgtggttttcagtgtcaccacgcagtaccaaggcacgtgccgctgtgagggcaccatctatctgtggaactgggatgataaagtcatcatttctgatattgatgggacaattaccagatcagatactcttggccacattttgcccacccttgggaaggattggacccatcagggcatcgctaagctgtaccataaagtgagccagaatggatataaatttctctactgttctgcccgtgccatcgggatggcggacatgacgcggggctacctgcactgggtcaacgagaggggcacggtgctgccccaggggcccctgctgctgagtcccagcagcctcttctctgccctgcacagagaagtgattgaaaagaagccagaaaagtttaaagtccagtgtttgacagacatcaaaaacctgtttttccccaacacagaacccttttatgctgcttttggaaaccgaccagctgatgtgtattcatacaagcaagtaggagtgtctttgaatagaatatttaccgtcaaccctaaaggagagctggtacaggaacatgcaaagaccaacatctcttcgtatgtgagactctgtgaagtagtcgaccacgttttcccgttgctgaaaagaagccattcttcagactttccctgttcggataccttcagtaacttcaccttttggagagagccactgccaccttttgaaaaccaggacattcattctgcctcagcgtaaaatgtcccaagcagcctcttgccagcagtgcagagcctggttgtcacccattaaaggataggtctccccggagtgcacagctccacctgggagcctggcgcgtcatcattggcctgacagcagagagaattgagaagcatttctcccctgccccaccccggggctgacatttctaagcaagataggaagggagcactttctaggctaggagttgggtgcatttgtaccgtgaaaagcattcctcagttgtggcttaatgccagttacgacgctgcctttccggcctgctccagcaagtagctactggttcacgtgcagtttggggctgtgaaacctaggcagaaggcggctgtctgagggctgtccccgcctaggacagggtcaatcgaggaatgccagatgtgcacggtttttggcaaagtagggggcacatttccattatagcaatgttagtgccaccaccttctgaacacagtggggagggctgtgaaggctcatgtgacctggatctgaggtctctgatagaaatctggacgccaccgggtccaggcctggcctcagacttggccttgtggatgggccccttacagtatttgctgactagtctcatttttaggtgataaatttttctttaattcctttggttaaagatagtctatttcattggcatatctccccccagtttttgtggctcaaggctggaatatttatgccttaatatatctatggcagacatttaagaatgcgctttatctagctcatggtaactttgcaacgccttagattaaaatgacagtaaatattactaaggcagtattttgaatgagtttgacactgccggcttccttccatccagcgaggtggtgctgacagtgtggacttgagcacacttatgccaaatgataatgatactgacttctgttgggagctctccaaagaaactggttggttttaagaaaatagtttcaagaagttcaactatattcttttagatattatgtattgttttactctgattaggttactgtgataggcatttattcatattctttctataccactgtcattaatatattaaaaagatgtatgtgttagactatcgaaagggccttattctctctttctcatagactgaccttcttttggaatttctgagtcatttattttccttagctttttccactcaaattaagggcaagcgaaaaagtaataatttggcattctttaagcctacagaatgtgattctttcacttgtttattacactggctcgtggacagaacaatttgaaaagtgaaagaattattttggtaaaagattttgctttacttttcgaagcattatttttttaaagagtgttttactccaacgattgaaacattttcctatttaaatttcattgttagaatcacaggaggcaaaaaatggaacggttgaatgaaattttactctttctgtgaaagaaaatccacagagttgttgcctccgttgtagttggtgggccccgttagcattggatgcctttgccaaatggttcatgtggacacacaaaggcaaacagatctgccatcgatcgcagatttctgtagaaacacggatgtgcatgtgcagattcccttttgcaggtattaaaaataattaaaaatagtcctgcctgaggttgcagtgagccgagcttgcactactgcactccagcctgggtgacagagtaagactccatgtcaaaaaaaaaaaaaaaaaaaaaaaagtcctgccttaactaactcctctgcgcttgttcactagtaacctaaagaggctatattcattctttatgcaatgagggtatttttgagtgaattttaactgctctgaactaagtataagctcatgggcctgcaaaggttcagacggtttctcctttgcacccaggaggaactttggctgcgagaatggggggatgtatccctcatgcagttggcatccaggcagccctctgcagcagcacaccctgcaggcggagttttcagaggatgcaattttggatcccgaattttgatgtaccttaaacttccacatcactgcaccctgaaacagagcatgctttccagaaagtcacactctcagatctgtgtcaagttcaatgtgagccctggcaaggctggcatattaacacctgccttctggcttctgaaagtgagatttgtatatgggctgcactcacgcatatacgagttggtttatctttgtgtacatgactataacccagtgatgctgaggtcatgtgctggaatgctgtatttggaccacacatttcaaagttgccctatggaaatgaatcctacttagtgacaagtcatcaaatgtttgtcacatgtgatgaagacaaatatgtatacctggcatagagaaaaatatatacctggtacattggagaaaaataattacactttcaaagagaattccctttgcaattttatgtttggatcaccactgtaagcacactttatttgcatttgatctgtatttgtatatgctgatgcaatgataaaaatcactgtaatacttcattgtgttgtactggatgcaaagctagaaaatattgcaataaatgagaccgatgaaagacttctctg

SEQ ID NO: 149464 - DNA, 599 bp, Homo sapiens
  Payload ID: 9507
  Gene Symbol: LPIN1
  Gene Name: lipin 1
  ENST ID: ENST00000441684
  CDS Start-End: 312-599
gtttgcaatacaaaggcggccacgcgcggcgccgctcgtatttgcaaccacgtggcttcacgagtccgccaaaccatcaggtgaataaacgggagaggagaagagagtctaggactcagccctggagtataagtcagagctggaaaagaagaggctccagagactggacggccactgagaggtgccacgtccctgaagggcctgaggagggttgatggcatgaccccatgaagcccagcaaggagtggagagaggagggctggaggactcccgcctgccatgacccagtccagggataagatgtgcagaccatgaattacgtggggcagttagccggccaggtgtttgtcaccgtgaaggagctctacaaggggctgaatcccgccacactctcagggtgcattgacatcattgtcatccgccagcccaatggaaacctccaatgctcccctttccacgtccgctttgggaagatgggggtcctgcgctcccgagagaaagtggttgacatagaaatcaatggggaatctgtggatttgcatatgaaattgggagataatggagaagcattttttgttcaagaaacagataatgatcag

SEQ ID NO: 149465 - DNA, 583 bp, Homo sapiens
  Payload ID: 9507
  Gene Symbol: LPIN1
  Gene Name: lipin 1
  ENST ID: ENST00000454151
  CDS Start-End: 1-583
atcgatgaccccaatctcgtggtaaagattgggagtaaatattataactggacaacagcagcacccctcctcctggcaatgcaggccttccagaaacctttgccaaagtcttcatgcttaagttaccttcatgtaattttggacgccattaggttttgcttctctaaaatttttaacgcacaaatagccactgtggaatctatcatgagggataaaatgcccaaaaagggaggaagatggtggttttcatggaggggaagaaacaccacaatcaaggaggaaagtaagccagagcagtgcttggctggcaaggcccatagcaccggagagcaaccgccgcagctcagcttggccaccagggtaaagcatgaatcatcctccagtgatgaggagcgcgcagctgccaagccatcaaacgcaggccacctccctcttctgcctaatgtcagctacaagaagactctccggctgacttccgagcagcttaaaagcttgaagttgaagaatggccccaacgacgtggttttcagtgtcaccacgcagtaccaaggcacgtgccgctgtgagggcaccatctatctgt

SEQ ID NO: 149466 - DNA, 6229 bp, Homo sapiens
  Payload ID: 9508
  Gene Symbol: LPIN2
  Gene Name: lipin 2
  Uniprot ID: Q92539
  ENST ID: ENST00000261596
  CDS Start-End: 240-2930
gagaagaagtggcaggtgatgctgaagcgggggagaagcggcagagccggccacacagtgcaggggatggagacaggtgctgggctggtcctcctgcagcatcctcagttgttggagggcagtcatcctcaggccgtacccagccagagaagaaaaagaacagtgtgaagccacgtgtgatagccgtccaacatcggctcttccctccaattacattgtagttgattgtgtctcaaaccatgaattatgtgggacagctggctgggcaggtgattgtcactgtgaaggaactctacaagggcattaaccaggccaccctctctgggtgcattgatgtcatcgtggtacagcagcaggatggcagctatcagtgttcaccttttcacgttcggtttggaaagctgggagtcctgagatccaaagagaaagtgattgatatagaaatcaacggcagtgcagtggatcttcacatgaagttgggtgataacggagaagctttctttgttgaggagactgaagaagaatatgaaaagcttcctgcttaccttgccacctcaccaattcctactgaagatcagttctttaaagatattgacacccctttggtgaaatcgggtggagatgaaacaccatctcagagttcagacatctcacacgtcttggaaacagagacaatttttactccaagttctgtgaaaaagaaaaaacgaaggagaaagaaatacaaacaggacagtaagaaggaagagcaggccgcatctgctgctgcagaagacacatgtgatgtaggcgtgagctccgatgatgacaagggggcccaggcagcacgaggatcttcaaatgcttccttgaaagaagaagaatgtaaagagcctttgctcttccattctggggatcattaccccttatctgatggagattggtcccctttagagaccacctatccccagacagcgtgtcctaagagtgattcagagctggaggtgaaacctgcggagagcctgctcagatcagagtctcacatggagtggacgtggggcggattcccagagtccaccaaggtcagcaaaagagaacgatctgaccatcatcctaggacagctacaattacaccatcagaaaatactcattttcgggtaattcccagtgaggacaacctcatcagtgaagttgagaaggatgcttccatggaagacactgtctgtaccatagtgaagcccaaacccagagccctgggtacacagatgagcgacccaacatctgtggcagagcttctcgaacctcctcttgagagtactcagatttcatctatgttagatgctgaccaccttcccaacgcagccttagcggaggcgccctcagaatccaaaccggcagctaaagtagactcgccgtcaaagaagaaaggtgttcacaaaagaagccaacaccagggacctgatgatatttaccttgatgacttaaagggtctagaacctgaagttgcagctctttatttccctaaaagtgaatcggagcccggttccaggcagtggcccgagtctgacacactctctggctcccagtccccacagtccgtgggaagcgcagctgcagatagcggcaccgagtgcctctcagattctgccatggacttgcctgacgttaccctctccctttgcgggggcctcagtgaaaatggagaaatttcaaaagaaaaattcatggagcatatcattacttatcacgaatttgcagaaaaccctggacttatagacaatcctaaccttgtaataaggatatataatcgttactataactgggctttggcagctcccatgatccttagcttgcaagtattccagaagagcttgcctaaggccacagttgagtcctgggtgaaagacaagatgccaaagaaatctggtcgctggtggttttggcgaaagagagaaagcatgaccaaacagctgccagaatccaaggagggaaaatctgaggcaccgccagccagtgacctgccatccagctccaaggagccggccggtgccaggccggccgagaatgactcctcgagtgacgagggatcacaggagctcgaagaatccatcacagtggaccccatccccacagagcccctgagccacggcagcacaacttcatataagaagtctctccgcctctcctcagaccagatcgcaaaactgaagctccacgatggcccaaatgatgttgtgtttagtattacaacccagtatcaaggcacctgtcgctgtgcagggaccatttacctgtggaactggaatgacaagatcatcatttctgatattgatgggacaataaccaagtcggatgctttgggacagattctcccacagctgggcaaagactggacccaccagggtatagcaaagctctaccattccatcaatgagaatggctacaagtttctgtactgctcggctcgtgccatcggcatggccgacatgacccgtggctacctgcactgggtcaatgacaagggcacaatcttgccccggggccccctgatgctgtcccccagcagcttgttctccgccttccacagagaagtgatagaaaagaaaccagagaagttcaaaattgagtgtctaaatgatatcaagaatctgtttgccccgtctaagcagcccttctatgctgcctttggaaaccgtccaaatgatgtctatgcctacacacaagttggagttccagactgtagaatattcaccgtgaaccccaagggtgaattaatacaagaaagaaccaaaggaaacaagtcatcgtatcacaggctgagtgagctcgtggagcatgtgttcccccttctcagtaaggagcagaattccgcttttccctgcccggagttcagctccttctgctactggcgagacccgatccctgaagtggacctggatgacctgtcttgaggcggcacctcagtgggtgggcagggcttggtccccctccccacagcaagggaaggcagctggctcttctgctgacctcagataccagccttccccagcggggacgggtgcttctggagctggtcccgccatcctcctttgccttcccaggccagctgctcaggctcggcaggtctgcagctcagctcctggaaggagaagggaggaactgggcctggggctggaggcctgggatccctcctttgtgggtcgcacacatgtttcctgctgtgagctggggcctccttccattgcatcattttaaaggaagaaaaaagcagctaaaaaagagtggaccaaaacactgcacacagtgaagtgttccagtttccactgggcagttgaggtggcttctgtaaccagggctgtcttcagatgtcagggtccctgaactgctgcgggcccagtcagtgatgctggctgaagctgcctgtgcacgtttcttctctggtcgcctcatttcctgctacactgaaggggtcagctgctccagtgggccaagttgggcaggacccccgcccctgcagggcccatgcaccagagccactgagcccagtcccataaacctggccctctttggggaaagatccccacagagcatcctcctctcatctgtgacaactccacgagcccttaatttcttagtcctcaccagaagaacaggtctcacaagtatatatttgatgtctgtaataaaagtgggaaggtgggtcttaaaacagaccaaaccccgccccgcccccaacaactctgcttttagggaggcctccgaaatgcagataggcggttgagtggggtcctgggaagagcgctgaatccctctgcttgctgcctggtgtgggcctttggaaagcatcttgccttgggacaggatttctaaaattctgtgattcagatttgtcagggaagcacagtgaagcttgcttaaaggcactggccagcagtgtgtgactttggcttttgggatcacaccctgtaatcgggcccgtggaagcagcgtcaaagaggggtcttggagctcctatggagcagactgccccccgagcagtgtccccagcctagccctgtgagaccccatggggacacgggtgcctatgtattttcactaaaatatacatggtagctccatttactgatgcggttgtaatgagctcacatcgtgtctgaagagatggcaccagggaaaggtgtgccataagctgctccagagcttttggtatgctgagtgttgacagagctgcactcttaacatcaagagaactgtcaggagcccagaaccaaccccaggtcttggtctccattggcgagaacacaggacgtggtggttcctgagcagagagggatctgcagatacaggcttggcgctcggggtggtctcgtggccaactcttcatgcccctgccgttgtagtggaacctctacatgttttagtttgcttcacctaaaataatgctgatctagagatagagaaataggggtggttatttttccagattggagagttgaaagtccctgactgatttcagccattttcctagtgcttgtcggatgcagagacaatgttgaaatcccctaaacacagttctcagtggcaaaacctaggaaggctcatgttcccagagaagggaccacatgagccttctcccatgcaaagcttcccccagcttaaatagttgataaggactaattgtttaatgagtttatttatctacagtaggttagggatcctgggttctgtttatatgaagttcttcccagtttgtgaattctagtacagcagccatgcagccaccttatttcatagatgccatctgtgtgtcctcttgactaccttctatttagaggaagaatgagagctttgtgtgtttaactgagcttatagtaggacttctttgcatatgtatggtactgaaaaatcttaatatacatctttaatcctttttaggttgtcctttaaagagtttttgactagtttctttttcttgacagctcttctctttggacacatgggccttcttagagggttcagtctaggacccggctctcctggccctgtgttgagggtagctggtccctctgtccctgtgtctgctagcactagactttgttgctgcagattgatccagtgggtacataggctaattaatgtgagtctttttccttgtttaaaggagtccctcttgctgaaagtagatgattactattgctgtagtgttaggaaagtattaagtttgtgctgaaaatccattgccatttggtacaaatgacatttgttctttctgtgaaagagatgccctcgagtgtgtttgtacacaaacccttaggatggtgagttgaagcatcaccctcgcgctatcttcagtgacgggtgacggctcagggagatggcaggcagattgggctctaagtcattattctctcagttactccattggtgaaatggccctttccctctttgcagttcagtctaagtctcgtatttgctttgctgtctgtgtgctgaagctcgtcccgtgtgagttgctgtctgccccttgtcaggctgtgaggtgctcgtgtagacctggagcatgcaggctgcctccgtttttgggtactgtgttgtgttttgctctgtctaaaaacatctgcatagttttcaactggaaaaagaaaaaacttaaaaatgggatgtcctaaaatgaaagctgctcaaagtcacagaacaaccgagggacaaaggagattggatgactgggaagcgctggcccggaacagcccctgcaactgtggggcctgcacacagcccttccacagttggcactgcaggtgcaggccaaccctttaaagaataaacaaggaagtcagctctttcactttttacaagttggcaaaaacagacttccggggaatttcgatgttttcccgtgttgtagagcttccagggtttaataaaactggttaaaaattgagtctttccctgaagtaagtgctctttccagatgaaaactactcttttggttttgtttgaaagtaagaaagggaggggaaactttgctcttttaataattatgttcagcctatgatgaagtatttgattattagacagcaatgtcactaataagttttaagttgtccaaagttaattgtaaacatcatcagtacagtactcttagttacagtaaagcaattgttgcaagatgaatggctaatattttggtgcagtgtttgatgttcaaaacaaaatgttacaacaataaacgaacataacataaactgaa

SEQ ID NO: 149467 - DNA, 936 bp, Homo sapiens
  Payload ID: 9508
  Gene Symbol: LPIN2
  Gene Name: lipin 2
  ENST ID: ENST00000584294
  CDS Start-End: 239-936
agctgccggctcggccgccgcagccgcggcgtcccattcatgagggccgcccgactcagctgcggcccaggcggcttccaaggcagcggcggctgcgggcgctccgaccccgcgcgcgcccccgaccggccccgccccctcggcttccctccccggcgggtcctagccgtcgcagtccagccgccgcctgccctcagccgcccgctggccgggagcggagcccctgtggtctcaaaccatgaattatgtgggacagctggctgggcaggtgattgtcactgtgaaggaactctacaagggcattaaccaggccaccctctctgggtgcattgatgtcatcgtggtacagcagcaggatggcagctatcagtgttcaccttttcacgttcggtttggaaagctgggagtcctgagatccaaagagaaagtgattgatatagaaatcaacggcagtgcagtggatcttcacatgaagttgggtgataacggagaagctttctttgttgaggagactgaagaagaatatgaaaagcttcctgcttaccttgccacctcaccaattcctactgaagatcagttctttaaagatattgacacccctttggtgaaatcgggtggagatgaaacaccatctcagagttcagacatctcacacgtcttggaaacagagacaatttttactccaagttctgtgaaaaagaaaaaacgaaggagaaagaaatacaaacaggacagtaagaaggaagagcaggccgcatctgctgctgcagaagacacatgtgatgtaggcgtgagctccgatgatgacaagggggcccaggcagcacgaggatcttcaaatgcttccttgaaagaagaagaatgtaaagagcctttgctcttccattctggggatcattaccccttatctgatggagattggtcccctttagagac

SEQ ID NO: 149468 - DNA, 491 bp, Homo sapiens
  Payload ID: 9508
  Gene Symbol: LPIN2
  Gene Name: lipin 2
  ENST ID: ENST00000584915
  CDS Start-End: 105-491
actgtgtctgcaagcagtttgtactcagtttgtcaagagagcagctttctgttttgattatataccttcatctctgaaaaaagacatgctagttaaatttcaagatgttttacttagaagatgacaaggaagatgaggtggtttgtaaaggctcattaagtaaaactcaagatgtttaccatgacaagtcccctcctggtatcttgtctcaaaccatgaattatgtgggacagctggctgggcaggtgattgtcactgtgaaggaactctacaagggcattaaccaggccaccctctctgggtgcattgatgtcatcgtggtacagcagcaggatggcagctatcagtgttcaccttttcacgttcggtttggaaagctgggagtcctgagatccaaagagaaagtgattgatatagaaatcaacggcagtgcagtggatcttcacatgaagttgggtgataacggagaagctttctttgttgaggagact

SEQ ID NO: 149469 - DNA, 4363 bp, Homo sapiens
  Payload ID: 9509
  Gene Symbol: LPIN3
  Gene Name: lipin 3
  Uniprot ID: Q9BQK8
  ENST ID: ENST00000373257
  CDS Start-End: 92-2647
cgaagacactcacctgtggagcctgtgcacgtaggtagaggcggcggctctgagtccaggagctccagtgggcagctccccagcaccagccatgaactacgtggggcagctggcggagacggtgtttgggacggtgaaggagctgtaccggggcctgaacccagccacactgagcggcggcattgacgtgctggtggtgaagcaggtggacggctcgttccggtgctcacccttccacgtgcgttttggcaagctgggcgtcctgcggtcgcgggagaaggtggtagacattgagctcaatggggagcctgtggacttgcacatgaagcttggggacagcggggaggccttctttgttcaggagctggagagcgatgatgaacatgtgcctcccggcctgtgcacctcacccatcccttgggggggtctgtctggcttcccctcggactcccagctgggcactgccagtgagcctgagggcctcgtcatggcaggcacggcctccactgggcggaggaagaggcgtcgcaggaggaaacccaagcagaaagaggatgcagtggcaactgattctagtccagaggaactggaggcaggcgctgagagtgagctatccctgccggaaaagctgaggccagagcccccaggtgtccagttggaagagaagtcttcactgcagcccaaagacatctacccctactcggatggcgagtggcccccccaggccagcctctcagcaggtgagctaacatcccctaagagcgactcggagctggaggtgcggaccccggagcccagtcccctaagagccgagtcccacatgcagtgggcctgggggaggctgcctaaggtggccagagctgagcggcccgagtcctcagtggtccttgaaggcagagctggggcaacctctcctcctcggggaggacccagcactccctctacctctgtggctggcggcgtggaccctttgggactcccaatccagcaaacagaggctggtgccgaccttcagcctgacacagaggatcccactctagtgggtccccctctccacaccccagagacagaggaaagcaagactcagagctctggggacatgggcctccctcctgcctccaagtcatggagctgggccactctggaggttccagttcccaccgggcagccagagagggtctccagggggaaaggctccccaaagagaagccagcacctgggccccagtgacatctacctggatgacttgccctccctggactctgagaatgcagcgctttacttcccccaaagtgactctgggctgggggccagaagatggagtgaacccagcagtcagaagtccctgagggaccccaaccctgaacatgaacctgaacccactctggacacagtggatacaatagcactgtccctctgtggtggactggctgacagccgggacatctccctagagaaattcaaccagcacagcgtctcttaccaggacctcaccaaaaaccccggacttttggatgacccaaacctagtggtgaaaatcaatggaaagcattataactgggctgtggctgcccccatgatcctctccctgcaagccttccagaaaaacttgcccaagagcaccatggacaagctggagagggagaagatgccccggaagggtgggcgatggtggttttcctggcgacgcagggacttcctggccgaggagcgcagtgcccagaaggagaagactgcagccaaggagcagcagggggagaagacagaagtcctgagcagtgatgacgatgccccagacagccctgtgatcctggagatcccctccttgccaccctccactccaccctccactcctacctacaagaagtccctccgcctctcctccgatcagatccggcgcctgaacctgcaagaaggtgccaatgatgtggtcttcagcgtgaccactcagtaccagggcacctgccgctgcaaggccaccatctacctgtggaaatgggacgacaaggtggtcatctctgacatcgacggcaccatcaccaagtcagatgctctgggccatatcctgccccagctggggaaagactggacacaccagggcatcaccagtctctatcacaaaatccaactaaatgggtacaagttcctgtactgctcggcgcgggccattggcatggcggacctcaccaaggggtacctgcagtgggtgagcgaggggggctgtagcctccccaagggccccatccttctgtctcccagcagcctcttctctgccctccacagagaggtgatcgagaagaaaccagaggtgttcaaggtcgcctgcctgagtgacatccagcagctgtttctgccccacggacagcccttctatgctgcctttgggaataggcccaatgatgtctttgcctaccggcaggtgggcctgcctgagtcacgcatcttcacagtcaacccccggggagagctcatccaggagctcataaagaaccacaaatccacgtatgagcggcttggtgaagtggtcgagctcctcttcccacctgtggcccgtggccccagcacagacctggccaaccctgaatacagtaacttctgctactggcgggagccactgcctgctgtggaccttgataccctggactgaacctgccctggctggctcctcctccctggcccggcccaggactggctaggtgtcctggggtataggagggtgggaattggagtgtcatggggcaaacccactgaaggggaaggaggaggctgcaggttggttggcagctagagagactcccccatcttccccgtcatatttttgccagctaagctgcagctgctccaggcgtcagtgtggcactgtcctggggcaattagcttgtcatctgggcccttgcagggttctttttttttttttttttttttttttcctgagacagggtcttgttctgttgcccaggctggagtgcagtggcatgatctctcggctcactgcaacctccgcctcccgggttcaagcgattcacctgcctcagcctcccaagtagctgggattacaggcgtgtaccaccacgcctggctaattttcgtgtttttagtagagatgggttttcaccacattggccaggctggtctcgaactcctgacctcaagtgatttgcccacctcggcctcccaaagtgctgggattacaggcatgagctaccatgccaggcctccttgcagggttttctatgcccttgatatctgtctccctgtcaacctgggaccttgctgtaagtcttgataggacagggagaagagggaggccctaccgaggctcgaggcttcagtgaagggtgacagcagtgggagtgtggtacagcctctggaaggacacagtgttctccccgccccttgtctgggagccaggactgtaccctccgaagccagacatcactgccaacatatcccccttgctggtgccctggcatctcagcacatgacacacacccacacctgcaggctgtggttccggcttggcctgctccccgtccggctgctgccgctgcctctctccagacctcgcttaaggacagtcccaaactcagctggggcaggtgttggcctgaaagtcctcccccagcctctgctggccagcttggtgctcacagctgctgggtaagctcttgcctaaggagctgtgggaagcagggctgatgccccagcaacctctcctcccactgtctttgaagaaagtagctttagaccggctaaaagctttaatccagagcctgccctactctgatagtaccagagtggagggcagaataccaaatgtccaggaaccaaaggcagggctgtggggacctgaagagcagcacagtggggcccgtgctgctgtgggggaaactgaggctgggagcctcagcagagaccggtgtcaagagtctctgggaactgcataggcctgaggaacatgcattttcaagttgtccattgatggtttcgtacctgaatttctcaccttttgtgaacatcttgggagggtgggggttttgcaggggtgttaaaagcaaggcttggagcccctttcctccagctggtggctccttctcagggcctggcctcattcaggccactttgtagagaaatgccctgacctcgcaggaaggatttccccacccccaagtggaaggaagaggacagtgtgggcaccagagggccctggaaacatcttaggggaaggaaaggaaaaggataaatttggagtggggggtctctaaacagattgcctggattccgttctttcctggggttctacagctgcctaagccctcaccttgggggaggatcaaagggaataaagagaactcttggctga

SEQ ID NO: 149470 - DNA, 808 bp, Homo sapiens
  Payload ID: 9509
  Gene Symbol: LPIN3
  Gene Name: lipin 3
  ENST ID: ENST00000445975
  CDS Start-End: 1-808
tggtgaaaatcaatggaaagcattataactgggctgtggctgcccccatgatcctctccctgcaagccttccagaaaaacttgcccaagcgcagtgcccagaaggagaagactgcagccaaggagcagcagggggagaagacagaagtcctgagcagtgatgacgatgccccagacagccctgtgatcctggagatcccctccttgccaccctccactccaccctccactcctacctacaagaagtccctccgcctctcctccgatcagatccggcgcctgaacctgcaagaaggtgccaatgatgtggtcttcagcgtgaccactcagtaccagggcacctgccgctgcaaggccaccatctacctgtggaaatgggacgacaaggtggtcatctctgacatcgacggcaccatcaccaagtcagatgctctgggccatatcctgccccagctggggaaagactggacacaccagggcatcaccagtctctatcacaaaatccaactaaatgggtacaagttcctgtactgctcggcgcgggccattggcatggcggacctcaccaaggggtacctgcagtgggtgagcgaggggggctgtagcctccccaagggccccatccttctgtctcccagcagcctcttctctgccctccacagagaggtgatcgagaagaaaccagaggtgttcaaggtcgcctgcctgagtgacatccagcagctgtttctgccccacggacagcccttctatgctgcctttgggaataggcccaatgatgtctttgcctaccggcaggtgggcctgcc

SEQ ID NO: 149471 - DNA, 4132 bp, Homo sapiens
  Payload ID: 9509
  Gene Symbol: LPIN3
  Gene Name: lipin 3
  Uniprot ID: Q9BQK8
  ENST ID: ENST00000632009
  CDS Start-End: 40-2598
agtccaggagctccagtgggcagctccccagcaccagccatgaactacgtggggcagctggcggagacggtgtttgggacggtgaaggagctgtaccggggcctgaacccagccacactgagcggcggcattgacgtgctggtggtgaagcaggtggacggctcgttccggtgctcacccttccacgtgcgttttggcaagctgggcgtcctgcggtcgcgggagaaggtggtagacattgagctcaatggggagcctgtggacttgcacatgaagcttggggacagcggggaggccttctttgttcaggagctggagagcgatgatgaacatgtgcctcccggcctgtgcacctcacccatcccttgggggggtctgtctggcttcccctcggactcccagctgggcactgccagtgagcctgagggcctcgtcatggcaggcacggcctccactgggcggaggaagaggcgtcgcaggaggaaacccaagcagaaagaggatgcagtggcaactgattctagtccagaggaactggaggcaggcgctgagagtgagctatccctgccggaaaagctgaggccagagcccccaggcagtgtccagttggaagagaagtcttcactgcagcccaaagacatctacccctactcggatggcgagtggcccccccaggccagcctctcagcaggtgagctaacatcccctaagagcgactcggagctggaggtgcggaccccggagcccagtcccctaagagccgagtcccacatgcagtgggcctgggggaggctgcctaaggtggccagagctgagcggcccgagtcctcagtggtccttgaaggcagagctggggcaacctctcctcctcggggaggacccagcactccctctacctctgtggctggcggcgtggaccctttgggactcccaatccagcaaacagaggctggtgccgaccttcagcctgacacagaggatcccactctagtgggtccccctctccacaccccagagacagaggaaagcaagactcagagctctggggacatgggcctccctcctgcctccaagtcatggagctgggccactctggaggttccagttcccaccgggcagccagagagggtctccagggggaaaggctccccaaagagaagccagcacctgggccccagtgacatctacctggatgacttgccctccctggactctgagaatgcagcgctttacttcccccaaagtgactctgggctgggggccagaagatggagtgaacccagcagtcagaagtccctgagggaccccaaccctgaacatgaacctgaacccactctggacacagtggatacaatagcactgtccctctgtggtggactggctgacagccgggacatctccctagagaaattcaaccagcacagcgtctcttaccaggacctcaccaaaaaccccggacttttggatgacccaaacctagtggtgaaaatcaatggaaagcattataactgggctgtggctgcccccatgatcctctccctgcaagccttccagaaaaacttgcccaagagcaccatggacaagctggagagggagaagatgccccggaagggtgggcgatggtggttttcctggcgacgcagggacttcctggccgaggagcgcagtgcccagaaggagaagactgcagccaaggagcagcagggggagaagacagaagtcctgagcagtgatgacgatgccccagacagccctgtgatcctggagatcccctccttgccaccctccactccaccctccactcctacctacaagaagtccctccgcctctcctccgatcagatccggcgcctgaacctgcaagaaggtgccaatgatgtggtcttcagcgtgaccactcagtaccagggcacctgccgctgcaaggccaccatctacctgtggaaatgggacgacaaggtggtcatctctgacatcgacggcaccatcaccaagtcagatgctctgggccatatcctgccccagctggggaaagactggacacaccagggcatcaccagtctctatcacaaaatccaactaaatgggtacaagttcctgtactgctcggcgcgggccattggcatggcggacctcaccaaggggtacctgcagtgggtgagcgaggggggctgtagcctccccaagggccccatccttctgtctcccagcagcctcttctctgccctccacagagaggtgatcgagaagaaaccagaggtgttcaaggtcgcctgcctgagtgacatccagcagctgtttctgccccacggacagcccttctatgctgcctttgggaataggcccaatgatgtctttgcctaccggcaggtgggcctgcctgagtcacgcatcttcacagtcaacccccggggagagctcatccaggagctcataaagaaccacaaatccacgtatgagcggcttggtgaagtggtcgagctcctcttcccacctgtggcccgtggccccagcacagacctggccaaccctgaatacagtaacttctgctactggcgggagccactgcctgctgtggaccttgataccctggactgaacctgccctggctggctcctcctccctggcccggcccaggactggctaggtgtcctggggtataggagggtgggaattggagtgtcatggggcaaacccactgaaggggaaggaggaggctgcaggttggttggcagctagagagactcccccatcttccccgtcatatttttgccagctaagctgcagctgctccaggcgtcagtgtggcactgtcctggggcaattagcttgtcatctgggcccttgcagggttctttttttttttttttttttttttttcctgagacagggtcttgttctgttgcccaggctggagtgcagtggcatgatctctcggctcactgcaacctccgcctcccgggttcaagcgattcacctgcctcagcctcccaagtagctgggattacaggcgtgtaccaccacgcctggctaattttcgtgtttttagtagagatgggttttcaccacattggccaggctggtctcgaactcctgacctcaagtgatttgcccacctcggcctcccaaagtgctgggattacaggcatgagctaccatgccaggcctccttgcagggttttctatgcccttgatatctgtctccctgtcaacctgggaccttgctgtaagtcttgataggacagggagaagagggaggccctaccgaggctcgaggcttcagtgaagggtgacagcagtgggagtgtggtacagcctctggaaggacacagtgttctccccgccccttgtctgggagccaggactgtaccctccgaagccagacatcactgccaacatatcccccttgctggtgccctggcatctcagcacatgacacacacccacacctgcaggctgtggttccggcttggcctgctccccgtccggctgctgccgctgcctctctccagacctcgcttaaggacagtcccaaactcagctggggcaggtgttggcctgaaagtcctcccccagcctctgctggccagcttggtgctcacagctgctgggtaagctcttgcctaaggagctgtgggaagcagggctgatgccccagcaacctctcctcccactgtctttgaagaaagtagctttagaccggctaaaagctttaatccagagcctgccctactctgatagtaccagagtggagggcagaataccaaatgtccaggaaccaaaggcagggctgtggggacctgaagagcagcacagtggggcccgtgctgctgtgggggaaactgaggctgggagcctcagcagagaccggtgtcaagagtctctgggaactgcataggcctgaggaacatgcattttcaagttgtccattgatggtttcgtacctgaatttctcaccttttgtgaacatcttgggagggtgggggttttgcaggggtgttaaaagcaaggcttggagcccctttcctccagctggtggctccttctcagggcctggcctcattcaggccactttgtagagaaatgccctgacctcgcaggaaggatttccccacccccaagtggaaggaag

SEQ ID NO: 149472 - DNA, 776 bp, Homo sapiens
  Payload ID: 9510
  Gene Symbol: LCN1
  Gene Name: lipocalin 1
  Uniprot ID: P31025
  ENST ID: ENST00000263598
  CDS Start-End: 61-591
acagcctctcccagccccagcaagcgacctgtcaggcggccgtggactcagactccggagatgaagcccctgctcctggccgtcagccttggcctcattgctgccctgcaggcccaccacctcctggcctcagacgaggagattcaggatgtgtcagggacgtggtatctgaaggccatgacggtggacagggagttccctgagatgaatctggaatcggtgacacccatgaccctcacgaccctggaagggggcaacctggaagccaaggtcaccatgctgataagtggccggtgccaggaggtgaaggccgtcctggagaaaactgacgagccgggaaaatacacggccgacgggggcaagcacgtggcatacatcatcaggtcgcacgtgaaggaccactacatcttttactgtgagggcgagctgcacgggaagccggtccgaggggtgaagctcgtgggcagagaccccaagaacaacctggaagccttggaggactttgagaaagccgcaggagcccgcggactcagcacggagagcatcctcatccccaggcagagcgaaacctgctctccagggagcgattagggggacaccttggctcctcagcagcccaaggacggcaccatccagcacctccgtcattcacagggacatggaaaaagctccccacccctgcagaacgcggctggctgcaccccttcctaccaccccccgccttccccctgccctgcgccccctctcctggttctccataaagagcttcagcagtt

SEQ ID NO: 149473 - DNA, 764 bp, Homo sapiens
  Payload ID: 9510
  Gene Symbol: LCN1
  Gene Name: lipocalin 1
  Uniprot ID: P31025
  ENST ID: ENST00000371781
  CDS Start-End: 44-574
cagcaagcgacctgtcaggcggccgtggactcagactccggagatgaagcccctgctcctggccgtcagccttggcctcattgctgccctgcaggcccaccacctcctggcctcagacgaggagattcaggatgtgtcagggacgtggtatctgaaggccatgacggtggacagggagttccctgagatgaatctggaatcggtgacacccatgaccctcacgaccctggaagggggcaacctggaagccaaggtcaccatgctgataagtggccggtgccaggaggtgaaggccgtcctggagaaaactgacgagccgggaaaatacacggccgacgggggcaagcacgtggcatacatcatcaggtcgcacgtgaaggaccactacatcttttactgtgagggcgagctgcacgggaagccggtccgaggggtgaagctcgtgggcagagaccccaagaacaacctggaagccttggaggactttgagaaagccgcaggagcccgcggactcagcacggagagcatcctcatccccaggcagagcgaaacctgctctccagggagcgattaggggcaggggacaccttggctcctcagcagcccaaggacggcaccatccagcacctccgtcattcacagggacatggaaaaagctccccacccctgcagaacgcggctggctgcaccccttcctaccaccccccgccttccccctgccctgcgccccctctcctggttctccataaagagcttcagcagtt

SEQ ID NO: 149474 - DNA, 723 bp, Homo sapiens
  Payload ID: 9511
  Gene Symbol: LCN10
  Gene Name: lipocalin 10
  Uniprot ID: Q6JVE6
  ENST ID: ENST00000497771
  CDS Start-End: 57-659
ggcggctccagagaggtttaaacactggccttggcggctgagggaggagggtgaagatgaggcaggggctgctggtgctggcgctggtgctggtgctggtgctagtgctggctgcagggtcccaggtgcaggagtggtaccccagggagtcccacgccctcaactggaacaagttttcagggttctggtacattctggccactgccactgatgcccagggattcttgccggccagggacaagaggaagctgggggcgtccgtggtaaaggtgaacaaagtgggccagctccgcgtgctcctcgccttcagacggttgaaggggtgccagtcccaggaggtgatcctgaggaaagacgggaagaagccggtgtttgggaacgcctgtgcatacgcggcgggcccgagggaaggacaggagggagtgaaaggggtgaaggccttccacgtgctgtccactgactacagctacggcttggtctacctccgcctggggcgtgcaacccaaaactacaagaacctgctgctcttccataggcagaatgtttcgagcttccagagtctgaaggaattcatggacgcttgtgacattctggggctctccaaggccgccgtcatcctcccgaaagacgcgtcccgtacacacaccatcctgccatgagagccagcgtcctctgctcttccctttcgacgcgtggtcctcccagacccgaggagcgttgttc

SEQ ID NO: 149475 - DNA, 564 bp, Homo sapiens
  Payload ID: 9511
  Gene Symbol: LCN10
  Gene Name: lipocalin 10
  Uniprot ID: Q6JVE6
  ENST ID: ENST00000474369
  CDS Start-End: 1-564
atgaggcaggggctgctggtgctggcgctggtgctggtgctggtgctagtgctggctgcagggtcccaggtgcaggagtggtaccccagggagtcccacgccctcaactggaacaagttttcagggttctggtacattctggccactgccactgatgcccagggattcttgccggccagggacaagaggaagctgggggcgtccgtggtaaaggtgaacaaagtgggccagctccgcgtgctcctcgccttcagacggggtcagggctgtgggcgggcacagccacgccatccgggaaccagcgggcatctctgggcatctctttcagtgaaaggggtgaaggccttccacgtgctgtccactgactacagctacggcttggtctacctccgcctggggcgtgcaacccaaaactacaagaacctgctgctcttccataggcagaatgtttcgagcttccagagtctgaaggaattcatggacgcttgtgacattctggggctctccaaggccgccgtcatcctcccgaaagacgcgtcccgtacacacaccatcctgccatga

SEQ ID NO: 149476 - DNA, 615 bp, Homo sapiens
  Payload ID: 9511
  Gene Symbol: LCN10
  Gene Name: lipocalin 10
  ENST ID: ENST00000527229
  CDS Start-End: 57-551
ggcggctccagagaggtttaaacactggccttggcggctgagggaggagggtgaagatgaggcaggggctgctggtgctggcgctggtgctggtgctggtgctagtgctggctgcagggtcccaggtgcaggagtggtaccccagggagtcccacgccctcaactggaacaagttttcagggttctggtacattctggccactgccactgatgcccagggattcttgccggccagggacaagaggaagctgggggcgtccgtggtaaaggtgaacaaagtgggccagctccgcgtgctcctcgccttcagacggttgaaggggtgccagtcccaggaggtgatcctgaggaaagacgggaagaagccggtgtttgggaacgcctgtgcatacgcggcgggcccgagggaaggacaggagggagataggcagaatgtttcgagcttccagagtctgaaggaattcatggacgcttgtgacattctggggctctccaaggccgccgtcatcctcccgaaagacgcgtcccgtacacacaccatcctgccatgagagccagcgtcctctgctcttccctttcgacgcgtggtcctcccagacccgaggagcgttgttc

SEQ ID NO: 149477 - DNA, 570 bp, Homo sapiens
  Payload ID: 9511
  Gene Symbol: LCN10
  Gene Name: lipocalin 10
  ENST ID: ENST00000529013
  CDS Start-End: 1-112
cactgatgcccagggattcttgccggccagggacaagaggaagctgggggcgtccgtggtaaaggtgaacaaagtgggccagctccgcgtgctcctcgccttcagacggtgagtgggcagcgccccccaggcaagggtctccccttccaggaggagggagctgcctcggggctggaaaggagtctgggaggagcctgtctgtctggaagttccacaagaaccgtccccccacttcctccccctaaactcagaggaagccacctgcagcccctgggaccccacatgggtgggtgttgggaggaagctgcctgcagaccttgggaccccacatggtgaaaggggtgaaggccttccacgtgctgtccactgactacagctacggcttggtctacctccgcctggggcgtgcaacccaaaactacaagaacctgctgctcttccataggcagaatgtttcgagcttccagagtctgaaggaattcatggacgcttgtgacattctggggctctccaaggccgccgtcatcctcccgaaagacgcgtcccgtacacacaccatcctgccatgag

SEQ ID NO: 149478 - DNA, 443 bp, Homo sapiens
  Payload ID: 9511
  Gene Symbol: LCN10
  Gene Name: lipocalin 10
  ENST ID: ENST00000532006
  CDS Start-End: 57-284
ggcggctccagagaggtttaaacactggccttggcggctgagggaggagggtgaagatgaggcaggggctgctggtgctggcgctggtgctggtgctggtgctagtgctggctgcagggtcccaggtgcaggagtggtaccccagggagtcccacgccctcaactggaacaagggacaagaggaagctgggggcgtccgtggtaaaggtgaacaaagtgggccagctccgcgtgctcctcgccttcagacgataggcagaatgtttcgagcttccagagtctgaaggaattcatggacgcttgtgacattctggggctctccaaggccgccgtcatcctcccgaaagacgcgtcccgtacacacaccatcctgccatgagagccagcgtcctctgctcttccctttcgacgcgtggtcctcccagacccgaggagcgttgttc

SEQ ID NO: 149479 - DNA, 1780 bp, Homo sapiens
  Payload ID: 9511
  Gene Symbol: LCN10
  Gene Name: lipocalin 10
  ENST ID: ENST00000341040
  CDS Start-End: 38-298
aaacactggccttggcggctgagggaggagggtgaagatgaggcaggggctgctggtgctggcgctggtgctggtgctggtgctagtgctggctgcagggtcccaggtgcaggagtggtaccccagggagtcccacgccctcaactggaacaagttttcagggttctggtacattctggccactgccactgatgcccagggattcttgccggccagggacaagaggaagctgggggcgtccgtggtaaaggtgaacaaagtgggccagctccgcgtgctcctcgccttcagacgataggcagaatgtttcgagcttccagagtctgaaggaattcatggacgcttgtgacattctggggctctccaaggccgccgtcatcctcccgaaagacgcgtcccgtacacacaccatcctgccatgagagccagcgtcctctgctcttccctttcgacgcgtggtcctcccagacccgaggagcgttgttccagatgtcaagtggagaccacggcttgttgagaggtgtttggtgactctaggtcattgacagtgtgaaaatcaagtggctcaagggatcctttatgatcacagaaagatgggggaaggaggatacaggctgaccgggtggcgagatgtcagccaggccccttccccactgtcttctggagcacactgcaggctgctgctattccctgtctgctgtgaaacagaccacaggccggcccaacgcagtcctcgccgtgtgccttgcctctgccctccacgccgccgccaccctccgcgttcctttacatcctgcactttctcaggaagccgttcgcatatccacccaacatggaggagcccccatgacgtgccaggcagcgtgctggcccctgcggctgcgttagggaacagaatcggcaaacgcagtcccagagttgatgcctgatcaggagaagccaacttcagcagtgtggtcacctggatactcgagtatagaccctagatcacctggatactcgagtatagaccctagaagtgtatctaggcgcggccagggccccacaacagcaggtctgactcattccatccagggcagcatcagggagagcttcctgggggaagtggcatttgggctgacctgggaagggtggtgggtgttaagtcagtttgggtggggctggaggagcaggggtgcatccccagaacaggatgtgacttctgaaaagacatcagagtagagaaaatggtttctcaaggagattggggacgccagtatcagaatggcggcggggagagccacagaggagcaggagggggcccaccagaccacggcacctcgaaggctgcggtgaaggcttaggtctcactcaaggggtgatgacgggaggttgtctgagatgaaccccccaactgaatgaatggaccttcttctggccaaggggatcccaaagaaaccctgaacccgagtcctcagccatgacggggtaaggggtcagcccctccttctggcccgagaagagatcagagattggttctgggcagtccatggagaatttgctcagctggaccagtacacgcttctcctttcatgaatattcatgactcctcctgaagcttattgaacatctctatttggccatctccttcagcgtaaattcctgtcccctctgtccctcccctccaagtgtctgttccaggcttctggcctgaggctacgcttcctagcctgtcagaagggctgccctgctggctgcaatctcttatgagaaataaagctctcctgtgtgcaaaaaagta

SEQ ID NO: 149480 - DNA, 403 bp, Homo sapiens
  Payload ID: 9512
  Gene Symbol: LCN12
  Gene Name: lipocalin 12
  ENST ID: ENST00000371632
  CDS Start-End: 1-273
acttttgagctaagtgatgatggccgctttgaggtgtggaatgcgatgactcgaggccagcactgtgacacatggtcttatgtgctgataccggcagcccagcctgggcagttcactgtggaccacggtgtggacacacgagcaggctggccgtcctcaggatcagcctgctgggcaggagctggttgctgcctcccgggacgctggaccagttcatctgcctgggcagagctcagggcctctcggatgacaacatcgtcttcccagatgtgactggctggtcaccccaggccagcgtctgttgaaggatgaagcagctcctgtccggcccagccctgcctcacagctgtgcgagctctgccctcctcagctctcaaacctgaataaatgcaccaagcccaga

SEQ ID NO: 149481 - DNA, 579 bp, Homo sapiens
  Payload ID: 9512
  Gene Symbol: LCN12
  Gene Name: lipocalin 12
  Uniprot ID: Q6JVE5
  ENST ID: ENST00000371633
  CDS Start-End: 1-579
atgaggctgctgtgtggcctgtggctgtggctctccttgctgaaagtcctgcaggcccagaccccaacccccctgccactcccgcccccgatgcagagcttccaaggaaaccagttccagggggaatggttcgtcctgggcctggcgggcaacagcttcaggccggagcacagggcgctgctgaacgctttcaccgcaacttttgagctaagtgatgatggccgctttgaggtgtggaatgcgatgactcgaggccagcactgtgacacatggtcttatgtgctgataccggcagcccagcctgggcagttcactgtggaccacggtgtggagcccggggcggacagagaggagacccgggtggtggacagcgactacacccagttcgccctgatgctgtcccgcagacacacgagcaggctggccgtcctcaggatcagcctgctgggcaggagctggttgctgcctcccgggacgctggaccagttcatctgcctgggcagagctcagggcctctcggatgacaacatcgtcttcccagatgtgactggctggtcaccccaggccagcgtctgttga

SEQ ID NO: 149482 - DNA, 489 bp, Homo sapiens
  Payload ID: 9512
  Gene Symbol: LCN12
  Gene Name: lipocalin 12
  ENST ID: ENST00000471615
  CDS Start-End: 1-309
gcgctgctgaacgctttcaccgcaacttttgagctaagtgatgatggccgctttgaggtgtggaatgcgatgactcgaggccagcactgtgacacatggtcttatgtgctgataccggcagcccagcctgggcagttcactgtggaccacggtgtgggcaggagctggttgctgcctcccgggacgctggaccagttcatctgcctgggcagagctcagggcctctcggatgacaacatcgtcttcccagatgtgactggaggtgccctggacctcagcagcctgccctgggtggcagccccagcctgaccactcagacagccgcggcccccaaggcctgactcttcttgtgggagggcgaggctggtcaccccaggccagcgtctgttgaaggatgaagcagctcctgtccggcccagccctgcctcacagctgtgcgagctctgccctcctcagctctcaaacctgaataaatgcaccaagcccaga

SEQ ID NO: 149483 - DNA, 762 bp, Homo sapiens
  Payload ID: 9513
  Gene Symbol: LCN15
  Gene Name: lipocalin 15
  Uniprot ID: Q6UWW0
  ENST ID: ENST00000316144
  CDS Start-End: 26-580
caggggctggagggcaggggaggggatgatgtcattcctgctcggcgcaatcctgaccctgctctgggcgcccacggctcaggctgaggttctgctgcagcctgacttcaatgctgaaaagttctcaggcctctggtacgtggtctccatggcatctgactgcagggtcttcctgggcaagaaggaccacctgtccatgtccaccagggccatcaggcccacagaggagggcggcctccacgtccacatggagttcccgggggcggacggctgtaaccaggtggatgccgagtacctgaaggtgggctccgagggacacttcagagtcccggccttgggctacctggacgtgcgcatcgtggacacagactacagctccttcgccgtcctttacatctacaaggagctggagggggccctcagcaccatggtgcagctctacagccggacccaggatgtgagtccccaggctctgaagtccttccaggacttctacccgaccctggggctccccaaggacatgatggtcatgctgccccagtcagatgcatgcaaccctgagagcaaggaggcgccctgacacctccggagccccacccccgcccttcccaggtggagccaaagcagcaggcgcctttgcccctggagtcaagacccacagccctcggggaccacctggagtctctccatcctccaccccccgcctgtgggatgccttgtgggacgtctctttctattcaataaacagatgctgcagcctca

SEQ ID NO: 149484 - DNA, 822 bp, Homo sapiens
  Payload ID: 9514
  Gene Symbol: LCN2
  Gene Name: lipocalin 2
  Uniprot ID: P80188
  ENST ID: ENST00000277480
  CDS Start-End: 74-670
actcgccacctcctcttccacccctgccaggcccagcagccaccacagcgcctgcttcctcggccctgaaatcatgcccctaggtctcctgtggctgggcctagccctgttgggggctctgcatgcccaggcccaggactccacctcagacctgatcccagccccacctctgagcaaggtccctctgcagcagaacttccaggacaaccaattccaggggaagtggtatgtggtaggcctggcagggaatgcaattctcagagaagacaaagacccgcaaaagatgtatgccaccatctatgagctgaaagaagacaagagctacaatgtcacctccgtcctgtttaggaaaaagaagtgtgactactggatcaggacttttgttccaggttgccagcccggcgagttcacgctgggcaacattaagagttaccctggattaacgagttacctcgtccgagtggtgagcaccaactacaaccagcatgctatggtgttcttcaagaaagtttctcaaaacagggagtacttcaagatcaccctctacgggagaaccaaggagctgacttcggaactaaaggagaacttcatccgcttctccaaatctctgggcctccctgaaaaccacatcgtcttccctgtcccaatcgaccagtgtatcgacggctgagtgcacaggtgccgccagctgccgcaccagcccgaacaccattgagggagctgggagaccctccccacagtgccacccatgcagctgctccccaggccaccccgctgatggagccccaccttgtctgctaaataaacatgtgccctcaggcc

SEQ ID NO: 149485 - DNA, 631 bp, Homo sapiens
  Payload ID: 9514
  Gene Symbol: LCN2
  Gene Name: lipocalin 2
  ENST ID: ENST00000372998
  CDS Start-End: 9-611
ctgaaatcatgcccctaggtctcctgtggctgggcctagccctgttgggggctctgcatgcccaggcccaggactccacctcagacctgatcccagccccacctctgagcaaggtccctctgcagcagaacttccaggacaaccaattccaggggaagtggtatgtggtaggcctggcagggaatgcaattctcagagaagacaaagacccgcaaaagatgtatgccaccatctatgagctgaaagaagacaagagctacaatgtcacctccgtcctgtttagggagaaggcccagaagtgtgactactggatcaggacttttgttccaggttgccagcccggcgagttcacgctgggcaacattaagagttaccctggattaacgagttacctcgtccgagtggtgagcaccaactacaaccagcatgctatggtgttcttcaagaaagtttctcaaaacagggagtacttcaagatcaccctctacgggagaaccaaggagctgacttcggaactaaaggagaacttcatccgcttctccaaatctctgggcctccctgaaaaccacatcgtcttccctgtcccaatcgaccagtgtatcgacggctgagtgcacagtgagtgtggctg

SEQ ID NO: 149486 - DNA, 848 bp, Homo sapiens
  Payload ID: 9514
  Gene Symbol: LCN2
  Gene Name: lipocalin 2
  Uniprot ID: P80188
  ENST ID: ENST00000373017
  CDS Start-End: 238-834
ggcattcattctttcctttctgtgggtgtggggaggggaccacagggcacataccccaccctgggatccagctgagcaggggggtcagagatgacagctcttccggctcacaggccaccggcccacatacagggcaatcagaagaaagaaacagcacaaggaaggcacagagggagtcgttgtccctgccagaggcccagcagccaccacagcgcctgcttcctcggccctgaaatcatgcccctaggtctcctgtggctgggcctagccctgttgggggctctgcatgcccaggcccaggactccacctcagacctgatcccagccccacctctgagcaaggtccctctgcagcagaacttccaggacaaccaattccaggggaagtggtatgtggtaggcctggcagggaatgcaattctcagagaagacaaagacccgcaaaagatgtatgccaccatctatgagctgaaagaagacaagagctacaatgtcacctccgtcctgtttaggaaaaagaagtgtgactactggatcaggacttttgttccaggttgccagcccggcgagttcacgctgggcaacattaagagttaccctggattaacgagttacctcgtccgagtggtgagcaccaactacaaccagcatgctatggtgttcttcaagaaagtttctcaaaacagggagtacttcaagatcaccctctacgggagaaccaaggagctgacttcggaactaaaggagaacttcatccgcttctccaaatctctgggcctccctgaaaaccacatcgtcttccctgtcccaatcgaccagtgtatcgacggctgagtgcacagtgagtg

SEQ ID NO: 149487 - DNA, 717 bp, Homo sapiens
  Payload ID: 9515
  Gene Symbol: LCN6
  Gene Name: lipocalin 6
  Uniprot ID: P62502
  ENST ID: ENST00000341206
  CDS Start-End: 46-537
gggactgcacatcctgggcctgcggcgcagtgtagacctgggaggatgggcggcctgctgctggctgcttttctggctttggtctcggtgcccagggcccaggccgtgtggttgggaagactggaccctgagcagcttcttgggccctggtacgtgcttgcggtggcctcccgggaaaagggctttgccatggagaaggacatgaagaacgtcgtgggggtggtggtgaccctcactccagaaaacaacctgcggacgctgtcctctcagcacgggctgggagggtgtgaccagagtgtcatggacctgataaagcgaaactccggatgggtgtttgagaatccctcaataggcgtgctggagctctgggtgctggccaccaacttcagagactatgccatcatcttcactcagctggagttcggggacgagcccttcaacaccgtggagctgtacagtctgacggagacagccagccaggaggccatggggctcttcaccaagtggagcaggagcctgggcttcctgtcacagtagcaggcccagctgcagaaggacctcacctgtgctcacaagatccttctgtgagtgctgcgtccccagtagggatggcgcccacagggtcctgtgacctcggccagtgtccacccacctcgctcagcggctcccggggcccagcaccagctcagaataaagcgattccacagcaaaccaagg

SEQ ID NO: 149488 - DNA, 1015 bp, Homo sapiens
  Payload ID: 9515
  Gene Symbol: LCN6
  Gene Name: lipocalin 6
  ENST ID: ENST00000476567
  CDS Start-End: 134-370
ctctggcctcactgctggctggcctggcctggactcctgagctccgtctcctctcaccgggccccggggtcttgaccctgagtgggtgacaggccccttcttttccaggctgggagggtgtgaccagagtgtcatggacctgataaagcgaaactccggatgggtgtttgagaatccctcaataggcgtgctggagctctgggtgctggccaccaacttcagagactatgccatcatcttcactcagctggagttcggggacgagcccttcaacaccgtggagctgtacagtctgacggagacagccagccaggaggccatggggctcttcaccaagtggagcaggagcctgggcttcctgtcacagtagcaggcccagctgcagaaggaccgtgagtgtccaccggagcagcctcgggggaggcttggggcaagttctggagcccacagggcgtgatggggtgacagagaccctggggttgattctggcttctgcctgactcagtcgccctgaaggagtcaggcaggctgagggggtcttcacctgcccctgcccaaagtcaggcctgggggtcttgtccccacggcaggcgagtcttgtgggtggggccctggggtgctggggggctcagtcctttttcacagccagtcttgcctccccttctagtcacctgtgctcacaagatccttctggtaagccgccatcctgagcctcaccctgggctctcttgggggaagggggtgggggaggccaccctacgcacagtgggtgggaggaccctctgcccaagcccacggggttcatggctccactgtctctaaggcagctgagggtgtggaggagcctccatggtgggctgggccccctcacactcctcttggttttcagtgagtgctgcgtccccagtagggatggcgcccacagggtcctgtgacctcggccagtgtccacccacctcgctcagcggctcccggggcccagcaccagctcagaataaagcgattccacagcaaa

SEQ ID NO: 149489 - DNA, 867 bp, Homo sapiens
  Payload ID: 9516
  Gene Symbol: LCN8
  Gene Name: lipocalin 8
  Uniprot ID: Q6JVE9
  ENST ID: ENST00000371688
  CDS Start-End: 297-755
atatgccaggagggtggctgggcaggctgctgtctaggccaggctaacccctgcggtgggcgtgggtgtcaccagggccgatggcgcttgtgcagaaacccacgtctctgagctgccagcagccaagctgtcctgatgacattcccgggtgggcgcacaagcctgcactgtccgtatagaatcggcccaggctgtgcagcaggggaacccggagcccggaccccgccacggaggccaggctgccgtgcaccatcctgggtgtcctcgtggtgctccgggcgcaggtggcagcagccatggaggagctggaccggcagaagattggaggattctggagggaagtcggtgtggcctccgatcaaagcctggtgctgacggccccgaagcgggtggagggcttgttcctcaccttgagcgggagtaacctgaccgtgaaggttgcatataacagctcaggaagctgtgagatagagaagatcgtgggctcagaaatagacagtacgggaaaattcgcttttcctggccacagagagatccacgtgctggacaccgactacgagggctacgccatcctgcgggtgtccctgatgtggcggggcaggaactttcgcgtcctcaagtactttactcggagccttgaggacaaggaccggctggggttctggaagtttcgggagctgacagcagacactggtctctacctggcggcccggcctgggcggtgtgccgagctcctgaaggaggagctgatttaatggagttcctgcctcagaccacaaggttcggagcgcccgcccacccctgcccctcctgggcaccctgcccaccaggtcacctgcacctgctctgaataaactgtgaagtcaa

SEQ ID NO: 149490 - DNA, 638 bp, Homo sapiens
  Payload ID: 9516
  Gene Symbol: LCN8
  Gene Name: lipocalin 8
  Uniprot ID: Q6JVE9
  ENST ID: ENST00000612714
  CDS Start-End: 1-528
atgcctggtgcagcagaggccctccccactgtcactgtcactctggtcgctggcgctgtgcctccggcctccggagctctgactgcccactgcattggaggattctggagggaagtcggtgtggcctccgatcaaagcctggtgctgacggccccgaagcgggtggagggcttgttcctcaccttgagcgggagtaacctgaccgtgaaggttgcatataacagctcaggaagctgtgagatagagaagatcgtgggctcagaaatagacagtacgggaaaattcgcttttcctggccacagagagatccacgtgctggacaccgactacgagggctacgccatcctgcgggtgtccctgatgtggcggggcaggaactttcgcgtcctcaagtactttactcggagccttgaggacaaggaccggctggggttctggaagtttcgggagctgacagcagacactggtctctacctggcggcccggcctgggcggtgtgccgagctcctgaaggaggagctgatttaatggagttcctgcctcagaccacaaggttcggagcgcccgcccacccctgcccctcctgggcaccctgcccaccaggtcacctgcacctgctctgaataaactgtgaagtc

SEQ ID NO: 149491 - DNA, 531 bp, Homo sapiens
  Payload ID: 9517
  Gene Symbol: LCN9
  Gene Name: lipocalin 9
  Uniprot ID: Q8WX39
  ENST ID: ENST00000277526
  CDS Start-End: 1-531
atggctctgcttctgctgagcctggggctgagcctcatcgcagcccaggagttcgatccccacaccgttatgcagaggaactacaacgtggccagggtttcaggggtctggtattctattttcatggcctcagatgacctgaatcggattaaagaaaatggagacctgagggtcttcgtccggaatattgaacacttgaagaacggcagcctaatatttgatttcgaatacatggtgcagggggagtgtgtggctgtggtcgtggtctgcgagaagacagagaagaatggggaatactccatcaactatgagggccagaacacagtggccgtctcggagactgactacaggctgttcatcaccttccacctccagaacttcaggaacgggaccgagacccacacgctggcgctctatgaaacctgcgaaaagtacggacttggctcacaaaatatcatcgacttgaccaacaaagatccctgctactccaagcattacaggagcccgcccaggcctcccatgcggtggtaa

SEQ ID NO: 149492 - DNA, 528 bp, Homo sapiens
  Payload ID: 9517
  Gene Symbol: LCN9
  Gene Name: lipocalin 9
  ENST ID: ENST00000619315
  CDS Start-End: 1-528
atggctctgcttctgctgagcctggggctgagcctcatcgcagcccaggagttcgatccccacaccgttatgcagaggaactacaacgtggccagggtttcaggggtctggtattctattttcatggcctcagatgacctgaatcggattaaagaaaatggagacctgagggtcttcgtccggaatattgaacacttgaagaacggcagcctaatatttgatttcgaatacatggtgcagggggagtgtgtggctgtggtcgtggtctgcgagaagacagagaagaatggggaatactccatcaactatgagggccagaacacagtggccgtctcggagactgactacaggctgttcatcaccttccacctccagaacttcaggaacgggaccgagacccacacgctggcgctctatgaaacctgcgaaaagtacggacttggctcacaaaatatcatcgacttgaccaacaaagatccctgctactccaagcattacaggagcccgcccaggcctcccatgcgtgag

SEQ ID NO: 149493 - DNA, 1839 bp, Homo sapiens
  Payload ID: 9518
  Gene Symbol: LCNL1
  Gene Name: lipocalin-like 1
  Uniprot ID: Q6ZST4
  ENST ID: ENST00000408973
  CDS Start-End: 595-1089
aggcccaggtccccatccaggccaactttgatgccagccaggtgtgcccagccctgtttcctcctcatctccaatgagtcctcccggctttggtgctgcaccccgggtccctgtccacaccctctttgatccaggctcagcagggctaggggcaggggaaacccccacctcacccgctccgtctgactggagtaggggttggctggggaagactgcagcctccatcctaccttttcagttgcatcccccaacaatccccagggcccaaaatagggacaagttggttgcctgtgcctcactgtcccccacccaccccacaaagacctgtgaccttgccacagccccacccatccagccgtaccccctgggtgccagctgcagacaggccggtgctgggctggtgggggccagttgctcatgtactgaggcccccctccctcagttctgcatcggggtcgagatgtgtacagcagcccctgccgtggccaggaagcagctgtgtcggggcagaatgtggtgggctcaggcccagggcacaggggcggcctcccagccttccctgcacttgccctgcagttccagggcacctggtacatggtcggggtggtgtcagatgaccaggacttcctggactccaaggacaccatgaagatggctgtggtcttagtgacccccttggggaatggtgacctggccctcaagtttggataccccacgccccatggcgggtgccagaaaatggacacgaccttcaccgagggtgctgtaccggggcagttcagcaacccagccatggccctgagtgacatccgagtggccttctccgactaccagcactttgccttgctgtacttggagatgcggaaagggggcctgcggaaccagtggctgcagctctacggtgggcgggctgcggggcggagacccagacacccccgcttcgggtctgggatgtcacccctgtgcctgcaccagccctttctgcacgcggaaggtggaaccgctggctcctggtgtctgtggccgcgggtcccggcccctccctgcccctctctccctctcttcgcccctccagccccttccctttagcttacccgccctccccaccttcagctcgagcgcccgagctgtttcccgaaggcgcccagaagatgcagctactggcgccccaagtgggcctgagccccagccagggcgtcctgctgccgaagtcgggtgagcggtgccggcagccctgctgggagggccaggccccgggtcacacccctgctggaagggccaggccctggtcactccactgatctcagattcgggacagaagtgcccggggcagacccagcctgtctgggtcgggggagggcgagacgttgcccaggccggtgttcccaggaggagatcgccttggggcaggtcgggggcctccgtcccagggaagggggcgcggggtggcgcctcaggctcgatctctctgcagaccagtgtgcgggcgcgctctcccgggtgagtagaccatggccatgcggagccgcggaccatgggccctcccagctcggtgggctgcaccgcggggccctctaccttcggggcagctagggacgacagcgggggtgatggggcacccgggcggatccgagccgcagcagcctggggaaccgcggggctgcgcgtcgggagggggcggaggcaggggacgccgcccacctgctccttgttttgcagtgaggggtccagcccctgagtgcccgcaggggtcagctgctccgtgcgcccagccctgcccaaagagccccctccctccacaccctggccccaagcgcaataaacaccctgaatgcctgt

SEQ ID NO: 149494 - DNA, 1775 bp, Homo sapiens
  Payload ID: 9519
  Gene Symbol: LIAS
  Gene Name: lipoic acid synthetase
  Uniprot ID: O43766
  ENST ID: ENST00000261434
  CDS Start-End: 119-1237
agccaatcgtggagcagcttggctgcttgtcataaatggagcgacgtaatttcgacctgtcctttcccgggagttagcgatccctcaacccctgcactgcgctagtcctaaagaggaaatgtctctacgctgcggggatgcagcccgcaccctggggccccgggtatttgggagatatttttgcagcccagtcagaccgttaagctccttgccagataaaaaaaaggaactcctacagaatggaccagaccttcaagattttgtatctggtgatcttgcagacaggagcacctgggatgaatataaaggaaacctaaaacgccagaaaggagaaaggttaagactacctccatggctaaagacagagattcccatggggaaaaattacaataaactgaaaaatactttgcggaatttaaatctccatacagtatgtgaggaagctcgatgtcccaatattggagagtgttggggaggtggagaatatgccaccgccacagccacgatcatgttgatgggtgacacatgtacaagaggttgcagattttgttctgttaagactgcaagaaatcctcctccactggatgccagtgagccctacaatactgcaaaggcaattgcagaatggggtctggattatgttgtcctgacatctgtggatcgagatgatatgcctgatgggggagctgaacacattgcaaagaccgtatcatatttaaaggaaaggaatccaaaaatccttgtggagtgtcttactcctgattttcgaggtgatctcaaagcaatagaaaaagttgctctgtcaggattagatgtgtatgcacataatgtagaaacagtcccggaattacagagtaaggttcgtgatcctcgggccaattttgatcagtccctacgtgtactgaaacatgccaagaaggttcagcctgatgttatttctaaaacatctataatgttgggtttaggcgagaatgatgagcaagtatatgcaacaatgaaagcacttcgtgaggcagatgtagactgcttgactttaggacaatatatgcagccaacaaggcgtcaccttaaggttgaagaatatattactcctgaaaaattcaaatactgggaaaaagtaggaaatgaacttggatttcattatactgcaagtggccctttggtgcgttcttcatataaagcaggtgaatttttcctgaaaaatctagtggctaaaagaaaaacaaaagacctctaaaacttcaacaagaccttcaagatcacagaaatttttaaaatttgattccagttaataacagaggtggtgccagaatgcctggactgcagtggatgtgccccacctctttgcttaaaaaaaaaaatgtcaatagccaggcatagtggctcacgcctgtaatcccagcactttaggaggccaaggcgggtggatcacctgaggtcaggagttcgagaccagcctggccaacatggtgaaatcctgtctccactaaaaacacaaaaattagtcaggcgtggtagtgggtgcctgtaatcccagctactcgggaggctaaggcaggagaatcacttgaacctgggagggggaggttgcagtgagccaagatcgctccattgccctccagcctgggtgacaagagcaaaactccatctcaaataaataaaaaggaaaaaaaagtcaataaactgtacaaatttaattacagtaattcatttggcttttagtgtatcttctttgtcccaattaaacagttgcttgctgtgatgtaatcttaaaa

SEQ ID NO: 149495 - DNA, 1594 bp, Homo sapiens
  Payload ID: 9519
  Gene Symbol: LIAS
  Gene Name: lipoic acid synthetase
  Uniprot ID: O43766
  ENST ID: ENST00000340169
  CDS Start-End: 119-1087
agccaatcgtggagcagcttggctgcttgtcataaatggagcgacgtaatttcgacctgtcctttcccgggagttagcgatccctcaacccctgcactgcgctagtcctaaagaggaaatgtctctacgctgcggggatgcagcccgcaccctggggccccgggtatttgggagatatttttgcagcccagtcagaccgttaagctccttgccagataaaaaaaaggaactcctacagaatggaccagaccttcaagattttgtatctggtgatcttgcagacaggagcacctgggatgaatataaaggaaacctaaaacgccagaaaggagaaaggttaagactacctccatggctaaagacagagattcccatggggaaaaattacaataaactgaaaaatactttgcggaatttaaatctccatacagtatgtgaggaagctcgatgtcccaatattggagagtgttggggaggtggagaatatgccaccgccacagccacgatcatgttgatgggtgacacatgtacaagaggttgcagattttgttctgttaagactgcaagaaatcctcctccactggatgccagtgagccctacaatactgcaaaggcaattgcagaatggggtctggattatgttgtcctgacatctgtggatcgagatgatatgcctgatgggggagctgaacacattgcaaagaccgtatcatatttaaaggaaaggaatccaaaaatccttgtggagtgtcttactcctgattttcgaggtgatctcaaagcaatagaaaaagttgctctgtcaggattagatgtgtatgcacataatgtagaaacagtcccggaattacagagtaaggttcgtgatcctcgggccaattttgatcagtccctacgtgtactgaaacatgccaagaaggttcagcctgatgttatttctaaaacatctataatgttgggtttaggcgagaatgatgagcaagtatatgcaacaatgaaagcacttcgtgaggcagatgtagactgcttgactttaggacaatatatgcagccaacaaggcgtcaccttaaggtgaatttttcctgaaaaatctagtggctaaaagaaaaacaaaagacctctaaaacttcaacaagaccttcaagatcacagaaatttttaaaatttgattccagttaataacagaggtggtgccagaatgcctggactgcagtggatgtgccccacctctttgcttaaaaaaaaaaatgtcaatagccaggcatagtggctcacgcctgtaatcccagcactttaggaggccaaggcgggtggatcacctgaggtcaggagttcgagaccagcctggccaacatggtgaaatcctgtctccactaaaaacacaaaaattagtcaggcgtggtagtgggtgcctgtaatcccagctactcgggaggctaaggcaggagaatcacttgaacctgggagggggaggttgcagtgagccaagatcgctccattgccctccagcctgggtgacaagagcaaaactccatctcaaataaataaaaaggaaaaaaaagtcaataaactgtacaaatttaattacagtaa

SEQ ID NO: 149496 - DNA, 1542 bp, Homo sapiens
  Payload ID: 9519
  Gene Symbol: LIAS
  Gene Name: lipoic acid synthetase
  Uniprot ID: O43766
  ENST ID: ENST00000381846
  CDS Start-End: 47-1036
gttagcgatccctcaacccctgcactgcgctagtcctaaagaggaaatgtctctacgctgcggggatgcagcccgcaccctggggccccgggtatttgggagatatttttgcagcccagtcagaccgttaagctccttgccagataaaaaaaaggaactcctacagaatggaccagaccttcaagattttgtatctggtgatcttgcagacaggagcacctgggatgaatataaaggaaacctaaaacgccagaaaggagaaaggttaagactacctccatggctaaagacagagattcccatggggaaaaattacaataaactgaaaaatactttgcggaatttaaatctccatacagtatgtgaggaagctcgatgtcccaatattggagagtgttggggaggtggagaatatgccaccgccacagccacgatcatgttgatgggtgacacatgtacaagaggttgcagattttgttctgttaagactgcaagaaatcctcctccactggatgccagtgagccctacaatactgcaaaggcaattgcagaatggggtctggattatgttgtcctgacatctgtggatcgagatgatatgcctgatgggggagctgaacacattgcaaagaccgtatcatatttaaaggaaagtaaggttcgtgatcctcgggccaattttgatcagtccctacgtgtactgaaacatgccaagaaggttcagcctgatgttatttctaaaacatctataatgttgggtttaggcgagaatgatgagcaagtatatgcaacaatgaaagcacttcgtgaggcagatgtagactgcttgactttaggacaatatatgcagccaacaaggcgtcaccttaaggttgaagaatatattactcctgaaaaattcaaatactgggaaaaagtaggaaatgaacttggatttcattatactgcaagtggccctttggtgcgttcttcatataaagcaggtgaatttttcctgaaaaatctagtggctaaaagaaaaacaaaagacctctaaaacttcaacaagaccttcaagatcacagaaatttttaaaatttgattccagttaataacagaggtggtgccagaatgcctggactgcagtggatgtgccccacctctttgcttaaaaaaaaaaatgtcaatagccaggcatagtggctcacgcctgtaatcccagcactttaggaggccaaggcgggtggatcacctgaggtcaggagttcgagaccagcctggccaacatggtgaaatcctgtctccactaaaaacacaaaaattagtcaggcgtggtagtgggtgcctgtaatcccagctactcgggaggctaaggcaggagaatcacttgaacctgggagggggaggttgcagtgagccaagatcgctccattgccctccagcctgggtgacaagagcaaaactccatctcaaataaataaaaaggaaaaaaaagtcaataaactgtacaaatttaattacagtaattcatttggcttttagtgtatcttctttgtcccaatt

SEQ ID NO: 149497 - DNA, 821 bp, Homo sapiens
  Payload ID: 9519
  Gene Symbol: LIAS
  Gene Name: lipoic acid synthetase
  ENST ID: ENST00000513731
  CDS Start-End: 53-781
ccgggagttagcgatccctcaacccctgcactgcgctagtcctaaagaggaaatgtctctacgctgcggggatgcagcccgcaccctggggccccgggtatttgggagatatttttgcagcccagtcagaccgttaagctccttgccagataaaaaaaaggaactcctacagaatggaccagaccttcaagattttgtatctggtgatcttgcagacaggagcacctgggatgaatataaaggaaacctaaaacgccagaaaggagaaaggaatccaaaaatccttgtggagtgtcttactcctgattttcgaggtgatctcaaagcaatagaaaaagttgctctgtcaggattagatgtgtatgcacataatgtagaaacagtcccggaattacagagtaaggttcgtgatcctcgggccaattttgatcagtccctacgtgtactgaaacatgccaagaaggttcagcctgatgttatttctaaaacatctataatgttgggtttaggcgagaatgatgagcaagtatatgcaacaatgaaagcacttcgtgaggcagatgtagactgcttgactttaggacaatatatgcagccaacaaggcgtcaccttaaggttgaagaatatattactcctgaaaaattcaaatactgggaaaaagtaggaaatgaacttggatttcattatactgcaagtggccctttggtgcgttcttcatataaagcaggtgaatttttcctgaaaaatctagtggctaaaagaaaaacaaaagacctctaaaacttcaacaagaccttcaagatcacagaaatttttaaaa

SEQ ID NO: 149498 - DNA, 1880 bp, Homo sapiens
  Payload ID: 9520
  Gene Symbol: LSR
  Gene Name: lipolysis stimulated lipoprotein receptor
  Uniprot ID: Q86X29
  ENST ID: ENST00000347609
  CDS Start-End: 1-1776
atgcaacaggacggacttggagtagggacaaggaacggaagtgggaaggggaggagcgtgcacccctcctggccttggtgcgcgccgcgccccctaaggtactttggaagggacgcgcgggccagacgcgcccagacggccgcgatggcgctggccatccaggtgaccgtgtccaacccctaccacgtggtgatcctcttccagcctgtgaccctgccctgtacctaccagatgacctcgacccccacgcaacccatcgtcatctggaagtacaagtctttctgccgggaccgcatcgccgatgccttctccccggccagcgtcgacaaccagctcaatgcccagctggcagccgggaacccaggctacaacccctacgttgagtgccaggacagcgtgcgcaccgtcagggtcgtggccaccaagcagggcaacgctgtgaccctgggagattactaccagggccggaggattaccatcaccggaaatgctgacctgacctttgaccagacggcgtggggggacagtggtgtgtattactgctccgtggtctcagcccaggacctccaggggaacaatgaggcctacgcagagctcatcgtccttgggaggacctcaggggtggctgagctcttacctggttttcaggcggggcccatagaagactggctcttcgtggttgtggtatgcctggctgccttcctcatcttcctcctcctgggcatctgctggtgccagtgctgcccgcacacttgctgctgctacgtcaggtgcccctgctgcccagacaagtgctgctgccccgaggccctgtatgccgccggcaaagcagccacctcaggtgttcccagcatttatgcccccagcacctatgcccacctgtctcccgccaagaccccacccccaccagctatgattcccatgggccctgcctacaacgggtaccctggaggataccctggagacgttgacaggagtagctcagtccgcagtggctacaggattcaggccagccagcaggacgactccatgcgggtcctgtactacatggagaaggagctggccaacttcgacccttctcgacctggcccccccagtggccgtgtggagcgggccatgagtgaagtcacctccctccacgaggacgactggcgatctcggccttcccggggccctgccctcaccccgatccgggatgaggagtggggtggccactccccccggagtcccaggggatgggaccaggagcccgccagggagcaggcaggcgggggctggcgggccaggcggccccgggcccgctccgtggacgccctggacgacctcaccccgccgagcaccgccgagtcagggagcaggtctcccacgagtaatggtgggagaagccgggcctacatgcccccgcggagccgcagccgggacgacctctatgaccaagacgactcgagggacttcccacgctcccgggacccccactacgacgacttcaggtctcgggagcgccctcctgccgaccccaggtcccaccaccaccgtacccgggaccctcgggacaacggctccaggtccggggacctcccctatgatgggcggctactggaggaggctgtgaggaagaaggggtcggaggagaggaggagaccccacaaggaggaggaggaagaggcctactacccgcccgcgccgcccccgtactcggagaccgactcgcaggcgtcccgagagcgcaggctcaagaagaacttggccctgagtcgggaaagtttagtcgtctgatctgacgttttctacgtagcttttgtatttttttttttaatttgaaggaacactgatgaagccctgccatacccctcccgagtctaataaaacgtataatcaca

SEQ ID NO: 149499 - DNA, 2105 bp, Homo sapiens
  Payload ID: 9520
  Gene Symbol: LSR
  Gene Name: lipolysis stimulated lipoprotein receptor
  Uniprot ID: Q86X29
  ENST ID: ENST00000354900
  CDS Start-End: 108-2000
cgggtggagtgtggctcggaggaccgcggcgggtcaagcacctttctcccccatatctgaaagcatgccctttgtccacgtcgtttacgctcattaaaacttccagaatgcaacaggacggacttggagtagggacaaggaacggaagtgggaaggggaggagcgtgcacccctcctggccttggtgcgcgccgcgccccctaaggtactttggaagggacgcgcgggccagacgcgcccagacggccgcgatggcgctgttggccggcgggctctccagagggctgggctcccacccggccgccgcaggccgggacgcggtcgtcttcgtgtggcttctgcttagcacctggtgcacagctcctgccagggccatccaggtgaccgtgtccaacccctaccacgtggtgatcctcttccagcctgtgaccctgccctgtacctaccagatgacctcgacccccacgcaacccatcgtcatctggaagtacaagtctttctgccgggaccgcatcgccgatgccttctccccggccagcgtcgacaaccagctcaatgcccagctggcagccgggaacccaggctacaacccctacgttgagtgccaggacagcgtgcgcaccgtcagggtcgtggccaccaagcagggcaacgctgtgaccctgggagattactaccagggccggaggattaccatcaccggaaatgctgacctgacctttgaccagacggcgtggggggacagtggtgtgtattactgctccgtggtctcagcccaggacctccaggggaacaatgaggcctacgcagagctcatcgtccttgactggctcttcgtggttgtggtatgcctggctgccttcctcatcttcctcctcctgggcatctgctggtgccagtgctgcccgcacacttgctgctgctacgtcaggtgcccctgctgcccagacaagtgctgctgccccgaggccctgtatgccgccggcaaagcagccacctcaggtgttcccagcatttatgcccccagcacctatgcccacctgtctcccgccaagaccccacccccaccagctatgattcccatgggccctgcctacaacgggtaccctggaggataccctggagacgttgacaggagtagctcagctggtggccaaggctcctatgtacccctgcttcgggacacggacagcagtgtggcctctgaagtccgcagtggctacaggattcaggccagccagcaggacgactccatgcgggtcctgtactacatggagaaggagctggccaacttcgacccttctcgacctggcccccccagtggccgtgtggagcgggccatgagtgaagtcacctccctccacgaggacgactggcgatctcggccttcccggggccctgccctcaccccgatccgggatgaggagtggggtggccactccccccggagtcccaggggatgggaccaggagcccgccagggagcaggcaggcgggggctggcgggccaggcggccccgggcccgctccgtggacgccctggacgacctcaccccgccgagcaccgccgagtcagggagcaggtctcccacgagtaatggtgggagaagccgggcctacatgcccccgcggagccgcagccgggacgacctctatgaccaagacgactcgagggacttcccacgctcccgggacccccactacgacgacttcaggtctcgggagcgccctcctgccgaccccaggtcccaccaccaccgtacccgggaccctcgggacaacggctccaggtccggggacctcccctatgatgggcggctactggaggaggctgtgaggaagaaggggtcggaggagaggaggagaccccacaaggaggaggaggaagaggcctactacccgcccgcgccgcccccgtactcggagaccgactcgcaggcgtcccgagagcgcaggctcaagaagaacttggccctgagtcgggaaagtttagtcgtctgatctgacgttttctacgtagcttttgtatttttttttttaatttgaaggaacactgatgaagccctgccatacccctcccgagtctaataaaacgtataatcacaa

SEQ ID NO: 149500 - DNA, 1963 bp, Homo sapiens
  Payload ID: 9520
  Gene Symbol: LSR
  Gene Name: lipolysis stimulated lipoprotein receptor
  Uniprot ID: Q86X29
  ENST ID: ENST00000360798
  CDS Start-End: 115-1860
cgcgcagcgggtggagtgtggctcggaggaccgcggcgggtcaagcacctttctcccccatatctgaaagcatgccctttgtccacgtcgtttacgctcattaaaacttccagaatgcaacaggacggacttggagtagggacaaggaacggaagtgggaaggggaggagcgtgcacccctcctggccttggtgcgcgccgcgccccctaaggtactttggaagggacgcgcgggccagacgcgcccagacggccgcgatggcgctgttggccggcgggctctccagagggctgggctcccacccggccgccgcaggccgggacgcggtcgtcttcgtgtggcttctgcttagcacctggtgcacagctcctgccagggccatccaggtgaccgtgtccaacccctaccacgtggtgatcctcttccagcctgtgaccctgccctgtacctaccagatgacctcgacccccacgcaacccatcgtcatctggaagtacaagtctttctgccgggaccgcatcgccgatgccttctccccggccagcgtcgacaaccagctcaatgcccagctggcagccgggaacccaggctacaacccctacgttgagtgccaggacagcgtgcgcaccgtcagggtcgtggccaccaagcagggcaacgctgtgaccctgggagattactaccagggccggaggattaccatcaccggaaatgctgacctgacctttgaccagacggcgtggggggacagtggtgtgtattactgctccgtggtctcagcccaggacctccaggggaacaatgaggcctacgcagagctcatcgtccttgtgtatgccgccggcaaagcagccacctcaggtgttcccagcatttatgcccccagcacctatgcccacctgtctcccgccaagaccccacccccaccagctatgattcccatgggccctgcctacaacgggtaccctggaggataccctggagacgttgacaggagtagctcagctggtggccaaggctcctatgtacccctgcttcgggacacggacagcagtgtggcctctgaagtccgcagtggctacaggattcaggccagccagcaggacgactccatgcgggtcctgtactacatggagaaggagctggccaacttcgacccttctcgacctggcccccccagtggccgtgtggagcgggccatgagtgaagtcacctccctccacgaggacgactggcgatctcggccttcccggggccctgccctcaccccgatccgggatgaggagtggggtggccactccccccggagtcccaggggatgggaccaggagcccgccagggagcaggcaggcgggggctggcgggccaggcggccccgggcccgctccgtggacgccctggacgacctcaccccgccgagcaccgccgagtcagggagcaggtctcccacgagtaatggtgggagaagccgggcctacatgcccccgcggagccgcagccgggacgacctctatgaccaagacgactcgagggacttcccacgctcccgggacccccactacgacgacttcaggtctcgggagcgccctcctgccgaccccaggtcccaccaccaccgtacccgggaccctcgggacaacggctccaggtccggggacctcccctatgatgggcggctactggaggaggctgtgaggaagaaggggtcggaggagaggaggagaccccacaaggaggaggaggaagaggcctactacccgcccgcgccgcccccgtactcggagaccgactcgcaggcgtcccgagagcgcaggctcaagaagaacttggccctgagtcgggaaagtttagtcgtctgatctgacgttttctacgtagcttttgtatttttttttttaatttgaaggaacactgatgaagccctgccatacccctcccgagtctaataaaacgtataatcac

SEQ ID NO: 149501 - DNA, 2210 bp, Homo sapiens
  Payload ID: 9520
  Gene Symbol: LSR
  Gene Name: lipolysis stimulated lipoprotein receptor
  Uniprot ID: Q86X29
  ENST ID: ENST00000361790
  CDS Start-End: 160-2109
ctcggctcccacccttgtgtacctgggccgaaccattcaccggagcgcgcagcgggtggagtgtggctcggaggaccgcggcgggtcaagcacctttctcccccatatctgaaagcatgccctttgtccacgtcgtttacgctcattaaaacttccagaatgcaacaggacggacttggagtagggacaaggaacggaagtgggaaggggaggagcgtgcacccctcctggccttggtgcgcgccgcgccccctaaggtactttggaagggacgcgcgggccagacgcgcccagacggccgcgatggcgctgttggccggcgggctctccagagggctgggctcccacccggccgccgcaggccgggacgcggtcgtcttcgtgtggcttctgcttagcacctggtgcacagctcctgccagggccatccaggtgaccgtgtccaacccctaccacgtggtgatcctcttccagcctgtgaccctgccctgtacctaccagatgacctcgacccccacgcaacccatcgtcatctggaagtacaagtctttctgccgggaccgcatcgccgatgccttctccccggccagcgtcgacaaccagctcaatgcccagctggcagccgggaacccaggctacaacccctacgttgagtgccaggacagcgtgcgcaccgtcagggtcgtggccaccaagcagggcaacgctgtgaccctgggagattactaccagggccggaggattaccatcaccggaaatgctgacctgacctttgaccagacggcgtggggggacagtggtgtgtattactgctccgtggtctcagcccaggacctccaggggaacaatgaggcctacgcagagctcatcgtccttgggaggacctcaggggtggctgagctcttacctggttttcaggcggggcccatagaagactggctcttcgtggttgtggtatgcctggctgccttcctcatcttcctcctcctgggcatctgctggtgccagtgctgcccgcacacttgctgctgctacgtcaggtgcccctgctgcccagacaagtgctgctgccccgaggccctgtatgccgccggcaaagcagccacctcaggtgttcccagcatttatgcccccagcacctatgcccacctgtctcccgccaagaccccacccccaccagctatgattcccatgggccctgcctacaacgggtaccctggaggataccctggagacgttgacaggagtagctcagctggtggccaaggctcctatgtacccctgcttcgggacacggacagcagtgtggcctctgaagtccgcagtggctacaggattcaggccagccagcaggacgactccatgcgggtcctgtactacatggagaaggagctggccaacttcgacccttctcgacctggcccccccagtggccgtgtggagcgggccatgagtgaagtcacctccctccacgaggacgactggcgatctcggccttcccggggccctgccctcaccccgatccgggatgaggagtggggtggccactccccccggagtcccaggggatgggaccaggagcccgccagggagcaggcaggcgggggctggcgggccaggcggccccgggcccgctccgtggacgccctggacgacctcaccccgccgagcaccgccgagtcagggagcaggtctcccacgagtaatggtgggagaagccgggcctacatgcccccgcggagccgcagccgggacgacctctatgaccaagacgactcgagggacttcccacgctcccgggacccccactacgacgacttcaggtctcgggagcgccctcctgccgaccccaggtcccaccaccaccgtacccgggaccctcgggacaacggctccaggtccggggacctcccctatgatgggcggctactggaggaggctgtgaggaagaaggggtcggaggagaggaggagaccccacaaggaggaggaggaagaggcctactacccgcccgcgccgcccccgtactcggagaccgactcgcaggcgtcccgagagcgcaggctcaagaagaacttggccctgagtcgggaaagtttagtcgtctgatctgacgttttctacgtagcttttgtatttttttttttaatttgaaggaacactgatgaagccctgccatacccctcccgagtctaataaaacgtataatc

SEQ ID NO: 149502 - DNA, 1606 bp, Homo sapiens
  Payload ID: 9520
  Gene Symbol: LSR
  Gene Name: lipolysis stimulated lipoprotein receptor
  Uniprot ID: Q86X29
  ENST ID: ENST00000427250
  CDS Start-End: 22-1503
agacgcgcccagacggccgcgatggcgctgttggccggcgggctctccagagggctgggctcccacccggccgccgcaggccgggacgcggtcgtcttcgtgtggcttctgcttagcacctggtgcacagctcctgccagggccatccaggtgaccgtgtccaacccctaccacgtggtgatcctcttccagcctgtgaccctgccctgtacctaccagatgacctcgacccccacgcaacccatcgtcatctggaagtacaagtctttctgccgggaccgcatcgccgatgccttctccccggccagcgtcgacaaccagctcaatgcccagctggcagccgggaacccaggctacaacccctacgttgagtgccaggacagcgtgcgcaccgtcagggtcgtggccaccaagcagggcaacgctgtgaccctgggagattactaccagggccggaggattaccatcaccggaatgtatgccgccggcaaagcagccacctcaggtgttcccagcatttatgcccccagcacctatgcccacctgtctcccgccaagaccccacccccaccagctatgattcccatgggccctgcctacaacgggtaccctggaggataccctggagacgttgacaggagtagctcagctggtggccaaggctcctatgtacccctgcttcgggacacggacagcagtgtggcctctgaagtccgcagtggctacaggattcaggccagccagcaggacgactccatgcgggtcctgtactacatggagaaggagctggccaacttcgacccttctcgacctggcccccccagtggccgtgtggagcgggccatgagtgaagtcacctccctccacgaggacgactggcgatctcggccttcccggggccctgccctcaccccgatccgggatgaggagtggggtggccactccccccggagtcccaggggatgggaccaggagcccgccagggagcaggcaggcgggggctggcgggccaggcggccccgggcccgctccgtggacgccctggacgacctcaccccgccgagcaccgccgagtcagggagcaggtctcccacgagtaatggtgggagaagccgggcctacatgcccccgcggagccgcagccgggacgacctctatgaccaagacgactcgagggacttcccacgctcccgggacccccactacgacgacttcaggtctcgggagcgccctcctgccgaccccaggtcccaccaccaccgtacccgggaccctcgggacaacggctccaggtccggggacctcccctatgatgggcggctactggaggaggctgtgaggaagaaggggtcggaggagaggaggagaccccacaaggaggaggaggaagaggcctactacccgcccgcgccgcccccgtactcggagaccgactcgcaggcgtcccgagagcgcaggctcaagaagaacttggccctgagtcgggaaagtttagtcgtctgatctgacgttttctacgtagcttttgtatttttttttttaatttgaaggaacactgatgaagccctgccatacccctcccgagtctaataaaacgtataatcac

SEQ ID NO: 149503 - DNA, 343 bp, Homo sapiens
  Payload ID: 9520
  Gene Symbol: LSR
  Gene Name: lipolysis stimulated lipoprotein receptor
  ENST ID: ENST00000599658
  CDS Start-End: 1-343
gacagcgtgcgcaccgtcagggtcgtggccaccaagcagggcaacgctgtgaccctgggagattactaccagggccggaggattaccatcaccggaaatgctgacctgacctttgaccagacggcgtggggggacagtggtgtgtattactgctccgtggtctcagcccaggacctccaggggaacaatgaggcctacgcagagctcatcgtccttgggaggacctcaggggtggctgagctcttacctggttttcaggcggggcccatagaagtgtatgccgccggcaaagcagccacctcaggtgttcccagcatttatgcccccagcacctatgcccacc

SEQ ID NO: 149504 - DNA, 297 bp, Homo sapiens
  Payload ID: 9520
  Gene Symbol: LSR
  Gene Name: lipolysis stimulated lipoprotein receptor
  ENST ID: ENST00000602003
  CDS Start-End: 144-297
gtgtacctgggccgaaccattcaccggagcgcgcagcgggtggagtgtggctcggaggaccgcggcgggtcaagcacctttctcccccatatctgaaagcatgccctttgtccacgtcgtttacgctcattaaaacttccagaatgcaacaggacggacttggagtagggacaaggaacggaagtgggaaggggaggagcgtgcacccctcctggccttggtgcgcgccgcgccccctaagctcctgccagggccatccaggtgaccgtgtccaacccctaccacgtggtgatcctc

SEQ ID NO: 149505 - DNA, 530 bp, Homo sapiens
  Payload ID: 9520
  Gene Symbol: LSR
  Gene Name: lipolysis stimulated lipoprotein receptor
  ENST ID: ENST00000601623
  CDS Start-End: 112-530
aggaagtgaaactccctggacgctcctgccagggccatccaggtgaccgtgtccaacccctaccacgtggtgatcctcttccagcctgtgaccctgccctgtacctaccagatgacctcgacccccacgcaacccatcgtcatctggaagtacaagtctttctgccgggaccgcatcgccgatgccttctccccggccagcgtcgacaaccagctcaatgcccagctggcagccgggaacccaggctacaacccctacgttgagtgccaggacagcgtgcgcaccgtcagggtcgtggccaccaagcagggcaacgctgtgaccctgggagattactaccagggccggaggattaccatcaccggaaatgctgacctgacctttgaccagacggcgtggggggacagtggtgtgtattactgctccgtggtctcagcccaggacctccaggggaacaatgaggcctacgcagagctcatcgtccttgactggctcttcgtggttgtggtatgcctggctgccttcctcat

SEQ ID NO: 149506 - DNA, 2480 bp, Homo sapiens
  Payload ID: 9520
  Gene Symbol: LSR
  Gene Name: lipolysis stimulated lipoprotein receptor
  Uniprot ID: Q86X29
  ENST ID: ENST00000602122
  CDS Start-End: 488-2377
agactcgctcctcccggcagggcgcacctaggcgggtccatcgccagccggggagaggggtttgggcagggagggaacaggtgcgcggcgggacccgccctatctcaacaggtgaatcgctccaagtgggtctcggttgcatggatctcggtgcgcttggtttggccggagcagatgggggccggaagggacctgtggtccgcaggcgccctcccagcgggccagtcacttggttcgggccctgggggacggagcgcacctgggtcagcccacttccggggagggaggcagaggaacccctccccgccgctcacccctaagcccagccctcggctcccacccttgtgtacctgggccgaaccattcaccggagcgcgcagcgggtggagtgtggctcggaggaccgcggcgggtcaagcacctttctcccccatatctgaaagcatgccctttgtccacgtcgtttacgctcattaaaacttccagaatgcaacaggacggacttggagtagggacaaggaacggaagtgggaaggggaggagcgtgcacccctcctggccttggtgcgcgccgcgccccctaaggtactttggaagggacgcgcgggccagacgcgcccagacggccgcgatggcgctgttggccggcgggctctccagagggctgggctcccacccggccgccgcaggccgggacgcggtcgtcttcgtgtggcttctgcttagcacctggtgcacagctcctgccagggccatccaggtgaccgtgtccaacccctaccacgtggtgatcctcttccagcctgtgaccctgccctgtacctaccagatgacctcgacccccacgcaacccatcgtcatctggaagtacaagtctttctgccgggaccgcatcgccgatgccttctccccggccagcgtcgacaaccagctcaatgcccagctggcagccgggaacccaggctacaacccctacgttgagtgccaggacagcgtgcgcaccgtcagggtcgtggccaccaagcagggcaacgctgtgaccctgggagattactaccagggccggaggattaccatcaccggaaatgctgacctgacctttgaccagacggcgtggggggacagtggtgtgtattactgctccgtggtctcagcccaggacctccaggggaacaatgaggcctacgcagagctcatcgtccttgactggctcttcgtggttgtggtatgcctggctgccttcctcatcttcctcctcctgggcatctgctggtgccagtgctgcccgcacacttgctgctgctacgtcaggtgcccctgctgcccagacaagtgctgctgccccgaggccctgtatgccgccggcaaagcagccacctcaggtgttcccagcatttatgcccccagcacctatgcccacctgtctcccgccaagaccccacccccaccagctatgattcccatgggccctgcctacaacgggtaccctggaggataccctggagacgttgacaggagtagctcagctggtggccaaggctcctatgtacccctgcttcgggacacggacagcagtgtggcctctgtccgcagtggctacaggattcaggccagccagcaggacgactccatgcgggtcctgtactacatggagaaggagctggccaacttcgacccttctcgacctggcccccccagtggccgtgtggagcgggccatgagtgaagtcacctccctccacgaggacgactggcgatctcggccttcccggggccctgccctcaccccgatccgggatgaggagtggggtggccactccccccggagtcccaggggatgggaccaggagcccgccagggagcaggcaggcgggggctggcgggccaggcggccccgggcccgctccgtggacgccctggacgacctcaccccgccgagcaccgccgagtcagggagcaggtctcccacgagtaatggtgggagaagccgggcctacatgcccccgcggagccgcagccgggacgacctctatgaccaagacgactcgagggacttcccacgctcccgggacccccactacgacgacttcaggtctcgggagcgccctcctgccgaccccaggtcccaccaccaccgtacccgggaccctcgggacaacggctccaggtccggggacctcccctatgatgggcggctactggaggaggctgtgaggaagaaggggtcggaggagaggaggagaccccacaaggaggaggaggaagaggcctactacccgcccgcgccgcccccgtactcggagaccgactcgcaggcgtcccgagagcgcaggctcaagaagaacttggccctgagtcgggaaagtttagtcgtctgatctgacgttttctacgtagcttttgtatttttttttttaatttgaaggaacactgatgaagccctgccatacccctcccgagtctaataaaacgtataatcac

SEQ ID NO: 149507 - DNA, 1885 bp, Homo sapiens
  Payload ID: 9520
  Gene Symbol: LSR
  Gene Name: lipolysis stimulated lipoprotein receptor
  ENST ID: ENST00000605618
  CDS Start-End: 5-1810
cgcgatggcgctgttggccggcgggctctccagagggctgggctcccacccggccgccgcaggccgggacgcggtcgtcttcgtgtggcttctgcttagcacctggtgcacagctcctgccagggccatccaggtgaccgtgtccaacccctaccacgtggtgatcctcttccagcctgtgaccctgccctgtacctaccagatgacctcgacccccacgcaacccatcgtcatctggaagtacaagtctttctgccgggaccgcatcgccgatgccttctccccggccagcgtcgacaaccagctcaatgcccagctggcagccgggaacccaggctacaacccctacgttgagtgccaggacagcgtgcgcaccgtcagggtcgtggccaccaagcagggcaacgctgtgaccctgggagattactaccagggccggaggattaccatcaccggaaatgctgacctgacctttgaccagacggcgtggggggacagtggtgtgtattactgctccgtggtctcagcccaggacctccaggggaacaatgaggcctacgcagagctcatcgtccttgggaggacctcaggggtggctgagctcttacctggttttcaggcggggcccatagaagactggctcttcgtggttgtggtatgcctggctgccttcctcatcttcctcctcctgggcatctgctggtgccagtgctgcccgcacacttgctgctgctacgtcaggtgcccctgctgcccagacaagtgctgctgccccgaggccctgtatgccgccggcaaagcagccacctcaggtgttcccagcatttatgcccccagcacctatgcccacctgtctcccgccaagaccccacccccaccagctatgattcccatgggccctgcctacaacgggtaccctggaggataccctggagacgttgacaggagtagctcagctggtggccaaggctcctatgtacccctgcttcgggacacggacagcagtgtggcctctgaagtccgcagtggctacaggattcaggccagccagcaggacgactccatgcgggtcctgtactacatggagaaggagctggccaacttcgacccttctcgacctggcccccccagtggccgtgtggagcgggccatgagtgaagtcacctccctccacgaggacgactggcgatctcggccttcccggggccctgccctcaccccgatccgggatgaggagtggggtggccactccccccggagtcccaggggatgggaccaggagcccgccagggagcaggcaggcgggggctggcgggccaggcggccccgggcccgctccgtggacgccctggacgacctcaccccgccgagcaccgccgagtcagggagcaggtctcccacgagtaatggtgggagaagccgggcctacatgcccccgcggagccgcagccgggacgacctctatgaccaagacgactcgagggacttcccacgctcccgggacccccactacgacgacttcaggtctcgggagcgccctcctgccgaccccaggtcccaccaccaccgtacccgggaccctcgggacaacggctccaggtccggggacctcccctatgatgggcggctactggaggaggctgtgaggaagaaggggtcggaggagaggaggagaccccacaaggaggaggaggaagaggcctactacccgcccgcgccgcccccgtactcggagaccgactcgcaggcgtcccgagagcgcaggctcaagaagaacttggccctgagtcgggaaagtttagtcgtctgatctgacgttttctacgtagcttttgtatttttttttttaatttgaaggaacactgatgaagccctgccatacccc

SEQ ID NO: 149508 - DNA, 2274 bp, Homo sapiens
  Payload ID: 9520
  Gene Symbol: LSR
  Gene Name: lipolysis stimulated lipoprotein receptor
  Uniprot ID: Q86X29
  ENST ID: ENST00000621372
  CDS Start-End: 224-2173
tcagcccacttccggggagggaggcagaggaacccctccccgccgctcacccctaagcccagccctcggctcccacccttgtgtacctgggccgaaccattcaccggagcgcgcagcgggtggagtgtggctcggaggaccgcggcgggtcaagcacctttctcccccatatctgaaagcatgccctttgtccacgtcgtttacgctcattaaaacttccagaatgcaacaggacggacttggagtagggacaaggaacggaagtgggaaggggaggagcgtgcacccctcctggccttggtgcgcgccgcgccccctaaggtactttggaagggacgcgcgggccagacgcgcccagacggccgcgatggcgctgttggccggcgggctctccagagggctgggctcccacccggccgccgcaggccgggacgcggtcgtcttcgtgtggcttctgcttagcacctggtgcacagctcctgccagggccatccaggtgaccgtgtccaacccctaccacgtggtgatcctcttccagcctgtgaccctgccctgtacctaccagatgacctcgacccccacgcaacccatcgtcatctggaagtacaagtctttctgccgggaccgcatcgccgatgccttctccccggccagcgtcgacaaccagctcaatgcccagctggcagccgggaacccaggctacaacccctacgttgagtgccaggacagcgtgcgcaccgtcagggtcgtggccaccaagcagggcaacgctgtgaccctgggagattactaccagggccggaggattaccatcaccggaaatgctgacctgacctttgaccagacggcgtggggggacagtggtgtgtattactgctccgtggtctcagcccaggacctccaggggaacaatgaggcctacgcagagctcatcgtccttgggaggacctcaggggtggctgagctcttacctggttttcaggcggggcccatagaagactggctcttcgtggttgtggtatgcctggctgccttcctcatcttcctcctcctgggcatctgctggtgccagtgctgcccgcacacttgctgctgctacgtcaggtgcccctgctgcccagacaagtgctgctgccccgaggccctgtatgccgccggcaaagcagccacctcaggtgttcccagcatttatgcccccagcacctatgcccacctgtctcccgccaagaccccacccccaccagctatgattcccatgggccctgcctacaacgggtaccctggaggataccctggagacgttgacaggagtagctcagctggtggccaaggctcctatgtacccctgcttcgggacacggacagcagtgtggcctctgaagtccgcagtggctacaggattcaggccagccagcaggacgactccatgcgggtcctgtactacatggagaaggagctggccaacttcgacccttctcgacctggcccccccagtggccgtgtggagcgggccatgagtgaagtcacctccctccacgaggacgactggcgatctcggccttcccggggccctgccctcaccccgatccgggatgaggagtggggtggccactccccccggagtcccaggggatgggaccaggagcccgccagggagcaggcaggcgggggctggcgggccaggcggccccgggcccgctccgtggacgccctggacgacctcaccccgccgagcaccgccgagtcagggagcaggtctcccacgagtaatggtgggagaagccgggcctacatgcccccgcggagccgcagccgggacgacctctatgaccaagacgactcgagggacttcccacgctcccgggacccccactacgacgacttcaggtctcgggagcgccctcctgccgaccccaggtcccaccaccaccgtacccgggaccctcgggacaacggctccaggtccggggacctcccctatgatgggcggctactggaggaggctgtgaggaagaaggggtcggaggagaggaggagaccccacaaggaggaggaggaagaggcctactacccgcccgcgccgcccccgtactcggagaccgactcgcaggcgtcccgagagcgcaggctcaagaagaacttggccctgagtcgggaaagtttagtcgtctgatctgacgttttctacgtagcttttgtatttttttttttaatttgaaggaacactgatgaagccctgccatacccctcccgagtctaataaaacgtataatc

SEQ ID NO: 149509 - DNA, 2110 bp, Homo sapiens
  Payload ID: 9521
  Gene Symbol: LHFP
  Gene Name: lipoma HMGIC fusion partner
  Uniprot ID: Q9Y693
  ENST ID: ENST00000379589
  CDS Start-End: 464-1066
gtgcgatccccggcgcccgcgcgcgcccacagcgctccgccagagctgccgccgcggactcgccgggagtgggggtctccgctggtgccagcccgcttctggagaccctccgcctcctgccaacccctgctcttccaggtcgggccccggggttctgcggctgttagggacagaggcaaagaagggcaggacggtccggtttcccgtggatgttcccgcccgagaaagacagcaagttgtgtgtgcgcccgggacgcgggagggaaggtggccgccgcccgccagccatggaccatcatctttagtgcagaggatggaaagttgatgcccagtaagactgaagatccattctgcattacggaactgtggattatctgtgggtccctggtgatttcacaccttcattcactcctgcagtccctgaacacttacttggggtcctcattgccctatctggtgaaagatggcatccagcctgacttgtactggagtaatctgggctttgctgtcttttctttgtgctgccacctcctgcgtggggttctttatgccttactggctctggggatcacagctgggcaagcctgtgtccttcggtaccttccggaggtgctcatatcctgtgcatgatgagagtcggcagatgatggtgatggtggaggaatgtgggcgctatgcctccttccagggcatccccagcgcagaatggaggatctgcaccatagtgaccggcctgggttgtggcctcctcctcctggtggcgctcactgccctcatgggttgctgtgtttccgacctcatctccaggacagtgggaagagtggctggaggaattcagtttcttgggggcttgttgattggtgctggctgtgccctctaccccttgggctgggacagtgaggaagtccggcagacttgtggctacacttctggccagtttgacctggggaagtgtgaaatcggctgggcctactactgcacgggagcaggtgccactgccgccatgctgctgtgcacgtggctggcttgcttttcgggcaagaaacagaagcactacccatactgagatggagctaccaagagcagacagaggagaagatgggccaaaggggcttggagaggtcaaaacatccacctaccttcaaaaggtgggatagtagttctaatccaatacaatgctaataaaatgaaacccgataaaatcaggaacatgatataggaaggaaggattgtaggagatttgtgggggaaaaaaaaggagagtatagaatgatggagaaaaatggaccaaaggctaaaaatattgcagggcatcgggtgtttctattccacagagtattgttaatgtacaacacacacacacacacacacacacacacacacacacacacacacacaacaaatctacatatacaaacaagggtttgggttttagttttttttttttaaggtgaggactcagaaaatcaaagggctagtagaaacagtgttatgttgggaagcagggtacccccaaagatgttccctgtaggtcacggcactcccaaaagcacacaagcacatacagacatatgcatccccacacacgcctatgcacaaacgtggattatcgcacagactgggaggtttagtggtgcatttctcctctgttttctttttaatatacatttaaaatacagtattatcactttataaaacatacattaagcctaataaatggaccaataagccaaactatcagtattttgtatatcctgcataaactctaatttagttcctcaacatattttcagtgtttatgcagacctttagagttaagcctttgtatttccatgttattccacaatatgcaatatttctctgagtagcttctgctatgatattcttatgaagaaaaggggcaactttctgtccactataggagagaattcagccgaagatatgagagtaatgagagacattttccagtcattggatcgtgttttcttttgtccattattgtactgtgctgtaccacatttatttctatattcattttgtaaaaaatttaaaagtgctattttgtttgtatttgaaaatctctgtgaataaattctctctttgatcaata

SEQ ID NO: 149510 - DNA, 1675 bp, Homo sapiens
  Payload ID: 9522
  Gene Symbol: LHFPL1
  Gene Name: lipoma HMGIC fusion partner-like 1
  Uniprot ID: Q86WI0
  ENST ID: ENST00000371968
  CDS Start-End: 241-903
tgcctgtatgtctgaggctgggtttgaagcctccagcgtgtttggagttaatccccattaggttggactccgcccctttctcccaaaggtaaagcaaggttttcaggcatcactgcaaagggcagctagtattcccatccttgtctaacaagctgtaaggagaagttgtttctgagatctgagcctgaagagagggaacaagtcagtcagccttcgtggtcagaagagaaacctgtgaccatgaggagcagcctgaccatggtgggaaccctctgggccttcctgtcccttgttactgctgtgaccagttctaccagttacttcctaccttactggctctttggatcccagatggggaagccagtgtcattcagcacattccggaggtgcaactaccctgtgcggggagagggacacagtctgatcatggtggaagaatgtgggcgctatgccagcttcaatgccatcccaagcctggcctggcagatgtgcacagtggtgacaggtgccggctgtgctctgctgctcctggtggcactagctgctgtcctgggttgctgcatggaggagctcatctccagaatgatgggacgttgcatgggagcagcgcagtttgttggagggctgctgataagctcaggctgtgccttataccctttaggatggaatagcccggagataatgcaaacatgtgggaatgtctccaatcaatttcagttaggtacctgtcggcttggctgggcctattactgtgctggaggtggagcagctgcagccatgttgatctgcacctggctctcttgctttgctggaagaaaccccaagcctgtcatattggtggagagcatcatgaggaataccaattcttatgctatggagcttgaccattgcctcaaaccttgagctttgaaagaagattggagagggtgggaaaggggaggagggagccctgaaaagaggtactaaggattaggccatttgtcatctgactgtcattagcatagcctagtgtttgcatgctttttaaactaattgtcgttcattttcacttatctttaagccagtaggtcactggctgtttataaaattcatcagaggaaacattctcagacatttacccaactggcaagtcgtgctaacccgaagacccaaagtacccctttatgcaaaataggatccaaagctaaggctgggtaagaatagttgtgcagggagggagcacgagatgggcagagctggttcctaccactccattcacacagttcatcagttcattcccaagtatttattgtcacccccaaacatctctggagtactactgctcaatttttgtgtcgttatcaggagtataccttggctcttcctttttttctcctgcttccccccgcaccttgtggggaagcttcaggggagcgggggagggtgattcccagtggtggggaaaacattaatcaaggatacttgcatttagcctggagccccttcctcattatgctttagaatattcataggagttccatttgtattctggctgggtgatgagcaaaaaaaatatatagtagcaaatattctctcatcctttagagataaagaaatggtgttcatcaaatgtactgagaatagactagcatttgtggggcactcaataaatttaaattcatggtgacagtgacaa

SEQ ID NO: 149511 - DNA, 5043 bp, Homo sapiens
  Payload ID: 9523
  Gene Symbol: LHFPL2
  Gene Name: lipoma HMGIC fusion partner-like 2
  Uniprot ID: Q6ZUX7
  ENST ID: ENST00000380345
  CDS Start-End: 677-1363
gggcagggcggctcggccgcctctttctctcgctgcccccgcccctcctcctcctccctctccccgagtgctagcccgggcggccgccgagcttggcgctctctcgcctcgctgcctcctcccccgcgccgcggaccctctcccctcccttgcgttgcccccctctcccgccgcctcctcccgctctcctctcgctctcctcccgcctccttcttccaggcgcggccagcgggggcaagagcgaggtggctgcgaggaggcgtcactgaaagccctgacttggggaaggctgcgggctcggagccggagacgccgagctggggccgggtgagttgggaatcagactcttgagttgacagctggcctatggtttctgcattttgttaagaagcacctcatgcaagcgagggacctgggactgctcacagccaggtggcatttttctgaagttgttcattaagacttcccagcattcctacagatataaataggtgaggccgcaggcggtgctctgggtccgggagcgctgtccccagcatgaacgcggccggcggcgggagtgaatgactgcagctgcgacttccttcccgggccgcccgagcctccttccccaccgactttcttgttttgattaactccgtggactcctgactctttcttcgcccggaacatcaatatgtgtcatgtcattgtcacctgtcgctcgatgctctggaccttgctgagtattgtggtggcttttgccgagctcattgccttcatgagtgcagactggctgatcgggaaagcgaggagccgcggcggcgtggagccggcgggcccgggcgggggctccccggagccctaccaccccaccctgggcatctacgcccgctgcatccggaacccaggggtgcagcacttccagcgggacacgctgtgcgggccctacgccgagagcttcggcgagatcgccagcggcttctggcaggccacagctattttcctggctgtgggaatctttattctctgcatggtggccttggtgtccgtcttcaccatgtgtgtacagagcatcatgaagaaaagcatcttcaatgtctgtgggctgttgcaaggaattgcaggtctattccttatcctcggtttgatactctaccctgctggctggggttgccagaaggccatagactactgtggacattatgcatctgcctacaaacctggagactgctccttgggctgggccttttataccgccattgggggcacagtcctcactttcatctgtgctgtcttctctgcacaagcagaaattgcaacctctagtgacaaagtacaggaagaaattgaagaggggaaaaatctgatctgcctcctttagtttggaagagacaatgccattttctcccttgagtaatcttgtgaaacagtccacagtttcatcatttgagtcaagtggagaactaacctttacctaccaaagccacgttccacggcccgaggcttaaacaggaccaatgagaggccacatccagctacgcaaagttactggacatgcggtctgcagtgcacattataaggaatggaacatgaaaatagtatataatcctagacctggagttgccaagttctgtcagactccatctcccccaggttcaatgaaggataataatctaaatcattagggcagcagtttctctggtaacggaagagaccgtccgccagatctgcaggctgtttctgctccaacactgcttgcttgtgagcatctctgcctcagaatggggttttgggttggagttcttgttttcctctgttctttcaagttgtctccaacgaacagaaaactataaacttactggggacaggatgtgtgctaaagggcacagcaagacactgtcttttgcttagctgaccaaaggggtcagcagggatggcgtggagtcatgctgtggaacttattctaggctgaatcctagggtaaggtggatcaactgaactgtcactccagagattttagaaatttgagtaaagaaacaataaggacctatacaatcatatgagaacaaaaatatgaaatcttgctagtgaagacgtattttttcttcttcccagcagccaggctagcaccagttctggcccagtctcctcttcttctggagatcacatgtttttcttctaaggttaggattgtgctttgactgcgaaaggaaacctcactgtttcctccttccagggactgaggtctccaagctagctgtggcttatgcagatgttcactgggaggacctgccagaatctcggcacttggggggagacctttactcccagtttggtgaccatgctgtagtcagctctatttccaatcccgacagtagcagaatggcattctacaacaaaaagaagctagttatgggagttaagtttttgtagttactggtgttgatcctgaaagcagactgagataacattaaattgctgcaactgaagaactgcagccaagaccttaattccaggaaagcacagaggacaaagttaattcaaaaagaggcgctagatcaaggtcacagcactgcctacacctgtttacaaaaagaatcaaataccactatgaataaggattcaggggtttttaatctactttccataaattaccaatatcactgattcaggaagatagtatctcagaatgaccagagcagcacagaaacaagctactctgacattatgggagcttcaaaattgtatcatgatacagaaacactccttagcactttaagaaagtgagatggaactgccagatttctggaaggagaaaaagtgtaggtatttgggttcattaatctgctcacttgaggactttgttttgaaaaagtaccttctgtggacaaggtattgtgctaccagctatacaaccctgacttcagagtttgcaaccttgccctgagtgaatcatgttaaagctgtctgagtctaaagcaccgtatcttggtgcagaacagataattatacagagatggaatgggacaaccgcagttttactacattctggtgtttggcctatatgagaaaccatcttctcacagattaagggctaagggcaaaaggggtgggaggtgtggaactagccttaatgagtttcccattcctgaaccaaaattcaaagtgagtgagatgtaaatcctgtgattttggtgaagaaaaaaacgggtatcttcatagcagcctaggaaaccttaaccatatctctaacaccacacagaaagaggctggaggagccactggacaaagcttctgtctctgtgtgtacatttataatgttctaaccaagtctcaaaccttgatgaaaaacacaaaatttttccataaacttatcagaagactcacttttctttctttcttggatagagaaaccattttctgacactaggtttacaatctcagtgtccttacaagttaagtcctaagctcacaggatcctccgagcatgtccatcacctgctctttggctaaggtggcagtgtacctctagatcaacctgggaacagtcacaagggagtgtgacttcttggccataataaactcactcgatagtgtttatgttattaatctgaatgcaacagaagacaaaagcacaggcatgcacacacacagaaccccaaaccactaaaaactacctaaacactgacttagtaaatagtaaaaaggtaatgttgggacttttaaaccttgaatccattagccaggcttgggatgaaaggaccatctaaaatcatgctagtctaaaccatgctcttccacacagctgtttaaaaaccactgggtatgaggaatatgctagaaagaaatgttaaaaatagattgttggctcacacttatttttctaataaataggaccattattactaccaggaaagtcttatttattttgcctgaaattggcttaaagaaagtctcatgacgggatgggatgggctgcgcttctcaatgaactctgaggcagaaatatttgccttggattctgtggattctttaaacctgtgtgctaataattcaaacaatgttgcattaattgtataagggtttttgtatagttttcaaacatctgtggtgtaatgatctttgttaaacatatattctgtaaagtgccatagtctttttttatgtgtagcatatttaaaaatatatatgtatattatacatacacaagtttgtgtgaaagatgtgcaataacaaaggtgtatgtatgttttgttgttttgttttggaaactggacaggagtcaaaacagggatgtttgtttctgttttggcaaggagagttccacatttttgccttcatggcttattcagtaacccataattttaatgctacacaaatcttatgtgaagaaaagactggtatgaaatcattttttcctgggtctaaaataatcgctagtgttatgtcaaagttaagcccgcacgccaggcccagttaatgctagtctttcatgtgaaatgtgaagctgccatgttgccttttctcttagtaggataactagtagctggtacataatcactgaggagctatttcttaacatgcttttatagaccatgctaatgctagaccagtatttaagggctaatctcacacctccttagctgtaagagtctggcttagaacagacctctctgtgcaataacttgtggccactggaaatccctgggccggcatttgtattggggttgcaatgactcccaagggccaaaagagttaaaggcacgactgggatttcttctgagactgtggtgaaactccttccaaggctgagggggtcagtaggtgctctggagggactcggcaccacttgatattcaacagccacttgagccaaatataaaattgtatttacagctgatggactcaatttgagccttcaaacttgtagttatcctattatattgtaaactaatacattgtctagcattgatttggttcctgtgcatatgtattttcactatgtgctcccctccccagatcttaattaaaccagattttgcaattcattcttattctttc

SEQ ID NO: 149512 - DNA, 4680 bp, Homo sapiens
  Payload ID: 9523
  Gene Symbol: LHFPL2
  Gene Name: lipoma HMGIC fusion partner-like 2
  Uniprot ID: Q6ZUX7
  ENST ID: ENST00000515007
  CDS Start-End: 312-998
acacgtgaaggaagcctttgtgggccttcctgcgcagctgactagctgaaagccatcgtgagccagcccaggagaaaccagcagaggaacagccagccgaaccctgggattgtgagaaataatcaggtgaggccgcaggcggtgctctgggtccgggagcgctgtccccagcatgaacgcggccggcggcgggagtgaatgactgcagctgcgacttccttcccgggccgcccgagcctccttccccaccgactttcttgttttgattaactccgtggactcctgactctttcttcgcccggaacatcaatatgtgtcatgtcattgtcacctgtcgctcgatgctctggaccttgctgagtattgtggtggcttttgccgagctcattgccttcatgagtgcagactggctgatcgggaaagcgaggagccgcggcggcgtggagccggcgggcccgggcgggggctccccggagccctaccaccccaccctgggcatctacgcccgctgcatccggaacccaggggtgcagcacttccagcgggacacgctgtgcgggccctacgccgagagcttcggcgagatcgccagcggcttctggcaggccacagctattttcctggctgtgggaatctttattctctgcatggtggccttggtgtccgtcttcaccatgtgtgtacagagcatcatgaagaaaagcatcttcaatgtctgtgggctgttgcaaggaattgcaggtctattccttatcctcggtttgatactctaccctgctggctggggttgccagaaggccatagactactgtggacattatgcatctgcctacaaacctggagactgctccttgggctgggccttttataccgccattgggggcacagtcctcactttcatctgtgctgtcttctctgcacaagcagaaattgcaacctctagtgacaaagtacaggaagaaattgaagaggggaaaaatctgatctgcctcctttagtttggaagagacaatgccattttctcccttgagtaatcttgtgaaacagtccacagtttcatcatttgagtcaagtggagaactaacctttacctaccaaagccacgttccacggcccgaggcttaaacaggaccaatgagaggccacatccagctacgcaaagttactggacatgcggtctgcagtgcacattataaggaatggaacatgaaaatagtatataatcctagacctggagttgccaagttctgtcagactccatctcccccaggttcaatgaaggataataatctaaatcattagggcagcagtttctctggtaacggaagagaccgtccgccagatctgcaggctgtttctgctccaacactgcttgcttgtgagcatctctgcctcagaatggggttttgggttggagttcttgttttcctctgttctttcaagttgtctccaacgaacagaaaactataaacttactggggacaggatgtgtgctaaagggcacagcaagacactgtcttttgcttagctgaccaaaggggtcagcagggatggcgtggagtcatgctgtggaacttattctaggctgaatcctagggtaaggtggatcaactgaactgtcactccagagattttagaaatttgagtaaagaaacaataaggacctatacaatcatatgagaacaaaaatatgaaatcttgctagtgaagacgtattttttcttcttcccagcagccaggctagcaccagttctggcccagtctcctcttcttctggagatcacatgtttttcttctaaggttaggattgtgctttgactgcgaaaggaaacctcactgtttcctccttccagggactgaggtctccaagctagctgtggcttatgcagatgttcactgggaggacctgccagaatctcggcacttggggggagacctttactcccagtttggtgaccatgctgtagtcagctctatttccaatcccgacagtagcagaatggcattctacaacaaaaagaagctagttatgggagttaagtttttgtagttactggtgttgatcctgaaagcagactgagataacattaaattgctgcaactgaagaactgcagccaagaccttaattccaggaaagcacagaggacaaagttaattcaaaaagaggcgctagatcaaggtcacagcactgcctacacctgtttacaaaaagaatcaaataccactatgaataaggattcaggggtttttaatctactttccataaattaccaatatcactgattcaggaagatagtatctcagaatgaccagagcagcacagaaacaagctactctgacattatgggagcttcaaaattgtatcatgatacagaaacactccttagcactttaagaaagtgagatggaactgccagatttctggaaggagaaaaagtgtaggtatttgggttcattaatctgctcacttgaggactttgttttgaaaaagtaccttctgtggacaaggtattgtgctaccagctatacaaccctgacttcagagtttgcaaccttgccctgagtgaatcatgttaaagctgtctgagtctaaagcaccgtatcttggtgcagaacagataattatacagagatggaatgggacaaccgcagttttactacattctggtgtttggcctatatgagaaaccatcttctcacagattaagggctaagggcaaaaggggtgggaggtgtggaactagccttaatgagtttcccattcctgaaccaaaattcaaagtgagtgagatgtaaatcctgtgattttggtgaagaaaaaaacgggtatcttcatagcagcctaggaaaccttaaccatatctctaacaccacacagaaagaggctggaggagccactggacaaagcttctgtctctgtgtgtacatttataatgttctaaccaagtctcaaaccttgatgaaaaacacaaaatttttccataaacttatcagaagactcacttttctttctttcttggatagagaaaccattttctgacactaggtttacaatctcagtgtccttacaagttaagtcctaagctcacaggatcctccgagcatgtccatcacctgctctttggctaaggtggcagtgtacctctagatcaacctgggaacagtcacaagggagtgtgacttcttggccataataaactcactcgatagtgtttatgttattaatctgaatgcaacagaagacaaaagcacaggcatgcacacacacagaaccccaaaccactaaaaactacctaaacactgacttagtaaatagtaaaaaggtaatgttgggacttttaaaccttgaatccattagccaggcttgggatgaaaggaccatctaaaatcatgctagtctaaaccatgctcttccacacagctgtttaaaaaccactgggtatgaggaatatgctagaaagaaatgttaaaaatagattgttggctcacacttatttttctaataaataggaccattattactaccaggaaagtcttatttattttgcctgaaattggcttaaagaaagtctcatgacgggatgggatgggctgcgcttctcaatgaactctgaggcagaaatatttgccttggattctgtggattctttaaacctgtgtgctaataattcaaacaatgttgcattaattgtataagggtttttgtatagttttcaaacatctgtggtgtaatgatctttgttaaacatatattctgtaaagtgccatagtctttttttatgtgtagcatatttaaaaatatatatgtatattatacatacacaagtttgtgtgaaagatgtgcaataacaaaggtgtatgtatgttttgttgttttgttttggaaactggacaggagtcaaaacagggatgtttgtttctgttttggcaaggagagttccacatttttgccttcatggcttattcagtaacccataattttaatgctacacaaatcttatgtgaagaaaagactggtatgaaatcattttttcctgggtctaaaataatcgctagtgttatgtcaaagttaagcccgcacgccaggcccagttaatgctagtctttcatgtgaaatgtgaagctgccatgttgccttttctcttagtaggataactagtagctggtacataatcactgaggagctatttcttaacatgcttttatagaccatgctaatgctagaccagtatttaagggctaatctcacacctccttagctgtaagagtctggcttagaacagacctctctgtgcaataacttgtggccactggaaatccctgggccggcatttgtattggggttgcaatgactcccaagggccaaaagagttaaaggcacgactgggatttcttctgagactgtggtgaaactccttccaaggctgagggggtcagtaggtgctctggagggactcggcaccacttgatattcaacagccacttgagccaaatataaaattgtatttacagctgatggactcaatttgagccttcaaacttgtagttatcctattatattgtaaactaatacattgtctagcattgatttggttcctgtgcatatgtattttcactatgtgctcccctccccagatcttaattaaaccagattttgcaattcattcttattctttcaa

SEQ ID NO: 149513 - DNA, 1378 bp, Homo sapiens
  Payload ID: 9524
  Gene Symbol: LHFPL3
  Gene Name: lipoma HMGIC fusion partner-like 3
  ENST ID: ENST00000401970
  CDS Start-End: 123-779
gtgagtgtgtctcctgcgcgctgagaggcggggggaggcggaggaccaggaggaggaggaggaggaggaggagggggagaatgcccggagccgccgccgctgccgccgccgccgccgccgcgatgctcccggctcaggaggctgccaagctgtaccacaccaactatgtgcggaactcgcgggccatcggcgtgctgtgggccatcttcaccatctgctttgccatcgtcaacgtggtgtgcttcatccagccctactggataggcgacggcgtggacaccccgcaagccggctatttcgggctcttccactactgcatcggcaacggcttctcccgggagctgacctgcaggggcagcttcacggacttctccacgctgccctcgggcgccttcaaagccgcctccttctttatcggcctctccatgatgctcatcattgcctgcatcatttgctttaccctcttcttcttctgcaacacggccactgtgtacaagatatgtgcctggatgcagctcacctccgctgcctgccttgtgcttggctgtatgattttccctgatggctgggactcagatgaagtaaaacggatgtgtggagaaaagacagacaagtacactcttggggcttgctcagtccgctgggcatacatcctggctattattggaattttggatgccctgatcctctcatttctagcatttgtgcttggtaatcgacaagacagcttgatggcagaggaactgaaggcagaaaacaaagatgatggaaatgcttaaggcaaactaaggtagtgtgagaccacaccatttctgctaagccaatattctctagaatgagcacaaaacaaatcgaataacagctaaacaaatcgaataacagctaaacgaatcgaataacagcttttgtacatcaacatcaagaaggaatacgcctgagagagatcagagtatatagatgaatatgaacaagaatggaacattcacttgtcaacgcactttctaaatctagatcagcagagatgggagtgattttctggaaagagatgtgatcatggattaaacaccagctcattggaaactcattggatgagatcagaaaacgttcatgaaaaatcatattcaggaaataaggaagaggaatataaatgctctagagttaacatgtaaaatatatacgtactgaggtttgtaaactgtcctttttaaatcaaactgaaaacaaaaagctttaacctttcaacagaatttttaaaaaggcagttagttctaaattattcctatctcaatagccaagaggctgatcaagcgtcatttattgaggaagcatcttagaaaatgcctctgaatgttttcataggagccgtgacctttggttc

SEQ ID NO: 149514 - DNA, 1852 bp, Homo sapiens
  Payload ID: 9524
  Gene Symbol: LHFPL3
  Gene Name: lipoma HMGIC fusion partner-like 3
  Uniprot ID: Q86UP9
  ENST ID: ENST00000424859
  CDS Start-End: 167-835
ctgggctgaggcggaggcaggggagttgcagcgcgcgaggctccgtgagtgtgtctcctgcgcgctgagaggcggggggaggcggaggaccaggaggaggaggaggaggaggaggagggggagaatgcccggagccgccgccgctgccgccgccgccgccgccgcgatgctcccggctcaggaggctgccaagctgtaccacaccaactatgtgcggaactcgcgggccatcggcgtgctgtgggccatcttcaccatctgctttgccatcgtcaacgtggtgtgcttcatccagccctactggataggcgacggcgtggacaccccgcaagccggctatttcgggctcttccactactgcatcggcaacggcttctcccgggagctgacctgcaggggcagcttcacggacttctccacgctgccctcgggcgccttcaaagccgcctccttctttatcggcctctccatgatgctcatcattgcctgcatcatttgctttaccctcttcttcttctgcaacacggccactgtgtacaagatatgtgcctggatgcagctcacctccgctgcctgccttgtgcttggctgtatgattttccctgatggctgggactcagatgaagtaaaacggatgtgtggagaaaagacagacaagtacactcttggggcttgctcagtccgctgggcatacatcctggctattattggaattttggatgccctgatcctctcatttctagcatttgtgcttggtaatcgacaagacagcttgatggcagaggaactgaaggcagaaaacaaagttctgctaagccaatattctctagaatgagcacaaaacaaatcgaataacagctaaacaaatcgaataacagctaaacgaatcgaataacagcttttgtacatcaacatcaagaaggaatacgcctgagagagatcagagtatatagatgaatatgaacaagaatggaacattcacttgtcaacgcactttctaaatctagatcagcagagatgggagtgattttctggaaagagatgtgatcatggattaaacaccagctcattggaaactcattggatgagatcagaaaacgttcatgaaaaatcatattcaggaaataaggaagaggaatataaatgctctagagttaacatgtaaaatatatacgtactgaggtttgtaaactgtcctttttaaatcaaactgaaaacaaaaagctttaacctttcaacagaatttttaaaaaggcagttagttctaaattattcctatctcaatagccaagaggctgatcaagcgtcatttattgaggaagcatcttagaaaatgcctctgaatgttttcataggagccgtgacctttggttcttcatctctaccattcatttacttcactgtgtaattagttacaaccactcagttattaagagacgtaacgcttcaaactttttaccaagtctgtgttctgtttaatctgtccatacaagttattactgagaaagtgtttatgccatatactattactccatcaagctgtatattacaggaagtacatctttacatcataggttcccaagcaacatagatttccctatctttcaggaaacagcatcaaggaactctgaaaaatatagaaaaagttcattttcaccttggaagctcacgtgtaatattataggctactatcaaataaacactttttttctaattctccctagtatatgcataggaatttaatatactttataaataagtatctaaaatgtctcctacttttttcctatttctttgccatacatgttatcagaaatccatgtcttctatttcccttactgatgggcactca

SEQ ID NO: 149515 - DNA, 4880 bp, Homo sapiens
  Payload ID: 9525
  Gene Symbol: LHFPL4
  Gene Name: lipoma HMGIC fusion partner-like 4
  Uniprot ID: Q7Z7J7
  ENST ID: ENST00000287585
  CDS Start-End: 287-1030
gcaagatggaggccgcgcagaggccgccgcctgggccgaggcagccgctgctgggagcgccgagccgcggcgcctaggccgtgccagtcccggatccgctgcctccggccgtgcccagcagctcccagacgcccccagctctgccccaggccccgccctcgcgggttccttgactcagggccgcttctcgcgtgcgtccccagctcccgcccggcagcccggcgctccgtcccgggccggcggcccccgccagccgccgccgccgccggccccgcctccgggcaccatgctgccctcgcaggaggcctccaagctctaccacgagcactacatgcggaactcgcgggccatcggcgtgctgtgggccatcttcaccatctgcttcgccatcatcaacgtggtggtcttcatccagccctactgggtgggcgacagcgtgagcacccccaagcctggctacttcggcctcttccactactgcgtgggcagcgggctggcgggccgcgagctcacctgccggggctccttcaccgacttcagcaccatcccgtccagcgccttcaaggcggccgccttcttcgtgctgctctccatggtgctgatcctcggctgcatcacctgcttttcgcttttcttcttctgcaacacggctacggtctacaagatctgcgcctggatgcagctcttggcagctctgtgcctcgtcctgggctgcatgatctttcctgatggctgggatgccgagaccatccgggacatgtgtggggccaagacggggaagtactccctgggggactgttcagtgcgctgggcatacatcctggccatcatcggcatcctcaacgccctcatcctctccttcctcgccttcgtgctgggcaaccggcaaacagacctgctgcaggaggagctcaagccggagaacaaagattttgtgggctctacagtaagctccgtgttgcggcccgggggtgatgtctctggatggggagtccttccctgccccgtggctcactcacagggaccctgaaaggccaggatcacagcccagtaattggcctgacctcagcttgtcctgccttctgccctctcgtcactccattcaagctctgagggaagaccctgatctcagacttacttctcaccgactaccctgcaagctccaggctttgaggagaggaaagcctggatgtggcctgggggagaggagaggccctccaaaccttgggagggtctaattcttgctcctccctcaatttgacctaagggagcctgcatctgcgtaggcccttgggcttctcctctcctctctagactggcctggaggtccctgcagatccccagggagagcggagctgtagttccagctccccaggccccctcagtctggagggctgccgcctggctgtatccgcacctcttctggtccctgcctcttcaagaaatttattctagatactgctccagggtgggctggactctttcctactttttttttttttcttttttggctgatgttggttccaccacatctgccacaaagctccaggtgccaccagtctcccctgggacctcctctgctccattccggcctgctcccagctcaccctgagggagagctgcaccgagggatgcacagggccctgctgtcagctgcagaccggggccctgatcagcccagagtcagaaaagactttcaggctctggaggtagcgggagggggtacgtggcctcggcagttggagcttagaagctgctcagcccgggctggcctggcctcctcttcctctctgctggaacatctcactgatgactgagcccttgaccttggcctcttttgcccaggcctcctctctgctgggatgtctcaccaatgactggacccttgaccctggcctgttttgtacagcacagacttcttggccctgttgtcagggttgggggtgtggaggggaccccagaggtggggagttgggggatgcattaccccttctgccccttttcatgccctccataccccaggcgtctaccaagggcagagactgtcttgtctctttgatacttttctgcataacttgaacttgcaggtcatctctgaacagggtacccctgtcccccttcctaagccttgttaccctgtcccagcctcttcctcctcctggcccacctctcgccttgcgatatgcccagggtctgcacctatgggcagtgcttggagccgaggcatgagtgtatgtgtatgtgggtgaaatgtgtgtgcgtgtgtgtgcgcgtgtgagcgtgtgtgtgtgtgtgtgtgttgggggacaggtgagaagtttctcccccctccacccactgtgggggcgtctcccttccccttggcagggagcaggtgagggagactcctggtattttttgaacacccgtcattcccctgtgggtctggcggcagagccatctctcccggggagcctccctgccctggggcctggacagctccctcagcactagttgctggtgcagaccggcttcgtccagcgccccctcctggcggcctggacctgcagggaaggggcggtgccctgcaggatgccaggggaagccgcctcgggcctcggcggaggggagagggtcgcttgagcgccatgtgtttgccaaccttgtgttcatttccacaggacttggacctgagagttagggtttccaagaaagaccctagaagtcccctgcctgtctccccactctggaccctagccggaatcagatgttgggacctagtgggttcctgccacctggaacttaccaagtcccgacttcactcctccacttactcctcccgggcaaagcctccccgcagtgctctggtcccagcgctgggctccccttccccgccggcgccttcccggacagtccagtcggcctggggtaggggcgctgcgggacagagggtccgagttaaatgcgggaggatgcgggagccccgtgggagggagttggggtaggagggagttcctcaaagatgcaaaccaagcccagcgttggagggggagagcagagttaggagagagtgaggggaggggcgcagcaagcgactgggaatgggagaagacactggggtgaggagaagaggggtgcagagacagggagatgagagatgattggagaaggagcgagggggacgcacaggcacagagaaacagcgcgaggaggagagatcgagagagacggggcagaggtggagagagatgagagaccagctgagaggctgcccgagagcttggggtgggggaggggaaatggatgaaaaggcggaaaaaggactcgggagcggggaagaggtaaatggagatgtgggttgggggcaagaatgggatgcagaggaaggagaggaggatgaaggagccaggatgcggggcagtggggagggggttgctatctgggcactgggtgaggggagagcttgttcccccaaggacgcctgccaccaggtgtccttgccacaccttgttccccaaggacacccaccaaacctgtgccctggtgcgggggatagaactgacctttcagaggctggaggcccggggcacaggcagccaaggccgcatccttttgggaagaactggagtgaaggaagccacttcagaggacgtagtgggtccagctgacttaggagtgggtcagcgccgggtggagaggagggaggctagttccctggtggggtagcctggcaacattcccattccaccgcacctggccagctgccatcttggcagagccagggggagatgcaccagggagtttggagtcaggaaggcagagttgtgtgggctgaagtctgcgggaaccccagggtgacacaggcaaggggtagaagtcagagtggggaccaaaccatagactggggccctgggttctgcagaggtgtggatggggcaggtggcaggtgctccagtgggggccccaggtgaggccctgatggccctcctggggcaataaagacatcatgggaagggggctttgtggtttgcctctgctctcgtcgggcgatctggctttagccttcaggaggaggtaagcagaggagatcagtgcctgtttctgaccccaggagggccttgttgggctccaacctagagccttccggcttcaggtcccaagagaagtccccccctaactgtgacccccctaactgtgatcaggggtctgccattgcccgcttttctctgcctgatctggggactcaggagaggccacggcagccacagcctaggggtggttcagtccctggcccacagtctggtcagttgagtccttctgggaaccggggctatgaaaactttcgtctttggggaccggtacccatgaaggaaaactttcctgagggggtgaggaccaaagaatcaagatccttttcaggcctgatagccaagatgatgagaacttttagataaggctgtggggagagtccctggccttttgagcatcctgcttgggcacacggggaataacctttctccagcttccagtgtgaactgagaaagagaaagggaaaccctgtctttggagaagctgggatgttcccagcaccagaaacttctgcaggcccctgcctggcccacggctaacctttgggtgggactggagtttcctgaacagggaacaagggagccttccgcagagctctgatgggcaggcctccgagggcctgtgctgtgtgctgttaggatagcttggtgttgtctataccccattagtaagttttgtctgagtgtgtcctcgctgttcattgtctaatttggtaacatttattttggtcctgaccccttctgctgctgctgggtttaagcttcagtgcaggtggaatgacattcaaataaagaaacactttctatcaccca

SEQ ID NO: 149516 - DNA, 2148 bp, Homo sapiens
  Payload ID: 9526
  Gene Symbol: LHFPL5
  Gene Name: lipoma HMGIC fusion partner-like 5
  Uniprot ID: Q8TAF8
  ENST ID: ENST00000360215
  CDS Start-End: 379-1038
ggggcgctggccgcggtgctgaaacggcgccctccgcggacggaggagggggcggggctctcgggagccgtgagccgggaagagggagacgggcagggcggcgccagcaggccctggtgggcttgggaggaggcaggagactggagacagcctcggctagagcggacacaggcacctggcaagctttccttgaccaaatcaaggttgtccttgtcctattaagcctcttccccttgccttgaagggacctcacctggtgccctgacctcagcctcctccccaaaccccgctggggagtgacctgcttctaggcctccatccacaaagctacggacttgcagcccacgggaccccagcccagggcctgctgccctcaccatggtgaaattgctgccggcccaggaggcagccaagatctaccataccaactatgtgcggaactcgcgagccgtgggcgtgatgtggggtaccctcaccatctgcttctccgtactggtcatggccctcttcatccagccctactggatcggcgacagcgtcaacacaccgcaggcaggctacttcggccttttctcctactgcgtgggtaacgtgctgtcctccgagctcatctgcaagggcggccccctagacttctcctccatcccctctagagccttcaagactgccatgttctttgtggccttgggcatgttcctcatcattggctccatcatctgcttcagcctgttcttcatctgcaacacggccacagtctataagatctgtgcatggatgcagctggctgcggccacaggcctaatgattggctgcctggtctaccctgatggttgggactcaagtgaggtgcggcgcatgtgtggggagcagacgggcaagtacacgctgggccactgcaccatccgctgggccttcatgctggccatcctcagcattggcgacgccctcatcctctccttcctggccttcgtgttgggctaccggcaggacaagctcctccctgacgactacaaggcagatggaaccgaggaggtgtgaagcagctgaagggtcggtcatctatttcccagacacaggaaaactagggaatcaaattcttcagagataagaacttgttcttccaagtttccttgttcctggctactataggcctgaagcctgaagccttttattataacactaaaactggacagtctcctgagacaagacctcctactgtactctttctggggaagcagaactgcagtgacccacttcaaagatattcagaggctgagcggtgcagggagtgctcagttgctggggatgggatccaagtccatttcttagttccacacagcagcaaatcgcttcaccttcttgaagcctctcctctgtaaagcgagagggctaaatgggtccatctctaggggccttccctcccaggtctgtgtctgatagcatacacacacacatatatatacacacacacacacacacacacacacacacacacacatacatacacacacacatatatatacacacacacacacacacacacacacacactctctctctctctcaaacacacacaaatgcccaaccagctctaagagggcactgaagaggtggctggacatgtgctgggtcatttttagggtgaggtgtagggggtcttttgcttctcccttctcatattttgttttcttattgctgctcagaggggggtaaggaatggaggggccatcagaacttgaatcctttaacatccaccaggaagttttatgaagagtgggtgataggatctaaaatctctgcagacttttttcctcccgggagccaaatatcacatttccttatggtgcccacactgactcaaccagaactggctaccagcttcagaaatgtgttacttatgttcaagtaatttgttataggaatagatgacatttttttttttcaaaaactttggatttggcatatagtcatctatagggggattggttccaggatcccctgcagatgccaaaatacatggatgcccaagtcctcagctaaaaatagcgtagtatttgcatataacctatgcacatcctcctgtatactttaaatcatctctagattacttataatacctaatacaatgtaaatgctatgtaaatactc

SEQ ID NO: 149517 - DNA, 1961 bp, Homo sapiens
  Payload ID: 9527
  Gene Symbol: LBP
  Gene Name: lipopolysaccharide binding protein
  Uniprot ID: P18428
  ENST ID: ENST00000217407
  CDS Start-End: 162-1607
gatgtcgcaagcaggttccagtccctgtgcctccccttcccgctcccaggaacccatccagcctcaggaactgcccccagccatcgagccttggctacttaagggacctgggcccaatccacagctgggacagtcctggcccactgcactgggaatctaggatgggggccttggccagagccctgccgtccatactgctggcattgctgcttacgtccaccccagaggctctgggtgccaaccccggcttggtcgccaggatcaccgacaagggactgcagtatgcggcccaggaggggctattagctctgcagagtgagctgctcaggatcacgctgcctgacttcaccggggacttgaggatcccccacgtcggccgtgggcgctatgagttccacagcctgaacatccacagctgtgagctgcttcactctgcgctgaggcctgtccctggccagggcctgagtctcagcatctccgactcctccatccgggtccagggcaggtggaaggtgcgcaagtcattcttcaaactacagggctcctttgatgtcagtgtcaagggcatcagcatttcggtcaacctcctgttgggcagcgagtcctccgggaggcccacagttactgcctccagctgcagcagtgacatcgctgacgtggaggtggacatgtcgggagacttggggtggctgttgaacctcttccacaaccagattgagtccaagttccagaaagtactggagagcaggatttgcgaaatgatccagaaatcagtgtcctccgatctacagccttatctccaaactctgccagttacaacagagattgacagtttcgccgacattgattatagcttagtggaagcccctcgggcaacagcccagatgctggaggtgatgtttaagggtgaaatctttcatcgtaaccaccgttctccagttaccctccttgctgcagtcatgagccttcctgaggaacacaacaaaatggtctactttgccatctcggattatgtcttcaacacggccagcctggtttatcatgaggaaggatatctgaacttctccatcacagatgacatgataccgcctgactctaatatccgactgaccaccaagtccttccgacccttcgtcccacggttagccaggctctaccccaacatgaacctggaactccagggatcagtgccctctgctccgctcctgaacttcagccctgggaatctgtctgtggacccctatatggagatagatgcctttgtgctcctgcccagctccagcaaggagcctgtcttccggctcagtgtggccactaatgtgtccgccaccttgaccttcaataccagcaagatcactgggttcctgaagccaggaaaggtaaaagtggaactgaaagaatccaaagttggactattcaatgcagagctgttggaagcgctcctcaactattacatccttaacaccttctaccccaagttcaatgataagttggccgaaggcttcccccttcctctgctgaagcgtgttcagctctacgaccttgggctgcagatccataaggacttcctgttcttgggtgccaatgtccaatacatgagagtttgaggacaagaaagatgaagcttggaggtcacagctggatctgcttgttgcatttccagctgtgcagcacgtctcagagattcttgaagaatgaagacatttctgctctcagctccgggggtgaggtgtgcctggcctctgcctccaccctcctcctcttcaccaggtgcatgcatgccctctctgagtctggactttgcttcccctccaggagggaccaccctccccgactggcctgggatatctttacaagcaggcactgtatttttttattcgccatctgatccccatgcctagcagagtgctggcacttagtaggtcctcaataaatatttattaaatgatgagatgatggaa

SEQ ID NO: 149518 - DNA, 2356 bp, Homo sapiens
  Payload ID: 9528
  Gene Symbol: LITAF
  Gene Name: lipopolysaccharide-induced TNF factor
  Uniprot ID: Q99732
  ENST ID: ENST00000339430
  CDS Start-End: 234-719
gtttctctccctgcccccgcgacttcgcgcaagatccgggaaggacacccgaggcccctgggagaccctggggaggtgaaaatcagagagcgaagcgggccgtggcccctaggcctgacccctccccgcggggtaaggcgggcaccccgcgagcgcaggggtcctcttactgctgatggcacccagctctgggcccagacgccgctcaccgtccaccgccggtgctgggtaaaatgtcggttccaggaccttaccaggcggccactgggccttcctcagcaccatccgcacctccatcctatgaagagacagtggctgttaacagttattaccccacacctccagctcccatgcctgggccaactacggggcttgtgacggggcctgatgggaagggcatgaatcctccttcgtattatacccagccagcgcccatccccaataacaatccaattaccgtgcagacggtctacgtgcagcaccccatcacctttttggaccgccctatccaaatgtgttgtccttcctgcaacaagatgatcgtgagtcagctgtcctataacgccggtgctctgacctggctgtcctgcgggagcctgtgcctgctggggtgcatagcgggctgctgcttcatccccttctgcgtggatgccctgcaggacgtggaccattactgtcccaactgcagagctctcctgggcacctacaagcgtttgtaggactcagccagacgtggagggagccgggtgccgcaggaagtcctttccacctctcatccagcttcacgcctggtggaggttctgccctggtggtctcacctctccagggggcccaccttcatgtcttcttttggggggaatacgtcgcaaaactaacaaatctccaaaccccagaaattgctgcttggagtcgtgcataggacttgcaaagacattccccttgagtgtcagttccacggtttcctgcctccctgagaccctgagtcctgccatctaactgtgatcattgccctatccgaatatcttcctgtgatctgccatcagtggctcttttttcctgcttccatgggcctttctggtggcagtctcaaactgagaagccacagttgccttatttttgaggctgttctgcccagagctcggctgaaccagcctttagtgcctaccattatcttatccgtctcttcccgtccctgatgacaaagatcttgccttacagactttacaggcttggctttgagattctgtaactgcagacttcattagcacacagattcactttaatttcttaattttttttttaaatacaaggagggggctattaacacccagtacagacatatccacaaggtcgtaaatgcatgctagaaaaatagggctggatcttatcactgccctgtctccccttgtttctctgtgccagatcttcagtgcccctttccatacagggatttttttctcatagagtaattatatgaacagtttttatgacctccttttggtctgaaatacttttgaacagaatttcttttttttaaaaaaaaacagagatggggtcttactatgttgcccaggctggtgtcgaactcctgggctcaagcgatccttctgccttggcctcccgaagtgctgggattgcaggcataagctaccatgctgggcctgaacataatttcaagaggaggatttataaaaccattttctgtaatcaaatgattggtgtcattttcccatttgccaatgtagtctcacttaaaaaaaaaaaaaagaaaaagaaatggataatttcatctactgcctttacttggggttaatgtgattcttaaacaccttcatcatggaactctcagagtggggtccgttttggtttcctggtggtgggttttgaaagataagggaaagcacattttgagcatgtctgggtaccatggtgcggatgcttgggaaccagaactgtttcagaggaatctaaagtctgattttagttttcagagacacagcttgttgtaaaacatgagaagacatgatttctaggactcaagcagcaagccaggattctaggttggctgctgtgtcatctttgaagtcaagacaaagctgggctcgaccttcaagggtcctcgttttgataatacttcagaatagggaactcatgtgaatactactatgtagaaataaaacctagaccttgagcgaacatctgtatattggttgaaaacgatagtggtaaccattgatcccccttcatttgatgtttggaaaattccagtaattatcatttttgcaacgaatatggataccacatagtactttggtgttacctgcttttgaaaaataaagtctttggttcacccggt

SEQ ID NO: 149519 - DNA, 1527 bp, Homo sapiens
  Payload ID: 9528
  Gene Symbol: LITAF
  Gene Name: lipopolysaccharide-induced TNF factor
  Uniprot ID: Q99732
  ENST ID: ENST00000381810
  CDS Start-End: 7-693
ggtaaaatgtcggttccaggaccttaccaggcggccactgggccttcctcagcaccatccgcacctccatcctatgaagagacagtggctgttaacagttattaccccacacctccagctcccatgcctgggccaactacggggcttgtgacggggcctgatgggaagggcatgaatcctccttcgtattatacccagccagcgcccatccccaataacaatccaattaccgtgcagacggtctacgtgcagcaccccatcacctttttggaccgccctatccaaatgtgttgtccttcctgcaacaagatgatcgtgagtcagctgtcctataacgccggtgctctgacctggctgtcctgcgggagcctgtgcctgctgggggtgcatagcgggctgctgcttcatccccttctgcgtggatgccctgcaggacgtggaccattactgtcccaactgcagagctctcctgggcacctacaagcgtttgtaggactcagccagacgtggagggagccgggtgccgcaggaagtcctttccacctctcatccagcttcacgcctggtggaggttctgccctggtggtctcacctctccagggggcccaccttcatgtcttcttttggggggaatacgtcgcaaaactaacaaatctccaaaccccagaaattgctgcttggagtcgtgcataggacttgcaaagacattccccttgagtgtcagttccacggtttcctgcctccctgagaccctgagtcctgccatctaactgtgatcattgccctatccgaatatcttcctgtgatctgccatcagtggctcttttttcctgcttccatgggcctttctggtggcagtctcaaactgagaagccacagttgccttatttttgaggctgttctgcccagagctcggctgaaccagcctttagtgcctaccattatcttatccgtctcttcccgtccctgatgacaaagatcttgccttacagactttacaggcttggctttgagattctgtaactgcagacttcattagcacacagattcactttaatttcttaattttttttttaaatacaaggagggggctattaacacccagtacagacatatccacaaggtcgtaaatgcatgctagaaaaatagggctggatcttatcactgccctgtctccccttgtttctctgtgccagatcttcagtgcccctttccatacagggatttttttctcatagagtaattatatgaacagtttttatgacctccttttggtctgaaatacttttgaacagaatttcttttttttaaaaaaaaacagagatggggtcttactatgttgcccaggctggtgtcgaactcctgggctcaagcgatccttctgccttggcctcccgaagtgctgggattgcaggcataagctaccatgctgggcctgaacataatttcaagaggaggatttataaaaccattttctgtaatcaaatgattggtgtcattttcccatttgccaatgtagtctcactt

SEQ ID NO: 149520 - DNA, 2292 bp, Homo sapiens
  Payload ID: 9528
  Gene Symbol: LITAF
  Gene Name: lipopolysaccharide-induced TNF factor
  Uniprot ID: Q99732
  ENST ID: ENST00000413364
  CDS Start-End: 71-529
ccttttctcggggcgcccgagaggccagctcagacctcccggctcgacaggcggcgcgggcggcggtaaaatgtcggttccaggaccttaccaggcggccactgggccttcctcagcaccatccgcacctccatcctatgaagagacagtggctgttaacagttattaccccacacctccagctcccatgcctgggccaactacggggcttgtgacggggcctgatgggaagggcatgaatcctccttcgtattatacccagccagcgcccatccccaataacaatccaattaccgtgcagacggtctacgtgcagcaccccatcacctttttggaccgccctatccaaatgtgttgtccttcctgcaacaagatgatcgtgagtcagctgtcctataacgccggtgctctgacctggctgtcctgcgggagcctgtgcctgctggggcaggagtgcagtggtacgatcgtagctctccgcagctttgatctcctgggctcctgcaatccgcccagctcagcctcctgagtacctgggaccacaggtgcatagcgggctgctgcttcatccccttctgcgtggatgccctgcaggacgtggaccattactgtcccaactgcagagctctcctgggcacctacaagcgtttgtaggactcagccagacgtggagggagccgggtgccgcaggaagtcctttccacctctcatccagcttcacgcctggtggaggttctgccctggtggtctcacctctccagggggcccaccttcatgtcttcttttggggggaatacgtcgcaaaactaacaaatctccaaaccccagaaattgctgcttggagtcgtgcataggacttgcaaagacattccccttgagtgtcagttccacggtttcctgcctccctgagaccctgagtcctgccatctaactgtgatcattgccctatccgaatatcttcctgtgatctgccatcagtggctcttttttcctgcttccatgggcctttctggtggcagtctcaaactgagaagccacagttgccttatttttgaggctgttctgcccagagctcggctgaaccagcctttagtgcctaccattatcttatccgtctcttcccgtccctgatgacaaagatcttgccttacagactttacaggcttggctttgagattctgtaactgcagacttcattagcacacagattcactttaatttcttaattttttttttaaatacaaggagggggctattaacacccagtacagacatatccacaaggtcgtaaatgcatgctagaaaaatagggctggatcttatcactgccctgtctccccttgtttctctgtgccagatcttcagtgcccctttccatacagggatttttttctcatagagtaattatatgaacagtttttatgacctccttttggtctgaaatacttttgaacagaatttcttttttttaaaaaaaaacagagatggggtcttactatgttgcccaggctggtgtcgaactcctgggctcaagcgatccttctgccttggcctcccgaagtgctgggattgcaggcataagctaccatgctgggcctgaacataatttcaagaggaggatttataaaaccattttctgtaatcaaatgattggtgtcattttcccatttgccaatgtagtctcacttaaaaaaaaaaaaaagaaaaagaaatggataatttcatctactgcctttacttggggttaatgtgattcttaaacaccttcatcatggaactctcagagtggggtccgttttggtttcctggtggtgggttttgaaagataagggaaagcacattttgagcatgtctgggtaccatggtgcggatgcttgggaaccagaactgtttcagaggaatctaaagtctgattttagttttcagagacacagcttgttgtaaaacatgagaagacatgatttctaggactcaagcagcaagccaggattctaggttggctgctgtgtcatctttgaagtcaagacaaagctgggctcgaccttcaagggtcctcgttttgataatacttcagaatagggaactcatgtgaatactactatgtagaaataaaacctagaccttgagcgaacatctgtatattggttgaaaacgatagtggtaaccattgatcccccttcatttgatgtttggaaaattccagtaattatcatttttgcaacgaatatggataccacatagtactttggtgttacctgcttttgaaaaataaagtctttggttcacccggtg

SEQ ID NO: 149521 - DNA, 556 bp, Homo sapiens
  Payload ID: 9528
  Gene Symbol: LITAF
  Gene Name: lipopolysaccharide-induced TNF factor
  ENST ID: ENST00000576334
  CDS Start-End: 458-556
agtaacccattttctctgggacccctttcttcgcagagagcgcttctctttctttcgcctattacacttctgctcttaacttcagtctggtgtgtccgcatcctagttttgcatggctgtcagacaacaaatctcgggtatttaccccagacaacgacgctgcttcactagcacccattccatctggagcaagcacacctgattgccccagcccggctccgaggaggctggagaattgcaagccttctaaggagggaaatttctccatgcttgggatggagctcagagcctgggtagccccacacaataccctccagccacatctcctgtaaataccccgtgtctttgtgctacccagagcccgagtctggccccatgtgcccgtgtaggtgtggaaccctgccacctgcgacacaggtcttcgaggagtcaaaaagggtaacttcctgacgttgccatgacatttgtaaactgtcatggtgctggtgggagtgtagcagtgaggaagaccagagttcgccctcgtcgccgtcttggttttggtaaaatgtcggtt

SEQ ID NO: 149522 - DNA, 516 bp, Homo sapiens
  Payload ID: 9528
  Gene Symbol: LITAF
  Gene Name: lipopolysaccharide-induced TNF factor
  ENST ID: ENST00000572255
  CDS Start-End: 275-481
agacctcccggctcgacaggcggcgcgggcggcggagttgaatccccctgggggttttcaagttgttcttggactgctggtttttgaaatagaagcccctttggtggggtcccccataaacccaggcgctggtgcccaccttgtgatgtgaaggctcctgtaacacgacctcactttcctggccccgcactactcacctgccccacgggacacagttaccgtgcagacggtctacgtgcagcaccccatcacctttttggaccgccctatccaaatgtgttgtccttcctgcaacaagatgatcgtgagtcagctgtcctataacgccggtgctctgacctggctgtcctgcgggagcctgtgcctgctggggtgcatagcgggctgctgcttcatccccttctgcgtggatgccctgcaggacgtggaccattactgtcccaactgcagagctctcctgggcacctacaagcgtttgtaggactcagccagacgtggagggagccgggtgccgca

SEQ ID NO: 149523 - DNA, 593 bp, Homo sapiens
  Payload ID: 9528
  Gene Symbol: LITAF
  Gene Name: lipopolysaccharide-induced TNF factor
  ENST ID: ENST00000570798
  CDS Start-End: 182-593
gacctcccggctcgacaggcggcgcgggcggcggaatttccccagagctacagtgagggtggaaaaaagaggatctgcaagaggaagtcctgtattcttggcactgtgacttgtcctctatttgttttcgcttttacagcagtgaaaatagccccgtgggtgaggcggtctatcaggtaaaatgtcggttccaggaccttaccaggcggccactgggccttcctcagcaccatccgcacctccatcctatgaagagacagtggctgttaacagttattaccccacacctccagctcccatgcctgggccaactacggggcttgtgacggggcctgatgggaagggcatgaatcctccttcgtattatacccagccagcgcccatccccaataacaatccaattaccgtgcagacggtctacgtgcagcaccccatcacctttttggaccgccctatccaaatgtgttgtccttcctgcaacaagatgatcgtgagtcagctgtcctataacgccggtgctctgacctggctgtcctgcgggagcctgtgcctgctggggtgcatagcgggctgctgcttcatccccttctgcg

SEQ ID NO: 149524 - DNA, 553 bp, Homo sapiens
  Payload ID: 9528
  Gene Symbol: LITAF
  Gene Name: lipopolysaccharide-induced TNF factor
  ENST ID: ENST00000574701
  CDS Start-End: 145-553
gaaagtggggagagccgcgagcggcaaatcaggagggagggccaggctgtcgggggcggacgggtggggctggcaccgagaggcaggggcaggataggagagtgggggagacaccaggtccgcgccaggcgtctcgggggtaaaatgtcggttccaggaccttaccaggcggccactgggccttcctcagcaccatccgcacctccatcctatgaagagacagtggctgttaacagttattaccccacacctccagctcccatgcctgggccaactacggggcttgtgacggggcctgatgggaagggcatgaatcctccttcgtattatacccagccagcgcccatccccaataacaatccaattaccgtgcagacggtctacgtgcagcaccccatcacctttttggaccgccctatccaaatgtgttgtccttcctgcaacaagatgatcgtgagtcagctgtcctataacgccggtgctctgacctggctgtcctgcgggagcctgtgcctgctggggcaggagtgcagtggtacgatcgtagctctcc

SEQ ID NO: 149525 - DNA, 587 bp, Homo sapiens
  Payload ID: 9528
  Gene Symbol: LITAF
  Gene Name: lipopolysaccharide-induced TNF factor
  ENST ID: ENST00000571277
  CDS Start-End: 469-587
agacctcccggctcgacaggcggcgcgggcggcgaattataaatgtgtttgtgtggctgtttgatctcaaagcaatgctcagaagatgcagtgtctcgaaatcccagaagataagatgttaccacatgaaagatggtctcaataaagggggagaggcggtggccgaggccttaatttccaaaacgagaaactggggcccacccatcttttaaaggtcgtcaaaagaaagctcccatcctcccatcccccacacctgtgtgttgactctgtaaagatgcagtttcctcactttgggaggagaggccgtggtttttgcaggaattgcgccgctgccgaattcagccattgcctcttggaggtttaggatgccccaggccttgttttccctcaaagcattccattggcaatcacgaccaaccatgctccttgaggatttctgtacacactggcttttcctggtcttgtaaaatgtcggttccaggaccttaccaggcggccactgggccttcctcagcaccatccgcacctccatcctatgaagagacagtggctgttaacagttattaccccacacctccagctcccat

SEQ ID NO: 149526 - DNA, 582 bp, Homo sapiens
  Payload ID: 9528
  Gene Symbol: LITAF
  Gene Name: lipopolysaccharide-induced TNF factor
  ENST ID: ENST00000575426
  CDS Start-End: 1-32
accgaagtgactctgccaaagagtctaagtgaagtgccattaccgtgcagacggtctacgtgcagcaccccatcacctttttggaccgccctatccaaatgtgttgtccttcctgcaacaagatgatcgtgagtcagctgtcctataacgccggtgctctgacctggctgtcctgcgggagcctgtgcctgctggggtgcatagcgggctgctgcttcatccccttctgcgtggatgccctgcaggacgtggaccattactgtcccaactgcagagctctcctgggcacctacaagcgtttgtaggactcagccagacgtggagggagccgggtgccgcaggaagtcctttccacctctcatccagcttcacgcctggtggaggttctgccctggtggtctcacctctccagggggcccaccttcatgtcttcttttggggggaatacgtcgcaaaactaacaaatctccaaaccccagaaattgctgcttggagtcgtgcataggacttgcaaagacattccccttgagtgtcagttccacggtttcctgcctccctgagaccctgagtcctgccatctaa

SEQ ID NO: 149527 - DNA, 1118 bp, Homo sapiens
  Payload ID: 9528
  Gene Symbol: LITAF
  Gene Name: lipopolysaccharide-induced TNF factor
  Uniprot ID: Q99732
  ENST ID: ENST00000570904
  CDS Start-End: 103-588
caggctgtcgggggcggacgggtggggctggcaccgagaggcaggggcaggataggagagtgggggagacaccaggtccgcgccaggcgtctcgggggtaaaatgtcggttccaggaccttaccaggcggccactgggccttcctcagcaccatccgcacctccatcctatgaagagacagtggctgttaacagttattaccccacacctccagctcccatgcctgggccaactacggggcttgtgacggggcctgatgggaagggcatgaatcctccttcgtattatacccagccagcgcccatccccaataacaatccaattaccgtgcagacggtctacgtgcagcaccccatcacctttttggaccgccctatccaaatgtgttgtccttcctgcaacaagatgatcgtgagtcagctgtcctataacgccggtgctctgacctggctgtcctgcgggagcctgtgcctgctggggtgcatagcgggctgctgcttcatccccttctgcgtggatgccctgcaggacgtggaccattactgtcccaactgcagagctctcctgggcacctacaagcgtttgtaggactcagccagacgtggagggagccgggtgccgcaggaagtcctttccacctctcatccagcttcacgcctggtggaggttctgccctggtggtctcacctctccagggggcccaccttcatgtcttcttttggggggaatacgtcgcaaaactaacaaatctccaaaccccagaaattgctgcttggagtcgtgcataggacttgcaaagacattccccttgagtgtcagttccacggtttcctgcctccctgagaccctgagtcctgccatctaactgtgatcattgccctatccgaatatcttcctgtgatctgccatcagtggctcttttttcctgcttccatgggcctttctggtggcagtctcaaactgagaagccacagttgccttatttttgaggctgttctgcccagagctcggctgaaccagcctttagtgcctaccattatcttatccgtctcttcccgtccctgatgacaaagatcttgccttacagactttacaggcttggctttgagattctgtaa

SEQ ID NO: 149528 - DNA, 2632 bp, Homo sapiens
  Payload ID: 9528
  Gene Symbol: LITAF
  Gene Name: lipopolysaccharide-induced TNF factor
  Uniprot ID: Q99732
  ENST ID: ENST00000571688
  CDS Start-End: 232-717
gctaaaaactttaccatcttcccagttcactcccagtcggtcttaggagacaggaccgctattgtgcccattttgcagacaggaagccgagctcagagaggatgggtaacatgcccgaaggcacagagagtgtcttggtctgtccggacgcgtctgtagagttacaggaagagaagggccgccctccagagggccgggagcgccccagcgcgggtccggggtcgaggtaaaatgtcggttccaggaccttaccaggcggccactgggccttcctcagcaccatccgcacctccatcctatgaagagacagtggctgttaacagttattaccccacacctccagctcccatgcctgggccaactacggggcttgtgacggggcctgatgggaagggcatgaatcctccttcgtattatacccagccagcgcccatccccaataacaatccaattaccgtgcagacggtctacgtgcagcaccccatcacctttttggaccgccctatccaaatgtgttgtccttcctgcaacaagatgatcgtgagtcagctgtcctataacgccggtgctctgacctggctgtcctgcgggagcctgtgcctgctggggtgcatagcgggctgctgcttcatccccttctgcgtggatgccctgcaggacgtggaccattactgtcccaactgcagagctctcctgggcacctacaagcgtttgtaggactcagccagacgtggagggagccgggtgccgcaggaagtcctttccacctctcatccagcttcacgcctggtggaggttctgccctggtggtctcacctctccagggggcccaccttcatgtcttcttttggggggaatacgtcgcaaaactaacaaatctccaaaccccagaaattgctgcttggagtcgtgcataggacttgcaaagacattccccttgagtgtcagttccacggtttcctgcctccctgagaccctgagtcctgccatctaactgtgatcattgccctatccgaatatcttcctgtgatctgccatcagtggctcttttttcctgcttccatgggcctttctggtggcagtctcaaactgagaagccacagttgccttatttttgaggctgttctgcccagagctcggctgaaccagcctttagtgcctaccattatcttatccgtctcttcccgtccctgatgacaaagatcttgccttacagactttacaggcttggctttgagattctgtaactgcagacttcattagcacacagattcactttaatttcttaattttttttttaaatacaaggagggggctattaacacccagtacagacatatccacaaggtcgtaaatgcatgctagaaaaatagggctggatcttatcactgccctgtctccccttgtttctctgtgccagatcttcagtgcccctttccatacagggatttttttctcatagagtaattatatgaacagtttttatgacctccttttggtctgaaatacttttgaacagaatttcttttttttaaaaaaaaacagagatggggtcttactatgttgcccaggctggtgtcgaactcctgggctcaagcgatccttctgccttggcctcccgaagtgctgggattgcaggcataagctaccatgctgggcctgaacataatttcaagaggaggatttataaaaccattttctgtaatcaaatgattggtgtcattttcccatttgccaatgtagtctcacttaaaaaaaaaaaaaagaaaaagaaatggataatttcatctactgcctttacttggggttaatgtgattcttaaacaccttcatcatggaactctcagagtggggtccgttttggtttcctggtggtgggttttgaaagataagggaaagcacattttgagcatgtctgggtaccatggtgcggatgcttgggaaccagaactgtttcagaggaatctaaagtctgattttagttttcagagacacagcttgttgtaaaacatgagaagacatgatttctaggactcaagcagcaagccaggattctaggttggctgctgtgtcatctttgaagtcaagacaaagctgggctcgaccttcaagggtcctcgttttgataatacttcagaatagggaactcatgtgaatactactatgtagaaataaaacctagaccttgagcgaacatctgtatattggttgaaaacgatagtggtaaccattgatcccccttcatttgatgtttggaaaattccagtaattatcatttttgcaacgaatatggataccacatagtactttggtgttacctgcttttgaaaaataaagtctttggttcacccggtgaactatttatgagttcttttggtgtgaagaaagggctcatgttgcatttccagccattgctacaaagaacctttatttgttcagtaacggtagaaaatccttcccgattaaaaacttcagacttgctgaatatcctgcaatgtcaagatgaccgatgttgagttgggtggatttgctaacgagtcagatttgaacatgaggctattggaacccaataggcgtcattgatggcggcaagccatagctttcaagttttaataaaatgcacaaaagagaa

SEQ ID NO: 149529 - DNA, 677 bp, Homo sapiens
  Payload ID: 9528
  Gene Symbol: LITAF
  Gene Name: lipopolysaccharide-induced TNF factor
  ENST ID: ENST00000571459
  CDS Start-End: 24-251
caggcggcgcgggcggcggtaaaatgtcggttccaggaccttaccaggcggccactgggccttcctcagcaccatccgcacctccatcctatgaagagacagtggctgttaacagttattaccccacacctccagctcccatgcctgggccaactacggggcttgtgacggggcctgatgggaagggcatgaatcctccttcgtattatacccagccagcgcccatccccaataacaatccaagtgcatagcgggctgctgcttcatccccttctgcgtggatgccctgcaggacgtggaccattactgtcccaactgcagagctctcctgggcacctacaagcgtttgtaggactcagccagacgtggagggagccgggtgccgcaggaagtcctttccacctctcatccagcttcacgcctggtggaggttctgccctggtggtctcacctctccagggggcccaccttcatgtcttcttttggggggaatacgtcgcaaaactaacaaatctccaaaccccagaaattgctgcttggagtcgtgcataggacttgcaaagacattccccttgagtgtcagttccacggtttcctgcctccctgagaccctgagtcctgccatctaactgtgatcattgccctatccgaatatcttcctgtgatctgccatcagt

SEQ ID NO: 149530 - DNA, 554 bp, Homo sapiens
  Payload ID: 9528
  Gene Symbol: LITAF
  Gene Name: lipopolysaccharide-induced TNF factor
  ENST ID: ENST00000574848
  CDS Start-End: 291-554
aagcagtaacccattttctctgggacccctttcttcgcagagagcgcttctctttctttcgcctattacacttctgctcttaacttcagtctggtgtgtccgcatcctagttttgcatggctgtcagacaacaaatctcggaccctccagccacatctcctgtaaataccccgtgtctttgtgctacccagagcccgagtctggccccatgtgcccgtgtaggtgtggaaccctgccacctgcgacacaggtcttcgaggagtcaaaaagggtaacttcctgacgttgccatgacatttgtaaactgtcatggtgctggtgggagtgtagcagtgaggaagaccagagttcgccctcgtcgccgtcttggttttggtaaaatgtcggttccaggaccttaccaggcggccactgggccttcctcagcaccatccgcacctccatcctatgaagagacagtggctgttaacagttattaccccacacctccagctcccatgcctgggccaactacggggcttgtgacggggcctgatgggaagggcatgaatcct

SEQ ID NO: 149531 - DNA, 486 bp, Homo sapiens
  Payload ID: 9528
  Gene Symbol: LITAF
  Gene Name: lipopolysaccharide-induced TNF factor
  ENST ID: ENST00000574703
  CDS Start-End: 40-357
agacctcccggctcgacaggcggcgcgggcggcggtaaaatgtcggttccaggaccttaccaggcggccactgggccttcctcagcaccatccgcacctccatcctatgaagagacagtggctgttaacagttattaccccacacctccagctcccatgcctgggccaactacggggcttgtgacggggcctgatgggaagggcatgaatcctccttcgtattatacccagccagcgcccatccccaataacaatccaagtacgtgtggcctcccaggccccccttaccattccttggccctccaccctgggaatcaggagagtgaccgaagtgactctgccaaagagtctaagtgaagtgccagtacgttccagttttacccccttaccttgaaattccacacgcagtcttttagattccatgttggtgaggctcacagcttttccgtaataaagtatggtttaggatctttcccatggtcatca

SEQ ID NO: 149532 - DNA, 548 bp, Homo sapiens
  Payload ID: 9528
  Gene Symbol: LITAF
  Gene Name: lipopolysaccharide-induced TNF factor
  ENST ID: ENST00000571976
  CDS Start-End: 62-442
ggggcgcccgagaggccagctcagacctcccggctcgacaggcggcgcgggcggcggtaaaatgtcggttccaggaccttaccaggcggccactgggccttcctcagcaccatccgcacctccatcctatgaagagacagtggctgttaacagttattaccccacacctccagctcccatgcctgggccaactacggggcttgtgacggggcctgatgggaagggcatgaatcctccttcgtattatacccagccagcgcccatccccaataacaatccaattaccgtgcagacggtctacgtgcagcaccccatcacctttttggaccgccctatccaaatgtgttgtccttcctgcaacaagatgatcgtgagtcagctgtcctataacgccggtgctctgacctggctgtcctgcgggagcctgtgcctgctggggtgagtctgcctcccacttggccccaagccatcctgcccttctctctgggtgctggcgggggtgggttctcaactgcaccatgcttgacattcagggccagacatttgtg

SEQ ID NO: 149533 - DNA, 579 bp, Homo sapiens
  Payload ID: 9528
  Gene Symbol: LITAF
  Gene Name: lipopolysaccharide-induced TNF factor
  ENST ID: ENST00000571627
  CDS Start-End: 119-579
aggaaaagaaacccgccttgagccaccgcagctcgtgccaggggtctcagatgatggacagacactgatatggaggttcaaatttcgggaaacacagcaacagcccagccatggtaaaatgtcggttccaggaccttaccaggcggccactgggccttcctcagcaccatccgcacctccatcctatgaagagacagtggctgttaacagttattaccccacacctccagctcccatgcctgggccaactacggggcttgtgacggggcctgatgggaagggcatgaatcctccttcgtattatacccagccagcgcccatccccaataacaatccaattaccgtgcagacggtctacgtgcagcaccccatcacctttttggaccgccctatccaaatgtgttgtccttcctgcaacaagatgatcgtgagtcagctgtcctataacgccggtgctctgacctggctgtcctgcgggagcctgtgcctgctggggtgcatagcgggctgctgcttcatccccttctgcgtggatgccctgcaggacgtggaccattactgtcccaactgcagagctct

SEQ ID NO: 149534 - DNA, 773 bp, Homo sapiens
  Payload ID: 9528
  Gene Symbol: LITAF
  Gene Name: lipopolysaccharide-induced TNF factor
  ENST ID: ENST00000573332
  CDS Start-End: 40-285
agacctcccggctcgacaggcggcgcgggcggcggtaaaatgtcggttccaggaccttaccaggcggccactgggccttcctcagcaccatccgcacctccatcctatgaagagacagtggctgttaacagttattaccccacacctccagctcccatgcctgggccaactacggggcttgtgacggggcctgatgggaagggcatgaatcctccttcgtattatacccagccagcgcccatccccaataacaatccaatgaatgctattggccttgtttcctgagcaacctgtgtttgtccctctccctttcatcagttaccgtgcagacggtctacgtgcagcaccccatcacctttttggaccgccctatccaaatgtgttgtccttcctgcaacaagatgatcgtgagtcagctgtcctataacgccggtgctctgacctggctgtcctgcgggagcctgtgcctgctggggtgcatagcgggctgctgcttcatccccttctgcgtggatgccctgcaggacgtggaccattactgtcccaactgcagagctctcctgggcacctacaagcgtttgtaggactcagccagacgtggagggagccgggtgccgcaggaagtcctttccacctctcatccagcttcacgcctggtggaggttctgccctggtggtctcacctctccagggggcccaccttcatgtcttcttttggggggaatacgtcgcaaaactaacaaatctccaaaccccagaaattgctgcttgga

SEQ ID NO: 149535 - DNA, 603 bp, Homo sapiens
  Payload ID: 9528
  Gene Symbol: LITAF
  Gene Name: lipopolysaccharide-induced TNF factor
  Uniprot ID: Q99732
  ENST ID: ENST00000576036
  CDS Start-End: 94-579
ccctgcgctcagccttctgagccttcctcatctgatgcctgttaggctccctttgctgctgaggtcctgggtgccatcccagcacttggtaaaatgtcggttccaggaccttaccaggcggccactgggccttcctcagcaccatccgcacctccatcctatgaagagacagtggctgttaacagttattaccccacacctccagctcccatgcctgggccaactacggggcttgtgacggggcctgatgggaagggcatgaatcctccttcgtattatacccagccagcgcccatccccaataacaatccaattaccgtgcagacggtctacgtgcagcaccccatcacctttttggaccgccctatccaaatgtgttgtccttcctgcaacaagatgatcgtgagtcagctgtcctataacgccggtgctctgacctggctgtcctgcgggagcctgtgcctgctggggtgcatagcgggctgctgcttcatccccttctgcgtggatgccctgcaggacgtggaccattactgtcccaactgcagagctctcctgggcacctacaagcgtttgtaggactcagccagacgtggagggagc

SEQ ID NO: 149536 - DNA, 717 bp, Homo sapiens
  Payload ID: 9528
  Gene Symbol: LITAF
  Gene Name: lipopolysaccharide-induced TNF factor
  Uniprot ID: Q99732
  ENST ID: ENST00000574763
  CDS Start-End: 221-706
agacctcccggctcgacaggcggcgcgggcggcggagttgaatccccctgggggttttcaagttgttcttggactgctggtttttgaaatagaagcccctttggtggggtcccccataaacccaggcgctggtgcccaccttgtgatgtgaaggctcctgtaacacgacctcactttcctggccccgcactactcacctgccccacgggacacaggtaaaatgtcggttccaggaccttaccaggcggccactgggccttcctcagcaccatccgcacctccatcctatgaagagacagtggctgttaacagttattaccccacacctccagctcccatgcctgggccaactacggggcttgtgacggggcctgatgggaagggcatgaatcctccttcgtattatacccagccagcgcccatccccaataacaatccaattaccgtgcagacggtctacgtgcagcaccccatcacctttttggaccgccctatccaaatgtgttgtccttcctgcaacaagatgatcgtgagtcagctgtcctataacgccggtgctctgacctggctgtcctgcgggagcctgtgcctgctggggtgcatagcgggctgctgcttcatccccttctgcgtggatgccctgcaggacgtggaccattactgtcccaactgcagagctctcctgggcacctacaagcgtttgtaggactcagccag

SEQ ID NO: 149537 - DNA, 692 bp, Homo sapiens
  Payload ID: 9528
  Gene Symbol: LITAF
  Gene Name: lipopolysaccharide-induced TNF factor
  Uniprot ID: Q99732
  ENST ID: ENST00000620789
  CDS Start-End: 234-692
gtttctctccctgcccccgcgacttcgcgcaagatccgggaaggacacccgaggcccctgggagaccctggggaggtgaaaatcagagagcgaagcgggccgtggcccctaggcctgacccctccccgcggggtaaggcgggcaccccgcgagcgcaggggtcctcttactgctgatggcacccagctctgggcccagacgccgctcaccgtccaccgccggtgctgggtaaaatgtcggttccaggaccttaccaggcggccactgggccttcctcagcaccatccgcacctccatcctatgaagagacagtggctgttaacagttattaccccacacctccagctcccatgcctgggccaactacggggcttgtgacggggcctgatgggaagggcatgaatcctccttcgtattatacccagccagcgcccatccccaataacaatccaattaccgtgcagacggtctacgtgcagcaccccatcacctttttggaccgccctatccaaatgtgttgtccttcctgcaacaagatgatcgtgagtcagctgtcctataacgccggtgctctgacctggctgtcctgcgggagcctgtgcctgctggggcaggagtgcagtggtacgatcgtagctctccgcagctttgatctcctgggctcctgcaatccgcccagctcagcctcctga

SEQ ID NO: 149538 - DNA, 2467 bp, Homo sapiens
  Payload ID: 9528
  Gene Symbol: LITAF
  Gene Name: lipopolysaccharide-induced TNF factor
  Uniprot ID: Q99732
  ENST ID: ENST00000622633
  CDS Start-End: 71-556
ccttttctcggggcgcccgagaggccagctcagacctcccggctcgacaggcggcgcgggcggcggtaaaatgtcggttccaggaccttaccaggcggccactgggccttcctcagcaccatccgcacctccatcctatgaagagacagtggctgttaacagttattaccccacacctccagctcccatgcctgggccaactacggggcttgtgacggggcctgatgggaagggcatgaatcctccttcgtattatacccagccagcgcccatccccaataacaatccaattaccgtgcagacggtctacgtgcagcaccccatcacctttttggaccgccctatccaaatgtgttgtccttcctgcaacaagatgatcgtgagtcagctgtcctataacgccggtgctctgacctggctgtcctgcgggagcctgtgcctgctggggtgcatagcgggctgctgcttcatccccttctgcgtggatgccctgcaggacgtggaccattactgtcccaactgcagagctctcctgggcacctacaagcgtttgtaggactcagccagacgtggagggagccgggtgccgcaggaagtcctttccacctctcatccagcttcacgcctggtggaggttctgccctggtggtctcacctctccagggggcccaccttcatgtcttcttttggggggaatacgtcgcaaaactaacaaatctccaaaccccagaaattgctgcttggagtcgtgcataggacttgcaaagacattccccttgagtgtcagttccacggtttcctgcctccctgagaccctgagtcctgccatctaactgtgatcattgccctatccgaatatcttcctgtgatctgccatcagtggctcttttttcctgcttccatgggcctttctggtggcagtctcaaactgagaagccacagttgccttatttttgaggctgttctgcccagagctcggctgaaccagcctttagtgcctaccattatcttatccgtctcttcccgtccctgatgacaaagatcttgccttacagactttacaggcttggctttgagattctgtaactgcagacttcattagcacacagattcactttaatttcttaattttttttttaaatacaaggagggggctattaacacccagtacagacatatccacaaggtcgtaaatgcatgctagaaaaatagggctggatcttatcactgccctgtctccccttgtttctctgtgccagatcttcagtgcccctttccatacagggatttttttctcatagagtaattatatgaacagtttttatgacctccttttggtctgaaatacttttgaacagaatttcttttttttaaaaaaaaacagagatggggtcttactatgttgcccaggctggtgtcgaactcctgggctcaagcgatccttctgccttggcctcccgaagtgctgggattgcaggcataagctaccatgctgggcctgaacataatttcaagaggaggatttataaaaccattttctgtaatcaaatgattggtgtcattttcccatttgccaatgtagtctcacttaaaaaaaaaaaaaagaaaaagaaatggataatttcatctactgcctttacttggggttaatgtgattcttaaacaccttcatcatggaactctcagagtggggtccgttttggtttcctggtggtgggttttgaaagataagggaaagcacattttgagcatgtctgggtaccatggtgcggatgcttgggaaccagaactgtttcagaggaatctaaagtctgattttagttttcagagacacagcttgttgtaaaacatgagaagacatgatttctaggactcaagcagcaagccaggattctaggttggctgctgtgtcatctttgaagtcaagacaaagctgggctcgaccttcaagggtcctcgttttgataatacttcagaatagggaactcatgtgaatactactatgtagaaataaaacctagaccttgagcgaacatctgtatattggttgaaaacgatagtggtaaccattgatcccccttcatttgatgtttggaaaattccagtaattatcatttttgcaacgaatatggataccacatagtactttggtgttacctgcttttgaaaaataaagtctttggttcacccggtgaactatttatgagttcttttggtgtgaagaaagggctcatgttgcatttccagccattgctacaaagaacctttatttgttcagtaacggtagaaaatccttcccgattaaaaacttcagacttgctgaatatcctgcaatgtcaagatgaccgatgttgagttgggtggatttgctaacgagtcagatttgaacatgaggctattggaacccaataggcgtcattgatggcggcaagccatagctttcaagttttaataaaatgcacaaaag

SEQ ID NO: 149539 - DNA, 3846 bp, Homo sapiens
  Payload ID: 9529
  Gene Symbol: LPL
  Gene Name: lipoprotein lipase
  Uniprot ID: P06858
  ENST ID: ENST00000311322
  CDS Start-End: 471-1898
tttaacgtgaatcgatgtaaacctgtgtttggtgcttagacagggggcccccgggtagagtggaaccccttaagctaagcgaacaggagcctaacaaagcaaatttttccgtctgccctttccccctcttctcgttggcagggttgatcctcattactgtttgctcaaacgtttagaagtgaatttaggtccctccccccaacttatgattttatagccaataggtgatgaggtttatttgcatatttccagtcacataagcagccttggcgtgaaaacagtgtcagactcgattccccctcttcctcctcctcaagggaaagctgcccacttctagctgccctgccatcccctttaaagggcgacttgctcagcgccaaaccgcggctccagccctctccagcctccggctcagccggctcatcagtcggtccgcgccttgcagctcctccagagggacgcgccccgagatggagagcaaagccctgctcgtgctgactctggccgtgtggctccagagtctgaccgcctcccgcggaggggtggccgccgccgaccaaagaagagattttatcgacatcgaaagtaaatttgccctaaggacccctgaagacacagctgaggacacttgccacctcattcccggagtagcagagtccgtggctacctgtcatttcaatcacagcagcaaaaccttcatggtgatccatggctggacggtaacaggaatgtatgagagttgggtgccaaaacttgtggccgccctgtacaagagagaaccagactccaatgtcattgtggtggactggctgtcacgggctcaggagcattacccagtgtccgcgggctacaccaaactggtgggacaggatgtggcccggtttatcaactggatggaggaggagtttaactaccctctggacaatgtccatctcttgggatacagccttggagcccatgctgctggcattgcaggaagtctgaccaataagaaagtcaacagaattactggcctcgatccagctggacctaactttgagtatgcagaagccccgagtcgtctttctcctgatgatgcagattttgtagacgtcttacacacattcaccagagggtcccctggtcgaagcattggaatccagaaaccagttgggcatgttgacatttacccgaatggaggtacttttcagccaggatgtaacattggagaagctatccgcgtgattgcagagagaggacttggagatgtggaccagctagtgaagtgctcccacgagcgctccattcatctcttcatcgactctctgttgaatgaagaaaatccaagtaaggcctacaggtgcagttccaaggaagcctttgagaaagggctctgcttgagttgtagaaagaaccgctgcaacaatctgggctatgagatcaataaagtcagagccaaaagaagcagcaaaatgtacctgaagactcgttctcagatgccctacaaagtcttccattaccaagtaaagattcatttttctgggactgagagtgaaacccataccaatcaggcctttgagatttctctgtatggcaccgtggccgagagtgagaacatcccattcactctgcctgaagtttccacaaataagacctactccttcctaatttacacagaggtagatattggagaactactcatgttgaagctcaaatggaagagtgattcatactttagctggtcagactggtggagcagtcccggcttcgccattcagaagatcagagtaaaagcaggagagactcagaaaaaggtgatcttctgttctagggagaaagtgtctcatttgcagaaaggaaaggcacctgcggtatttgtgaaatgccatgacaagtctctgaataagaagtcaggctgaaactgggcgaatctacagaacaaagaacggcatgtgaattctgtgaagaatgaagtggaggaagtaacttttacaaaacatacccagtgtttggggtgtttcaaaagtggattttcctgaatattaatcccagccctacccttgttagttattttaggagacagtctcaagcactaaaaagtggctaattcaatttatggggtatagtggccaaatagcacatcctccaacgttaaaagacagtggatcatgaaaagtgctgttttgtcctttgagaaagaaataattgtttgagcgcagagtaaaataaggctccttcatgtggcgtattgggccatagcctataattggttagaacctcctattttaattggaattctggatctttcggactgaggccttctcaaactttactctaagtctccaagaatacagaaaatgcttttccgcggcacgaatcagactcatctacacagcagtatgaatgatgttttagaatgattccctcttgctattggaatgtggtccagacgtcaaccaggaacatgtaacttggagagggacgaagaaagggtctgataaacacagaggttttaaacagtccctaccattggcctgcatcatgacaaagttacaaattcaaggagatataaaatctagatcaattaattcttaataggctttatcgtttattgcttaatccctctctcccccttcttttttgtctcaagattatattataataatgttctctgggtaggtgttgaaaatgagcctgtaatcctcagctgacacataatttgaatggtgcagaaaaaaaaaaagaaaccgtaattttattattagattctccaaatgattttcatcaatttaaaatcattcaatatctgacagttactcttcagttttaggcttaccttggtcatgcttcagttgtacttccagtgcgtctcttttgttcctggctttgacatgaaaagataggtttgagttcaaattttgcattgtgtgagcttctacagattttagacaaggaccgtttttactaagtaaaagggtggagaggttcctggggtggattcctaagcagtgcttgtaaaccatcgcgtgcaatgagccagatggagtaccatgagggttgctatttgttgtttttaacaactaatcaagagtgagtgaacaactatttataaactagatctcctatttttcagaatgctcttctacgtataaatatgaaatgataaagatgtcaaatatctcagaggctatagctgggaacccgactgtgaaagtatgtgatatctgaacacatactagaaagctctgcatgtgtgttgtccttcagcataattcggaagggaaaacagtcgatcaagggatgtattggaacatgtcggagtagaaattgttcctgatgtgccagaacttcgaccctttctctgagagagatgatcgtgcctataaatagtaggaccaatgttgtgattaacatcatcaggcttggaatgaattctctctaaaaataaaatgatgtatgatttgttgttggcatcccctttattaattcattaaatttctggatttgggttgtgacccagggtgcattaacttaaaagattcactaaagcagcacatagcactgggaactctggctccgaaaaactttgttatatatatcaaggatgttctggctttacattttatttattagctgtaaatacatgtgtggatgtgtaaatggagcttgtacatattggaaaggtcattgtggctatctgcatttataaatgtgtggtgctaactgtatgtgtctttatcagtgatggtctcacagagccaactcactcttatgaaatgggctttaacaaaacaagaaagaaacgtacttaactgtgtgaagaaatggaatcagcttttaataaaattgacaacattttattaccac

SEQ ID NO: 149540 - DNA, 629 bp, Homo sapiens
  Payload ID: 9529
  Gene Symbol: LPL
  Gene Name: lipoprotein lipase
  ENST ID: ENST00000524029
  CDS Start-End: 241-629
gacaaacaggattcgtcaaaagagaggtgtattaaagtgccgatcaaatgtaatttaacagctaaactttccctccttggaaaacagggaaagctgcccacttctagctgccctgccatcccctttaaagggcgacttgctcagcgccaaaccgcggctccagccctctccagcctccggctcagccggctcatcagtcggtccgcgccttgcagctcctccagagggacgcgccccgagatggagagcaaagccctgctcgtgctgactctggccgtgtggctccagagtctgaccgcctcccgcggaggggtggccgccgccgaccaaagaagagattttatcgacatcgaaagtaaatttgccctaaggacccctgaagacacagctgaggacacttgccacctcattcccggagtagcagagtccgtggctacctgtcatttcaatcacagcagcaaaaccttcatggtgatccatggctggacggtaacaggaatgtatgagagttgggtgccaaaacttgtggccgccctgtacaagagagaaccagactccaatgtcattgtggtggactggctgtcacgggctcaggagcattacccagtgtccgcgggctacaccaaact

SEQ ID NO: 149541 - DNA, 560 bp, Homo sapiens
  Payload ID: 9529
  Gene Symbol: LPL
  Gene Name: lipoprotein lipase
  ENST ID: ENST00000520959
  CDS Start-End: 216-560
aacagtttgtatgctggaagagttctgaaaagatctctgagggctggaagtgctaaggacaatttcataaagaagaaagaagagattttatcgacatcgaaagtaaatttgccctaaggacccctgaagacacagctgaggacacttgccacctcattcccggagtagcagagtccgtggctacctgtcatttcaatcacagcagcaaaaccttcatggtgatccatggctggacggtaacaggaatgtatgagagttgggtgccaaaacttgtggccgccctgtacaagagagaaccagactccaatgtcattgtggtggactggctgtcacgggctcaggagcattacccagtgtccgcgggctacaccaaactggtgggacaggatgtggcccggtttatcaactggatggaggaggagtttaactaccctctggacaatgtccatctcttgggatacagccttggagcccatgctgctggcattgcaggaagtctgaccaataagaaagtcaacagaattactggcctcgatccagctggacctaactttgagtat

SEQ ID NO: 149542 - DNA, 559 bp, Homo sapiens
  Payload ID: 9529
  Gene Symbol: LPL
  Gene Name: lipoprotein lipase
  ENST ID: ENST00000522701
  CDS Start-End: 243-559
aaactttccctccttggaaaacagtcacataagcagccttggcgtgaaaacagtgtcagactcgattccccctcttcctcctcctcaagggaaagctgcccacttctagctgccctgccatcccctttaaagggcgacttgctcagcgccaaaccgcggctccagccctctccagcctccggctcagccggctcatcagtcggtccgcgccttgcagctcctccagagggacgcgccccgagatggagagcaaagccctgctcgtgctgactctggccgtgtggctccagagtctgaccgcctcccgcggaggggtggccgccgccgaccaaagaagagattttatcgacatcgaaagtaaatttgccctaaggacccctgaagacacagctgaggacacttgccacctcattcccggagtagcagagtccgtggctacctgtcatttcaatcacagcagcaaaaccttcatggtgatccatggctggacggtaacaggaatgtatgagagttgggtgccaaaacttgtggccgccctgtacaagagagaaccagactc

SEQ ID NO: 149543 - DNA, 554 bp, Homo sapiens
  Payload ID: 9529
  Gene Symbol: LPL
  Gene Name: lipoprotein lipase
  ENST ID: ENST00000519773
  CDS Start-End: 186-305
agactcgattccccctcttcctcctcctcaagggaaagctgcccacttctagctgccctgccatcccctttaaagggcgacttgctcagcgccaaaccgcggctccagccctctccagcctccggctcagccggctcatcagtcggtccgcgccttgcagctcctccagagggacgcgccccgagatggagagcaaagccctgctcgtgctgactctggccgtgtggctccagagtctgaccgcctcccgcggaggggtggccgccgccgaccttattttgaagttacagatttttaaattttgagttgaaaaaaaagagcaaatttagattaaggaatgagaagtagtcctcgcagcctcatgaatctcctgaaatttcgaacggcaaaatctaaaatctacaagttattaccttcttacagtaaatagaaagaagagattttatcgacatcgaaagtaaatttgccctaaggacccctgaagacacagctgaggacacttgccacctcattcccggagtagcagagtccgtggctacctgtcatttcaatca

SEQ ID NO: 149544 - DNA, 6414 bp, Homo sapiens
  Payload ID: 9530
  Gene Symbol: LPA
  Gene Name: lipoprotein, Lp(a)
  Uniprot ID: P08519
  ENST ID: ENST00000316300
  CDS Start-End: 46-6168
ctgggattgggacacactttctgggcactgctggccagtcccaaaatggaacataaggaagtggttcttctacttcttttatttctgaaatcagcagcacctgagcaaagccatgtggtccaggattgctaccatggtgatggacagagttatcgaggcacgtactccaccactgtcacaggaaggacctgccaagcttggtcatctatgacaccacatcaacataataggaccacagaaaactacccaaatgctggcttgatcatgaactactgcaggaatccagatgctgtggcagctccttattgttatacgagggatcccggtgtcaggtgggagtactgcaacctgacgcaatgctcagacgcagaagggactgccgtcgcgcctccgactgttaccccggttccaagcctagaggctccttccgaacaagcaccgactgagcaaaggcctggggtgcaggagtgctaccatggtaatggacagagttatcgaggcacatactccaccactgtcacaggaagaacctgccaagcttggtcatctatgacaccacactcgcatagtcggaccccagaatactacccaaatgctggcttgatcatgaactactgcaggaatccagatgctgtggcagctccttattgttatacgagggatcccggtgtcaggtgggagtactgcaacctgacgcaatgctcagacgcagaagggactgccgtcgcgcctccgactgttaccccggttccaagcctagaggctccttccgaacaagcaccgactgagcaaaggcctggggtgcaggagtgctaccatggtaatggacagagttatcgaggcacatactccaccactgtcacaggaagaacctgccaagcttggtcatctatgacaccacactcgcatagtcggaccccagaatactacccaaatgctggcttgatcatgaactactgcaggaatccagatgctgtggcagctccttattgttatacgagggatcccggtgtcaggtgggagtactgcaacctgacgcaatgctcagacgcagaagggactgccgtcgcgcctccgactgttaccccggttccaagcctagaggctccttccgaacaagcaccgactgagcagaggcctggggtgcaggagtgctaccacggtaatggacagagttatcgaggcacatactccaccactgtcactggaagaacctgccaagcttggtcatctatgacaccacactcgcatagtcggaccccagaatactacccaaatgctggcttgatcatgaactactgcaggaatccagatgctgtggcagctccttattgttatacgagggatcccggtgtcaggtgggagtactgcaacctgacgcaatgctcagacgcagaagggactgccgtcgcgcctccgactgttaccccggttccaagcctagaggctccttccgaacaagcaccgactgagcaaaggcctggggtgcaggagtgctaccatggtaatggacagagttatcgaggcacatactccaccactgtcacaggaagaacctgccaagcttggtcatctatgacaccacactcgcatagtcggaccccagaatactacccaaatgctggcttgatcatgaactactgcaggaatccagatgctgtggcagctccttattgttatacgagggatcccggtgtcaggtgggagtactgcaacctgacgcaatgctcagacgcagaagggactgccgtcgcgcctccgactgttaccccggttccaagcctagaggctccttccgaacaagcaccgactgagcaaaggcctggggtgcaggagtgctaccatggtaatggacagagttatcgaggcacatactccaccactgtcacaggaagaacctgccaagcttggtcatctatgacaccacactcgcatagtcggaccccagaatactacccaaatgctggcttgatcatgaactactgcaggaatccagatgctgtggcagctccttattgttatacgagggatcccggtgtcaggtgggagtactgcaacctgacgcaatgctcagacgcagaagggactgccgtcgcgcctccgactgttaccccggttccaagcctagaggctccttccgaacaagcaccgactgagcaaaggcctggggtgcaggagtgctaccatggtaatggacagagttatcgaggcacatactccaccactgtcacaggaagaacctgccaagcttggtcatctatgacaccacactcgcatagtcggaccccagaatactacccaaatgctggcttgatcatgaactactgcaggaatccagatgctgtggcagctccttattgttatacgagggatcccggtgtcaggtgggagtactgcaacctgacgcaatgctcagacgcagaagggactgccgtcgcgcctccgactgttaccccggttccaagcctagaggctccttccgaacaagcaccgactgagcagaggcctggggtgcaggagtgctaccacggtaatggacagagttatcgaggcacatactccaccactgtcactggaagaacctgccaagcttggtcatctatgacaccacactcgcatagtcggaccccagaatactacccaaatgctggcttgatcatgaactactgcaggaatccagatcctgtggcagccccttattgttatacgagggatcccagtgtcaggtgggagtactgcaacctgacacaatgctcagacgcagaagggactgccgtcgcgcctccaactattaccccgattccaagcctagaggctccttctgaacaagcaccaactgagcaaaggcctggggtgcaggagtgctaccacggaaatggacagagttatcaaggcacatacttcattactgtcacaggaagaacctgccaagcttggtcatctatgacaccacactcgcatagtcggaccccagcatactacccaaatgctggcttgatcaagaactactgccgaaatccagatcctgtggcagccccttggtgttatacaacagatcccagtgtcaggtgggagtactgcaacctgacacgatgctcagatgcagaatggactgccttcgtccctccgaatgttattctggctccaagcctagaggctttttttgaacaagcactgactgaggaaacccccggggtacaggactgctactaccattatggacagagttaccgaggcacatactccaccactgtcacaggaagaacttgccaagcttggtcatctatgacaccacaccagcatagtcggaccccagaaaactacccaaatgctggcctgaccaggaactactgcaggaatccagatgctgagattcgcccttggtgttacaccatggatcccagtgtcaggtgggagtactgcaacctgacacaatgcctggtgacagaatcaagtgtccttgcaactctcacggtggtcccagatccaagcacagaggcttcttctgaagaagcaccaacggagcaaagccccggggtccaggattgctaccatggtgatggacagagttatcgaggctcattctctaccactgtcacaggaaggacatgtcagtcttggtcctctatgacaccacactggcatcagaggacaacagaatattatccaaatggtggcctgaccaggaactactgcaggaatccagatgctgagattagtccttggtgttataccatggatcccaatgtcagatgggagtactgcaacctgacacaatgtccagtgacagaatcaagtgtccttgcgacgtccacggctgtttctgaacaagcaccaacggagcaaagccccacagtccaggactgctaccatggtgatggacagagttatcgaggctcattctccaccactgttacaggaaggacatgtcagtcttggtcctctatgacaccacactggcatcagagaaccacagaatactacccaaatggtggcctgaccaggaactactgcaggaatccagatgctgagattcgcccttggtgttataccatggatcccagtgtcagatgggagtactgcaacctgacgcaatgtccagtgatggaatcaactctcctcacaactcccacggtggtcccagttccaagcacagagcttccttctgaagaagcaccaactgaaaacagcactggggtccaggactgctaccgaggtgatggacagagttatcgaggcacactctccaccactatcacaggaagaacatgtcagtcttggtcgtctatgacaccacattggcatcggaggatcccattatactatccaaatgctggcctgaccaggaactactgcaggaatccagatgctgagattcgcccttggtgttacaccatggatcccagtgtcaggtgggagtactgcaacctgacacgatgtccagtgacagaatcgagtgtcctcacaactcccacagtggccccggttccaagcacagaggctccttctgaacaagcaccacctgagaaaagccctgtggtccaggattgctaccatggtgatggacggagttatcgaggcatatcctccaccactgtcacaggaaggacctgtcaatcttggtcatctatgataccacactggcatcagaggaccccagaaaactacccaaatgctggcctgaccgagaactactgcaggaatccagattctgggaaacaaccctggtgttacacaaccgatccgtgtgtgaggtgggagtactgcaatctgacacaatgctcagaaacagaatcaggtgtcctagagactcccactgttgttccagttccaagcatggaggctcattctgaagcagcaccaactgagcaaacccctgtggtccggcagtgctaccatggtaatggccagagttatcgaggcacattctccaccactgtcacaggaaggacatgtcaatcttggtcatccatgacaccacaccggcatcagaggaccccagaaaactacccaaatgatggcctgacaatgaactactgcaggaatccagatgccgatacaggcccttggtgttttaccatggaccccagcatcaggtgggagtactgcaacctgacgcgatgctcagacacagaagggactgtggtcgctcctccgactgtcatccaggttccaagcctagggcctccttctgaacaagactgtatgtttgggaatgggaaaggataccggggcaagaaggcaaccactgttactgggacgccatgccaggaatgggctgcccaggagccccatagacacagcacgttcattccagggacaaataaatgggcaggtctggaaaaaaattactgccgtaaccctgatggtgacatcaatggtccctggtgctacacaatgaatccaagaaaactttttgactactgtgatatccctctctgtgcatcctcttcatttgattgtgggaagcctcaagtggagccgaagaaatgtcctggaagcattgtaggggggtgtgtggcccacccacattcctggccctggcaagtcagtctcagaacaaggtttggaaagcacttctgtggaggcaccttaatatccccagagtgggtgctgactgctgctcactgcttgaagaagtcctcaaggccttcatcctacaaggtcatcctgggtgcacaccaagaagtgaacctcgaatctcatgttcaggaaatagaagtgtctaggctgttcttggagcccacacaagcagatattgccttgctaaagctaagcaggcctgccgtcatcactgacaaagtaatgccagcttgtctgccatccccagactacatggtcaccgccaggactgaatgttacatcactggctggggagaaacccaaggtacctttgggactggccttctcaaggaagcccagctccttgttattgagaatgaagtgtgcaatcactataagtatatttgtgctgagcatttggccagaggcactgacagttgccagggtgacagtggagggcctctggtttgcttcgagaaggacaaatacattttacaaggagtcacttcttggggtcttggctgtgcacgccccaataagcctggtgtctatgctcgtgtttcaaggtttgttacttggattgagggaatgatgagaaataattaattggacgggagacagagtgaagcatcaacctacttagaagctgaaacgtgggtaaggatttagcatgctggaaataatagacagcaatcaaacgaagacactgttcccagctaccagctatgccaaaccttggcatttttggtatttttgtgtataagcttttaaggtctgactgacaaattctgtattaaggtgtcatagctatgacatttgttaaaaataaactctgcacttattttgatttga

SEQ ID NO: 149545 - DNA, 1839 bp, Homo sapiens
  Payload ID: 9530
  Gene Symbol: LPA
  Gene Name: lipoprotein, Lp(a)
  Uniprot ID: P08519
  ENST ID: ENST00000447678
  CDS Start-End: 1-1839
agtggcttgatcatgaactactgcaggaatccagatgctgtggcagctccttattgttatacgagggatcccggtgtcaggtgggagtactgcaacctgacgcaatgctcagacgcagaagggactgccgtcgcgcctccgactgttaccccggttccaagcctagaggctccttccgaacaagcaccgactgagcagaggcctggggtgcaggagtgctaccacggtaatggacagagttatcgaggcacatactccaccactgtcactggaagaacctgccaagcttggtcatctatgacaccacactcgcatagtcggaccccagaatactacccaaatgctggcttgatcatgaactactgcaggaatccagatcctgtggcagccccttattgttatacgagggatcccagtgtcaggtgggagtactgcaacctgacacaatgctcagacgcagaagggactgccgtcgcgcctccaactattaccccgattccaagcctagaggctccttctgaacaagcaccaactgagcaaaggcctggggtgcaggagtgctaccacggaaatggacagagttatcaaggcacatacttcattactgtcacaggaagaacctgccaagcttggtcatctatgacaccacactcgcatagtcggaccccagcatactacccaaatgctggcttgatcaagaactactgccgaaatccagatcctgtggcagccccttggtgttatacaacagatcccagtgtcaggtgggagtactgcaacctgacacgatgctcagatgcagaatggactgccttcgtccctccgaatgttattctggctccaagcctagaggctttttttgaacaagcactgactgaggaaacccccggggtacaggactgctactaccattatggacagagttaccgaggcacatactccaccactgtcacaggaagaacttgccaagcttggtcatctatgacaccacaccagcatagtcggaccccagaaaactacccaaatgctggcctgaccaggaactactgcaggaatccagatgctgagattcgcccttggtgttacaccatggatcccagtgtcaggtgggagtactgcaacctgacacaatgcctggtgacagaatcaagtgtccttgcaactctcacggtggtcccagatccaagcacagaggcttcttctgaagaagcaccaacggagcaaagccccggggtccaggattgctaccatggtgatggacagagttatcgaggctcattctctaccactgtcacaggaaggacatgtcagtcttggtcctctatgacaccacactggcatcagaggacaacagaatattatccaaatggtggcctgaccaggaactactgcaggaatccagatgctgagattagtccttggtgttataccatggatcccaatgtcagatgggagtactgcaacctgacacaatgtccagtgacagaatcaagtgtccttgcgacgtccacggctgtttctgaacaagcaccaacggagcaaagccccacagtccaggactgctaccatggtgatggacagagttatcgaggctcattctccaccactgttacaggaaggacatgtcagtcttggtcctctatgacaccacactggcatcagagaaccacagaatactacccaaatggtggcctgaccaggaactactgcaggaatccagatgctgagattcgcccttggtgttataccatggatcccagtgtcagatgggagtactgcaacctgacgcaatgtccagtgatggaatcaactctcctcacaactcccacggtggtccca

SEQ ID NO: 149546 - DNA, 1713 bp, Homo sapiens
  Payload ID: 9530
  Gene Symbol: LPA
  Gene Name: lipoprotein, Lp(a)
  ENST ID: ENST00000614786
  CDS Start-End: 1-1713
agtggcttgatcatgaactactgcaggaatccagatgctgtggcagctccttattgttatacgagggatcccggtgtcaggtgggagtactgcaacctgacgcaatgctcagacgcagaagggactgccgtcgcgcctccgactgttaccccggttccaagcctagaggctccttccgaacaagcaccgactgagcaaaggcctggggtgcaggagtgctaccatggtaatggacagagttatcgaggcacatactccaccactgtcacaggaagaacctgccaagcttggtcatctatgacaccacactcgcatagtcggaccccagaatactacccaaatgctggcttgatcatgaactactgcaggaatccagatgctgtggcagctccttattgttatacgagggatcccggtgtcaggtgggagtactgcaacctgacgcaatgctcagacgcagaagggactgccgtcgcgcctccgactgttaccccggttccaagcctagaggctccttccgaacaagcaccgactgagcagaggcctggggtgcaggagtgctaccacggtaatggacagagttatcgaggcacatactccaccactgtcactggaagaacctgccaagcttggtcatctatgacaccacactcgcatagtcggaccccagaatactacccaaatgctggcttgatcatgaactactgcaggaatccagatgctgtggcagctccttattgttatacgagggatcccggtgtcaggtgggagtactgcaacctgacgcaatgctcagacgcagaagggactgccgtcgcgcctccgactgttaccccggttccaagcctagaggctccttccgaacaagcaccgactgagcaaaggcctggggtgcaggagtgctaccatggtaatggacagagttatcgaggcacatactccaccactgtcacaggaagaacctgccaagcttggtcatctatgacaccacactcgcatagtcggaccccagaatactacccaaatgctggcttgatcatgaactactgcaggaatccagatgctgtggcagctccttattgttatacgagggatcccggtgtcaggtgggagtactgcaacctgacgcaatgctcagacgcagaagggactgccgtcgcgcctccgactgttaccccggttccaagcctagaggctccttccgaacaagcaccgactgagcaaaggcctggggtgcaggagtgctaccatggtaatggacagagttatcgaggcacatactccaccactgtcacaggaagaacctgccaagcttggtcatctatgacaccacactcgcatagtcggaccccagaatactacccaaatgctggcttgatcatgaactactgcaggaatccagatgctgtggcagctccttattgttatacgagggatcccggtgtcaggtgggagtactgcaacctgacgcaatgctcagacgcagaagggactgccgtcgcgcctccgactgttaccccggttccaagcctagaggctccttccgaacaagcaccgactgagcaaaggcctggggtgcaggagtgctaccatggtaatggacagagttatcgaggcacatactccaccactgtcacaggaagaacctgccaagcttggtcatctatgacaccacactcgcatagtcggaccccagaatactacccaaatgcg

SEQ ID NO: 149547 - DNA, 3970 bp, Homo sapiens
  Payload ID: 9531
  Gene Symbol: LOXHD1
  Gene Name: lipoxygenase homology domains 1
  Uniprot ID: Q8IVV2
  ENST ID: ENST00000300591
  CDS Start-End: 415-3759
agtacctcttcagtaacactgatactttgtggaggggttatgagagaattgcaggcagggccccagcacctagagcccatgggccagctgacccacaggaacaaacagagaatggcgttgagtggcagatgctgaggcacttggttcctggtgtggtctgcttcctcccgtgcatggagcagtgtgtgcattcacatggtgtgatccatatggccctcttcacacctaaatggtgggcaaatccgtcttcagtttctgacagtcactttggatttgcacagcaccagctcatagcagacagacaccttcaccatctatgccattgacctgggggccctgaccaagattcggattcgccacgacaacacaggcaacagagcaggctggttcctggacagaatagacattactgacatgaacaacgagatcacgtactactttccatgccaacgttggctggcagtggaggaagatgatggccagctgtccagggagctgttgccagtggatgagtcctatgtgctgccacagagcgaggagggtaggggaggcggtgacaacaaccccctcgacaacctggccctggagcagaaagataaatctaccacattctcagtgaccataaagactggggttaagaagaatgcgggcacagatgctaatgtcttcatcacactctttggcacacaggatgacactggaatgaccctcctgaagtcctccaagacaaacagcgataagtttgagagggacagcattgaaatcttcacggtggagacgctggatctgggagacctgtggaaagtccggcttggccatgacaacacaggcaaggccccaggctggtttgtagactgggtagaggtggatgccccatctcttgggaagtgcatgacgtttccctgtggccgctggctggccaaaaacgaagacgacgggtccatcatcagagacctcttccatgcagagcttcagacgaggctgtacacaccatttgttccttacgagatcaccctctacaccagtgatgtctttgctgctgggacagatgccaacatcttcatcatcatctatggctgcgatgccgtgtgcacccagcagaagtatctgtgtaccaacaagagggaacagaagcagttctttgagaggaagtctgcctcccgcttcatcgtagagttagaagatgtgggagaaatcattgaaaaaattcggattggccataataacacgggcatgaatcctgggtggcactgctctcacgtggacatccgcaggctcctcccggataaagacggtgcagagaccttgactttcccatgcgatcggtggcttgccacctctgaggatgacaaaaagaccattcgagaactggttccatatgacatcttcactgagaaatacatgaaagatgggtccttacggcaagtctacaaggaagtagaagagcctctggacattgtgctgtactcggtgcagatcttcacagggaacattcctggggcagggacggatgccaaggtgtacatcaccatctatggagacctcggggacactggggagcgataccttggcaagtcagagaaccggaccaacaagttcgagagaggaacggctgacaccttcatcatcgaggccgctgacctaggcgtcatctacaagatcaagctccgccatgacaactccaagtggtgcgcagactggtacgtggagaaggtggagatctggaatgacaccaacgaggacgagttcctgttcctatgcgggcgctggctctccctgaagaaggaggatgggcgactcgagaggctcttttacgagaaggagtacactggggaccgcagcagcaactgcagcagccctgctgacttctgggagatcgccctgagctccaagatggccgatgtcgacatcagcacagtgaccgggcccatggctgactacgttcaagagggcccaattattccctactatgtgtcagtcaccactgggaagcacaaggacgcggccactgacagccgagccttcatctttctcatcggggaggatgatgaacgtagtaagcgcatctggttggactacccccgagggaagaggggcttcagccgtggctctgtggaggagttctacgtcgcaggcttggatgtgggcatcatcaagaaaatagagctgggccatgacggggcctcccctgagagctgctggctggtggaagagttgtgtttggcagtgcccacccagggcaccaagtacatgttgaactgtaactgctggctggccaaggacagaggcgacggcatcacctcccgtgtcttcgacctcttggatgccatggtggtgaacattggggtgaaggttctctatgaaatgacggtgtggacaggggatgtggttggcgggggcactgactccaacatcttcatgaccctctacggcatcaacgggagcacagaggagatgcagctggacaaaaagaaagccaggtttgagcgggagcagaacgacaccttcatcatggagatcctagacattgctccattcaccaagatgcggatccggattgatggcctgggcagtcggccggagtggttcctggagaggatcctactgaagaacatgaacactggagacctgaccatgttctactatggagactggctgtcccagcggaagggcaagaagaccctggtgtgtgaaatgtgtgccgttatcgatgaggaagaaatgatggagtggacctcctacaccgtcgcagttaagaccagcgacatcctgggagcaggcactgatgccaacgtgttcatcatcatcttcggggagaacggggatagtgggacactggccctgaagcagtcggcaaactggaacaagtttgagcggaacaacacggacacattcaacttccctgacatgctgagcttgggccacctctgcaagctgagggtctggcacgacaacaaagggatatttcctggctggcatctgagctatgtcgatgtgaaggacaactcccgcgacgagaccttccacttccagtgtgactgctggctctccaagagtgagggtgacgggcagacggtccgcgactttgcctgtgccaacaacaagatctgtgatgagctggaagagaccacctacgagatcgtcatagaaacgggcaacggaggcgaaaccagggagaacgtctggctcatcctggagggcaggaagaaccgatccaaagagtttctcatggaaaattcttctaggcagcgggcctttaggaaggggaccacagacacgtttgagtttgacagcatctacttgggggacattgcctccctctgtgtgggccaccttgccagggaagaccggtttatccccaagagagaacttgcctggcatgtcaagaccatcaccatcaccgagatggagtacggcaatgtgtacttctttaactgtgactgcctcatccccctcaagaggaagaggaagtacttcaaggtattcgaggttaccaagacgacagagagctttgccagcaaggtccagagcctggtgcccgtcaagtacgaagtcatcgtgacaacaggctatgagccaggggcaggcactgatgccaacgtcttcgtgaccatctttggggccaacggagacacaggcaagcgggagctgaagcagaaaatgcgcaacctcttcgagcggggcagcacagaccgcttcttcctggagacgctggagctggtagtgaccaggctgggacttgctgcagagtgtggatgagaaattgagtcttcacccaggggatagaagtggagaagcagaggccatcaagatggtgtattttaagcaaaaactaattaacacttttccccaaaaaagctaggctaattaaattattaccaaccatatcctataaagaactcatcttagcatctgcttgctaagaagtgtatacttttccccagtttcaataaacccagtggcaagtgga

SEQ ID NO: 149548 - DNA, 1958 bp, Homo sapiens
  Payload ID: 9531
  Gene Symbol: LOXHD1
  Gene Name: lipoxygenase homology domains 1
  Uniprot ID: Q8IVV2
  ENST ID: ENST00000398686
  CDS Start-End: 221-1759
ctgcctcacagaggaagaaccgaggtgggggcttggtgaaggcacaccaggaagagcaggctgcgcctcaccctccagtggagacagagggcagacattctctttggagcacacctcaggctaaatggcaaaaccccaatctcaagtgaacatcatggaactaggggattgtctcacttctccagtggattgaggcagtgctccctctgttctctatgaaatgacggtgtggacaggggatgtggttggcgggggcactgactccaacatcttcatgaccctctacggcatcaacgggagcacagaggagatgcagctggacaaaaagaaagccaggtttgagcgggagcagaacgacaccttcatcatggagatcctagacattgctccattcaccaagatgcggatccggattgatggcctgggcagtcggccggagtggttcctggagaggatcctactgaagaacatgaacactggagacctgaccatgttctactatggagactggctgtcccagcggaagggcaagaagaccctggtgtgtgaaatgtgtgccgttatcgatgaggaagaaatgatggagtggacctcctacaccgtcgcagttaagaccagcgacatcctgggagcaggcactgatgccaacgtgttcatcatcatcttcggggagaacggggatagtgggacactggccctgaagcagtcggcaaactggaacaagtttgagcggaacaacacggacacattcaacttccctgacatgctgagcttgggccacctctgcaagctgagggtctggcacgacaacaaagggatatttcctggctggcatctgagctatgtcgatgtgaaggacaactcccgcgacgagaccttccacttccagtgtgactgctggctctccaagagtgagggtgacgggcagacggtccgcgactttgcctgtgccaacaacaagatctgtgatgagctggaagagaccacctacgagatcgtcatagaaacgggcaacggaggcgaaaccagggagaacgtctggctcatcctggagggcaggaagaaccgatccaaagagtttctcatggaaaattcttctaggcagcgggcctttaggaaggggaccacagacacgtttgagtttgacagcatctacttgggggacattgcctccctctgtgtgggccaccttgccagggaagaccggtttatccccaagagagaacttgcctggcatgtcaagaccatcaccatcaccgagatggagtacggcaatgtgtacttctttaactgtgactgcctcatccccctcaagaggaagaggaagtacttcaaggtattcgaggttaccaagacgacagagagctttgccagcaaggtccagagcctggtgcccgtcaagtacgaagtcatcgtgacaacaggctatgagccaggggcaggcactgatgccaacgtcttcgtgaccatctttggggccaacggagacacaggcaagcgggagctgaagcagaaaatgcgcaacctcttcgagcggggcagcacagaccgcttcttcctggagacgctggagctgggtgagctgcgcaaggtgcgcctggagcacgacagcagtggctactgctcaggctggctggtggagaaggtggaggtcaccaacaccagcaccggcgtggccaccatcttcaactgtggcaggtggctggacaagaagcggggggatggactcacctggagagacctcttcccttctgtctgaggggctagggcccccaccctctcactgagatgccccaatctcacatttctgccctccaccttggcggtcagcagcccttcaaagcctctagcattggcactgggggctagcagtccactgagaacttcatggggtcctgctccccaccctacccccagtttattgaacctacagtgataataattagcatgtgtcataa

SEQ ID NO: 149549 - DNA, 1824 bp, Homo sapiens
  Payload ID: 9531
  Gene Symbol: LOXHD1
  Gene Name: lipoxygenase homology domains 1
  Uniprot ID: Q8IVV2
  ENST ID: ENST00000398705
  CDS Start-End: 206-1579
agaaccgaggtgggggcttggtgaaggcacaccaggaagagcaggctgcgcctcaccctccagtggagacagagggcagacattctctttggagcacacctcaggctaaatggcaaaaccccaatctcaagtgaacatcatggaactaggggattgtctcacttctccagtggattgaggcagtgctccctctgttctctatgaaatgacggtgtggacaggggatgtggttggcgggggcactgactccaacatcttcatgaccctctacggcatcaacgggagcacagaggagatgcagctggacaaaaagaaagccaggtttgagcgggagcagaacgacaccttcatcatggagatcctagacattgctccattcaccaagatgcggatccggattgatggcctgggcagtcggccggagtggttcctggagaggatcctactgaagaacatgaacactggagacctgaccatgttctactatggagactggctgtcccagcggaagggcaagaagaccctggtgtgtgaaatgtgtgccgttatcgatgaggaagaaatgatggagtggacctcctacaccgtcgcagttaagaccagcgacatcctgggagcaggcactgatgccaacgtgttcatcatcatcttcggggagaacggggatagtgggacactggccctgaagcagtcggcaaactggaacaagtttgagcggaacaacacggacacattcaacttccctgacatgctgagcttgggccacctctgcaagctgagggtctggcacgacaacaaagggatatttcctggctggcatctgagctatgtcgatgtgaaggacaactcccgcgacgagaccttccacttccagtgtgactgctggctctccaagagtgagggtgacgggcagacggtccgcgactttgcctgtgccaacaacaagatctgtgatgagctggaagagaccacctacgagatcgtcatagaaacgggcaacggaggcgaaaccagggagaacgtctggctcatcctggagggcaggaagaaccgatccaaagagtttctcatggaaaattcttctaggcagcgggcctttaggaaggggaccacagacacgtttgagtttgacagcatctacttgggggacattgcctccctctgtgtgggccaccttgccagggaagaccggtttatccccaagagagaacttgcctggcatgtcaagaccatcaccatcaccgagatggagtacggcaatgtgtacttctttaactgtgactgcctcatccccctcaagaggaagaggaagtacttcaaggtattcgaggttaccaagacgacagagagctttgccagcaaggtccagagcctggtgcccgtcaagtacgaagtcatcgtgacaacaggctatgagccaggggcaggcactgatgccaacgtcttcgtgaccatctttggggccaacggagacacaggcaagcgggagctgaagcagaaaatgcgcaacctcttcgagcggggcagcacagaccgcttcttcctggagacgctggagctgggtgagctgcgcaagtagtgaccaggctgggacttgctgcagagtgtggatgagaaattgagtcttcacccaggggatagaagtggagaagcagaggccatcaagatggtgtattttaagcaaaaactaattaacacttttccccaaaaaagctaggctaattaaattattaccaaccatatcctataaagaactcatcttagcatctgcttgctaagaagtgtatacttttccccagtttcaataaacccagtggcaagtgg

SEQ ID NO: 149550 - DNA, 6226 bp, Homo sapiens
  Payload ID: 9531
  Gene Symbol: LOXHD1
  Gene Name: lipoxygenase homology domains 1
  ENST ID: ENST00000441551
  CDS Start-End: 1-6204
atgatgccccagaagaaaaggcggaggaagaaggacatcgacttcctggccctgtacgaagcggagctgctgaactacgcctcggaggacgacgagggggagctggaacacgagtactacaaggccagagtgtatgaagtggtcacagccacgggggatgttcgcggtgcagggacggatgccaatgtcttcatcacgctttttggagagaatgggctctctcccaagctccagctcaccagcaagagcaagtctgcctttgagaagggcaacgtcgatgtgttccgggtgagaaccaacaatgtgggcctcatctataaagtcaggattgagcatgacaacacgggcttgaatgccagctggtacctggaccatgtgattgtgaccgacatgaagaggcctcatctccgttactacttcaactgcaacaactggctgagcaaggtggaaggtgaccgccagtggtgccgtgacctgctggccagcttcaaccccatggacatgcccagaggtaataagtatgaagtcaaggtatacactggtgatgtaattggtgcagggacagatgctgatgtcttcatcaatatttttggagagtatggagacacaggggagcgtaggctagaaaatgaaaaggacaactttgaaaagggagctgaagacaggttcatcctggatgccccggatttggggcagctgatgaagatcaatgttggccacaacaataaggggggctctgcaggttggttcctgtcccagatagtcattgaagatattgggaacaaaagaaaatatgacttcccccttaaccgctggctggccttggacgaagacgatggcaaaatccaaagggatatcttagtgggcggagctgagaccacagctattacgtatattgtcaccgtcttcactggggatgtccggggggctggtaccaaatccaaaatctacttggtcatgtatggggccagagggaataagaacagtgggaaaatcttcctggagggcggcgtgtttgaccgaggccgcacggacatcttccacatcgagctggctgtcctccttagccccctgagtcgggtctccgtcgggcatggcaatgtgggtgtcaacagaggctggttctgtgagaaggtggtgattctgtgccccttcactggtatccagcagaccttcccttgtagcaactggctggatgagaagaaagcggatgggttgattgagaggcagctctatgagatggtgtctctcaggaagaagcggctgaaaaaattcccttggtccctgtgggtctggacaaccgacctaaagaaagctggtaccaactctcccatcttcatccagatttatgggcagaaggggcggacagatgagattctcctgaatcccaacaacaagtggttcaaacccggcataatcgagaagtttaggattgagctcccggatcttggcaggttttataagattcgagtatggcatgataaaaggagttctggttctggatggcatttagaaaggatgaccctgatgaacactctgaacaaagacaagtacaacttcaattgcaaccgctggctggatgccaatgaggatgacaatgagatagtgagggaaatgactgcagaaggcccaacagtgcgcaggatcatgggcatggcccggtaccatgtgactgtgtgcacaggtgaacttgaaggtgctgggaccgatgccaacgtctatctctgcctttttggtgatgtgggggacacgggggaacggctgctctacaactgcaggaataacacagacctgtttgaaaagggcaatgctgacgagttcactatcgagtctgtcaccatgcggaatgtgaggcgggtgaggatcagacacgatggcaaaggctccggcagcggctggtacctggacagagtgctggtgagagaggaggggcagcctgagagcgacaacgtggagttcccatgtctcaggtggttggacaaggataaggatgatgggcagctggtccgagagttgctacccagtgacagcagcgcgacactgaagaactttcgctatcacatcagcttgaagactggggatgtctctggggccagcacggattctagagtctacatcaagctctatggggataaatctgacaccatcaagcaagttcttcttgtctctgacaacaacctcaaagactactttgaacgtggccgggtggatgagttcaccctcgagaccctgaacattggaaatatcaaccggctggtgattgggcatgacagcactggcatgcatgccagctggttcctgggcagcgttcagatccgtgtgccccgtcaaggcaagcagtacacctttcccgccaaccgctggctggacaagaaccaggctgacgggcgcctggaggtggagctgtatcccagcgaggtggtggagatccagaaattggtccactatgaggttgagatttggacaggagatgtgggtggcgcaggcaccagtgcccgagtctacatgcagatctatggagagaaaggcaagacagaagtgctcttcctctccagccgctcaaaagtttttgaacgggcgtccaaggacacattccagacagacaccttcaccatctatgccattgacctgggggccctgaccaagattcggattcgccacgacaacacaggcaacagagcaggctggttcctggacagaatagacattactgacatgaacaacgagatcacgtactactttccatgccaacgttggctggcagtggaggaagatgatggccagctgtccagggagctgttgccagtggatgagtcctatgtgctgccacagagcgaggagggtaggggaggcggtgacaacaaccccctcgacaacctggccctggagcagaaagataaatctaccacattctcagtgaccataaagactggggttaagaagaatgcgggcacagatgctaatgtcttcatcacactctttggcacacaggatgacactggaatgaccctcctgaagtcctccaagacaaacagcgataagtttgagagggacagcattgaaatcttcacggtggagacgctggatctgggagacctgtggaaagtccggcttggccatgacaacacaggcaaggccccaggctggtttgtagactgggtagaggtggatgccccatctcttgggaagtgcatgacgtttccctgtggccgctggctggccaaaaacgaagacgacgggtccatcatcagagacctcttccatgcagagcttcagacgaggctgtacacaccatttgttccttacgagatcaccctctacaccagtgatgtctttgctgctgggacagatgccaacatcttcatcatcatctatggctgcgatgccgtgtgcacccagcagaagtatctgtgtaccaacaagagggaacagaagcagttctttgagaggaagtctgcctcccgcttcatcgtagagttagaagatgtgggagaaatcattgaaaaaattcggattggccataataacacgggcatgaatcctgggtggcactgctctcacgtggacatccgcaggctcctcccggataaagacggtgcagagaccttgactttcccatgcgatcggtggcttgccacctctgaggatgacaaaaagaccattcgagaactggttccatatgacatcttcactgagaaatacatgaaagatgggtccttacggcaagtctacaaggaagtagaagagcctctggacattgtgctgtactcggtgcagatcttcacagggaacattcctggggcagggacggatgccaaggtgtacatcaccatctatggagacctcggggacactggggagcgataccttggcaagtcagagaaccggaccaacaagttcgagagaggaacggctgacaccttcatcatcgaggccgctgacctaggcgtcatctacaagatcaagctccgccatgacaactccaagtggtgcgcagactggtacgtggagaaggtggagatctggaatgacaccaacgaggacgagttcctgttcctatgcgggcgctggctctccctgaagaaggaggatgggcgactcgagaggctcttttacgagaaggagtacactggggaccgcagcagcaactgcagcagccctgctgacttctgggagatcgccctgagctccaagatggccgatgtcgacatcagcacagtgaccgggcccatggctgactacgttcaagagggcccaattattccctactatgtgtcagtcaccactgggaagcacaaggacgcggccactgacagccgagccttcatctttctcatcggggaggatgatgaacgtagtaagcgcatctggttggactacccccgagggaagaggggcttcagccgtggctctgtggaggagttctacgtcgcaggcttggatgtgggcatcatcaagaaaatagagctgggccatgacggggcctcccctgagagctgctggctggtggaagagttgtgtttggcagtgcccacccagggcaccaagtacatgttgaactgtaactgctggctggccaaggacagaggcgacggcatcacctcccgtgtcttcgacctcttggatgccatggtggtgaacattggggtgaaggttctctatgaaatgacggtgtggacaggggatgtggttggcgggggcactgactccaacatcttcatgaccctctacggcatcaacgggagcacagaggagatgcagctggacaaaaagaaagccaggtttgagcgggagcagaacgacaccttcatcatggagatcctagacattgctccattcaccaagatgcggatccggattgatggcctgggcagtcggccggagtggttcctggagaggatcctactgaagaacatgaacactggagacctgaccatgttctactatggagactggctgtcccagcggaagggcaagaagaccctggtgtgtgaaatgtgtgccgttatcgatgaggaagaaatgatggagtggacctcctacaccgtcgcagttaagaccagcgacatcctgggagcaggcactgatgccaacgtgttcatcatcatcttcggggagaacggggatagtgggacactggccctgaagcagtcggcaaactggaacaagtttgagcggaacaacacggacacattcaacttccctgacatgctgagcttgggccacctctgcaagctgagggtctggcacgacaacaaagggatatttcctggctggcatctgagctatgtcgatgtgaaggacaactcccgcgacgagaccttccacttccagtgtgactgctggctctccaagagtgagggtgacgggcagacggtccgcgactttgcctgtgccaacaacaagatctgtgatgagctggaagagaccacctacgagatcgtcatagaaacgggcaacggaggcgaaaccagggagaacgtctggctcatcctggagggcaggaagaaccgatccaaagagtttctcatggaaaattcttctaggcagcgggcctttaggaaggggaccacagacacgtttgagtttgacagcatctacttgggggacattgcctccctctgtgtgggccaccttgccagggaagaccggtttatccccaagagagaacttgcctggcatgtcaagaccatcaccatcaccgagatggagtacggcaatgtgtacttctttaactgtgactgcctcatccccctcaagaggaagaggaagtacttcaaggtattcgaggttaccaagacgacagagagctttgccagcaaggtccagagcctggtgcccgtcaagtacgaagtcatcgtgacaacaggctatgagccaggggcaggcactgatgccaacgtcttcgtgaccatctttggggccaacggagacacaggcaagcgggagctgaagcagaaaatgcgcaacctcttcgagcggggcagcacagaccgcttcttcctggagacgctggagctgggtgagctgcgcaaggtgcgcctggagcacgacagcagtggctactgctcaggctggctggtggagaaggtggaggtcaccaacaccagcaccggcgtggccaccatcttcaactgtggcaggtggctggacaagaagcggggggatggactcacctggagagacctcttcccttctgtctgaggggctagggcccccaccctct

SEQ ID NO: 149551 - DNA, 675 bp, Homo sapiens
  Payload ID: 9531
  Gene Symbol: LOXHD1
  Gene Name: lipoxygenase homology domains 1
  ENST ID: ENST00000414184
  CDS Start-End: 135-675
cagcagtagagtggtgataggaaagatggcatctgggatactgtgaatctctgagtctcacggtgcagccaatggtgtccacacaataccctccttaactgaaaaagcctggagggcaagaggttctctatgaaatgacggtgtggacaggggatgtggttggcgggggcactgactccaacatcttcatgaccctctacggcatcaacgggagcacagaggagatgcagctggacaaaaagaaagccaggtttgagcgggagcagaacgacaccttcatcatggagatcctagacattgctccattcaccaagatgcggatccggattgatggcctgggcagtcggccggagtggttcctggagaggatcctactgaagaacatgaacactggagacctgaccatgttctactatggagactggctgtcccagcggaagggcaagaagaccctggtgtgtgaaatgtgtgccgttatcgatgaggaagaaatgatggagtggacctcctacaccgtcgcagttaagaccagcgacatcctgggagcaggcactgatgccaacgtgttcatcatcatcttcggggagaacggggatagtgggacactggccctgaagcagtcggcaaactggaacaagtttgagcggaacaacacggacacattcaacttccctg

SEQ ID NO: 149552 - DNA, 556 bp, Homo sapiens
  Payload ID: 9531
  Gene Symbol: LOXHD1
  Gene Name: lipoxygenase homology domains 1
  ENST ID: ENST00000419859
  CDS Start-End: 488-556
actttgtggaggggttatgagagaattgcaggcagggccccagcacctagagcccatgggccagctgacccacaggaacaaacagagaatggcgttgagtggcagatgctgaggcacttggtagggatgcgggggttcaagaggaagtcctcgccgcaagatggtgtcttgggggaaaactagggggagggagcaacttaaactgggccttggcaggttcctggtgtggtctgcttcctcccgtgcatggagcagtgtgtgcattcacatggtgtgatccatatggccctcttcacacctaaatggtgggcaaatccgtcttcagtttctgacagtcactttggatttgcacagcaccagctcatagcagacagacaccttcaccatctatgccattgacctgggggccctgaccaagattcggattcgccacgacaacacaggcaacagagcaggctggttcctggacagaatagacattactgacatgaacaacgagatcacgtactactttccatgccaacgttggctggcagtggaggaagatgatggccag

SEQ ID NO: 149553 - DNA, 560 bp, Homo sapiens
  Payload ID: 9531
  Gene Symbol: LOXHD1
  Gene Name: lipoxygenase homology domains 1
  ENST ID: ENST00000452425
  CDS Start-End: 390-560
attgttcaccaaaggatccaccatcaacagcagtagagtggtgataggaaagatggcatctgggatactgtgaatctctgagtctcacggtgcagccaatggtgtccacacaataccctccttaactgaaaaagcctggagggcaagaggtctgagcttcggtcctggctccatctctaactggtcaaatgacctgggataaattatataaacgcacaggtcaggccaggcaggaggcagatgcctggtgctaggatctgaggacacacagccatttggtggcccagaagcctctgtttcacctgaccctgtgggtttctctttttggctcatggctatggggtcaacagaaggccccagcccttatctctggtactgaatcaaaaccaatgggcttcttggaccaggtcagaagctgtcccacaaaggttctctatgaaatgacggtgtggacaggggatgtggttggcgggggcactgactccaacatcttcatgaccctctacggcatcaacgggagcacagaggagatgcagctggacaaaaagaaagccaggttt

SEQ ID NO: 149554 - DNA, 1358 bp, Homo sapiens
  Payload ID: 9531
  Gene Symbol: LOXHD1
  Gene Name: lipoxygenase homology domains 1
  ENST ID: ENST00000536111
  CDS Start-End: 192-1112
gaaccagggtcctgacctggagtctgacctctgccagaaactcatcaggtcaccctggacaagtcatgccatctttatgggcttttgtttcctcttctgataaatgggcttaatgttgccagcctaacttcttaagatgttctgaaaatccaaggcatttaagcttggaaaggaaaaagtgccacagaaccatgaggctggggacaaactgtgaacatccccagcttccccttgcagctccatcagggtactactttccatgccaacgttggctggcagtggaggaagatgatggccagctgtccagggagctgttgccagtggatgagtcctatgtgctgccacagagcgaggagggtaggggaggcggtgacaacaaccccctcgacaacctggccctggagcagaaagataaatctaccacattctcagtgaccataaagactggggttaagaagaatgcgggcacagatgctaatgtcttcatcacactctttggcacacaggatgacactggaatgaccctcctgaagtcctccaagacaaacagcgataagtttgagagggacagcattgaaatcttcacggtggagacgctggatctgggagacctgtggaaagtccggcttggccatgacaacacaggcaaggccccaggctggtttgtagactgggtagaggtggatgccccatctcttgggaagtgcatgacgtttccctgtggccgctggctggccaaaaacgaagacgacgggtccatcatcagagacctcttccatgcagagcttcagacgaggctgtacacaccatttgttccttacgagatcaccctctacaccagtgatgtctttgctgctgggacagatgccaacatcttcatcatcatctatggctgcgatgccgtgtgcacccagcagaagtatctgtgtaccaacaagagggaacagaagcagttctttgagaggaagtctgcctcccgcttcatcgtagagttagaagatgtgggagaaatcattgaaaaaattcggattggccataataacacgggcatgaatcctgggtggcactgctctcacgtggacatccgcaggctcctcccggataaagactagagatggggtttcaccatgttggccaagctggtcttgaaatcctgacatcagggtgcagagaccttgactttcccatgcgatcggtggcttgccacctctgaggatgacaaaaagaccattcgagaactggttccatatgacatcttcactgagaaatacatgaaagatgggtccttacggcaagtctacaaggaagtagaagagcctctggacattgtgctgtactcggtgcagatcttcacaggg

SEQ ID NO: 149555 - DNA, 6848 bp, Homo sapiens
  Payload ID: 9531
  Gene Symbol: LOXHD1
  Gene Name: lipoxygenase homology domains 1
  ENST ID: ENST00000536736
  CDS Start-End: 1-6636
atgatgccccagaagaaaaggcggaggaagaaggacatcgacttcctggccctgtacgaagcggagctgctgaactacgcctcggaggacgacgagggggagctggaacacgagtactacaaggccagagtgtatgaagtggtcacagccacgggggatgttcgcggtgcagggacggatgccaatgtcttcatcacgctttttggagagaatgggctctctcccaagctccagctcaccagcaagagcaagtctgcctttgagaagggcaacgtcgatgtgttccgggtgagaaccaacaatgtgggcctcatctataaagtcaggattgagcatgacaacacgggcttgaatgccagctggtacctggaccatgtgattgtgaccgacatgaagaggcctcatctccgttactacttcaactgcaacaactggctgagcaaggtggaaggtgaccgccagtggtgccgtgacctgctggccagcttcaaccccatggacatgcccagaggtaataagtatgaagtcaaggtatacactggtgatgtaattggtgcagggacagatgctgatgtcttcatcaatatttttggagagtatggagacacaggggagcgtaggctagaaaatgaaaaggacaactttgaaaagggagctgaagacaggttcatcctggatgccccggatttggggcagctgatgaagatcaatgttggccacaacaataaggggggctctgcaggttggttcctgtcccagatagtcattgaagatattgggaacaaaagaaaatatgacttcccccttaaccgctggctggccttggacgaagacgatggcaaaatccaaagggatatcttagtgggcggagctgagaccacagctattacgtatattgtcaccgtcttcactggggatgtccggggggctggtaccaaatccaaaatctacttggtcatgtatggggccagagggaataagaacagtgggaaaatcttcctggagggcggcgtgtttgaccgaggccgcacggacatcttccacatcgagctggctgtcctccttagccccctgagtcgggtctccgtcgggcatggcaatgtgggtgtcaacagaggctggttctgtgagaaggtggtgattctgtgccccttcactggtatccagcagaccttcccttgtagcaactggctggatgagaagaaagcggatgggttgattgagaggcagctctatgagatggtgtctctcaggaagaagcggctgaaaaaattcccttggtccctgtgggtctggacaaccgacctaaagaaagctggtaccaactctcccatcttcatccagatttatgggcagaaggggcggacagatgagattctcctgaatcccaacaacaagtggttcaaacccggcataatcgagaagtttaggattgagctcccggatcttggcaggttttataagattcgagtatggcatgataaaaggagttctggttctggatggcatttagaaaggatgaccctgatgaacactctgaacaaagacaagtacaacttcaattgcaaccgctggctggatgccaatgaggatgacaatgagatagtgagggaaatgactgcagaaggcccaacagtgcgcaggatcatgggcatggcccggtaccatgtgactgtgtgcacaggtgaacttgaaggtgctgggaccgatgccaacgtctatctctgcctttttggtgatgtgggggacacgggggaacggctgctctacaactgcaggaataacacagacctgtttgaaaagggcaatgctgacgagttcactatcgagtctgtcaccatgcggaatgtgaggcgggtgaggatcagacacgatggcaaaggctccggcagcggctggtacctggacagagtgctggtgagagaggaggggcagcctgagagcgacaacgtggagttcccatgtctcaggtggttggacaaggataaggatgatgggcagctggtccgagagttgctacccagtgacagcagcgcgacactgaagaactttcgctatcacatcagcttgaagactggggatgtctctggggccagcacggattctagagtctacatcaagctctatggggataaatctgacaccatcaagcaagttcttcttgtctctgacaacaacctcaaagactactttgaacgtggccgggtggatgagttcaccctcgagaccctgaacattggaaatatcaaccggctggtgattgggcatgacagcactggcatgcatgccagctggttcctgggcagcgttcagatccgtgtgccccgtcaaggcaagcagtacacctttcccgccaaccgctggctggacaagaaccaggctgacgggcgcctggaggtggagctgtatcccagcgaggtggtggagatccagaaattggtccactatgaggttgagatttggacaggagatgtgggtggcgcaggcaccagtgcccgagtctacatgcagatctatggagagaaaggcaagacagaagtgctcttcctctccagccgctcaaaagtttttgaacgggcgtccaaggacacattccagcttgaggcggccgacgtgggcgaggtctataagctccggctcgggcacacgggcgagggctttgggcccagctggttcgtggacaccgtgtggctgcggcacctggtggtgcgggaggtggacctcacgccggaggaggaggcccggaagaagaaggagaaggacaagctgcggcagctgctcaagaaggagcggctgaaggccaagctgcagaggaagaagaagaagaggaagggcagcgacgaagaggacgagggggaggaagaggagtcgtcctcatcagaggagtcctcgtcagaggaggaggagatggaagaagaggaggaagaggaggagtttgggccggggatgcaggaggtgattgagcagcacaagttcgaagcccaccgctggctggcccggggcaaggaggacaacgaacttgtcgtggagttggtgccagctggcaagccgggtcctgagcgaaacacctatgaggttcaggtggtcacggggaatgtgcccaaggccggcactgatgctaacgtctacctaaccatctacggcgaggagtatggagacacgggcgaacgacccctgaagaagtcagacaagtccaacaaatttgagcaggggcagacagacaccttcaccatctatgccattgacctgggggccctgaccaagattcggattcgccacgacaacacaggcaacagagcaggctggttcctggacagaatagacattactgacatgaacaacgagatcacgtactactttccatgccaacgttggctggcagtggaggaagatgatggccagctgtccagggagctgttgccagtggatgagtcctatgtgctgccacagagcgaggagggtaggggaggcggtgacaacaaccccctcgacaacctggccctggagcagaaagataaatctaccacattctcagtgaccataaagactggggttaagaagaatgcgggcacagatgctaatgtcttcatcacactctttggcacacaggatgacactggaatgaccctcctgaagtcctccaagacaaacagcgataagtttgagagggacagcattgaaatcttcacggtggagacgctggatctgggagacctgtggaaagtccggcttggccatgacaacacaggcaaggccccaggctggtttgtagactgggtagaggtggatgccccatctcttgggaagtgcatgacgtttccctgtggccgctggctggccaaaaacgaagacgacgggtccatcatcagagacctcttccatgcagagcttcagacgaggctgtacacaccatttgttccttacgagatcaccctctacaccagtgatgtctttgctgctgggacagatgccaacatcttcatcatcatctatggctgcgatgccgtgtgcacccagcagaagtatctgtgtaccaacaagagggaacagaagcagttctttgagaggaagtctgcctcccgcttcatcgtagagttagaagatgtgggagaaatcattgaaaaaattcggattggccataataacacgggcatgaatcctgggtggcactgctctcacgtggacatccgcaggctcctcccggataaagacggtgcagagaccttgactttcccatgcgatcggtggcttgccacctctgaggatgacaaaaagaccattcgagaactggttccatatgacatcttcactgagaaatacatgaaagatgggtccttacggcaagtctacaaggaagtagaagagcctctggacattgtgctgtactcggtgcagatcttcacagggaacattcctggggcagggacggatgccaaggtgtacatcaccatctatggagacctcggggacactggggagcgataccttggcaagtcagagaaccggaccaacaagttcgagagaggaacggctgacaccttcatcatcgaggccgctgacctaggcgtcatctacaagatcaagctccgccatgacaactccaagtggtgcgcagactggtacgtggagaaggtggagatctggaatgacaccaacgaggacgagttcctgttcctatgcgggcgctggctctccctgaagaaggaggatgggcgactcgagaggctcttttacgagaaggagtacactggggaccgcagcagcaactgcagcagccctgctgacttctgggagatcgccctgagctccaagatggccgatgtcgacatcagcacagtgaccgggcccatggctgactacgttcaagagggcccaattattccctactatgtgtcagtcaccactgggaagcacaaggacgcggccactgacagccgagccttcatctttctcatcggggaggatgatgaacgtagtaagcgcatctggttggactacccccgagggaagaggggcttcagccgtggctctgtggaggagttctacgtcgcaggcttggatgtgggcatcatcaagaaaatagaggttctctatgaaatgacggtgtggacaggggatgtggttggcgggggcactgactccaacatcttcatgaccctctacggcatcaacgggagcacagaggagatgcagctggacaaaaagaaagccaggtttgagcgggagcagaacgacaccttcatcatggagatcctagacattgctccattcaccaagatgcggatccggattgatggcctgggcagtcggccggagtggttcctggagaggatcctactgaagaacatgaacactggagacctgaccatgttctactatggagactggctgtcccagcggaagggcaagaagaccctggtgtgtgaaatgtgtgccgttatcgatgaggaagaaatgatggagtggacctcctacaccgtcgcagttaagaccagcgacatcctgggagcaggcactgatgccaacgtgttcatcatcatcttcggggagaacggggatagtgggacactggccctgaagcagtcggcaaactggaacaagtttgagcggaacaacacggacacattcaacttccctgacatgctgagcttgggccacctctgcaagctgagggtctggcacgacaacaaagggatatttcctggctggcatctgagctatgtcgatgtgaaggacaactcccgcgacgagaccttccacttccagtgtgactgctggctctccaagagtgagggtgacgggcagacggtccgcgactttgcctgtgccaacaacaagatctgtgatgagctggaagagaccacctacgagatcgtcatagaaacgggcaacggaggcgaaaccagggagaacgtctggctcatcctggagggcaggaagaaccgatccaaagagtttctcatggaaaattcttctaggcagcgggcctttaggaaggggaccacagacacgtttgagtttgacagcatctacttgggggacattgcctccctctgtgtgggccaccttgccagggaagaccggtttatccccaagagagaacttgcctggcatgtcaagaccatcaccatcaccgagatggagtacggcaatgtgtacttctttaactgtgactgcctcatccccctcaagaggaagaggaagtacttcaaggtattcgaggttaccaagacgacagagagctttgccagcaaggtccagagcctggtgcccgtcaagtacgaagtcatcgtgacaacaggctatgagccaggggcaggcactgatgccaacgtcttcgtgaccatctttggggccaacggagacacaggcaagcgggagctgaagcagaaaatgcgcaacctcttcgagcggggcagcacagaccgcttcttcctggagacgctggagctgggtgagctgcgcaaggtgcgcctggagcacgacagcagtggctactgctcaggctggctggtggagaaggtggaggtcaccaacaccagcaccggcgtggccaccatcttcaactgtggcaggtggctggacaagaagcggggggatggactcacctggagagacctcttcccttctgtctgaggggctagggcccccaccctctcactgagatgccccaatctcacatttctgccctccaccttggcggtcagcagcccttcaaagcctctagcattggcactgggggctagcagtccactgagaacttcatggggtcctgctccccaccctacccccagtttattgaacctacagtgataataattagcatgtgtcataatctgtggctgccc

SEQ ID NO: 149556 - DNA, 3755 bp, Homo sapiens
  Payload ID: 9531
  Gene Symbol: LOXHD1
  Gene Name: lipoxygenase homology domains 1
  ENST ID: ENST00000582408
  CDS Start-End: 241-3543
gatactttgtggaggggttatgagagaattgcaggcagggccccagcacctagagcccatgggccagctgacccacaggaacaaacagagaatggcgttgagtggcagatgctgaggcacttgacagacaccttcaccatctatgccattgacctgggggccctgaccaagattcggattcgccacgacaacacaggcaacagagcaggctggttcctggacagaatagacattactgacatgaacaacgagatcacgtactactttccatgccaacgttggctggcagtggaggaagatgatggccagctgtccagggagctgttgccagtggatgagtcctatgtgctgccacagagcgaggagggtaggggaggcggtgacaacaaccccctcgacaacctggccctggagcagaaagataaatctaccacattctcagtgaccataaagactggggttaagaagaatgcgggcacagatgctaatgtcttcatcacactctttggcacacaggatgacactggaatgaccctcctgaagtcctccaagacaaacagcgataagtttgagagggacagcattgaaatcttcacggtggagacgctggatctgggagacctgtggaaagtccggcttggccatgacaacacaggcaaggccccaggctggtttgtagactgggtagaggtggatgccccatctcttgggaagtgcatgacgtttccctgtggccgctggctggccaaaaacgaagacgacgggtccatcatcagagacctcttccatgcagagcttcagacgaggctgtacacaccatttgttccttacgagatcaccctctacaccagtgatgtctttgctgctgggacagatgccaacatcttcatcatcatctatggctgcgatgccgtgtgcacccagcagaagtatctgtgtaccaacaagagggaacagaagcagttctttgagaggaagtctgcctcccgcttcatcgtagagttagaagatgtgggagaaatcattgaaaaaattcggattggccataataacacgggcatgaatcctgggtggcactgctctcacgtggacatccgcaggctcctcccggataaagacggtgcagagaccttgactttcccatgcgatcggtggcttgccacctctgaggatgacaaaaagaccattcgagaactggttccatatgacatcttcactgagaaatacatgaaagatgggtccttacggcaagtctacaaggaagtagaagagcctctggacattgtgctgtactcggtgcagatcttcacagggaacattcctggggcagggacggatgccaaggtgtacatcaccatctatggagacctcggggacactggggagcgataccttggcaagtcagagaaccggaccaacaagttcgagagaggaacggctgacaccttcatcatcgaggccgctgacctaggcgtcatctacaagatcaagctccgccatgacaactccaagtggtgcgcagactggtacgtggagaaggtggagatctggaatgacaccaacgaggacgagttcctgttcctatgcgggcgctggctctccctgaagaaggaggatgggcgactcgagaggctcttttacgagaaggagtacactggggaccgcagcagcaactgcagcagccctgctgacttctgggagatcgccctgagctccaagatggccgatgtcgacatcagcacagtgaccgggcccatggctgactacgttcaagagggcccaattattccctactatgtgtcagtcaccactgggaagcacaaggacgcggccactgacagccgagccttcatctttctcatcggggaggatgatgaacgtagtaagcgcatctggttggactacccccgagggaagaggggcttcagccgtggctctgtggaggagttctacgtcgcaggcttggatgtgggcatcatcaagaaaatagaggttctctatgaaatgacggtgtggacaggggatgtggttggcgggggcactgactccaacatcttcatgaccctctacggcatcaacgggagcacagaggagatgcagctggacaaaaagaaagccaggtttgagcgggagcagaacgacaccttcatcatggagatcctagacattgctccattcaccaagatgcggatccggattgatggcctgggcagtcggccggagtggttcctggagaggatcctactgaagaacatgaacactggagacctgaccatgttctactatggagactggctgtcccagcggaagggcaagaagaccctggtgtgtgaaatgtgtgccgttatcgatgaggaagaaatgatggagtggacctcctacaccgtcgcagttaagaccagcgacatcctgggagcaggcactgatgccaacgtgttcatcatcatcttcggggagaacggggatagtgggacactggccctgaagcagtcggcaaactggaacaagtttgagcggaacaacacggacacattcaacttccctgacatgctgagcttgggccacctctgcaagctgagggtctggcacgacaacaaagggatatttcctggctggcatctgagctatgtcgatgtgaaggacaactcccgcgacgagaccttccacttccagtgtgactgctggctctccaagagtgagggtgacgggcagacggtccgcgactttgcctgtgccaacaacaagatctgtgatgagctggaagagaccacctacgagatcgtcatagaaacgggcaacggaggcgaaaccagggagaacgtctggctcatcctggagggcaggaagaaccgatccaaagagtttctcatggaaaattcttctaggcagcgggcctttaggaaggggaccacagacacgtttgagtttgacagcatctacttgggggacattgcctccctctgtgtgggccaccttgccagggaagaccggtttatccccaagagagaacttgcctggcatgtcaagaccatcaccatcaccgagatggagtacggcaatgtgtacttctttaactgtgactgcctcatccccctcaagaggaagaggaagtacttcaaggtattcgaggttaccaagacgacagagagctttgccagcaaggtccagagcctggtgcccgtcaagtacgaagtcatcgtgacaacaggctatgagccaggggcaggcactgatgccaacgtcttcgtgaccatctttggggccaacggagacacaggcaagcgggagctgaagcagaaaatgcgcaacctcttcgagcggggcagcacagaccgcttcttcctggagacgctggagctgggtgagctgcgcaaggtgcgcctggagcacgacagcagtggctactgctcaggctggctggtggagaaggtggaggtcaccaacaccagcaccggcgtggccaccatcttcaactgtggcaggtggctggacaagaagcggggggatggactcacctggagagacctcttcccttctgtctgaggggctagggcccccaccctctcactgagatgccccaatctcacatttctgccctccaccttggcggtcagcagcccttcaaagcctctagcattggcactgggggctagcagtccactgagaacttcatggggtcctgctccccaccctacccccagtttattgaacctacagtgataataattagcatgtgtcataatctgtggctgccc

SEQ ID NO: 149557 - DNA, 3632 bp, Homo sapiens
  Payload ID: 9531
  Gene Symbol: LOXHD1
  Gene Name: lipoxygenase homology domains 1
  ENST ID: ENST00000579038
  CDS Start-End: 352-3387
gggctgggtgacgttggaggatgagagtgggctggctgtgacactggaggatgagggcgagctggctgtgacatccgagggtactactttccatgccaacgttggctggcagtggaggaagatgatggccagctgtccagggagctgttgccagtggatgagtcctatgtgctgccacagagcgaggagggtaggggaggcggtgacaacaaccccctcgacaacctggccctggagcagaaagataaatctaccacattctcagtgaccataaagactggggttaagaagaatgcgggcacagatgctaatgtcttcatcacactctttggcacacaggatgacactggaatgaccctcctgaagtcctccaagacaaacagcgataagtttgagagggacagcattgaaatcttcacggtggagacgctggatctgggagacctgtggaaagtccggcttggccatgacaacacaggcaaggccccaggctggtttgtagactgggtagaggtggatgccccatctcttgggaagtgcatgacgtttccctgtggccgctggctggccaaaaacgaagacgacgggtccatcatcagagacctcttccatgcagagcttcagacgaggctgtacacaccatttgttccttacgagatcaccctctacaccagtgatgtctttgctgctgggacagatgccaacatcttcatcatcatctatggctgcgatgccgtgtgcacccagcagaagtatctgtgtaccaacaagagggaacagaagcagttctttgagaggaagtctgcctcccgcttcatcgtagagttagaagatgtgggagaaatcattgaaaaaattcggattggccataataacacgggcatgaatcctgggtggcactgctctcacgtggacatccgcaggctcctcccggataaagacggtgcagagaccttgactttcccatgcgatcggtggcttgccacctctgaggatgacaaaaagaccattcgagaactggttccatatgacatcttcactgagaaatacatgaaagatgggtccttacggcaagtctacaaggaagtagaagagcctctggacattgtgctgtactcggtgcagatcttcacagggaacattcctggggcagggacggatgccaaggtgtacatcaccatctatggagacctcggggacactggggagcgataccttggcaagtcagagaaccggaccaacaagttcgagagaggaacggctgacaccttcatcatcgaggccgctgacctaggcgtcatctacaagatcaagctccgccatgacaactccaagtggtgcgcagactggtacgtggagaaggtggagatctggaatgacaccaacgaggacgagttcctgttcctatgcgggcgctggctctccctgaagaaggaggatgggcgactcgagaggctcttttacgagaaggagtacactggggaccgcagcagcaactgcagcagccctgctgacttctgggagatcgccctgagctccaagatggccgatgtcgacatcagcacagtgaccgggcccatggctgactacgttcaagagggcccaattattccctactatgtgtcagtcaccactgggaagcacaaggacgcggccactgacagccgagccttcatctttctcatcggggaggatgatgaacgtagtaagcgcatctggttggactacccccgagggaagaggggcttcagccgtggctctgtggaggagttctacgtcgcaggcttggatgtgggcatcatcaagaaaatagagctgggccatgacggggcctcccctgagagctgctggctggtggaagagttgtgtttggcagtgcccacccagggcaccaagtacatgttgaactgtaactgctggctggccaaggacagaggcgacggcatcacctcccgtgtcttcgacctcttggatgccatggtggtgaacattggggtgaaggttctctatgaaatgacggtgtggacaggggatgtggttggcgggggcactgactccaacatcttcatgaccctctacggcatcaacgggagcacagaggagatgcagctggacaaaaagaaagccaggtttgagcgggagcagaacgacaccttcatcatggagatcctagacattgctccattcaccaagatgcggatccggattgatggcctgggcagtcggccggagtggttcctggagaggatcctactgaagaacatgaacactggagacctgaccatgttctactatggagactggctgtcccagcggaagggcaagaagaccctggtgtgtgaaatgtgtgccgttatcgatgaggaagaaatgatggagtggacctcctacaccgtcgcagttaagaccagcgacatcctgggagcaggcactgatgccaacgtgttcatcatcatcttcggggagaacggggatagtgggacactggccctgaagcagtcggcaaactggaacaagtttgagcggaacaacacggacacattcaacttccctgacatgctgagcttgggccacctctgcaagctgagggtctggcacgacaacaaagggatatttcctggctggcatctgagctatgtcgatgtgaaggacaactcccgcgacgagaccttccacttccagtgtgactgctggctctccaagagtgagggtgacgggcagacggtccgcgactttgcctgtgccaacaacaagatctgtgatgagctggaagagaccacctacgagatcgtcatagaaacgggcaacggaggcgaaaccagggagaacgtctggctcatcctggagggcaggaagaaccgatccaaagagtttctcatggaaaattcttctaggcagcgggcctttaggaaggggaccacagacacgtttgagtttgacagcatctacttgggggacattgcctccctctgtgtgggccaccttgccagggaagaccggtttatccccaagagagaacttgcctggcatgtcaagaccatcaccatcaccgagatggagtacggcaatgtgtacttctttaactgtgactgcctcatccccctcaagaggaagaggaagtacttcaaggtattcgaggttaccaagacgacagagagctttgccagcaaggtccagagcctggtgcccgtcaagtacgaagtcatcgtgacaacaggctatgagccaggggcaggcactgatgccaacgtcttcgtgaccatctttggggccaacggagacacaggcaagcgggagctgaagcagaaaatgcgcaacctcttcgagcggggcagcacagaccgcttcttcctggagacgctggagctgggtgagctgcgcaagtagtgaccaggctgggacttgctgcagagtgtggatgagaaattgagtcttcacccaggggatagaagtggagaagcagaggccatcaagatggtgtattttaagcaaaaactaattaacacttttccccaaaaaagctaggctaattaaattattaccaaccatatcctataaagaactcatcttagcatctgcttgctaagaagtgtatacttttccccagtttcaataaacccagtggcaagtgg

SEQ ID NO: 149558 - DNA, 1018 bp, Homo sapiens
  Payload ID: 9532
  Gene Symbol: LIPT2
  Gene Name: lipoyl(octanoyl) transferase 2 (putative)
  Uniprot ID: A6NK58
  ENST ID: ENST00000310109
  CDS Start-End: 31-726
cggggccccgcggacgcaacggtgggcacgatgcggcaacccgccgttcggttggtgcgcctgggtcgggtgccgtacgccgagctactggggctgcaggaccgctggctgcggcggctgcaggccgagccaggcattgaggccccgtcggggactgaggcgggcgcgctcctgctctgcgagcccgcggggcccgtgtatacggccgggctgcgcggcggcctgacgcccgaggaaactgcgcggctacgggccttgggcgccgaggtgcgcgtcacaggccgcggtggcctggccaccttccacggcccgggccagctgctttgccacccggtactcgacctgcggcgtctcggcctgcgcttgcgcatgcacgtagcgtcgctggaggcgtgcgccgtgcgcctgtgcgagctccagggcctgcaggacgcccgcgcgcggcccccgccctacactggcgtctggctagacgatcgcaagatctgcgcgatcggagtccgctgtggaaggcacatcacatcccacggcctggctctcaactgctctaccgacctcacgtggtttgagcacatcgtgccctgtggactggttgggacaggcgtcacttccttgagtaaggagctccagaggcacgtcaccgtggaagaagtaatgccacctttccttgtggcctttaaggagatctacaagtgcacactgatctcagaggacagccccaactgaagagtactcataacagccaggatgctcctgccttgggaagcatgaagtctgacttgagtcacctactgaaacccagattttagacctggcctgtcattcactgatcatgaaactaaggacataccatgagctctgagccactattttcatatgtatcctgttttatttatatcttccccacctacctcagagatactagatgtgacaatactgtgaaaagcaacacatgctatataaaacattagcactgctattgacagcagtgtctcagagaaattcagatgtcatagat

SEQ ID NO: 149559 - DNA, 769 bp, Homo sapiens
  Payload ID: 9532
  Gene Symbol: LIPT2
  Gene Name: lipoyl(octanoyl) transferase 2 (putative)
  ENST ID: ENST00000527115
  CDS Start-End: 1-236
agggcctgcaggacgcccgcgcgcggcccccgccctacactggcgtctggctagacgatcgcaagatctgcgcgatcggtgagcgccgcggagcagggcggtacctgagagccgaggagtccgctgtggaaggcacatcacatcccacggcctggctctcaactgctctaccgacctcacgtggtttgagcacatcgtgccctgtggactggttgggacaggcgtcacttccttgagtaaggagctccagaggcacgtcaccgtggaagaagtaatgccacctttccttgtggcctttaaggagatctacaagtgcacactgatctcagaggacagccccaactgaagagtactcataacagccaggatgctcctgccttgggaagcatgaagtctgacttgagtcacctactgaaacccagattttagacctggcctgtcattcactgatcatgaaactaaggacataccatgagctctgagccactattttcatatgtatcctgttttatttatatcttccccacctacctcagagatactagatgtgacaatactgtgaaaagcaacacatgctatataaaacattagcactgctattgacagcagtgtctcagagaaattcagatgtcatagattgttatttctcgattgttgatgtcatagattgtcatttctcaattgttgcttcctcaatactgtgtctaactgagcaattctgggctctagttcctttgattttgtgggaatcaaatctctgaatggccca

SEQ ID NO: 149560 - DNA, 218 bp, Homo sapiens
  Payload ID: 9532
  Gene Symbol: LIPT2
  Gene Name: lipoyl(octanoyl) transferase 2 (putative)
  ENST ID: ENST00000528085
  CDS Start-End: 1-218
actggggctgcaggaccgctggctgcggcggctgcaggccgagccaggcattgaggccccgtcggggactgaggcgggcgcgctcctgctctgcgagcccgcggggcccgtgtatacggccgggctgcgcggcggcctgacgcccgaggaaactgcgcggctacgggccttgggcgccgaggagtccgctgtggaaggcacatcacatcccacggcct

SEQ ID NO: 149561 - DNA, 1289 bp, Homo sapiens
  Payload ID: 9533
  Gene Symbol: LIPT1
  Gene Name: lipoyltransferase 1
  Uniprot ID: Q9Y234
  ENST ID: ENST00000393471
  CDS Start-End: 99-1220
agcatcgcgcgcaaggcctgccggttgctcggggtcgtatgacgcacttttccagctcgagccctcacgaggccgtgggtacgaccggaagccgcagcatgctgatcccattttcaatgaagaattgcttccagttactttgtaactgccaggtcccagcagctggctttaaaaaaacagtaaaaaatgggctcattttacagtcaatttccaatgatgtctatcaaaatctggctgtggaagactggatccatgaccatatgaatctagaaggcaaaccaattctattcttttggcagaattctccctctgttgtaattggtaggcatcaaaatccttggcaggaatgtaacctgaatctaatgagagaagaaggtataaaactggctcggagaagaagtggaggaggaacagtctaccatgatatgggtaatatcaatttgactttctttacaaccaaaaaaaagtatgatagaatggaaaatctgaaattaattgtgagagctctgaatgctgtccaaccccagctggatgtgcaggctaccaaaagatttgaccttttacttgatggacagtttaaaatctcaggaacagcttctaagatcggccggactactgcctatcaccattgcactttattatgtagtactgatgggacgttcttgtcttctttgctaaagagcccttaccaagggatcaggagcaatgccactgctagcataccttccttagtgaaaaatcttttggaaaaggatcccactctgacctgtgaagtactaatgaatgctgttgctacagagtatgctgcttatcatcaaattgataatcacattcacctaataaacccaacggatgagacactgtttcctggaataaatagcaaagccaaagaactgcaaacttgggagtggatatatggcaaaactccaaagtttagtataaatacttcctttcatgtgttatatgaacagtcacacttggaaattaaagtattcatagacataaagaatggaagaattgaaatttgtaatattgaagcacctgatcattggttgccattggaaatacgtgacaaattaaattcaagtcttattggcagtaagttttgcccaactgaaactaccatgctaacaaatatattacttagaacatgtccacaagaccacaaactaaacagtaaatggaatattctctgtgaaaaaattaagggaataatgtgattccaagtaaatgtcttaatacagtttcaattagaaaataaaatgtctcatacttgcacattgtatgtc

SEQ ID NO: 149562 - DNA, 1424 bp, Homo sapiens
  Payload ID: 9533
  Gene Symbol: LIPT1
  Gene Name: lipoyltransferase 1
  Uniprot ID: Q9Y234
  ENST ID: ENST00000393473
  CDS Start-End: 225-1346
agcatcgcgcgcaaggcctgccggttgctcggggtcgtatgacgcacttttccagctcgagccctcacgaggccgtgggtacgaccggaagccgcagactgaatctcgctctgttgcccagcccatctcggcccactgaaacctccacctcccgggttcaagcgattctcctgcctcagcctcccgagtagctgagattacaggcgcctgccaccacgcccagcatgctgatcccattttcaatgaagaattgcttccagttactttgtaactgccaggtcccagcagctggctttaaaaaaacagtaaaaaatgggctcattttacagtcaatttccaatgatgtctatcaaaatctggctgtggaagactggatccatgaccatatgaatctagaaggcaaaccaattctattcttttggcagaattctccctctgttgtaattggtaggcatcaaaatccttggcaggaatgtaacctgaatctaatgagagaagaaggtataaaactggctcggagaagaagtggaggaggaacagtctaccatgatatgggtaatatcaatttgactttctttacaaccaaaaaaaagtatgatagaatggaaaatctgaaattaattgtgagagctctgaatgctgtccaaccccagctggatgtgcaggctaccaaaagatttgaccttttacttgatggacagtttaaaatctcaggaacagcttctaagatcggccggactactgcctatcaccattgcactttattatgtagtactgatgggacgttcttgtcttctttgctaaagagcccttaccaagggatcaggagcaatgccactgctagcataccttccttagtgaaaaatcttttggaaaaggatcccactctgacctgtgaagtactaatgaatgctgttgctacagagtatgctgcttatcatcaaattgataatcacattcacctaataaacccaacggatgagacactgtttcctggaataaatagcaaagccaaagaactgcaaacttgggagtggatatatggcaaaactccaaagtttagtataaatacttcctttcatgtgttatatgaacagtcacacttggaaattaaagtattcatagacataaagaatggaagaattgaaatttgtaatattgaagcacctgatcattggttgccattggaaatacgtgacaaattaaattcaagtcttattggcagtaagttttgcccaactgaaactaccatgctaacaaatatattacttagaacatgtccacaagaccacaaactaaacagtaaatggaatattctctgtgaaaaaattaagggaataatgtgattccaagtaaatgtcttaatacagtttcaattagaaaataaaatgtctcatacttgcacattgtatgtcaaaaaaaaa

SEQ ID NO: 149563 - DNA, 482 bp, Homo sapiens
  Payload ID: 9533
  Gene Symbol: LIPT1
  Gene Name: lipoyltransferase 1
  ENST ID: ENST00000449211
  CDS Start-End: 77-482
ggttgctcggggtcgtatgacgcacttttccagctcgagccctcacgaggccgtgggtacgaccggaagccgcagcatgctgatcccattttcaatgaagaattgcttccagttactttgtaactgccaggtcccagcagctggctttaaaaaaacagtaaaaaatgggctcattttacagtcaatttccaatgatgtctatcaaaatctggctgtggaagactggatccatgaccatatgaatctagaaggcaaaccaattctattcttttggcagaattctccctctgttgtaattggtaggcatcaaaatccttggcaggaatgtaacctgaatctaatgagagaagaaggtataaaactggctcggagaagaagtggaggaggaacagtctaccatgatatgggtaatatcaatttgactttctttacaaccaaaaaaaagtatgatagaatggaaaatctgaaattaattgtgagag

SEQ ID NO: 149564 - DNA, 885 bp, Homo sapiens
  Payload ID: 9533
  Gene Symbol: LIPT1
  Gene Name: lipoyltransferase 1
  ENST ID: ENST00000434566
  CDS Start-End: 132-885
ggggtcgtatgacgcacttttccagctcgagccctcacgaggccgtgggtacgaccggaagccgcagttcagtgatggggagccgtgtttggcagtgcagaggtagcgaagtgtcccaagaacatggaagcatgctgatcccattttcaatgaagaattgcttccagttactttgtaactgccaggtcccagcagctggctttaaaaaaacagtaaaaaatgggctcattttacagtcaatttccaatgatgtctatcaaaatctggctgtggaagactggatccatgaccatatgaatctagaaggcaaaccaattctattcttttggcagaattctccctctgttgtaattggtaggcatcaaaatccttggcaggaatgtaacctgaatctaatgagagaagaaggtataaaactggctcggagaagaagtggaggaggaacagtctaccatgatatgggtaatatcaatttgactttctttacaaccaaaaaaaagtatgatagaatggaaaatctgaaattaattgtgagagctctgaatgctgtccaaccccagctggatgtgcaggctaccaaaagatttgaccttttacttgatggacagtttaaaatctcaggaacagcttctaagatcggccggactactgcctatcaccattgcactttattatgtagtactgatgggacgttcttgtcttctttgctaaagagcccttaccaagggatcaggagcaatgccactgctagcataccttccttagtgaaaaatcttttggaaaaggatcccactctgacctgtgaagtactaatgaatgctgttgctacagagtatgctgcttatcatcaaattgataatcacattcacctaataaacccaacgg

SEQ ID NO: 149565 - DNA, 803 bp, Homo sapiens
  Payload ID: 9533
  Gene Symbol: LIPT1
  Gene Name: lipoyltransferase 1
  ENST ID: ENST00000415142
  CDS Start-End: 486-803
aaaccgggatgttgcgggccgtagcgcgtgggcggccgtggggtcttgggcgcgcgcggtgtttctggcggtgggtcaggacttgcgggtcgcctccgccggtgttgaagcctcttgtgtgcacactttctcctcagcacttgggacgacctaatttcactgttaggaacggttgatcccgaacacaggagggagggtaaatatcgtaaaacatgttggacgctagctgtgtgcacgccccctgggagccaaaagggcgaagtaaaacatgcacacgaccgtaatgagattctgattcagtgatggggagccgtgtttggcagtgcagaggtagcgaagtgtcccaagaacatggaagactgaatctcgctctgttgcccagcccatctcggcccactgaaacctccacctcccgggttcaagcgattctcctgcctcagcctcccgagtagctgagattacaggcgcctgccaccacgcccagcatgctgatcccattttcaatgaagaattgcttccagttactttgtaactgccaggtcccagcagctggctttaaaaaaacagtaaaaaatgggctcattttacagtcaatttccaatgatgtctatcaaaatctggctgtggaagactggatccatgaccatatgaatctagaaggcaaaccaattctattcttttggcagaattctccctctgttgtaattggtaggcatcaaaatccttggcaggaatgtaacctgaatctaatgagagaagaaggtataaaactggctcggagaagaagtggaggaggaacagtc

SEQ ID NO: 149566 - DNA, 583 bp, Homo sapiens
  Payload ID: 9533
  Gene Symbol: LIPT1
  Gene Name: lipoyltransferase 1
  ENST ID: ENST00000436234
  CDS Start-End: 466-583
gatgttgcgggccgtagcgcgtgggcggccgtggggtcttgggcgcgcgcggtgtttctggcggtgggtcaggacttgcgggtcgcctccgccggtgttgaagcctcttgtgtgcacactttctcctcagcacttgggacgacctaatttcactgttaggaacggttgatcccgaacacaggagggagggtaaatatcgtaaaacatgttggacgctagctgtgtgcacgccccctgggagccaaaagggcgaagtaaaacatgcacacgaccgtaatgagattctgagtaagttgtatatcattagagaggggacaaaataatagggtcttggcgaggtcttatgaagaagctgcgcctgcctagaaagatagatgggattgtgctgttttcgctttcagttcagtgatggggagccgtgtttggcagtgcagaggtagcgaagtgtcccaagaacatggaagcatgctgatcccattttcaatgaagaattgcttccagttactttgtaactgccaggtcccagcagctggctttaaaaaaacagtaaaaaatgggctcattttacagtcaatttccaatg

SEQ ID NO: 149567 - DNA, 7685 bp, Homo sapiens
  Payload ID: 9534
  Gene Symbol: LTN1
  Gene Name: listerin E3 ubiquitin protein ligase 1
  Uniprot ID: O94822
  ENST ID: ENST00000361371
  CDS Start-End: 81-5381
ccgccgccagaagccggaagttgtgtcccggacgtgtcaaccggggtctgagtgctcagagtacagctgcaaccgcgaccatgggcgggaagaacaagcagcgaactaaagggaacctgaggccttcaaacagtggccgagctgcagaactccttgccaaagaacagggaacagtgcctggatttattggttttggaacatctcagagtgacctaggctatgttcctgctattcaaggagctgaagaaattgacagtcttgtagattctgatttccgaatggtgctgcggaaactttcaaagaaagatgtcaccacaaaattaaaagctatgcaggaatttggaaccatgtgtacagagagagacacagaaactgtgaaaggagttcttccatattggccaagaattttttgcaaaatttcacttgatcatgaccgtcgcgtccgagaagccacacaacaagcttttgaaaaacttatccttaaagtaaagaaacagttggctccctacttaaaaagtttaatgggatattggctaatggctcagtgtgatacttacacaccagctgcgtttgcagcaaaagatgcatttgaagcggcttttcctccaagcaagcaacctgaagccatagcattttgtaaggatgaaattacaagtgtgctgcaggatcatcttataaaagaaacacctgatacactcagtgacccgcaaactgttccagaggaagaaagagaagctaaattctaccgggttgtaacttgttccttattggcattaaagagattactttgccttttacctgataatgagcttgattctctggaggagaaatttaagtctcttttatcacagaataagttttggaagtatggaaaacacagtgtacctcagattcgctcagcttattttgagttagtctctgcattgtgccagcgcattccacagttgatgaaagaggaagcatccaaagtgagcccatcagttctacttagcattgatgacagtgacccaattgtctgcccagctctctgggaagctgtactctatacacttacaactattgaggactgttggcttcatgtaaatgcaaaaaagagtgtgtttcccaagctatcaactgtgattcgtgaaggtggtcggggtctagctactgtcatatatccttaccttctgccattcatcagcaagctccctcagtccatcacaaatccaaagttggatttcttcaaaaatttcctcacgtctctagttgctgggctgtcaacagagagaactaaaaccagctctttagagtcctcggcagtaatatctgctttttttgaatgcttacgttttataatgcagcaaaacttaggtgaggaagagattgaacagatgctcgtcaatgatcagttgatcccttttattgatgcagttctcaaagacccaggattgcaacatgggcagctatttaaccatttagcagaaactctaagttcctgggaagccaaagcagacacggaaaaagatgaaaaaacagctcacaacttggagaacgtactgatacatttctgggaaagactgtcagagatctgtgttgcgaaaatcagtgagccagaagctgatgttgagtccgttttgggtgtatctaacctattacaggtgcttcagaagccgaagagctcattgaagtcaagtaaaaaaaaaaatggtaaggttagatttgctgatgagatacttgaaagcaataaagagaatgaaaaatgtgtatcttcagaaggagagaagattgaaggctgggaattaacaactgaaccttctctcactcataattcttcaggccttttgtctcctctaaggaaaaaacctttggaagacttagtctgtaaactcgcagatataagtattaattatgtcaatgaacgaaagtcagagcaacatctaaggtttctttctactctgcttgactccttttcttcaagccgagtatttaaaatgctacttggtgatgaaaaacagagtattgtccaagccaaacctcttgaaatagccaagcttgtacaaaaaaatcctgcggtgcagtttttataccagaaactgataggttggctaaatgaagatcaaaggaaggattttggtttcctggtggacattttgtacagtgctctccggtgctgtgacaatgatatggaaagaaaaaaagtcttggatgatctaaccaaggtggacttgaaatggaattctcttcttaagattattgaaaaggcatgtcctagttcagataaacatgctttagtaactccttggctcaaaggcgatatccttggtgagaaattggtcaacttggcagattgtctttgtaatgaggacttggaatccagggtatcttcagaatctcacttctcagaaagatggactcttctaagcttggtattatcccaacatgttaaaaatgattacttgattggagacgtatatgttgaaagaatcattgttagacttcatgaaactttattcaaaacaaagaaattatcagaagctgaaagcagtgactcatcagtgtcttttatctgtgatgtggcctataactatttcagctcagcgaaaggatgcttgctaatgccatcatctgaagatttattattaactctctttcagttatgtgctcagagcaaagaaaaaacacatttgccagattttcttatctgtaaactgaaaaatacttggctctctggtgtaaatttattggttcatcaaactgacagttcatataaagagagtaccttcctacatttgtctgctctgtggctgaagaaccaagttcaggcttcatctttggatatcaacagtctccaagtcctcttgtctgctgttgatgatttgctaaatacacttctagagagtgaagattcttatcttatgggagtttatattggaagtgtaatgccgaacgacagtgaatgggaaaagatgaggcagtctcttcctatgcagtggttacatagacctcttttagagggaagattgagtttgaattatgaatgtttcaaaacagattttaaggaacaggacataaagacacttcccagccatttgtgtacttcagcattattgagcaaaatggtcttaattgcactgagaaaggaaacagtcttagaaaataatgagcttgagaaaataattgcagaactgctttattcactgcagtggtgtgaagaattagataacccacctatttttctaattggattttgtgaaatacttcaaaaaatgaatattacgtatgataacttacgtgtacttggtaatacgtcgggccttttgcagctgttatttaacaggtccagagaacatggcacactgtggtctcttattattgctaagttgatcctttcccgaagcatttcatctgatgaagtaaaaccacattataagagaaaagaaagtttttttccactaactgaaggcaatttgcataccattcaaagtctatgtccatttttgtcaaaagaagaaaagaaagaatttagtgctcaatgtatacctgctcttttgggctggactaagaaagatctttgcagcactaatggaggttttggacatcttgccattttcaattcttgtctgcaaaccaaaagtatagatgatggagagctattacatggaatattaaaaatcataatatcctggaagaaagagcatgaagatatttttcttttcagttgtaatctatcagaagcaagtccagaggtactgggtgtaaatatagaaataatccggtttctttccctatttctgaaatactgctcatcccctttggcagagagtgagtgggacttcatcatgtgctccatgttggcttggttggagacaacaagtgagaatcaggcattgtattctattccacttgtgcaactgtttgcctgtgtcagctgtgatttggcctgtgacctcagtgctttctttgattccacaactctggataccattggcaatcttcctgtaaatctaatcagtgaatggaaagaatttttttcccaaggcatccacagtttgcttttacctattttggtgactgttacaggagaaaacaaagatgtgtctgaaacatcctttcagaatgcaatgctgaaacccatgtgtgaaacattaacgtatatctcaaaggaacagctattgagtcacaaacttcctgcaagattagttgctgaccaaaaaacaaacttaccagaatatctccagactttgttaaatacattggccccattactcctcttcagagctaggcctgtgcaaattgctgtttatcatatgctatacaaattgatgcctgaattaccacagtatgatcaggataatctaaagtcatacggagatgaagaagaagagccagccttgtcaccaccagcagcactgatgtctcttcttagcattcaagaggacttactagaaaatgttttggggtgtattcctgttggacagatagttactattaaaccactgagtgaagacttctgttatgttctgggataccttctcacttggaaattaatactaactttcttcaaagctgcatcatcacagcttcgggctttgtattccatgtatcttcggaaaacaaagagtttgaataaattgctctatcacctgttcaggcttatgccagaaaatccaacctatgcagagacagcagttgaggtcccaaataaggaccctaaaacattctttactgaggagctccagctgagtattagagaaacaacaatgcttccataccacattccacacttggcttgttcagtctatcatatgacattaaaagacttgcctgccatggttaggttgtggtggaatagcagtgagaagcgtgttttcaatattgtggatagatttacaagcaagtatgtcagcagtgttctttcttttcaagaaatatcttctgtacaaacaagtacacaactatttaatggcatgacggttaaagctcgagctactactcgagaggtaatggctacttatactattgaggacatagttattgaacttataatacaactgccttcaaattatccactgggttcaataatagtagaaagtgggaaaagagtaggagtagctgttcagcagtggcggaactggatgctgcagttaagcacttacctcacccatcagaatggaagtattatggaaggcttagctttatggaaaaataacgtagacaaacgttttgagggtgttgaagattgcatgatctgtttctcagtcattcacggtttcaactattcccttcccaaaaaagcctgtagaacatgcaagaaaaaattccattcagcctgcttgtacaaatggtttacatctagcaacaaatccacttgtccactgtgtcgtgagacgtttttctgagatttttttcactggaagggatccctgaagtacatcaaacaaaggcattggatttggatccgtctgaaagtgtggatgtggggaagccagtgagcattacttttaaataggaccttctctggaaaattattttggttaatgtaataatcctaaaatcaggtttacttaactttagattgctttgtaaatgtttggaaactttcttttacaaaagaatattacatatttgagagaaaatatttctattaatggtttaatttctttgtatatttaaaaataaatatgaaaaacccctaaattacagaattggaatttgtgaaaagattgcacaactatattattgataaacccattccgtttgttgatctgtgttttagaatagtccaagtgaagcaaaacgaactgagagagctgatttacatctatagatattttaagccttatttattagttatgacaataaattagtattctgatatttgtagattattttaatgataaaaatgacactaagctattaatacggcttgtcttaagatatctggaggcatgctctgaaatcctatataaaagagtttaaactgaactttaaggtgcctccatttatcaagggttatgaaactcagaaaattaaattcttgatgctgacctttttgcttgtgggagaattatttctatatattagtgaaatttgaattgtaaacttgtcagtgaatttatcactctgagcgagtctctagagggtgagaatttgagagaaatagtaatttgattatttcattcatgaagcggagtggtagttatccttctattgagagggaagaaataaatgagtattactgaaacttaaagatcagtggaaaaaaaaaacatttaaaaatgttgtaggagactttcaattttggaagcaaactgagctattcttaccagccaaagttatactaaataagagacttgggggagcaaatgtttttcagccttcagaaatgaaagttaaggattttagcactaggtaaaattcagtataataggctgaagtggagtaagtgaaaacctgccttttgccactcttaaaaattgtgcccaaaatataaaagtgtggaactttagaacttggaataattttattgcagtcttccattacatggaaatagcatatctaatatctaggttacttgagagaccagctaatcatctctgttgcacatgtttaattggcaaaaagcaattcatgataaataaaattactgctttccatctactgggtaaaatgactattgaaatagtatgaatgtggtcagaggattatagttgagagtgaagtactatgtgtgagttatagatctctcgaattatatttatagatgcagtgtcctgcccagttttgtttgcctcctacattttactgtaaaatatttattgtcttctagccttgagcctctgagggtcagtaagtgaagtacagatagcaaaattttactacctcgttaacccttttcttaaaatattctctatctttctatgtctctttctgacatagtaatcccaaaggattgtgttactccccgtgaaagttattacttttcctttaaaaatggttttataataagactgtttaaaacctttccagtattggtacatcttggcttctggcccaaaccccaagcagaaaagaaaatggaataatggagcattgtttttccacattagtattagggcatcagattcttggtgaaacactataattaagtagttataattaaataactgttcttcatacttaggactcttaatacatttctttaagacttgtaagtataattgtaaagcttgttaactgtttatatactaaagaaaaagctttacaagataagactgaaattcagaataccacatctgtacagcgttgacaactctaactaaaaggattacagcccttaaaattttagcttaaggacattttaaaattgcatgagattagcaaaattattaatttaaaaccccaaagtaaattgcaaattttaaaatttatttttgactcttttatcacatgctccaatgtatgtacataagtgtctgtggcttaaataatatgttgttatttgatacatttttgtggtgcaagtaattaatgttattatttgattgttataccatatgtgcccattaaaattctttttaattaaaaatatttcaaatatgcagaaaaataataatataaatgcccttgtacccttcacatactattttgccatatttgcttctgatttttaaataaataaaatgttactcttttgtacttct

SEQ ID NO: 149568 - DNA, 7749 bp, Homo sapiens
  Payload ID: 9534
  Gene Symbol: LTN1
  Gene Name: listerin E3 ubiquitin protein ligase 1
  Uniprot ID: O94822
  ENST ID: ENST00000389194
  CDS Start-End: 7-5445
cagcaaatggacagggtgggtggcggaaaagggcccgggggaagttattacagggtgtcctcttccgccgccagaagccggaagttgtgtcccggacgtgtcaaccggggtctgagtgctcagagtacagctgcaaccgcgaccatgggcgggaagaacaagcagcgaactaaagggaacctgaggccttcaaacagtggccgagctgcagaactccttgccaaagaacagggaacagtgcctggatttattggttttggaacatctcagagtgacctaggctatgttcctgctattcaaggagctgaagaaattgacagtcttgtagattctgatttccgaatggtgctgcggaaactttcaaagaaagatgtcaccacaaaattaaaagctatgcaggaatttggaaccatgtgtacagagagagacacagaaactgtgaaaggagttcttccatattggccaagaattttttgcaaaatttcacttgatcatgaccgtcgcgtccgagaagccacacaacaagcttttgaaaaacttatccttaaagtaaagaaacagttggctccctacttaaaaagtttaatgggatattggctaatggctcagtgtgatacttacacaccagctgcgtttgcagcaaaagatgcatttgaagcggcttttcctccaagcaagcaacctgaagccatagcattttgtaaggatgaaattacaagtgtgctgcaggatcatcttataaaagaaacacctgatacactcagtgacccgcaaactgttccagaggaagaaagagaagctaaattctaccgggttgtaacttgttccttattggcattaaagagattactttgccttttacctgataatgagcttgattctctggaggagaaatttaagtctcttttatcacagaataagttttggaagtatggaaaacacagtgtacctcagattcgctcagcttattttgagttagtctctgcattgtgccagcgcattccacagttgatgaaagaggaagcatccaaagtgagcccatcagttctacttagcattgatgacagtgacccaattgtctgcccagctctctgggaagctgtactctatacacttacaactattgaggactgttggcttcatgtaaatgcaaaaaagagtgtgtttcccaagctatcaactgtgattcgtgaaggtggtcggggtctagctactgtcatatatccttaccttctgccattcatcagcaagctccctcagtccatcacaaatccaaagttggatttcttcaaaaatttcctcacgtctctagttgctgggctgtcaacagagagaactaaaaccagctctttagagtcctcggcagtaatatctgctttttttgaatgcttacgttttataatgcagcaaaacttaggtgaggaagagattgaacagatgctcgtcaatgatcagttgatcccttttattgatgcagttctcaaagacccaggattgcaacatgggcagctatttaaccatttagcagaaactctaagttcctgggaagccaaagcagacacggaaaaagatgaaaaaacagctcacaacttggagaacgtactgatacatttctgggaaagactgtcagagatctgtgttgcgaaaatcagtgagccagaagctgatgttgagtccgttttgggtgtatctaacctattacaggtgcttcagaagccgaagagctcattgaagtcaagtaaaaaaaaaaatggtaaggttagatttgctgatgagatacttgaaagcaataaagagaatgaaaaatgtgtatcttcagaaggagagaagattgaaggctgggaattaacaactgaaccttctctcactcataattcttcaggccttttgtctcctctaaggaaaaaacctttggaagacttagtctgtaaactcgcagatataagtattaattatgtcaatgaacgaaagtcagagcaacatctaaggtttctttctactctgcttgactccttttcttcaagccgagtatttaaaatgctacttggtgatgaaaaacagagtattgtccaagccaaacctcttgaaatagccaagcttgtacaaaaaaatcctgcggtgcagtttttataccagaaactgataggttggctaaatgaagatcaaaggaaggattttggtttcctggtggacattttgtacagtgctctccggtgctgtgacaatgatatggaaagaaaaaaagtcttggatgatctaaccaaggtggacttgaaatggaattctcttcttaagattattgaaaaggcatgtcctagttcagataaacatgctttagtaactccttggctcaaaggcgatatccttggtgagaaattggtcaacttggcagattgtctttgtaatgaggacttggaatccagggtatcttcagaatctcacttctcagaaagatggactcttctaagcttggtattatcccaacatgttaaaaatgattacttgattggagacgtatatgttgaaagaatcattgttagacttcatgaaactttattcaaaacaaagaaattatcagaagctgaaagcagtgactcatcagtgtcttttatctgtgatgtggcctataactatttcagctcagcgaaaggatgcttgctaatgccatcatctgaagatttattattaactctctttcagttatgtgctcagagcaaagaaaaaacacatttgccagattttcttatctgtaaactgaaaaatacttggctctctggtgtaaatttattggttcatcaaactgacagttcatataaagagagtaccttcctacatttgtctgctctgtggctgaagaaccaagttcaggcttcatctttggatatcaacagtctccaagtcctcttgtctgctgttgatgatttgctaaatacacttctagagagtgaagattcttatcttatgggagtttatattggaagtgtaatgccgaacgacagtgaatgggaaaagatgaggcagtctcttcctatgcagtggttacatagacctcttttagagggaagattgagtttgaattatgaatgtttcaaaacagattttaaggaacaggacataaagacacttcccagccatttgtgtacttcagcattattgagcaaaatggtcttaattgcactgagaaaggaaacagtcttagaaaataatgagcttgagaaaataattgcagaactgctttattcactgcagtggtgtgaagaattagataacccacctatttttctaattggattttgtgaaatacttcaaaaaatgaatattacgtatgataacttacgtgtacttggtaatacgtcgggccttttgcagctgttatttaacaggtccagagaacatggcacactgtggtctcttattattgctaagttgatcctttcccgaagcatttcatctgatgaagtaaaaccacattataagagaaaagaaagtttttttccactaactgaaggcaatttgcataccattcaaagtctatgtccatttttgtcaaaagaagaaaagaaagaatttagtgctcaatgtatacctgctcttttgggctggactaagaaagatctttgcagcactaatggaggttttggacatcttgccattttcaattcttgtctgcaaaccaaaagtatagatgatggagagctattacatggaatattaaaaatcataatatcctggaagaaagagcatgaagatatttttcttttcagttgtaatctatcagaagcaagtccagaggtactgggtgtaaatatagaaataatccggtttctttccctatttctgaaatactgctcatcccctttggcagagagtgagtgggacttcatcatgtgctccatgttggcttggttggagacaacaagtgagaatcaggcattgtattctattccacttgtgcaactgtttgcctgtgtcagctgtgatttggcctgtgacctcagtgctttctttgattccacaactctggataccattggcaatcttcctgtaaatctaatcagtgaatggaaagaatttttttcccaaggcatccacagtttgcttttacctattttggtgactgttacaggagaaaacaaagatgtgtctgaaacatcctttcagaatgcaatgctgaaacccatgtgtgaaacattaacgtatatctcaaaggaacagctattgagtcacaaacttcctgcaagattagttgctgaccaaaaaacaaacttaccagaatatctccagactttgttaaatacattggccccattactcctcttcagagctaggcctgtgcaaattgctgtttatcatatgctatacaaattgatgcctgaattaccacagtatgatcaggataatctaaagtcatacggagatgaagaagaagagccagccttgtcaccaccagcagcactgatgtctcttcttagcattcaagaggacttactagaaaatgttttggggtgtattcctgttggacagatagttactattaaaccactgagtgaagacttctgttatgttctgggataccttctcacttggaaattaatactaactttcttcaaagctgcatcatcacagcttcgggctttgtattccatgtatcttcggaaaacaaagagtttgaataaattgctctatcacctgttcaggcttatgccagaaaatccaacctatgcagagacagcagttgaggtcccaaataaggaccctaaaacattctttactgaggagctccagctgagtattagagaaacaacaatgcttccataccacattccacacttggcttgttcagtctatcatatgacattaaaagacttgcctgccatggttaggttgtggtggaatagcagtgagaagcgtgttttcaatattgtggatagatttacaagcaagtatgtcagcagtgttctttcttttcaagaaatatcttctgtacaaacaagtacacaactatttaatggcatgacggttaaagctcgagctactactcgagaggtaatggctacttatactattgaggacatagttattgaacttataatacaactgccttcaaattatccactgggttcaataatagtagaaagtgggaaaagagtaggagtagctgttcagcagtggcggaactggatgctgcagttaagcacttacctcacccatcagaatggaagtattatggaaggcttagctttatggaaaaataacgtagacaaacgttttgagggtgttgaagattgcatgatctgtttctcagtcattcacggtttcaactattcccttcccaaaaaagcctgtagaacatgcaagaaaaaattccattcagcctgcttgtacaaatggtttacatctagcaacaaatccacttgtccactgtgtcgtgagacgtttttctgagatttttttcactggaagggatccctgaagtacatcaaacaaaggcattggatttggatccgtctgaaagtgtggatgtggggaagccagtgagcattacttttaaataggaccttctctggaaaattattttggttaatgtaataatcctaaaatcaggtttacttaactttagattgctttgtaaatgtttggaaactttcttttacaaaagaatattacatatttgagagaaaatatttctattaatggtttaatttctttgtatatttaaaaataaatatgaaaaacccctaaattacagaattggaatttgtgaaaagattgcacaactatattattgataaacccattccgtttgttgatctgtgttttagaatagtccaagtgaagcaaaacgaactgagagagctgatttacatctatagatattttaagccttatttattagttatgacaataaattagtattctgatatttgtagattattttaatgataaaaatgacactaagctattaatacggcttgtcttaagatatctggaggcatgctctgaaatcctatataaaagagtttaaactgaactttaaggtgcctccatttatcaagggttatgaaactcagaaaattaaattcttgatgctgacctttttgcttgtgggagaattatttctatatattagtgaaatttgaattgtaaacttgtcagtgaatttatcactctgagcgagtctctagagggtgagaatttgagagaaatagtaatttgattatttcattcatgaagcggagtggtagttatccttctattgagagggaagaaataaatgagtattactgaaacttaaagatcagtggaaaaaaaaaacatttaaaaatgttgtaggagactttcaattttggaagcaaactgagctattcttaccagccaaagttatactaaataagagacttgggggagcaaatgtttttcagccttcagaaatgaaagttaaggattttagcactaggtaaaattcagtataataggctgaagtggagtaagtgaaaacctgccttttgccactcttaaaaattgtgcccaaaatataaaagtgtggaactttagaacttggaataattttattgcagtcttccattacatggaaatagcatatctaatatctaggttacttgagagaccagctaatcatctctgttgcacatgtttaattggcaaaaagcaattcatgataaataaaattactgctttccatctactgggtaaaatgactattgaaatagtatgaatgtggtcagaggattatagttgagagtgaagtactatgtgtgagttatagatctctcgaattatatttatagatgcagtgtcctgcccagttttgtttgcctcctacattttactgtaaaatatttattgtcttctagccttgagcctctgagggtcagtaagtgaagtacagatagcaaaattttactacctcgttaacccttttcttaaaatattctctatctttctatgtctctttctgacatagtaatcccaaaggattgtgttactccccgtgaaagttattacttttcctttaaaaatggttttataataagactgtttaaaacctttccagtattggtacatcttggcttctggcccaaaccccaagcagaaaagaaaatggaataatggagcattgtttttccacattagtattagggcatcagattcttggtgaaacactataattaagtagttataattaaataactgttcttcatacttaggactcttaatacatttctttaagacttgtaagtataattgtaaagcttgttaactgtttatatactaaagaaaaagctttacaagataagactgaaattcagaataccacatctgtacagcgttgacaactctaactaaaaggattacagcccttaaaattttagcttaaggacattttaaaattgcatgagattagcaaaattattaatttaaaaccccaaagtaaattgcaaattttaaaatttatttttgactcttttatcacatgctccaatgtatgtacataagtgtctgtggcttaaataatatgttgttatttgatacatttttgtggtgcaagtaattaatgttattatttgattgttataccatatgtgcccattaaaattctttttaattaaaaatatttcaaatatgcagaaaaataataatataaatgcccttgtacccttcacatactattttgccatatttgcttctgatttttaaataaataaaatgttactcttttgtacttct

SEQ ID NO: 149569 - DNA, 2714 bp, Homo sapiens
  Payload ID: 9534
  Gene Symbol: LTN1
  Gene Name: listerin E3 ubiquitin protein ligase 1
  ENST ID: ENST00000389195
  CDS Start-End: 7-2448
cagcaaatggacagggtgggtggcggaaaagggcccgggggaagttattacagggtgtcctcttccgccgccagaagccggaagttgtgtcccggacgtgtcaaccggggtctgagtgctcagagtacagctgcaaccgcgaccatgggcgggaagaacaagcagcgaactaaagggaacctgaggccttcaaacagtggccgagctgcagaactccttgccaaagaacagggaacagtgcctggatttattggttttggaacatctcagagtgacctaggctatgttcctgctattcaaggagctgaagaaattgacagtcttgtagattctgatttccgaatggtgctgcggaaactttcaaagaaagatgtcaccacaaaattaaaagctatgcaggaatttggaaccatgtgtacagagagagacacagaaactgtgaaaggagttcttccatattggccaagaattttttgcaaaatttcacttgatcatgaccgtcgcgtccgagaagccacacaacaagcttttgaaaaacttatccttaaagtaaagaaacagttggctccctacttaaaaagtttaatgggatattggctaatggctcagtgtgatacttacacaccagctgcgtttgcagcaaaagatgcatttgaagcggcttttcctccaagcaagcaacctgaagccatagcattttgtaaggatgaaattacaagtgtgctgcaggatcatcttataaaagaaacacctgatacactcagtgacccgcaaactgttccagaggaagaaagagaagctaaattctaccgggttgtaacttgttccttattggcattaaagagattactttgccttttacctgataatgagcttgattctctggaggagaaatttaagtctcttttatcacagaataagttttggaagtatggaaaacacagtgtacctcagattcgctcagcttattttgagttagtctctgcattgtgccagcgcattccacagttgatgaaagaggaagcatccaaagtgagcccatcagttctacttagcattgatgacagtgacccaattgtctgcccagctctctgggaagctgtactctatacacttacaactattgaggactgttggcttcatgtaaatgcaaaaaagagtgtgtttcccaagctatcaactgtgattcgtgaaggtggtcggggtctagctactgtcatatatccttaccttctgccattcatcagcaagctccctcagtccatcacaaatccaaagttggatttcttcaaaaatttcctcacgtctctagttgctgggctgtcaacagagagaactaaaaccagctctttagagtcctcggcagtaatatctgctttttttgaatgcttacgttttataatgcagcaaaacttaggtgaggaagagattgaacagatgctcgtcaatgatcagttgatcccttttattgatgcagttctcaaagacccaggattgcaacatgggcagctatttaaccatttagcagaaactctaagttcctgggaagccaaagcagacacggaaaaagatgaaaaaacagctcacaacttggagaacgtactgatacatttctgggaaagactgtcagagatctgtgttgcgaaaatcagtgagccagaagctgatgttgagtccgttttgggtgtatctaacctattacaggtgcttcagaagccgaagagctcattgaagtcaagtaaaaaaaaaaatggtaaggttagatttgctgatgagatacttgaaagcaataaagagaatgaaaaatgtgtatcttcagaaggagagaagattgaaggctgggaattaacaactgaaccttctctcactcataattcttcaggccttttgtctcctctaaggaaaaaacctttggaagacttagtctgtaaactcgcagatataagtattaattatgtcaatgaacgaaagtcagagcaacatctaaggtttctttctactctgcttgactccttttcttcaagccgagtatttaaaatgctacttggtgatgaaaaacagagtattgtccaagccaaacctcttgaaatagccaagcttgtacaaaaaaatcctgcggtgcagtttttataccagaaactgataggttggctaaatgaagatcaaaggaaggattttggtttcctggtggacattttgtacagtgctctccggtgctgtgacaatgatatggaaagaaaaaaagtcttggatgatctaaccaaggtggacttgaaatggaattctcttcttaagattattgaaaaggaatgtacctgccgtgaagtgcaaatactcacatctgtgtggaagaaaatcctcttcctgagcagtgattggaagttcctagccagtgtttgctgcctgcgcttccatgactcactagcctcctcatctccttacagctaggcagcttctttcattagatatgttcatactggcatatctcagagacatcattgctttgaaatgaaccaagttgcaaattccttacttctcagcccttaaagcaaaagaagctctgggaacatggatcagcatgctttaggggtggatttacagcttttttttttcttgcttccccacctcatgaaaataagttgctgtcagatatctggccctagtaactctatatcagagaatttggggaaataaatcccattgttcatattgaa

SEQ ID NO: 149570 - DNA, 1753 bp, Homo sapiens
  Payload ID: 9534
  Gene Symbol: LTN1
  Gene Name: listerin E3 ubiquitin protein ligase 1
  ENST ID: ENST00000483326
  CDS Start-End: 1-1099
ttcaaagaaagatgtcaccacaaaattaaaagctatgcaggaatttggaaccatgtgtacagagagagacacagaaactgtgaaaggagttcttccatattggccaagaattttttgcaaaatttcacttgatcatgaccgtcgcgtccgagaagccacacaacaagcttttgaaaaacttatccttaaagtaaagaaacagttggctccctacttaaaaagtttaatgggatattggctaatggctcagtgtgatacttacacaccagctgcgtttgcagcaaaagatgcatttgaagcggcttttcctccaagcaagcaacctgaagccatagcattttgtaaggatgaaattacaagtgtgctgcaggatcatcttataaaagaaacacctgatacactcagtgacccgcaaactgttccagaggaagaaagagaagctaaattctaccgggttgtaacttgttccttattggcattaaagagattactttgccttttacctgataatgagcttgattctctggaggagaaatttaagtctcttttatcacagaataagttttggaagtatggaaaacacagtgtacctcagattcgctcagcttattttgagttagtctctgcattgtgccagcgcattccacagttgatgaaagaggaagcatccaaagtgagcccatcagttctacttagcattgatgacagtgacccaattgtctgcccagctctctgggaagctgtactctatacacttacaactattgaggactgttggcttcatgtaaatgcaaaaaagagtgtgtttcccaagctatcaactgtgattcgtgaaggtggtcggggtctagctactgtcatatatccttaccttctgccattcatcagcaagctccctcagtccatcacaaatccaaagttggatttcttcaaaaatttcctcacgtctctagttgctgggctgtcaacagagagaactaaaaccagctctttagagtcctcggcagtaatatctgctttttttgaatgcttacgttttataatgcagcaaaacttaggtgaggaagagattgaacagatgctcgtcaatgatcagtaatcaacacagaagacttctgtgaccaaatatgtggagatttctcccacccagcaagcagtcagttctgcagcagataccagctatgtgtcctccaattcaattctgactatctacctggagatagtgtcagatctcactggcttaggactcagtcccacaagaccgctccccacttctgatgccaatcgcaagccccaggctgttttacctgggcttctgaccaaccagctgtacatctaaatcagggatcccatgaccccctcctggggtttgcttaatttgctagactgtctcacagaactcagagaaacaatttaccagtttattataaatgatattacaaaggatacaaatgaagacatgcacacgttgatcccttttattgatgcagttctcaaagacccaggattgcaacatgggcagctatttaaccatttagcagaaactctaagttcctgggaagccaaagcagacacggaaaaagatgaaaaaacagctcacaacttggagaacgtactgatacatttctgggaaagactgtcagagatctgtgttgcgaaaatcagtgagccagaagctgatgttgagtccgttttgggtgtatctaacctattacaggtgcttcagaagccgaagagctcattgaagtcaagt

SEQ ID NO: 149571 - DNA, 7756 bp, Homo sapiens
  Payload ID: 9534
  Gene Symbol: LTN1
  Gene Name: listerin E3 ubiquitin protein ligase 1
  Uniprot ID: O94822
  ENST ID: ENST00000614971
  CDS Start-End: 14-5452
agtggggcagcaaatggacagggtgggtggcggaaaagggcccgggggaagttattacagggtgtcctcttccgccgccagaagccggaagttgtgtcccggacgtgtcaaccggggtctgagtgctcagagtacagctgcaaccgcgaccatgggcgggaagaacaagcagcgaactaaagggaacctgaggccttcaaacagtggccgagctgcagaactccttgccaaagaacagggaacagtgcctggatttattggttttggaacatctcagagtgacctaggctatgttcctgctattcaaggagctgaagaaattgacagtcttgtagattctgatttccgaatggtgctgcggaaactttcaaagaaagatgtcaccacaaaattaaaagctatgcaggaatttggaaccatgtgtacagagagagacacagaaactgtgaaaggagttcttccatattggccaagaattttttgcaaaatttcacttgatcatgaccgtcgcgtccgagaagccacacaacaagcttttgaaaaacttatccttaaagtaaagaaacagttggctccctacttaaaaagtttaatgggatattggctaatggctcagtgtgatacttacacaccagctgcgtttgcagcaaaagatgcatttgaagcggcttttcctccaagcaagcaacctgaagccatagcattttgtaaggatgaaattacaagtgtgctgcaggatcatcttataaaagaaacacctgatacactcagtgacccgcaaactgttccagaggaagaaagagaagctaaattctaccgggttgtaacttgttccttattggcattaaagagattactttgccttttacctgataatgagcttgattctctggaggagaaatttaagtctcttttatcacagaataagttttggaagtatggaaaacacagtgtacctcagattcgctcagcttattttgagttagtctctgcattgtgccagcgcattccacagttgatgaaagaggaagcatccaaagtgagcccatcagttctacttagcattgatgacagtgacccaattgtctgcccagctctctgggaagctgtactctatacacttacaactattgaggactgttggcttcatgtaaatgcaaaaaagagtgtgtttcccaagctatcaactgtgattcgtgaaggtggtcggggtctagctactgtcatatatccttaccttctgccattcatcagcaagctccctcagtccatcacaaatccaaagttggatttcttcaaaaatttcctcacgtctctagttgctgggctgtcaacagagagaactaaaaccagctctttagagtcctcggcagtaatatctgctttttttgaatgcttacgttttataatgcagcaaaacttaggtgaggaagagattgaacagatgctcgtcaatgatcagttgatcccttttattgatgcagttctcaaagacccaggattgcaacatgggcagctatttaaccatttagcagaaactctaagttcctgggaagccaaagcagacacggaaaaagatgaaaaaacagctcacaacttggagaacgtactgatacatttctgggaaagactgtcagagatctgtgttgcgaaaatcagtgagccagaagctgatgttgagtccgttttgggtgtatctaacctattacaggtgcttcagaagccgaagagctcattgaagtcaagtaaaaaaaaaaatggtaaggttagatttgctgatgagatacttgaaagcaataaagagaatgaaaaatgtgtatcttcagaaggagagaagattgaaggctgggaattaacaactgaaccttctctcactcataattcttcaggccttttgtctcctctaaggaaaaaacctttggaagacttagtctgtaaactcgcagatataagtattaattatgtcaatgaacgaaagtcagagcaacatctaaggtttctttctactctgcttgactccttttcttcaagccgagtatttaaaatgctacttggtgatgaaaaacagagtattgtccaagccaaacctcttgaaatagccaagcttgtacaaaaaaatcctgcggtgcagtttttataccagaaactgataggttggctaaatgaagatcaaaggaaggattttggtttcctggtggacattttgtacagtgctctccggtgctgtgacaatgatatggaaagaaaaaaagtcttggatgatctaaccaaggtggacttgaaatggaattctcttcttaagattattgaaaaggcatgtcctagttcagataaacatgctttagtaactccttggctcaaaggcgatatccttggtgagaaattggtcaacttggcagattgtctttgtaatgaggacttggaatccagggtatcttcagaatctcacttctcagaaagatggactcttctaagcttggtattatcccaacatgttaaaaatgattacttgattggagacgtatatgttgaaagaatcattgttagacttcatgaaactttattcaaaacaaagaaattatcagaagctgaaagcagtgactcatcagtgtcttttatctgtgatgtggcctataactatttcagctcagcgaaaggatgcttgctaatgccatcatctgaagatttattattaactctctttcagttatgtgctcagagcaaagaaaaaacacatttgccagattttcttatctgtaaactgaaaaatacttggctctctggtgtaaatttattggttcatcaaactgacagttcatataaagagagtaccttcctacatttgtctgctctgtggctgaagaaccaagttcaggcttcatctttggatatcaacagtctccaagtcctcttgtctgctgttgatgatttgctaaatacacttctagagagtgaagattcttatcttatgggagtttatattggaagtgtaatgccgaacgacagtgaatgggaaaagatgaggcagtctcttcctatgcagtggttacatagacctcttttagagggaagattgagtttgaattatgaatgtttcaaaacagattttaaggaacaggacataaagacacttcccagccatttgtgtacttcagcattattgagcaaaatggtcttaattgcactgagaaaggaaacagtcttagaaaataatgagcttgagaaaataattgcagaactgctttattcactgcagtggtgtgaagaattagataacccacctatttttctaattggattttgtgaaatacttcaaaaaatgaatattacgtatgataacttacgtgtacttggtaatacgtcgggccttttgcagctgttatttaacaggtccagagaacatggcacactgtggtctcttattattgctaagttgatcctttcccgaagcatttcatctgatgaagtaaaaccacattataagagaaaagaaagtttttttccactaactgaaggcaatttgcataccattcaaagtctatgtccatttttgtcaaaagaagaaaagaaagaatttagtgctcaatgtatacctgctcttttgggctggactaagaaagatctttgcagcactaatggaggttttggacatcttgccattttcaattcttgtctgcaaaccaaaagtatagatgatggagagctattacatggaatattaaaaatcataatatcctggaagaaagagcatgaagatatttttcttttcagttgtaatctatcagaagcaagtccagaggtactgggtgtaaatatagaaataatccggtttctttccctatttctgaaatactgctcatcccctttggcagagagtgagtgggacttcatcatgtgctccatgttggcttggttggagacaacaagtgagaatcaggcattgtattctattccacttgtgcaactgtttgcctgtgtcagctgtgatttggcctgtgacctcagtgctttctttgattccacaactctggataccattggcaatcttcctgtaaatctaatcagtgaatggaaagaatttttttcccaaggcatccacagtttgcttttacctattttggtgactgttacaggagaaaacaaagatgtgtctgaaacatcctttcagaatgcaatgctgaaacccatgtgtgaaacattaacgtatatctcaaaggaacagctattgagtcacaaacttcctgcaagattagttgctgaccaaaaaacaaacttaccagaatatctccagactttgttaaatacattggccccattactcctcttcagagctaggcctgtgcaaattgctgtttatcatatgctatacaaattgatgcctgaattaccacagtatgatcaggataatctaaagtcatacggagatgaagaagaagagccagccttgtcaccaccagcagcactgatgtctcttcttagcattcaagaggacttactagaaaatgttttggggtgtattcctgttggacagatagttactattaaaccactgagtgaagacttctgttatgttctgggataccttctcacttggaaattaatactaactttcttcaaagctgcatcatcacagcttcgggctttgtattccatgtatcttcggaaaacaaagagtttgaataaattgctctatcacctgttcaggcttatgccagaaaatccaacctatgcagagacagcagttgaggtcccaaataaggaccctaaaacattctttactgaggagctccagctgagtattagagaaacaacaatgcttccataccacattccacacttggcttgttcagtctatcatatgacattaaaagacttgcctgccatggttaggttgtggtggaatagcagtgagaagcgtgttttcaatattgtggatagatttacaagcaagtatgtcagcagtgttctttcttttcaagaaatatcttctgtacaaacaagtacacaactatttaatggcatgacggttaaagctcgagctactactcgagaggtaatggctacttatactattgaggacatagttattgaacttataatacaactgccttcaaattatccactgggttcaataatagtagaaagtgggaaaagagtaggagtagctgttcagcagtggcggaactggatgctgcagttaagcacttacctcacccatcagaatggaagtattatggaaggcttagctttatggaaaaataacgtagacaaacgttttgagggtgttgaagattgcatgatctgtttctcagtcattcacggtttcaactattcccttcccaaaaaagcctgtagaacatgcaagaaaaaattccattcagcctgcttgtacaaatggtttacatctagcaacaaatccacttgtccactgtgtcgtgagacgtttttctgagatttttttcactggaagggatccctgaagtacatcaaacaaaggcattggatttggatccgtctgaaagtgtggatgtggggaagccagtgagcattacttttaaataggaccttctctggaaaattattttggttaatgtaataatcctaaaatcaggtttacttaactttagattgctttgtaaatgtttggaaactttcttttacaaaagaatattacatatttgagagaaaatatttctattaatggtttaatttctttgtatatttaaaaataaatatgaaaaacccctaaattacagaattggaatttgtgaaaagattgcacaactatattattgataaacccattccgtttgttgatctgtgttttagaatagtccaagtgaagcaaaacgaactgagagagctgatttacatctatagatattttaagccttatttattagttatgacaataaattagtattctgatatttgtagattattttaatgataaaaatgacactaagctattaatacggcttgtcttaagatatctggaggcatgctctgaaatcctatataaaagagtttaaactgaactttaaggtgcctccatttatcaagggttatgaaactcagaaaattaaattcttgatgctgacctttttgcttgtgggagaattatttctatatattagtgaaatttgaattgtaaacttgtcagtgaatttatcactctgagcgagtctctagagggtgagaatttgagagaaatagtaatttgattatttcattcatgaagcggagtggtagttatccttctattgagagggaagaaataaatgagtattactgaaacttaaagatcagtggaaaaaaaaaacatttaaaaatgttgtaggagactttcaattttggaagcaaactgagctattcttaccagccaaagttatactaaataagagacttgggggagcaaatgtttttcagccttcagaaatgaaagttaaggattttagcactaggtaaaattcagtataataggctgaagtggagtaagtgaaaacctgccttttgccactcttaaaaattgtgcccaaaatataaaagtgtggaactttagaacttggaataattttattgcagtcttccattacatggaaatagcatatctaatatctaggttacttgagagaccagctaatcatctctgttgcacatgtttaattggcaaaaagcaattcatgataaataaaattactgctttccatctactgggtaaaatgactattgaaatagtatgaatgtggtcagaggattatagttgagagtgaagtactatgtgtgagttatagatctctcgaattatatttatagatgcagtgtcctgcccagttttgtttgcctcctacattttactgtaaaatatttattgtcttctagccttgagcctctgagggtcagtaagtgaagtacagatagcaaaattttactacctcgttaacccttttcttaaaatattctctatctttctatgtctctttctgacatagtaatcccaaaggattgtgttactccccgtgaaagttattacttttcctttaaaaatggttttataataagactgtttaaaacctttccagtattggtacatcttggcttctggcccaaaccccaagcagaaaagaaaatggaataatggagcattgtttttccacattagtattagggcatcagattcttggtgaaacactataattaagtagttataattaaataactgttcttcatacttaggactcttaatacatttctttaagacttgtaagtataattgtaaagcttgttaactgtttatatactaaagaaaaagctttacaagataagactgaaattcagaataccacatctgtacagcgttgacaactctaactaaaaggattacagcccttaaaattttagcttaaggacattttaaaattgcatgagattagcaaaattattaatttaaaaccccaaagtaaattgcaaattttaaaatttatttttgactcttttatcacatgctccaatgtatgtacataagtgtctgtggcttaaataatatgttgttatttgatacatttttgtggtgcaagtaattaatgttattatttgattgttataccatatgtgcccattaaaattctttttaattaaaaatatttcaaatatgcagaaaaataataatataaatgcccttgtacccttcacatactattttgccatatttgcttctgatttttaaataaataaaatgttactcttttgtacttct

SEQ ID NO: 149572 - DNA, 2207 bp, Homo sapiens
  Payload ID: 9535
  Gene Symbol: LEAP2
  Gene Name: liver expressed antimicrobial peptide 2
  Uniprot ID: Q969E1
  ENST ID: ENST00000296877
  CDS Start-End: 1374-1607
aggactagaatcaggacagtcagatctgtggtcacatcctgcccaattccagctctgaggtccatcaaaccatctgcttctcccttggcaagaagctccctctgtctgactggcagcagggtcagtggccatccttttctaccttcagctgttgtgcatctcctccacgttttcctggagtaaaggaacaagcaggttcttatccaaatacccaacctgtgaagatgagacggcccttgggaagaggtattagccaagttttcagtatgatgcccggcagaaagaatttgttgtctttgtcttaagcttattatcctcccaggtcataggaagatctaaagtccaatcagtctccttactcagaattcacagctttcccctcaaacttaaaatgcccatgtcatttcacgagtacccataactacccatcgtttagatacatgtcctcccttggtctagaaatctgcagcagttcctacttaaactgatggatgctttgggctttggaggtatctcatccctatgcctgttgccctgaagctgccggaaggaaaggccccactcaactactgggaagaaagcccataattcaaggcttttaatacagtcactacacaagctctccctctgatttaggagatcttgttacctcctcatctacatgtgcttaaaaacaaaaagaaacctataattattcaattcacctgtggtccaaataagtctcacatccagccattcccctgagagggcaggaggccagactttgaactttccacagctgggtcttcattttactagtgagataaagaggtgcagattagggtgacagtccatctaagcaagtggacgatctggggaactgtaggccttgctgaagcatcctcccacagaaaggagataagggccttatccaattggctgtacacaatagatcagtgcttctttcctagacaaggctgaaaggggccaacattatttctgaagacttcattattggaattctatgggagtgatctcactgagctattttggaatagaaatgtggctagttgcctgacctccctcaatggtttcacgtggctttcaaagggaaggaagggcagtgctgacttttggtaaaatgggcgaaagggtccatgccagcaacacaatcactcaaagtccagatgagggatcagtaaatacaacgtgcctgaaaggtggcccttgagcacattcctccggtagacattaacttattaaattgattctgattacaaatataaactttgcccccatctcacccagtaacaatgcaagagttgatgtcagtctataaaaggaagtaggaactgtccctggctttcaggctccaacatcctccccctgtcaagatgtggcacctcaaactttgtgcagtcctcatgatcttcctgttgctgttgggccagatagatggctccccaataccagaagtgagttcggcaaagagaaggccacggagaatgaccccattttggagaggggtttccctcaggcctattggagcctcctgccgggatgattctgagtgtatcacaaggctatgcagaaaaagacgctgttccttaagtgtggcccaggaatgatgtacataccagggaaagaaaggacagcagtcacctccgacaatgctccgttctatggaatattgattaactgcattttggctggagacacccaagtgaagcaatcttgtatttttaatatttaaaggcagatgtacgctttaaattggtctccatttcttcttagaatgttgatatatggataagcataactaaacttgtcaatttagagtttatttttctatggatactattaaatgtctcaaattgaaattttagcagtctggaattcaagcttttgagggaaagaaggattcattttgtatactaaagaaaaaaacagcattgcccaataatgtgttaacttctcaatctggaaagtgtagtgagagctacataatcaatagctacgtaatcaacttcagcaagttcctaagctgtggccctggatcccttcactccatactcttcagggaggtgtcaaaggtggtcaagcttgggaggctgaggcaggagaatcacttgaacctgggaggtggaggttgcagtgagccaagatcatgccactgcaccccagcctgggtgacatagagagactctgtctcaaaaaaaaaaaaaaaa

SEQ ID NO: 149573 - DNA, 761 bp, Homo sapiens
  Payload ID: 9536
  Gene Symbol: LKAAEAR1
  Gene Name: LKAAEAR motif containing 1
  Uniprot ID: Q8TD35
  ENST ID: ENST00000302096
  CDS Start-End: 141-725
gtgcggaactcaaaaccgactgcggagagcccagcgggcgggagctggggcgcacgttggggccctgccgaggggcgggcagggcccggtgccagccccggcaccgacgggacgccctcctccctccgcagggcgggaggatgccgccgccagcgaaggagggcgggcgcaagggcccgcgggagcgaagcgggaagagcgcgccaggcacggcgcagggtgaggagcgtgccaagggggcgcccgcgacagagccccccaagccgggctgggccctgacgccgcagggactggcggccatgctccctgcgcagcgccaccgccatctgctcttcggcgacctgctggaggacgtgggcgcggcggcctccaccttcccgtgcgggtcggtggaaccggggtaccgcatgcccgacccgcgcccgtggacgcagtcgctcgagctgcccgccgagcgccagaaccggctcctcggcgtcctcaaggcagcggaggcccgcgggcgagtccgcgccctgcggctgcgctacacccgcatgcgggccgaggagatcgcgctgctcatccagcggcagaagtccgcgcgcgccgccatccggctggagctgttcctgccgccgcagctgaagcccgcgcggatcccggaccccctggaccgccaagagcggaggcgcgtggagaccatcctggaggagaacgtggatggcaccatcttcccgcggtgacggcgactgagagtgtgcgacgcgccccagcctccc

SEQ ID NO: 149574 - DNA, 868 bp, Homo sapiens
  Payload ID: 9536
  Gene Symbol: LKAAEAR1
  Gene Name: LKAAEAR motif containing 1
  Uniprot ID: Q8TD35
  ENST ID: ENST00000308906
  CDS Start-End: 141-863
gtgcggaactcaaaaccgactgcggagagcccagcgggcgggagctggggcgcacgttggggccctgccgaggggcgggcagggcccggtgccagccccggcaccgacgggacgccctcctccctccgcagggcgggaggatgccgccgccagcgaaggagggcgggcgcaagggcccgcgggagcgaagcgggaagagcgcgccaggcacggcgcagggtgaggagcgtgccaagggggcgcccgcgacagagccccccaagccgggctgggccctgacgccgcagggactggcggccatgctccctgcgcagcgccaccgccatctgctcttcggcgacctgctggaggacgtgggcgcggcggcctccaccttcccgtgcgggtcggtggaaccggggtaccgcatgcccgacccgcgcccgtggacgcagtcgctcgagctgcccgccgagcgccagaaccggctcctcggcgtcctcaaggcagcggaggcccgcgggcgagtccgcgccctgcggctgcgctacacccgcatgcgggccgaggagatcgcgctgctcatccagcggcagaagtccgcgcgcgccgccatccggctggagctgttcctgccgccgcagctgaagcccgcgcggatcccggaccccctggaccgccaagaggtgcagacaagccccggtaggggcggggaaaggggaggggccctgcccgcctccgcacacgccggaccccagcctctctccccggcagcggaggcgcgtggagaccatcctggaggagaacgtggatggcaccatcttcccgcggtgacggcgactgagagtgtgcgacgcgccccagcctcccacataaagttataattctc

SEQ ID NO: 149575 - DNA, 3348 bp, Homo sapiens
  Payload ID: 9537
  Gene Symbol:
  Gene Name: LL0XNC01-16G2.1
  ENST ID: ENST00000436629
  CDS Start-End: 355-2091
atgtctcctcctgtctagccacttgtcttccacagagactacgaaatttttcttcctcatctacctggggcttctgggagaagcgggaagccctgtagtcttagcacagcgggctttggagacccctgcgctgcgcagcgcggccgcgtgactgaggcgagatcttccaccctcctgctccagggcctctaggtggcctccagagtgggctccacagcttgaaggcggcgtttttccgcgggtggtcgcagcgtccgcagagtcggagaaagctgcgtcagagactgcaacagtcagcacacattcctgtctgatcaggctccctccctcaagtcctctgcgatagctctggcgatgcttcaggactggtgcaggaggatgggtgtgaacgcagagcgctctctgctcatcctggatatccctgacgactgcgaggaacatgagttccaggaggccgtgcgggctgccctgtcgcccctgggcaggtaccgagtgctcatcaaggtcttcagaaaggagctcggggccagggcagccttggtggaattcgctgagggtttaaaccaaagcttgattccccgccaaatagcaggcaaagggggaccctggaaagtgatctccctgccccaggcccttgatgctgagtttcaggatatacccagtttccctgcacagccccaggggcaagcagtggccagaggtgcaggtgaagcaggagctgcaggtgaggcaggatctgtaggtgaggcaggaggtgtgaatgaggaaagatctgcaggtgaagatgaggcaggaggtataggtgaggcaggaggtgtaggtgaggcaggagcagcaggtgaggcaggagcagcaggtgaggcaggagcagcaggtgaggcaggaggtgcaggtgaggcaggaggtgcaggtgaggcaggaggtgcaggtgaggaaggaggtacaggtgaggaaggaggtgcaggtgaggcaggaggcgcaggtgaggaaggaggtgaagatgaggcaggagctgcaggtgaggcagtaggtgcaggtgtggtggaggcctggacccagtcatggcgccagaccctgcggcctctggtgaaaactatggcctaccgggaactgagacccttttccgggagggagcagccaggctgcgtggaagagtcctttgagagctggttggaggacgccaaggatatgctgcagctgtggtgccacgcgtcggaaagggagagaaggaggcggctgctggacagcttggatggcctggccctggatatcgtgagcggcctcctggaggaagatccagacttctctgcgcaggactgcctgacggcgctggggcaggtgtttaggagccgggatacatggatgacctcgcggatgaagttcctgacctgcacgcaggggccccaggaggggctgtttgccttcgtggtgcgcctggaaggcctgctgcagaaggccgtggagaagggggcggtccacccagccatggccaaccacctgcgactgcggcaggtgctgtctcgggcccgccccagcgaggcactccaggataccctgaggaggatgcagctggagaggaggccacctgacttcctgaggctgctgcggctcatccgggacatggaggcgtgggcagcctccctagcaaggagccagcagggtgtggcctgggcagcggccccagtggagagtgaagacccagctgctgcccaggcctccccggcccagggggacgccagcgaggctgatcccggagcagaagatgctgatgaggctgcttccaccaccaaagaggccgccagggttgcccctgccactggggaagatgaaaatgcccctgcaggccttgaaggcctaggtcagggaaggtcccccgacgcccctgggggcctcccagccaggatgggcagtgcagtcgacatggccccaggaggtcccagctgggagccagagggccttgtccaggttggaggccaggaggctgaggagcctccccaggaggggctcaagcccatcttagaggagtcagaaaacgaggatgaggatggggctggggaggcgggcaagcccaagtcccccccgggcaaataggctctgagggccctgagggctcctctcctctcaggcagcagcaccctggaggcagacagaggccaggccagggccggtccctcaccccatgttgggagctgtgcctcccacctcccctaatgggtcctggccaccaccaccagcccttcccagtgactcagatgaccacgtttgataccaaatggggagctggcctggagggagctctgagcggccagcctgaagatgtctgccccccaccccttgtcctgtgttgggagagatgggggaaagaggccctctcaagggtgacagctgcctacatgtcccaagaggtggcccccacttgccatccctggggcagactgccccccgttccgggaagcccaccctcacctctgtaggccccatagtgacccacgcgtccgaacagcagacgcccactcacccaccgctagccattgttcctacacaaagttgtatgctgtgcgcccatcggtgcggctgcctctgggcctggggcacatgctgtgagcttcctgctagcccaggctctgctagctgctacctgtcccttgtcgtgagcaccacctctgctttcctggtgtagatctaggccaggggctgcttgttctcgtggagctgtgtgtgttcttctctgagcagctcctccccggaggcccccagcacagtcctgggagatggtggaaggaggcgccagggcacgatggacgctcatcctgtgactgctatggtgagcatgaccacgatggtgcccgtgaccatgatggtgaccatgactgtgtgaggaagaaccggacctgggacagagcagagctgccctgcctgaggctccccggggagctttgtgctttggtgttctattcctgttgttacttgtgactcagtttccttgacttgggggggtgttccctgctgtgttttcagtgtcctgtgagggctatagggcagggccctgccccagcggatgggctcgggagggggctccctgaagccagtggacactgccagagtccaccatcctggcaagaggcggaccctggggccctcaggaaggagggagttggcagcgggggctgcagcaggagtaggagcagatgaggcgtcttgccaggaaccccaggaggagggggcccgggacctgtgtgggacctgtgtcctgtggtggcaatttgcagtttctctctgtgttgtgattcccttctcttcaatggtttcagtacatgtttctcttcaataaacttcattcagtgttcc

SEQ ID NO: 149576 - DNA, 1268 bp, Homo sapiens
  Payload ID: 9538
  Gene Symbol:
  Gene Name: LLfos-48D6.2
  ENST ID: ENST00000621615
  CDS Start-End: 75-467
gcgaacggcgagcagcggcggcggcgcggagagacgcagcggaggttttcctggtttcggaccccagcggccggatggtgaaatcctccctgcagcggatcctcaatagccactgcttcgccagagagaaggaaggggataaacccagcgccaccatccacgccagccgcaccatgccgctcctaagcctgcacagccgcggcggcagcagcagtgagaggtggcctgtgagtacggcatggtgcacgtggtctcccaggccgggggccccgaaggcaaagactactgcatcctctacaacccgcagtgggcccatcttccgcacgacctcagcaaggcatctttcctgcagctgcgcaactggacggcctccctgctctgctccgcagccgacctccccgcccgtggcttcagcaaccagatcccgctggtggcgcgggggaactgcaccttctatgagaaagtgaggctggcccagggcagcggagcacgcgggctgctcatcgtcagcagggagaggctggtccccccggggggtaataagacgcagtatgatgagattggcattcccgtggccctgctcagctacaaagacatgctggacatcttcacgcgtttcggccgcacggtgagggcggcgctgtatgcgcctaaggagccggtgctggactacaacatggtcatcatcttcatcatggctgtgggcaccgtcgccatcggcggctactgggccgggagtcgggacgtgaagaaaaggtacatgaagcacaagcgcgacgatgggcccgagaagcaggaggacgaggcggtggacgtgacgccggtgatgacctgcgtgtttgtggtgatgtgctgctccatgctggtgctgctctactatttctacgatctcctcgtgtacgtggtcatcgggatcttctgcctggcctccgccaccggcctctacagctgcctggcgccctgtgtgcggcggctgcccttcggcaagtgcaggatccccaacaacagcctgccctacttccacaagcgcccgcaggcccgtatgctgctcctggcgctcttctgcgtggccgtcagcgtggtgtggggcgtcttccgcaacgaggaccagtaagtgctgcttcccccgggccccggcgggcagcggagtcctcgggtgcaccagggctcctggggccctgactccctgccctccctggaggccgccccagcctggagctgcttcagcaccgcgtgatgaagagccctggccccgggctgctctgaca

SEQ ID NO: 149577 - DNA, 7746 bp, Homo sapiens
  Payload ID: 9539
  Gene Symbol: LLPH
  Gene Name: LLP homolog, long-term synaptic facilitation (Aplysia)
  Uniprot ID: Q9BRT6
  ENST ID: ENST00000266604
  CDS Start-End: 72-461
ggaagacggaagtgcaaagacttccggtcggcgtgagcgtgaggtgtgggtgttcgtttctcaggtaaaacatggctaaaagcttacggagtaagtggaaaagaaagatgcgtgctgaaaagagaaaaaagaatgccccaaaggaggccagcaggcttaaaagtattctcaaactagacggtgatgttttaatgaaagatgttcaagagatagcaactgtggtggtacccaaacccaaacattgccaagagaaaatgcaatgtgaggtaaaagatgaaaaagatgacatgaaaatggagactgatattaagagaaacaaaaagactcttctagaccagcatggacagtacccaatatggatgaaccaaaggcaaagaaaaaggctgaaggcaaagcgagagaaaagaaaggggaaaagcaaagcaaaagcagtgaaagtggcaaagggtttggcctggtagactcttaaaaccttggaaaatgccacatgggatagatgacggattagaatgtatacacatgtatactttgatttcaactgccaccaaatgaaaaccatttgttttcctattttaacttggccttttttcttcaattcaaacccagcataactcctcaagtttgttttgggaacttgaataaaatattttctttgatacatccaagctctactgatactttaactggatgctacccaatatccagttataatcaggcctcaacgttctgtcaggtattaatatggttagaattgttcttacaactggtaattatagtcaatagagataaaacagatgatgtactgacaaatttttgtgaacttagattttaaagaaagttgttgtataatcatatcatttaaaaatactacattagggctgggcatggtggctcacacctgtaatcccagcactttgggaggccgaggcaggtggatcacgaggtcagttcgagactagcctggctaatacagtgaaaccccatctctactaaaaatacaaaattagccgggcatgggggcgcgcacctgtagttccagctactcgggaggctgaggcaggataattgcttgaacccaggagatggaggttgcagtgagccaagattgccccactgcactccaccctgggcaatggagtaggactctgtctcaaaaaaaaaaaaaataatggatcttataaagtacttgtgtggagctttgattccacagaataaaagatattttgtgtgtagatcttcaagtctgatttttttttctttcatgtatgcttaaggttttttagtcctagagaagaccagatttcaattaaatgttttcttatcttaattttaggtagaatattaacatatacaaatcagtatgctttttaggaaattagaacatttcaggtttttcatggaaactgatttaatgttctttagtgttaatattgtgtggcctaatatagtatcatgcagcattccccggagtgtgttcttcagtatcagtttcctctggatgcttggttaaaaaaaataaattgtgttcacatcgatttgggaaatgctacatacttgaagatttacaaaagattttagtttaggattagaatagtcctacagggttccagcagcaaagaaacctgtttagcgtctactctttgaaactagttttctgagaaatgatttttagttaaatctgtcttactacagtttgctaaattcatttttattttacttttagttaagcaatctaaacttagcattccctctgaatttcactataatcagattaaccatctcatatgttaactggaacaaccaaatacttactgagtgcctagtatgtgggccagggactttccagatgcttgggacagattgaataagataagatttctgctctcatagggctgagagctgtgtatctgtttagaagaagatgttaacttcccaggagaactcaagtaaaatgtgaaatagaataaggccacttggtcatgaggtcacaaactttgtgccaggcacactgctaaattggggcacaatacatggacatgtattgtaataaagaggacatgacccaaatgtttcagaaaatttaagcttataaaatttgatgccagtaaactcttggaattgtttaaatatagtagacttttcttatttttctcaatagtttattgaaaagttggtagataactttaaatgcttaaaatttcttaacagctaagaaagatatgaattgaaagatgtcattcatgatctttgttgcctttggtgtaggtatgaataacactagcatttgtgagggaaaagtgaatatgtacatttttattcataaaataaaaaaaattgcaaacaaccagttaagccactgacaatatcagcctaaatacagtagctgaattatttatgttttttttttttttttttttgagatggggtctcactctgtcacccaggctggagtgattggcacaagtgtggctccgctgcaacctccacctcccaggctgaagcgattctcccacctcagcctccccagtagctgggactacaggtgggtgccaccacgcccagctaatttttgtatttttgtagagacagggtttcgccatgttgcccaggctggtctcaaactcctggactcaagtaatccacctgccccagcctcccaaagtggtgggattacatgcgtgagccaccacacccggcctaatgtagacattttttatgatttttggaaaagggggccaggcaccaaattctaacaatttgggaggctgaggcagatggatcacctgaggtcaggagtttgagaccagcctgaccaacatggtgaaaccctgtctctactaaaaatacaaagttagctgggcatggtggcaggtgcctgtaatcccagctacttgggaggctgaggaaggagaatcgcttgaacctgggaggcagaggttgcagtgagtcaagaccacaccattgcactccagcctgagcaagaagagcgaaactccatctcaaaaaaaaaaaaaaaaaaagtctacattcgtgatattacacagttggcacttatttacattttggcagcattgtcaggtagagaccaatgccagggttatgttcatgttttctgtggctgataacctctaatttgattctgttgatagtagctttgagctttcatccagagcctctctgatgttaggattttcacttcattgtgtccagtcatgaagtttgtccattcaggatttaacttgaaagttaacaaaatcaaaaatcaaagcaccattaccagaaaacatatttgggaatcatgttctcaagtgtcacatggcctctggaaaggcgactgctgaagagaagtttactgacacagtgttgtcagtaccctctaaggcactgagttcctgaacactaccagcaagattctccccacctccaaatattggcaggaaatttagactagcatttcaaaattagtgcaggggtatggtcacatctttggcactttatttttaaagattacaaatcgagaagtatagcatagtccttttatcttttaaataattagcttatttttttgaaatttgtcatctttttgactgacattttccagagaattgctgtaaagccacaagatggagctcaagctaagcaccaaatcattttggaattagattgagtgagctaaatcacattaggaattgaatgtaacactttttgtgttttaagaaattaagtctgaaatcaaaatataatttaaagatgatcaaaactgcttcaagtattaactcatttaatctgcccagcaatctcatgagtttggtactaatgttatctgagtttggtactaatgtaatctctgtttacacatggggaaactgaggcacacaggccatacaactaaaactgaaatctgggattcaaatttaggcagtgtggctctagagcctatactcttacaatgccattctgcctctcaaggatgtgcaaactcttgctaagagagaaaggtgattttaggatagaatacctatttttgggtcaacctgtgatagattgggttcatgtgggctcaggatcagataaagagcaggtttaagtagaataatgatgtacagaaccctcctcaaatctctaggcctaaggcagactggatttcctcaggtgacacttcattaggaatgggctgaccaatccaaaaggggaaggtgtaggccatgatcagtagttgcccaaggtactaatcagagaagaaatgcaaactgcagttgaagctctaaggtagaatcaagtagtggttttgaccacatcctattttctactgtcacattagtgtagatatctcttcccactatgtaattcacatgctacatcaaataaggatgcagcagtatatatttgcttattaggaaattcagatattttcaaaatttggatccgtgtttctggaatatggcttaagagttggagaagaaaaatagctataaatgacttgaatcaaatatctgaaatggactggtggtgatggtgaggggcagcaatgtgtaatttagggaagtgctgaccacaacataaaattgggaggaatctaaggcattgccaaatttataaatactacaatagaaatgcagatgctaagctgttggctaatcttactagttaagtgactaacttctgatgccatctggcagagtgattcaaatttgtgctaaacacaaaatatatgtctttttccctctatttgcctgcatgtattaataaaaacactgttgcagtagacacataccaattttacaaggaaatgtttaggggtgaggtgggactgttaaatacttacatcaggtcaaaggtcactctgctgtttccagaggactgtcaggtagccaggaggcccagggccacttttgggcctgcttacaaaaccctaaattttccgcagttgaatgccaagagtcttttgcagttattttagagcaggggagaaaatacaatgtgttgccaaataagcttaatttggtaggcaagcagtaaaaataacccaacagccaacatttagagaatgcgtactctcttaaatgctttatgtatattatttaatctttaaaacactgtgggatcaatactttaattatccctattttcagatgagaaaacagtttgaaaggttaactaaatttacccaaagtcatgcaactgctaagtagtgagcaagccgcctgtcccagagtatagaatgaatacctatgatggaaagctacagagagacagacttttatttgatttaaggaagcgccttctaaccaagattttgggagctgaaatgggcaccttgggatccttgaggtgtcagtctaaggtggacaggcatttggttggaatgtagcaaaatggattcaaacactgtagagttatccttcagaatctatcggggattggtgccaggatcttcacagataccaaaatccacagatgctcgaatcgcttacataaactggtgaaatatttgcatataacccatgcccatcctcccatatatagtcatatgtcactaaatgactgggatgtgttctgagaagtgtgtcactaggtaatatcgttaatcattgtgtgaatatcatagactgtacttacacaaatctagagggtatcgtctactacacttaggctatgtgatatagcctattgcttctaggctacaaattggtcaagcaagttactgtactgagtactgtaggcaattgtatcacaatgggaagtatttgtgtatctaaacatagaaaaggtacagtaaaaatacagtataaaagataaaaaaatggtacacctgtaccacttatgaatagtgcttggaggactcgtgcttggggtgagtcaatgagtaagccatgagtgaatgtgaaggcctcagacatgactgtatactgctgtatattttttttttttttttttgagacggagtttcactcttgttgcccaggctggagtacaatggcgcaatctcagctcacctcaacctccacctcctgggttcaagcaattcttctgcctcaacctcccgactagctaggattacaggcatgcaccaccacggccggctaattttgtatttttggtagagatgaggtttctccatgttggtcaggctggccttgaactcctgacctcaggtgatccacctgcctcagcctcccaaagtgctgcgattacaggcgtgagccactgtactcggcctgctgtaggctttatatacactgtgcacttaggctacataaacttataaaaaactttcttcaataataaattaactttagcttcctgtaacttttttaccttataaacgttttaattttttaaactgtataacccttttatcataacacttaccttaaaacacaaatacattgtacaactgtacacaaatattttatatttttataagcttttttctatttccacaatttttaattttttaatttctttttttacttcttaagtttttttgttaaaaactaagacacaaacacattagcctccatctacactgtcttccacctccacagcttgtcccactgcaaggccttcaggggcaataacaggcatggagttgccatctcctatgagagcaacaccttcttgtgcaataccttctggaggacctgcctgaggctgttcacagtcaactttttctttaagtagaaggagtacactctaaaataaaaagtatagtaaagccataaaccgtagtcattattatcaagtattatgaactgtacataattgtatgtgctatacctttatatgactgacagcacagtaggtttgtttacaccagcatcaccacaaacacgtgagtaatgcattgcactgtgatgttaagatggctacagtgtcactgggccataggaatgtttcagctctactgtaatcttatgggaccactgcctatattgactgaaatgtcatcatgcaatgcatgactgtactttaaatcatctctagattacttataatacaatgaaaatgctatgtaaatagttgttatactgtatttagggaataatgataagaaaaaaagtcggtacatgttcagtacagatgcaactgtagttttcttttgaatattttttatctcaggacgaagccccaaatgcagaattcatagatacagagggccaactgttcttggaatttgggttgaaagctgttaaagttcttttcagccaaaaaaaaatgcctcgtaataaattgtcatgtttgaaatgtatcatgcttgttttgctctacatagttttttggtactacataactgtagacttaagtatctttttggtggaaataaaatatgaaatctctttaattttgttaatgttaggtctggtattcgttccattaagttccactttaaagtatggaaaaatgttataaacatctgctttaaacaatgaatggtactgcaatagtcctgtaaagaaaaatgaatggagtaaagtccttcaagttttcatttaaagaatggcatagctttataatacattaagtttttaatatgcggaatgtatttaatatcctaaagcgatgaattgtcttggcattatgctatcttatgaaacactttcttactctcacattgtgtctttatagttttcaatatcagcaaaacctttaaatagtcttagttgggtgttgtgtatcattgtacagcaactgttagtacatgtggtatttctgatccatgtaataaagtacatttgtcatgta

SEQ ID NO: 149578 - DNA, 1177 bp, Homo sapiens
  Payload ID: 9539
  Gene Symbol: LLPH
  Gene Name: LLP homolog, long-term synaptic facilitation (Aplysia)
  Uniprot ID: Q9BRT6
  ENST ID: ENST00000446587
  CDS Start-End: 255-644
gagttcggttcctcaccggtccagtgacacatgggacttggggcttgattccgccacccttggagaatttcgtttcttgacactcgctgggctatacttgagctccagtccggagatgcaggccttgttgagggcgagggttccccttgctctttttggtgggggccctccggcttccgagtgcactggataaagtggagcccacccctgtcgttcactcccgctgaagttaacttcggccctcaaggtaaaacatggctaaaagcttacggagtaagtggaaaagaaagatgcgtgctgaaaagagaaaaaagaatgccccaaaggaggccagcaggcttaaaagtattctcaaactagacggtgatgttttaatgaaagatgttcaagagatagcaactgtggtggtacccaaacccaaacattgccaagagaaaatgcaatgtgaggtaaaagatgaaaaagatgacatgaaaatggagactgatattaagagaaacaaaaagactcttctagaccagcatggacagtacccaatatggatgaaccaaaggcaaagaaaaaggctgaaggcaaagcgagagaaaagaaaggggaaaagcaaagcaaaagcagtgaaagtggcaaagggtttggcctggtagactcttaaaaccttggaaaatgccacatgggatagatgacggattagaatgtatacacatgtatactttgatttcaactgccaccaaatgaaaaccatttgttttcctattttaacttggccttttttcttcaattcaaacccagcataactcctcaagtttgttttgggaacttgaataaaatattttctttgatacatccaagctctactgatactttaactggatgctacccaatatccagttataatcaggcctcaacgttctgtcaggtattaatatggttagaattgttcttacaactggtaattatagtcaatagagataaaacagatgatgtactgacaaatttttgtgaacttagattttaaagaaagttgttgtataatcatatcatttaaaaatactacattagggctgggcatggtggctcacacctgtaatcccagcactttgggaggccgaggcaggtggatcacgaggtcagttcgagactagcctggctaatacagtgaaaccccatctctactaaa

SEQ ID NO: 149579 - DNA, 2099 bp, Homo sapiens
  Payload ID: 9540
  Gene Symbol: LMBRD1
  Gene Name: LMBR1 domain containing 1
  Uniprot ID: Q9NUN5
  ENST ID: ENST00000370570
  CDS Start-End: 344-1747
gtactgcattcatgaagtaggctttgaaaattatacatcttggacaagtttttaagggatagtgggctttccttacacaactaaaataacctttacttcacataaggtttcctgctagaaactttcaaacacatacaaaaatcagagaaaatacactgggtagtaacaaacatctctttttgttctatttcaggctattttggcattctgctggatatatgttcgtaaataccaaagtcggcgggaaagtgaagttgtctccaccataacagcaattttttctctagcaattgcacttatcacatcagcacttctaccagtggatatatttttggtttcttacatgaaaaatcaaaatggtacatttaaggactgggctaatgctaatgtcagcagacagattgaggacactgtattatacggttactatactttatattctgttatattgttctgtgtgttcttctggatcccttttgtctacttctattatgaagaaaaggatgatgatgatactagtaaatgtactcaaattaaaacggcactcaagtatactttgggatttgttgtgatttgtgcactgcttcttttagttggtgcctttgttccattgaatgttcccaataacaaaaattctacagagtgggaaaaagtgaagtccctatttgaagaacttggaagtagtcatggtttagctgcattgtcattttctatcagttctctgaccttgattggaatgttggcagctataacttacacagcctatggcatgtctgcgttacctttaaatctgataaaaggcactagaagcgctgcttatgaacgtttggaaaacactgaagacattgaagaagtagaacaacacattcaaacgattaaatcaaaaagcaaagatggtcgacctttgccagcaagggataaacgcgccttaaaacaatttgaagaaaggttacgaacacttaagaagagagagaggcatttagaattcattgaaaacagctggtggacaaaattttgtggcgctctgcgtcccctgaagatcgtctggggaatatttttcatcttagttgcattgctgtttgtaatttctctcttcttgtcaaatttagataaagctcttcattcagctggaatagattctggtttcataatttttggagctaacctgagtaatccactgaatatgcttttgcctttactacaaacagttttccctcttgattatattcttataacaattattattatgtactttatttttacttcaatggcaggaattcgaaatattggcatatggttcttttggattagattatataaaatcagaagaggtagaaccaggccccaagcactcctttttctctgcatgatacttctgcttattgtccttcacactagctacatgatttatagtcttgctccccaatatgttatgtatggaagccaaaattacttaatagagactaatataacttctgataatcataaaggcaattcaaccctttctgtgccaaagagatgtgatgcagatgctcctgaagatcagtgtactgttacccggacatacctattccttcacaagttctggttcttcagtgctgcttactattttggtaactgggcctttcttggggtatttttgattggattaattgtatcctgttgtaaagggaagaaatcggttattgaaggagtagatgaagattcagacataagtgatgatgagccctctgtctattctgcttgacagccttctgtcttaaaggttttataatgctgactgaatatctgttatgcatttttaaagtattaaactaacattaggatttgctaactagctttcatcaaaaatgggagcatggctataagacaactatattttattatatgttttctgaagtaacattgtatcatagattaacattttaaattaccataatcatgctatgtaaatataagactactggctttgtgagggaatgtttgtgcaaaattttttcctctaatgtataatagtgttaaattgattaaaaatcttccagaattaatattcccttttgtcactttttgaaaacataataaatcatctgtatctgtgc

SEQ ID NO: 149580 - DNA, 2209 bp, Homo sapiens
  Payload ID: 9540
  Gene Symbol: LMBRD1
  Gene Name: LMBR1 domain containing 1
  Uniprot ID: Q9NUN5
  ENST ID: ENST00000370577
  CDS Start-End: 231-1853
actgcgtccgcacgcgccccgcccctgagcagtccttgctgccccgcccccgctcggctcgccgccaggggacgctagtgggtccagtctccttggcaaccacttgctcctccccctccgcccctttaacctttagggtgcgcgggtgcagtatatctcgcgctctctcccctttccccctcccctttccccaccccgggcgctcaggttggtctggaccggaagcgaagatggcgacttctggcgcggcctcggcggagctggtgatcggctggtgcatattcggcctcttactactggctattttggcattctgctggatatatgttcgtaaataccaaagtcggcgggaaagtgaagttgtctccaccataacagcaattttttctctagcaattgcacttatcacatcagcacttctaccagtggatatatttttggtttcttacatgaaaaatcaaaatggtacatttaaggactgggctaatgctaatgtcagcagacagattgaggacactgtattatacggttactatactttatattctgttatattgttctgtgtgttcttctggatcccttttgtctacttctattatgaagaaaaggatgatgatgatactagtaaatgtactcaaattaaaacggcactcaagtatactttgggatttgttgtgatttgtgcactgcttcttttagttggtgcctttgttccattgaatgttcccaataacaaaaattctacagagtgggaaaaagtgaagtccctatttgaagaacttggaagtagtcatggtttagctgcattgtcattttctatcagttctctgaccttgattggaatgttggcagctataacttacacagcctatggcatgtctgcgttacctttaaatctgataaaaggcactagaagcgctgcttatgaacgtttggaaaacactgaagacattgaagaagtagaacaacacattcaaacgattaaatcaaaaagcaaagatggtcgacctttgccagcaagggataaacgcgccttaaaacaatttgaagaaaggttacgaacacttaagaagagagagaggcatttagaattcattgaaaacagctggtggacaaaattttgtggcgctctgcgtcccctgaagatcgtctggggaatatttttcatcttagttgcattgctgtttgtaatttctctcttcttgtcaaatttagataaagctcttcattcagctggaatagattctggtttcataatttttggagctaacctgagtaatccactgaatatgcttttgcctttactacaaacagttttccctcttgattatattcttataacaattattattatgtactttatttttacttcaatggcaggaattcgaaatattggcatatggttcttttggattagattatataaaatcagaagaggtagaaccaggccccaagcactcctttttctctgcatgatacttctgcttattgtccttcacactagctacatgatttatagtcttgctccccaatatgttatgtatggaagccaaaattacttaatagagactaatataacttctgataatcataaaggcaattcaaccctttctgtgccaaagagatgtgatgcagatgctcctgaagatcagtgtactgttacccggacatacctattccttcacaagttctggttcttcagtgctgcttactattttggtaactgggcctttcttggggtatttttgattggattaattgtatcctgttgtaaagggaagaaatcggttattgaaggagtagatgaagattcagacataagtgatgatgagccctctgtctattctgcttgacagccttctgtcttaaaggttttataatgctgactgaatatctgttatgcatttttaaagtattaaactaacattaggatttgctaactagctttcatcaaaaatgggagcatggctataagacaactatattttattatatgttttctgaagtaacattgtatcatagattaacattttaaattaccataatcatgctatgtaaatataagactactggctttgtgagggaatgtttgtgcaaaattttttcctctaatgtataatagtgttaaattgattaaaaatcttccagaattaatattcccttttgtcactttttgaaaacataataaatcatctgtatctgtgcctta

SEQ ID NO: 149581 - DNA, 1861 bp, Homo sapiens
  Payload ID: 9540
  Gene Symbol: LMBRD1
  Gene Name: LMBR1 domain containing 1
  Uniprot ID: Q9NUN5
  ENST ID: ENST00000472827
  CDS Start-End: 5-1183
gaagatggcgacttctggcgcggcctcggcggagctggtgatcggctggtgcatattcggcctcttactactggctattttggcattctgctggatatatgttcgtaaataccaaagtcggcgggaaagtgaagttgtctccaccataacagcaattttttctctagcaattgcacttatcacatcagcacttctaccagtggatatatttttggtttcttacatgaaaaatcaaaatggtacatttaaggactgggctaatgctaatgtcagcagacagattgaggacactgtattatacggttactatactttatattctgttatattgttctgtgtgttcttctggatcccttttgtctacttctattatgaagaaaaggatgatgatgatactagtaaatgtactcaaattaaaacggcactcaagtatactttgggatttgttgtgatttgtgcactgcttcttttagttggtgcctttgttccattgaatgttcccaataacaaaaattctacagagtgggaaaaagtgaagtccctatttgaagaacttggaagtagtcatggtttagctgcattgtcattttctatcagttctctgaccttgattggaatgttggcagctataacttacacagcctatggcatgtctgcgttacctttaaatctgataaaaggcactagaagcgctgcttatgaacgtttggaaaacactgaagacattgaagaagtagaacaacacattcaaacgattaaatcaaaaagcaaagatggtcgacctttgccagcaagggataaacgcgccttaaaacaatttgaagaaaggttacgaacacttaagaagagagagaggcatttagaattcattgaaaacagctggtggacaaaattttgtggcgctctgcgtcccctgaagatcgtctggggaatatttttcatcttagttgcattgctgtttgtaatttctctcttcttgtcaaatttagataaagctcttcattcagctggaatagattctggtttcataatttttggagctaacctgagtaatccactgaatatgcttttgcctttactacaaacagaattcgaaatattggcatatggttcttttggattagattatataaaatcagaagaggtagaaccaggccccaagcactcctttttctctgcatgatacttctgcttattgtccttcacactagctacatgatttatagtcttgctccccaatatgttatgtatggaagccaaaattacttaatagagactaatataacttctgataatcataaaggcaattcaaccctttctgtgccaaagagatgtgatgcagatgctcctgaagatcagtgtactgttacccggacatacctattccttcacaagttctggttcttcagtgctgcttactattttggtaactgggcctttcttggggtatttttgattggattaattgtatcctgttgtaaagggaagaaatcggttattgaaggagtagatgaagattcagacataagtgatgatgagccctctgtctattctgcttgacagccttctgtcttaaaggttttataatgctgactgaatatctgttatgcatttttaaagtattaaactaacattaggatttgctaactagctttcatcaaaaatgggagcatggctataagacaactatattttattatatgttttctgaagtaacattgtatcatagattaacattttaaattaccataatcatgctatgtaaatataagactactggctttgtgagggaatgtttgtgcaaaattttttcctctaatgtataatagtgttaaattgattaaaaatcttccagaattaa

SEQ ID NO: 149582 - DNA, 8185 bp, Homo sapiens
  Payload ID: 9541
  Gene Symbol: LMBRD2
  Gene Name: LMBR1 domain containing 2
  Uniprot ID: Q68DH5
  ENST ID: ENST00000296603
  CDS Start-End: 464-2551
acaaccccccgcgggagcgggactggtcggcccacggggtaggcggggaggcggaagcgggcggcgctacggctgactgggaaatgtcagccgctggactgtagacggattttcctttctcgggagcccgcaggccttctggtgatcgccagcgctgtcgtctctgagcgtggatcccagaacctggacagctgtggcggccgccgtttcccggtcccgtccagacgctgtctggcgagatcggacggtgagcctaaggcggaacgcgtgaggcgcttttgagtctggggtccggggccgagagcaggcggaaagagaggggacccggcagaccccgagtggccgccgctgcggggcccaagtccttggctgctgagtggtgacagtagcccagcccgccggccagatatggtccagacctgtacatgaataactttggttagtcagagtgaaatattcaataatgagtggtgcagctttgggacttgagattgtttttgtcttttttctggcattatttctgcttcatcgatatggagactttaagaaacagcatagacttgtgattattggaacactgcttgcttggtatctctgctttcttattgtcttcatactgcctctggatgttagtacgacaatatacaaccggtgcaagcatgctgctgcaaattcaagccctcctgagaatagcaacattacaggattgtacgcaactgctaaccctgttccaagccagcatccttgtttcaagccatggagttacattcctgatggaatcatgccaattttctggagggtagtgtattggacgtcacaatttttaacatggattctcttaccttttatgcagtcatatgcaagatcaggagggttttccatcactggaaagatcaaaactgcactaattgagaatgcaatctactatggcacctatttgctgatttttggagcatttttaatttatgtagctgtaaacccacatttacatttagaatggaaccagcttcagacaattgggatagctgctgcaaatacatggggtctgtttcttcttgtgttgttgttggggtatggcttggtggaaattcctcgatcatactggaatggagcaaaaaggggttatctacttatgaaaacgtattttaaggcagccaaactgatgacagagaaagcagatgcagaagagaatttggaagatgccatggaggaggttcgtaaagtgaatgaaagcatcaagtataatcacccattgagaaaatgtgttgatacaatacttaaaaagtgccctacagagtatcaggaaaaaatgggtaggaacatggatgattatgaagattttgatgaaaagcatagtatctatccaagtgaaaaaagtctggtaaaactgcataaacaggtgatttattcagttcagagacaccgtcgaactcaagtacaatggcagattcttttggaacaagcattttatctagaagatgtagcaaaaaatgaaactagtgctactcatcagtttgttcacacctttcaatcgccagagccagaaaatcgatttatccaatatttttataatcctacatttgaatggtactgggaatgtcttttgcgaccatggttttacaagatacttgctgtggttctgtccatcttctctgtgattgttgtgtggtcagagtgcacattctttagcactactcctgtcttatccctctttgcggtcttcatacagctggcagaaaaaacatataattatatttatatcgagattgcctgcttcctttccatcttcttcctaagtatctgtgtttattctactgtgttcaggattcgtgtatttaactattattatttggcctcacatcaccagactgatgcttatagccttcttttcagtggcatgctattttgccgtttgacacctcctttatgtcttaatttcttgggtttgacccatatggattcatctatctctcacaagaatactcaaccaactgcttatacatctattatgggttccatgaaagttttatcctttattgcagatggattctatatatattatcctatgttggtggtaattctctgcattgctacttattttagtttgggaacccgttgtttgaatctgctcggtttccagcagtttatgggagatgatgatatgacatcagacttagttaatgaaggaaaagaattaatcagaaaagagaagagaaaaaggcaaaggcaagaagaaggtgaaaatcgaagaagagaatggaaagaacgttatggacacaatagagaagattccactaggaacagaaatattcatactgaccccaaagagtcaaacttctcagatgttaataccaaccgttctgcattcaaatataccagggctaataacaggactgaaagggaccggatagaacttctccaagatgcagaacctttggattttaatgcagaaacattcactgatgatcctcttgaatctgaatcaggaaggtatcagcctggtggacgatatctctcgatgtctcgcagtgacatatttaatgatgtttaaagtctgaaaaagtttgtgggaccactaaccaaggtcaacacatcagttcagtcttgatgaacatctgtgtaccctagaatttcctctatacacagtgaaaagtgtcaagataacaaaaaaggcactgagaattaattatatcttaggaataatagtttaatgtgcattgaatagagtatcacctttttcaacaagatttattacatatcatttcctaagcatctgccttagaaatacagttacagtggaaggactttaagaaagatcaacatatgttaagaacatgcagttcagtttgtttcagattaattttttttcaagagagttattttaaagattcaaggaagccataagtcatactaaataatattatatacagttttgttattgtgacttacatttttgttacttctaaaaagtatattcaacctgtatttcccaaagaaatgtaagtgaatggagacctcaaataataactgtattcataaaactcgtgtcttaaaacaaggcttacttactagacataactgaatgtaaaaagtgctttttcaaatctgtttgcaaactcgtgggggatttttgcatgtataagattaagattatacttcaagtgatgcgtgtctgtgtatttagcatgtgtactataatcaggtgatatagtattccttcagtctttgtagtaactggatttttttatgcttctggtattgctttataaaagattttcatttcagaaagctatgttcacatttatcatttaacatattgatttaaatgttgattatgatattcaaggataaatcctaggcattaatgaaaaatagtttttttttaagtagtcaaagagtccaacaaaatccttcagtatttaaaggtacctgcttatactttttgagaaaaaaactggttattcaaaggtaaaaagtgaatccatttactgttattactgatacttaaatcgtggtttatagaaaacaaaactatattagaatggaaatgtgtaataacttgttggttaaacattcttactaaatagactgtttttaacctttgtgtttaagataaatttatgtattatattttaaagcactagtgttttattgaaaagtgaacatgtttgattgcagcatgcttgcagagagttttcttatgtccctagaatatttgcaactcttactgaatccatgctacatttggtgaccatacttcagcttgcctaatacagtctcagtgtaacacctagtatcctgtttattactagtgattactttcaccctcaagtatcccacccagtttgaagatgaattatatggttcccctaacttgaagttaatctttccccaagacataaatttaaaatttttatttttatttttaataaatattatcatgtaagtttttttttaaaacacagctctatgcagatattgaaaggaatagagcatcatcctcattatctgaaaattttgatctttgagtttttatgatctttgcaattagatcccttttaaaataattatcagtggatagacttactctgaattgaaggtcatatagactacacttaagaacacacacatacagtcttttcatgtgaagtgtggccagaaagcaataagccaggagcagagataatttgatcctctttgtaatttaatgattgactaattgaatacctttggcaaatcatgtagctcttcagtgcctcaagtgcttcattctgcactttcatttgcagaatgaagatgatacttgctatttacctgctgatctaccttacaaagccattgtgaggaagttgaattggtgtttatgtactggagtttataactgtgctatttttcctagtgatacttgaaggtattggatggggaaatgatcatcccagaaatgggtccagtttcttattattacagaaaagtttacaagtacttaaagcaaaaacgcttttggactaattcatcaaaagtcctgtgaaagtagtgttgttttatttagtctttgggtttactttggaataatttcttaagtataatgtttctcatcaggttttgtcatgaaattaagatgctgttgttgaaacagaagcagaaaaggaaaagaaattagccaattacttttataactaacttttataatgccctaagataaattggtaggaacgtgtaaggtaatgttaccactttcctttagtattaaattttttatggttataataattgaagtgtatacgtgcatacacttcacaaccggtatagattcctttatgactttcaagttatatttaaaatatttggttgtttcagtgattcagaatattcaactttaagcagaatttgtcttacagaatgttatatacaatcatataaaaatgttattttgttggataaatttgagttcagaaggcaatgacttgaccctggaagactcagtttattgctggggaaccaagttaatatttgtcaagccaccctgtgtaaaaaactgtaatgggtagaagttttctcttttgagaagcttattgaaatataatgacatctactgcaaaataggactactaaatacatatactttacatgcaaagtacatttcttaaagaattatttctggtaatttttgatgactttattacttgataataagtattagtttaaaattttccaaattattctttaaatagttgttaggtaagaatattcagtaagccagtaattcagaataactattgtagaaaataataataatctattaatttaatgaatcacctctaaattactaattaacttcttttacaacataaataacttgttatcaatagagcatttttgtaaaaaacaaaagaaagaataagtttaattattaaaatttgctctcttaccaaatgaatacaagggcttttgaataatctcattgcataagaggccctcatttcacagaaatggtaagaactaaatcaaaagattcaagggttttccctttataaagaatagatcagaaaatttgacaatccagacattcaaaaaaacattctgccagttgatttttttggactactatttgattagatgatcagttctgaaatttaagctgcatgtatgcccaaattaaattagcataggaaagtcaatgtgtgtggttttttaaaagtatattttagcatattaatggagcaatttaatttacattcagttacaaacctcattcttattaataggtttagggaatgttcttgctggtgtgctgattaccatattagagaaaaaataaactctccatattataattcacctgtttagtaaggtgagtttcttacttgtgatttgagtggattatgcctaaaaattacaagtatatttgcactaagcgacaaaatatgtccctgaaaaatcttagcgtacttgaatcatcaaatgtaatggattgtattgaattctaaatgttaagaagtaagtggatttagggttttgtctttcttttcttatgtcctctctcattcctttatacctttcttcctttctgaggcctatgtttatagcatgacttttaatgtgctgaaagattttccttctgttttgtgtacagagttgtttttgatgagtggtacgctcagaaggaactagttctgactacaaatcccactacttgaaatagcaatattgtacctaaagtagtcaaacagattttgctagacaactaagcaacatctgaatacaaatgtaaagtatgctggctcagtgtatcttttaggtcactaaagaggacacatcagtaaataaattgttttcagtgtaatatttttacataaaaatagatttcccccccaaaatttaagatttatttagattcttgagacatctttttatgaaaaggaattaataacatacatcatcaaaacttttcttaggagcgttgaaacaatataagaaggttacagaaggccttctaaaatatgaattcccatctgtatgaggtacttctttccaactcagtgactttttgcccagagacttggaagactgggcaatgttttctttcccctttcccaactcctggagacaaggccctaggagcaatttcctccagtagggcaggccgtagtcctgctctgtcttacttcccactgcagcaggaacatgtcctcgcctctgattccttctgtaccaagccattggtccattgaggtcaattgaggactcactgtaaattttaaatctgttaataaagcaaggatattggcatgttcctcttctcatcaatatcctaaaagacatttattttttacacactccttgggaaaaattaactttttttcactgaaaatatttccttttttggttatcttgatctcagattattttgtgaaagaattttactgtacttagttcaaaagagtagaaagaatgatttactattgcagacatatgtagggtaaaatcataatttatttaaactgactgtacaacaccatttagagttgatattgacataaatgttattagcctactaatttggaactgcatttctcaacaatgctggcaagcatcttccgtacttagcataccaagttgtaggggagagactgtgtatatattttttaaaagcaatccaatggatttgtttttgttcatattttgaaaacaactcgaaggatttttcttattttagaaggtagaaaatatgtggacctgtgttttaaattaatatgtatttataaattataacattgaatgatacaacagagctctaatattgatgttctcactttctgatatttaatttttataaatgtttttgtaagtaactaattgtagtattgcttttaaatagttttaaaatctatctcaaataagttctgcccagacctatttccttaggacagtattctaaagttcagtagtccagtgtgagcttgaaatactcctagatcccgtcagtgatttttatatataccaatacacaagcaaattattaatataccaaaaacctaatttctgcattgcattaataaaatacttgttattttgcctttatccaattcagttgattaggtgaaatagaaaattaatcttttcaaatgtgcatatgatcataatttttcaaaatgttactgtggtcatttttggtgcatgatgccaagtttatctttagttagccattgccacctgatatgtaatgacaaatgttttactatctgatcattgggttgtagattaaactattttttttctctgtagattctcactacattttcaaatatgtacttggaaaaagctgcaaagtgctacctataagcaaattagtaactttggccttatctatgcatagtgttcgctcagtttggttttgataaattgattgacttgcagttcctttgtagtattttaacttattgtgatgtaatgaattttttgaaatgtttatttgattagctgttaaaatataggaaagaatgtagctttgcatgaaataaattacatttctacaagttaataagaattttgctgattgtttatatattttacttcatttgagattaaggttcttttaagtagattcaggcgttctttgttccttatcaatttattagcaaatatgacaaatgttttaaaataaatatgtgtactttagttttca

SEQ ID NO: 149583 - DNA, 1167 bp, Homo sapiens
  Payload ID: 9542
  Gene Symbol: LMO7DN
  Gene Name: LMO7 downstream neighbor
  Uniprot ID: F2Z398
  ENST ID: ENST00000318245
  CDS Start-End: 90-458
ttttattctttttagatgattatcccggggctcctctgagaaaagtaggagtagattgctggaattaccatgggttaaaatgaaagaggatgacctggctggacaaaggcgtatggactcaggaagacgagaactcctgctccttctctgaatcggattttcctggctgtagagaccagatcaacccttccattccatcgatttggaccgcagtttcgggaatgatgatttcgctggaagtgcggtggtggataaaggggaagcagggttacgtaatttcactgggtcacgctctgtcacctaggctggagtgcagtggaacattctcagctcactgcatcctcggcctcccagggggctcaagctatcctcccgcctcagtctcccaagtagttgggaccacagctttgtatctggtggaggaggcttgggccgaagctggtaaaatgagaagttaggggaggatgtcctcagagagctggaagatcacagtcctcattgtcacaaccgatacagtgttgatagggacaacatatgccttggaatgtttcaaatactttgccacaattaagggacactgaacaggaactcagttttggaaaacaaagtggaatttctggaaactgctagcataaaagctttgacagggtcacatgcagattagcataattttattacattttctattttagtcctgtgagatactaatttggatttcattgtgcccattgagcggcttttgttctttggctgtgagtttaattatttagttatttatgagtgcatctgggcataagtgccacagttttatttcggtgacaaatttatggtcagtgaattttagtaattaatgaataaattatttctcctccataaatgcccctgcaatttctgattttcataacaattcataatacttaagaaaaattctttattagttgaaaaagccaatgctaatggaatcaggaaaaggagatttcaaattgctttaattaactgtattaattaatatccaatatgtgtaagatattgaattggctttggttgtctctcttagcatttagttgcctaaaatctgtttaacatatgaatatactgtgttaaaataaattctaattcttttgtgaagtaaatggcaagaataaaaggatctcctttataatcttt

SEQ ID NO: 149584 - DNA, 3236 bp, Homo sapiens
  Payload ID: 9543
  Gene Symbol: LONP1
  Gene Name: lon peptidase 1, mitochondrial
  Uniprot ID: P36776
  ENST ID: ENST00000360614
  CDS Start-End: 159-3038
cgaactccgccccctcttctccgcgtaggcccagctccctgaagcggctgtttcgagccacgcgcccatcgggtaccgaggcacgcgccgggcgtcacgtgcgtttcgcggcgagcggaaatgacgcgagttgtgtgagccgccagtatggccgggctatggcggcgagcactggctacgtgcgactgtggggagcggcgcggtgctgggtgctgcggcggccgatgctggccgccgccggggggcgggttcccactgcagcaggagcgtggttgctccgaggccagcggacctgcgacgcctctcctccttgggcactgtggggccgaggcccggcaattgggggccaatggcgggggttttgggaagcgagcagccgcggcggaggcgcattctcggggggcgaggacgcctccgagggcggcgcggaggaaggagccggcggcgcggggggcagcgcgggcgccggggaaggcccggtcataacggcgctcacgcccatgacgatccccgatgtgtttccgcacctgccgctcatcgccatcacccgcaacccggtgttcccgcgctttatcaagattatcgaggttaaaaataagaagttggttgagctgctgagaaggaaagttcgtctcgcccagccttatgtcggcgtctttctaaagagagatgacagcaatgagtcggatgtggtcgagagcctggatgaaatctaccacacggggacgtttgcccagatccatgagatgcaggaccttggggacaagctgcgcatgatcgtcatgggacacagaagagtccatatcagcagacagctggaggtggagcccgaggagccggaggcggagaacaagcacaagccccgcaggaagtcaaagcggggcaagaaggaggcggaggacgagctgagcgccaggcacccggcggagctggcgatggagcccacccctgagctcccggctgaggtgctcatggtggaggtagagaacgttgtccacgaggacttccaggtcacggaggaggtgaaagccctgactgcagagatcgtgaagaccatccgggacatcattgccttgaaccctctctacagggagtcagtgctgcagatgatgcaggctggccagcgggtggtggacaaccccatctacctgagcgacatgggcgccgcgctcaccggggccgagtcccatgagctgcaggacgtcctggaagagaccaatattcctaagcggctgtacaaggccctctccctgctgaagaaggaatttgaactgagcaagctgcagcagcgcctggggcgggaggtggaggagaagatcaagcagacccaccgtaagtacctgctgcaggagcagctaaagatcatcaagaaggagctgggcctggagaaggacgacaaggatgccatcgaggagaagttccgggagcgcctgaaggagctcgtggtccccaagcacgtcatggatgttgtggacgaggagctgagcaagctgggcctgctggacaaccactcctcggagttcaatgtcacccgcaactacctagactggctcacgtccatcccttggggcaagtacagcaacgagaacctggacctggcgcgggcacaggcagtgctggaggaagaccactacggcatggaggacgtcaagaaacgcatcctggagttcattgccgttagccagctccgcggctccacccagggcaagatcctctgcttctatggcccccctggcgtgggtaagaccagcattgctcgctccatcgcccgcgccctgaaccgagagtacttccgcttcagcgtcgggggcatgactgacgtggctgagatcaagggccacaggcggacctacgtgggcgccatgcccgggaagatcatccagtgtttgaagaagaccaagacggagaaccccctgatcctcatcgacgaggtggacaagatcggccgaggctaccagggggacccgtcgtcggcactgctggagctgctggacccagagcagaatgccaacttcctggaccactacctggacgtgcccgtggacttgtccaaggtgctgttcatctgcacggccaacgtcacggacaccatccccgagccgctgcgagaccgtatggagatgatcaacgtgtcgggctacgtggcccaggagaagctggccattgcggagcgctacctggtgccccaggctcgcgccctgtgtggcttggatgagagcaaggccaagctgtcatcggacgtgctgacgctgctcatcaagcagtactgccgcgagagcggtgtccgcaacctgcagaagcaagtggagaaggtgttacggaaatcggcctacaagattgtcagcggcgaggccgagtccgtggaggtgacgcccgagaacctgcaggacttcgtggggaagcccgtgttcaccgtggagcgcatgtatgacgtgacaccgcccggcgtggtcatggggctggcctggaccgcaatgggaggctccacgctgtttgtggagacatccctgagacggccacaggacaaggatgccaagggtgacaaggatggcagcctggaggtgacaggccagctgggggaggtgatgaaggagagcgcccgcatagcctacaccttcgccagagccttcctcatgcagcacgcccccgccaatgactacctggtgacctcacacatccacctgcatgtgcccgagggcgccacccccaaggacggcccaagcgcaggctgcaccatcgtcacggccctgctgtccctggccatgggcaggcctgtccggcagaatctggccatgactggcgaagtctccctcacgggcaagatcctgcctgttggtggcatcaaggagaagaccattgcggccaagcgcgcaggggtgacgtgcatcgtcctgccagccgagaacaagaaggacttctacgacctggcagccttcatcaccgagggcctggaggtgcacttcgtggaacactaccgggagatcttcgacatcgccttcccggacgagcaggcagaggcgctggccgtggaacggtgacggccaccccgggactgcaggcggcggatgtcaggccctgtctgggccagaactgagcgctgtggggagcgcgcccggacctggcagtggagccaccgagcgagcagctcggtccagtgacccagatcccagggacctcagtcggcttaatcagagtgtggcatagaagctatttaatgattaaagtcatttgcagta

SEQ ID NO: 149585 - DNA, 3002 bp, Homo sapiens
  Payload ID: 9543
  Gene Symbol: LONP1
  Gene Name: lon peptidase 1, mitochondrial
  Uniprot ID: P36776
  ENST ID: ENST00000540670
  CDS Start-End: 514-2805
agacgaatcccgggaagcccgaatccgcgcaccccaaagtgcgctcagagcctgagtatgcgcacccggccacccgtggccagtctagagtctgagcatgcgcatgttgtccgcgcgcctaagcatgtgcacaggctgctcatgagttcctaaacgttgcgtttgcaacactaccagtgttttgtacgggcgctggcgcctgctcacagccttccacgtgaccggaaaaggccttcagcgcataaagtgggagaccggaagaggcggagacgatccgatgctcgaactccgccccctcttctccgcgtaggcccagctccctgaagcggctgtttcgagccacgcgcccatcgggttaaaaataagaagttggttgagctgctgagaaggaaagttcgtctcgcccagccttatgtcggcgtctttctaaagagagatgacagcaatgagtcggatgtggtcgagagcctggatgaaatctaccacacggggacgtttgcccagatccatgagatgcaggaccttggggacaagctgcgcatgatcgtcatgggacacagaagagtccatatcagcagacagctggaggtggagcccgaggagccggaggcggagaacaagcacaagccccgcaggaagtcaaagcggggcaagaaggaggcggaggacgagctgagcgccaggcacccggcggagctggcgatggagcccacccctgagctcccggctgaggtgctcatggtggaggtagagaacgttgtccacgaggacttccaggtcacggaggaggtgaaagccctgactgcagagatcgtgaagaccatccgggacatcattgccttgaaccctctctacagggagtcagtgctgcagatgatgcaggctggccagcgggtggtggacaaccccatctacctgagcgacatgggcgccgcgctcaccggggccgagtcccatgagctgcaggacgtcctggaagagaccaatattcctaagcggctgtacaaggccctctccctgctgaagaaggaatttgaactgagcaagctgcagcagcgcctggggcgggaggtggaggagaagatcaagcagacccaccgtaagtacctgctgcaggagcagctaaagatcatcaagaaggagctgggcctggagaaggacgacaaggatgccatcgaggagaagttccgggagcgcctgaaggagctcgtggtccccaagcacgtcatggatgttgtggacgaggagctgagcaagctgggcctgctggacaaccactcctcggagttcaatgtcacccgcaactacctagactggctcacgtccatcccttggggcaagtacagcaacgagaacctggacctggcgcgggcacaggcagtgctggaggaagaccactacggcatggaggacgtcaagaaacgcatcctggagttcattgccgttagccagctccgcggctccacccagggcaagatcctctgcttctatggcccccctggcgtgggtaagaccagcattgctcgctccatcgcccgcgccctgaaccgagagtacttccgcttcagcgtcgggggcatgactgacgtggctgagatcaagggccacaggcggacctacgtgggcgccatgcccgggaagatcatccagtgtttgaagaagaccaagacggagaaccccctgatcctcatcgacgaggtggacaagatcggccgaggctaccagggggacccgtcgtcggcactgctggagctgctggacccagagcagaatgccaacttcctggaccactacctggacgtgcccgtggacttgtccaaggtgctgttcatctgcacggccaacgtcacggacaccatccccgagccgctgcgagaccgtatggagatgatcaacgtgtcgggctacgtggcccaggagaagctggccattgcggagcgctacctggtgccccaggctcgcgccctgtgtggcttggatgagagcaaggccaagctgtcatcggacgtgctgacgctgctcatcaagcagtactgccgcgagagcggtgtccgcaacctgcagaagcaagtggagaaggtgttacggaaatcggcctacaagattgtcagcggcgaggccgagtccgtggaggtgacgcccgagaacctgcaggacttcgtggggaagcccgtgttcaccgtggagcgcatgtatgacgtgacaccgcccggcgtggtcatggggctggcctggaccgcaatgggaggctccacgctgtttgtggagacatccctgagacggccacaggacaaggatgccaagggtgacaaggatggcagcctggaggtgacaggccagctgggggaggtgatgaaggagagcgcccgcatagcctacaccttcgccagagccttcctcatgcagcacgcccccgccaatgactacctggtgacctcacacatccacctgcatgtgcccgagggcgccacccccaaggacggcccaagcgcaggctgcaccatcgtcacggccctgctgtccctggccatgggcaggcctgtccggcagaatctggccatgactggcgaagtctccctcacgggcaagatcctgcctgttggtggcatcaaggagaagaccattgcggccaagcgcgcaggggtgacgtgcatcgtcctgccagccgagaacaagaaggacttctacgacctggcagccttcatcaccgagggcctggaggtgcacttcgtggaacactaccgggagatcttcgacatcgccttcccggacgagcaggcagaggcgctggccgtggaacggtgacggccaccccgggactgcaggcggcggatgtcaggccctgtctgggccagaactgagcgctgtggggagcgcgcccggacctggcagtggagccaccgagcgagcagctcggtccagtgacccagatcccagggacctcagtcggcttaatcagagtgtggcatagaagctatttaatgattaaagtcatttgcagt

SEQ ID NO: 149586 - DNA, 2626 bp, Homo sapiens
  Payload ID: 9543
  Gene Symbol: LONP1
  Gene Name: lon peptidase 1, mitochondrial
  ENST ID: ENST00000590729
  CDS Start-End: 60-2549
gcggcgcggggggcagcgcgggcgccggggaaggcccggtcataacggcgctcacgcccatgacgatccccgatgtgtttccgcacctgccgctcatcgccatcacccgcaacccggtgttcccgcgctttatcaagattatcgaggttaaaaataagaagttggttgagctgctgagaaggaaagttcgtctcgcccagccttatgtcggcgtctttctaaagagagatgacagcaatgagtcggatgtggtcgagagcctggatgaaatctaccacacggggacgtttgcccagatccatgagatgcaggaccttggggacaagctgcgcatgatcgtcatgggacacagaagagtccatatcagcagacagctggaggtggagcccgaggagccggaggcggagaacaagcacaagccccgcaggaagtcaaagcggggcaagaaggaggcggaggacgagctgagcgccaggcacccggcggagctggcgatggagcccacccctgagctcccggctgaggtgctcatggtggaggccctgactgcagagatcgtgaagaccatccgggacatcattgccttgaaccctctctacagggagtcagtgctgcagatgatgcaggctggccagcgggtggtggacaaccccatctacctgagcgacatgggcgccgcgctcaccggggccgagtcccatgagctgcaggacgtcctggaagagaccaatattcctaagcggctgtacaaggccctctccctgctgaagaaggaatttgaactgagcaagctgcagcagcgcctggggcgggaggtggaggagaagatcaagcagacccaccgtaagtacctgctgcaggagcagctaaagatcatcaagaaggagctgggcctggagaaggacgacaaggatgccatcgaggagaagttccgggagcgcctgaaggagctcgtggtccccaagcacgtcatggatgttgtggacgaggagctgagcaagctgggcctgctggacaaccactcctcggagttcaatgtcacccgcaactacctagactggctcacgtccatcccttggggcaagtacagcaacgagaacctggacctggcgcgggcacaggcagtgctggaggaagaccactacggcatggaggacgtcaagaaacgcatcctggagttcattgccgttagccagctccgcggctccacccagggcaagatcctctgcttctatggcccccctggcgtgggtaagaccagcattgctcgctccatcgcccgcgccctgaaccgagagtacttccgcttcagcgtcgggggcatgactgacgtggctgagatcaagggccacaggcggacctacgtgggcgccatgcccgggaagatcatccagtgtttgaagaagaccaagacggagaaccccctgatcctcatcgacgaggtggacaagatcggccgaggctaccagggggacccgtcgtcggcactgctggagctgctggacccagagcagaatgccaacttcctggaccactacctggacgtgcccgtggacttgtccaaggtgctgttcatctgcacggccaacgtcacggacaccatccccgagccgctgcgagaccgtatggagatgatcaacgtgtcgggctacgtggcccaggagaagctggccattgcggagcgctacctggtgccccaggctcgcgccctgtgtggcttggatgagagcaaggccaagctgtcatcggacgtgctgacgctgctcatcaagcagtactgccgcgagagcggtgtccgcaacctgcagaagcaagtggagaaggtgttacggaaatcggcctacaagattgtcagcggcgaggccgagtccgtggaggtgacgcccgagaacctgcaggacttcgtggggaagcccgtgttcaccgtggagcgcatgtatgacgtgacaccgcccggcgtggtcatggggctggcctggaccgcaatgggaggctccacgctgtttgtggagacatccctgagacggccacaggacaaggatgccaagggtgacaaggatggcagcctggaggtgacaggccagctgggggaggtgatgaaggagagcgcccgcatagcctacaccttcgccagagccttcctcatgcagcacgcccccgccaatgactacctggtgacctcacacatccacctgcatgtgcccgagggcgccacccccaaggacggcccaagcgcaggctgcaccatcgtcacggccctgctgtccctggccatgggcaggcctgtccggcagaatctggccatgactggcgaagtctccctcacgggcaagatcctgcctgttggtggcatcaaggagaagaccattgcggccaagcgcgcaggggtgacgtgcatcgtcctgccagccgagaacaagaaggacttctacgacctggcagccttcatcaccgagggcctggaggtgcacttcgtggaacactaccgggagatcttcgacatcgccttcccggacgagcaggcagaggcgctggccgtggaacggtgacggccaccccgggactgcaggcggcggatgtcaggccctgtctgggccagaactgagcgctgtggggagcgcgcccg

SEQ ID NO: 149587 - DNA, 2882 bp, Homo sapiens
  Payload ID: 9543
  Gene Symbol: LONP1
  Gene Name: lon peptidase 1, mitochondrial
  ENST ID: ENST00000585374
  CDS Start-End: 148-2685
agtatggccgggctatggcggcgagcactggctacgtgcgactgtggggagcggcgcggtgctgggtgctgcggcggccgatgctggccgccgccggggggcggcgcgggcgccggggaaggcccggtcataacggcgctcacgcccatgacgatccccgatgtgtttccgcacctgccgctcatcgccatcacccgcaacccggtgttcccgcgctttatcaagattatcgaggttaaaaataagaagttggttgagctgctgagaaggaaagttcgtctcgcccagccttatgtcggcgtctttctaaagagagatgacagcaatgagtcggatgtggtcgagagcctggatgaaatctaccacacggggacgtttgcccagatccatgagatgcaggaccttggggacaagctgcgcatgatcgtcatgggacacagaagagtccatatcagcagacagctggaggtggagcccgaggagccggaggcggagaacaagcacaagccccgcaggaagtcaaagcggggcaagaaggaggcggaggacgagctgagcgccaggcacccggcggagctggcgatggagcccacccctgagctcccggctgaggtgctcatggtggaggtagagaacgttgtccacgaggacttccaggtcacggaggaggtgaaagccctgactgcagagatcgtgaagaccatccgggacatcattgccttgaaccctctctacagggagtcagtgctgcagatgatgcaggctggccagcgggtggtggacaaccccatctacctgagcgacatgggcgccgcgctcaccggggccgagtcccatgagctgcaggacgtcctggaagagaccaatattcctaagcggctgtacaaggccctctccctgctgaagaaggaatttgaactgagcaagctgcagcagcgcctggggcgggaggtggaggagaagatcaagcagacccaccgtaagtacctgctgcaggagcagctaaagatcatcaagaaggagctgggcctggagaaggacgacaaggatgccatcgaggagaagttccgggagcgcctgaaggagctcgtggtccccaagcacgtcatggatgttgtggacgaggagctgagcaagctgggcctgctggacaaccactcctcggagttcaatgtcacccgcaactacctagactggctcacgtccatcccttggggcaagtacagcaacgagaacctggacctggcgcgggcacaggcagtgctggaggaagaccactacggcatggaggacgtcaagaaacgcatcctggagttcattgccgttagccagctccgcggctccacccagggcaagatcctctgcttctatggcccccctggcgtgggtaagaccagcattgctcgctccatcgcccgcgccctgaaccgagagtacttccgcttcagcgtcgggggcatgactgacgtggctgagatcaagggccacaggcggacctacgtgggcgccatgcccgggaagatcatccagtgtttgaagaagaccaagacggagaaccccctgatcctcatcgacgaggtggacaagatcggccgaggctaccagggggacccgtcgtcggcactgctggagctgctggacccagagcagaatgccaacttcctggaccactacctggacgtgcccgtggacttgtccaaggtgctgttcatctgcacggccaacgtcacggacaccatccccgagccgctgcgagaccgtatggagatgatcaacgtgtcgggctacgtggcccaggagaagctggccattgcggagcgctacctggtgccccaggctcgcgccctgtgtggcttggatgagagcaaggccaagctgtcatcggacgtgctgacgctgctcatcaagcagtactgccgcgagagcggtgtccgcaacctgcagaagcaagtggagaaggtgttacggaaatcggcctacaagattgtcagcggcgaggccgagtccgtggaggtgacgcccgagaacctgcaggacttcgtggggaagcccgtgttcaccgtggagcgcatgtatgacgtgacaccgcccggcgtggtcatggggctggcctggaccgcaatgggaggctccacgctgtttgtggagacatccctgagacggccacaggacaaggatgccaagggtgacaaggatggcagcctggaggtgacaggccagctgggggaggtgatgaaggagagcgcccgcatagcctacaccttcgccagagccttcctcatgcagcacgcccccgccaatgactacctggtgacctcacacatccacctgcatgtgcccgagggcgccacccccaaggacggcccaagcgcaggctgcaccatcgtcacggccctgctgtccctggccatgggcaggcctgtccggcagaatctggccatgactggcgaagtctccctcacgggcaagatcctgcctgttggtggcatcaaggagaagaccattgcggccaagcgcgcaggggtgacgtgcatcgtcctgccagccgagaacaagaaggacttctacgacctggcagccttcatcaccgagggcctggaggtgcacttcgtggaacactaccgggagatcttcgacatcgccttcccggacgagcaggcagaggcgctggccgtggaacggtgacggccaccccgggactgcaggcggcggatgtcaggccctgtctgggccagaactgagcgctgtggggagcgcgcccggacctggcagtggagccaccgagcgagcagctcggtccagtgacccagatcccagggacctcagtcggcttaatcagagtgtggcatagaagctatttaatgattaaagtcatttgcagt

SEQ ID NO: 149588 - DNA, 2884 bp, Homo sapiens
  Payload ID: 9543
  Gene Symbol: LONP1
  Gene Name: lon peptidase 1, mitochondrial
  ENST ID: ENST00000590558
  CDS Start-End: 1-558
ggcggcgcggaggaaggagccggcggcgcggggggcagcgcgggcgccggggaaggcccggtcataacggcgctcacgcccatgacgatccccgatgtgtttccgcacctgccgctcatcgccatcacccgcaacccggtgttcccgcgctttatcaagattatcgaggttaaaaataagaagttggttgagctgctgagaaggaaagttcgtctcgcccagccttatgtcggcgtctttctaaagagagatgacagcaatgagtcggatgtggtcgagagcctggatgaaatctaccacacggggacgtttgcccagatccatgagatgcaggaccttggggacaagctgcgcatgatcgtcatgggacacagaagggaggcctcagccgggtccagctcccagcctcagcggctgattcacacctgccttgctcccgtgtcagagtccatatcagcagacagctggaggtggagcccgaggagccggaggcggagaacaagcacaagccccgcaggaagtcaaagcggggcaagaaggaggcggaggacgagctgagcgccaggcacccggcggagctggcgatggagcccacccctgagctcccggctgaggtgctcatggtggaggtagagaacgttgtccacgaggacttccaggtcacggaggaggtgaaagccctgactgcagagatcgtgaagaccatccgggacatcattgccttgaaccctctctacagggagtcagtgctgcagatgatgcaggctggccagcgggtggtggacaaccccatctacctgagcgacatgggcgccgcgctcaccggggccgagtcccatgagctgcaggacgtcctggaagagaccaatattcctaagcggctgtacaaggccctctccctgctgaagaaggaatttgaactgagcaagctgcagcagcgcctggggcgggaggtggaggagaagatcaagcagacccaccgtaagtacctgctgcaggagcagctaaagatcatcaagaaggagctgggcctggagaaggacgacaaggatgccatcgaggagaagttccgggagcgcctgaaggagctcgtggtccccaagcacgtcatggatgttgtggacgaggagctgagcaagctgggcctgctggacaaccactcctcggagttcaatgtcacccgcaactacctagactggctcacgtccatcccttggggcaagtacagcaacgagaacctggacctggcgcgggcacaggcagtgctggaggaagaccactacggcatggaggacgtcaagaaacgcatcctggagttcattgccgttagccagctccgcggctccacccagggcaagatcctctgcttctatggcccccctggcgtgggtaagaccagcattgctcgctccatcgcccgcgccctgaaccgagagtacttccgcttcagcgtcgggggcatgactgacgtggctgagatcaagggccacaggcggacctacgtgggcgccatgcccgggaagatcatccagtgtttgaagaagaccaagacggagaaccccctgatcctcatcgacgaggtggacaagatcggccgaggctaccagggggacccgtcgtcggcactgctggagctgctggacccagagcagaatgccaacttcctggaccactacctggacgtgcccgtggacttgtccaaggtgctgttcatctgcacggccaacgtcacggacaccatccccgagccgctgcgagaccgtatggagatgatcaacgtgtcgggctacgtggcccaggagaagctggccattgcggagcgctacctggtgccccaggctcgcgccctgtgtggcttggatgagagcaaggccaagctgtcatcggacgtgctgacgctgctcatcaagcagtactgccgcgagagcggtgtccgcaacctgcagaagcaagtggagaaggtgttacggaaatcggcctacaagattgtcagcggcgaggccgagtccgtggaggtgacgcccgagaacctgcaggacttcgtggggaagcccgtgttcaccgtggagcgcatgtatgacgtgacaccgcccggcgtggtcatggggctggcctggaccgcaatgggaggctccacgctgtttgtggagacatccctgagacggccacaggacaaggatgccaagggtgacaaggatggcagcctggaggtgacaggccagctgggggaggtgatgaaggagagcgcccgcatagcctacaccttcgccagagccttcctcatgcagcacgcccccgccaatgactacctggtgacctcacacatccacctgcatgtgcccgagggcgccacccccaaggacggcccaagcgcaggctgcaccatcgtcacggccctgctgtccctggccatgggcaggcctgtccggcagaatctggccatgactggcgaagtctccctcacgggcaagatcctgcctgttggtggcatcaaggagaagaccattgcggccaagcgcgcaggggtgacgtgcatcgtcctgccagccgagaacaagaaggacttctacgacctggcagccttcatcaccgagggcctggaggtgcacttcgtggaacactaccgggagatcttcgacatcgccttcccggacgagcaggcagaggcgctggccgtggaacggtgacggccaccccgggactgcaggcggcggatgtcaggccctgtctgggccagaactgagcgctgtggggagcgcgcccggacctggcagtggagccaccgagcgagcagctcggtccagtgacccagatcccagggacctcagtcggcttaatcagagtgtggcatagaagctatttaatgattaaagtcatttgcagt

SEQ ID NO: 149589 - DNA, 725 bp, Homo sapiens
  Payload ID: 9543
  Gene Symbol: LONP1
  Gene Name: lon peptidase 1, mitochondrial
  ENST ID: ENST00000590206
  CDS Start-End: 1-725
gatgatgcaggctggccagcgggtggtggacaaccccatctacctgagcgacatgggcgccgcgctcaccggggccgagtcccatgagctgcaggacgtcctggaagagaccaatgtggaggagaagatcaagcagacccaccgtaagtacctgctgcaggagcagctaaagatcatcaagaaggagctgggcctggagaaggacgacaaggatgccatcgaggagaagttccgggagcgcctgaaggagctcgtggtccccaagcacgtcatggatgttgtggacgaggagctgagcaagctgggcctgctggacaaccactcctcggagttcaatgtcacccgcaactacctagactggctcacgtccatcccttggggcaagtacagcaacgagaacctggacctggcgcgggcacaggcagtgctggaggaagaccactacggcatggaggacgtcaagaaacgcatcctggagttcattgccgttagccagctccgcggctccacccagggcaagatcctctgcttctatggcccccctggcgtgggtaagaccagcattgctcgctccatcgcccgcgccctgaaccgagagtacttccgcttcagcgtcgggggcatgactgacgtggctgagatcaagggccacaggcggacctacgtgggcgccatgcccgggaagatcatccagtgtttgaagaagaccaagacggagaaccccc

SEQ ID NO: 149590 - DNA, 641 bp, Homo sapiens
  Payload ID: 9543
  Gene Symbol: LONP1
  Gene Name: lon peptidase 1, mitochondrial
  ENST ID: ENST00000587365
  CDS Start-End: 12-641
atggccgggctatggcggcgagcactggctacgtgcgactgtggggagcggcgcggtgctgggtgctgcggcggccgatgctggccgccgccggggggcgggttcccactgcagcaggagcgtggttgctccgaggccagcggacctgcgacgcctctcctccttgggcactgtggggccgaggcccggcaattgggggccaatggcgggggttttgggaagcgagcagccgcggcggaggcgcattctcggggggcgaggacgcctccgagggcggcgcggaggaaggagccggcggcgcggggggcagcgcgggcgccggggaaggcccggtcataacggcgctcacgcccatgacgatccccgatgtgtttccgcacctgccgctcatcgccatcacccgcaacccggtgttcccgcgctttatcaagattatcgaggtggaggagcagctaaagatcatcaagaaggagctgggcctggagaaggacgacaaggatgccatcgaggagaagttccgggagcgcctgaaggagctcgtggtccccaagcacgtcatggatgttgtggacgaggagctgagcaagctgggcctgctggacaaccactcctcggagttcaatgtcacccgcaactaccta

SEQ ID NO: 149591 - DNA, 793 bp, Homo sapiens
  Payload ID: 9543
  Gene Symbol: LONP1
  Gene Name: lon peptidase 1, mitochondrial
  ENST ID: ENST00000589473
  CDS Start-End: 1-793
cggaaatcggcctacaagattgtcagcggcgaggccgagtccgtggaggtgacgcccgagaacctgcaggacttcgtggggaagcccgtgttcaccgtggagcgcatgtatgacgtgacaccgcccggcgtggtcatggggctggcctggaccgcaatgggaggctccacgctgtttgtggagacatccctgagacggccacaggacaaggatgccaagggtgacaaggatggcagcctggaggtgacaggccagctgggggaggtgatgaaggagagcgcccgcatagcctacaccttcgccagagccttcctcatgcagcacgcccccgccaatgactacctggtgacctcacacatccacctgcatgtgcccgagggcgccacccccaaggacggcccaagcgcaggctgcaccatcgtcacggccctgctgtccctggccatgggcaggcctgtccggcagaatctggccatgactggcgaagtctccctcacgggcaagatcctgcctgttggtggcatcaaggagaagaccattgcggcccaggcagggctgaccctgactctgcccccaggccaagcgcgcaggggtgacgtgcatcgtcctgccagccgagaacaagaaggacttctacgacctggcagccttcatcaccgagggcctggaggtgcacttcgtggaacactaccgggagatcttcgacatcgccttcccggacgagcaggcagaggcgctggccgtggaacggtgacggccaccccgggactgcaggcggcggatgtcaggccct

SEQ ID NO: 149592 - DNA, 471 bp, Homo sapiens
  Payload ID: 9543
  Gene Symbol: LONP1
  Gene Name: lon peptidase 1, mitochondrial
  ENST ID: ENST00000586617
  CDS Start-End: 15-275
agtatggccgggctatggcggcgagcactggctacgtgcgactgtggggagcggcgcggtgctgggtgctgcggcggccgatgctggccgccgccggggggcgggttcccactgcagcaggagcgtggttgctccgaggccagcggacctgcgacgcctctcctccttgggcactgtggggccgaggcccggcaattgggggccaatggcggggaacaagcacaagccccgcaggaagtcaaagcggggcaagaaggaggcggaggacgagctgagcgccaggcacccggcggagctggcgatggagcccacccctgagctcccggctgaggtgctcatggtggaggtagagaacgttgtccacgaggacttccaggtcacggaggaggtgaaagccctgactgcagagatcgtgaagaccatccgggacatcattgccttgaaccctctctacagggagtcagtgctgca

SEQ ID NO: 149593 - DNA, 2918 bp, Homo sapiens
  Payload ID: 9543
  Gene Symbol: LONP1
  Gene Name: lon peptidase 1, mitochondrial
  Uniprot ID: P36776
  ENST ID: ENST00000593119
  CDS Start-End: 34-2721
gcgagttgtgtgagccgccagtatggccgggctatggcggcgagcactggctacgtgcgactgtggggagcggcgcggtgctgggtgctgcggcggccgatgctggccgccgccggggggcgggttcccactgcagcaggagcgtggttgctccgaggcccggtcataacggcgctcacgcccatgacgatccccgatgtgtttccgcacctgccgctcatcgccatcacccgcaacccggtgttcccgcgctttatcaagattatcgaggttaaaaataagaagttggttgagctgctgagaaggaaagttcgtctcgcccagccttatgtcggcgtctttctaaagagagatgacagcaatgagtcggatgtggtcgagagcctggatgaaatctaccacacggggacgtttgcccagatccatgagatgcaggaccttggggacaagctgcgcatgatcgtcatgggacacagaagagtccatatcagcagacagctggaggtggagcccgaggagccggaggcggagaacaagcacaagccccgcaggaagtcaaagcggggcaagaaggaggcggaggacgagctgagcgccaggcacccggcggagctggcgatggagcccacccctgagctcccggctgaggtgctcatggtggaggtagagaacgttgtccacgaggacttccaggtcacggaggaggtgaaagccctgactgcagagatcgtgaagaccatccgggacatcattgccttgaaccctctctacagggagtcagtgctgcagatgatgcaggctggccagcgggtggtggacaaccccatctacctgagcgacatgggcgccgcgctcaccggggccgagtcccatgagctgcaggacgtcctggaagagaccaatattcctaagcggctgtacaaggccctctccctgctgaagaaggaatttgaactgagcaagctgcagcagcgcctggggcgggaggtggaggagaagatcaagcagacccaccgtaagtacctgctgcaggagcagctaaagatcatcaagaaggagctgggcctggagaaggacgacaaggatgccatcgaggagaagttccgggagcgcctgaaggagctcgtggtccccaagcacgtcatggatgttgtggacgaggagctgagcaagctgggcctgctggacaaccactcctcggagttcaatgtcacccgcaactacctagactggctcacgtccatcccttggggcaagtacagcaacgagaacctggacctggcgcgggcacaggcagtgctggaggaagaccactacggcatggaggacgtcaagaaacgcatcctggagttcattgccgttagccagctccgcggctccacccagggcaagatcctctgcttctatggcccccctggcgtgggtaagaccagcattgctcgctccatcgcccgcgccctgaaccgagagtacttccgcttcagcgtcgggggcatgactgacgtggctgagatcaagggccacaggcggacctacgtgggcgccatgcccgggaagatcatccagtgtttgaagaagaccaagacggagaaccccctgatcctcatcgacgaggtggacaagatcggccgaggctaccagggggacccgtcgtcggcactgctggagctgctggacccagagcagaatgccaacttcctggaccactacctggacgtgcccgtggacttgtccaaggtgctgttcatctgcacggccaacgtcacggacaccatccccgagccgctgcgagaccgtatggagatgatcaacgtgtcgggctacgtggcccaggagaagctggccattgcggagcgctacctggtgccccaggctcgcgccctgtgtggcttggatgagagcaaggccaagctgtcatcggacgtgctgacgctgctcatcaagcagtactgccgcgagagcggtgtccgcaacctgcagaagcaagtggagaaggtgttacggaaatcggcctacaagattgtcagcggcgaggccgagtccgtggaggtgacgcccgagaacctgcaggacttcgtggggaagcccgtgttcaccgtggagcgcatgtatgacgtgacaccgcccggcgtggtcatggggctggcctggaccgcaatgggaggctccacgctgtttgtggagacatccctgagacggccacaggacaaggatgccaagggtgacaaggatggcagcctggaggtgacaggccagctgggggaggtgatgaaggagagcgcccgcatagcctacaccttcgccagagccttcctcatgcagcacgcccccgccaatgactacctggtgacctcacacatccacctgcatgtgcccgagggcgccacccccaaggacggcccaagcgcaggctgcaccatcgtcacggccctgctgtccctggccatgggcaggcctgtccggcagaatctggccatgactggcgaagtctccctcacgggcaagatcctgcctgttggtggcatcaaggagaagaccattgcggccaagcgcgcaggggtgacgtgcatcgtcctgccagccgagaacaagaaggacttctacgacctggcagccttcatcaccgagggcctggaggtgcacttcgtggaacactaccgggagatcttcgacatcgccttcccggacgagcaggcagaggcgctggccgtggaacggtgacggccaccccgggactgcaggcggcggatgtcaggccctgtctgggccagaactgagcgctgtggggagcgcgcccggacctggcagtggagccaccgagcgagcagctcggtccagtgacccagatcccagggacctcagtcggcttaatcagagtgtggcatagaagctatttaatgattaaagtcatttgcagt

SEQ ID NO: 149594 - DNA, 8199 bp, Homo sapiens
  Payload ID: 9544
  Gene Symbol: LONP2
  Gene Name: lon peptidase 2, peroxisomal
  Uniprot ID: Q86WA8
  ENST ID: ENST00000285737
  CDS Start-End: 94-2652
aggcgggtctgaggtttggtgactgcggggcaggccgggggcagctgtctgtctggctctttttgacagcccccagtgcgaaaggctgccagcatgtcatcagtgagccccatccagatccccagtcgcctcccgctgctgctcacccacgagggcgtcctgctgcccggctccaccatgcgcaccagcgtggactcggcccgcaacctgcagctggtgcggagccgccttctgaagggcacgtcgctgcaaagcaccatcctgggcgtcatccccaacacgcctgaccccgccagcgacgcgcaggacctgccgccgctgcacaggattggcacagctgcactggccgttcaggttgtgggcagtaactggcccaagccccactacactctgttgattacaggcctatgccgtttccagattgtacaggtcttaaaagagaagccatatcccattgctgaagtggagcagttggaccgacttgaggagtttcccaacacctgtaaaatgagggaggagctaggagaactatcagagcagttttacaaatatgcagtacaattggttgaaatgttggatatgtctgtccctgcagttgctaaattgagacgtcttttagatagtcttccaagggaagctttaccagacatcttgacatcaattatccgaacaagcaacaaagagaaactccagattttagatgctgtgagcctagaggagcggttcaagatgactataccactgcttgtcagacaaattgaaggcctgaaattgcttcaaaaaaccagaaaacccaagcaagatgatgataagagggttatagcaatacgccctattaggagaattacacatatctcaggtactttagaagatgaagatgaagatgaagataatgatgacattgtcatgctagagaaaaaaatacgaacatctagtatgccagagcaggcccataaagtctgtgtcaaagagataaagagactcaaaaaaatgcctcagtcaatgccagaatatgctctgactagaaattatttggaacttatggtagaacttccttggaacaaaagtacaactgaccgcctggacattagggcagcccggattcttctggataatgaccattacgccatggaaaaattgaagaaaagagtactggaatacttggctgtcagacagctcaaaaataacctgaagggcccaatcctatgctttgttggccctcctggagttggtaaaacaagtgtgggaagatcagtggccaagactctaggtcgagagttccacaggattgcacttggaggagtatgtgatcagtctgacattcgaggacacaggcgcacctatgttggcagcatgcctggtcgcatcatcaacggcttgaagactgtgggagtgaacaacccagtgttcctattagatgaggttgacaaactgggaaaaagtctacagggtgatccagcagcagctctgcttgaggtgttggatcctgaacaaaaccataacttcacagatcattatctaaatgtggcctttgacctttctcaagttctttttatagctactgccaacaccactgctaccattccagctgccttgttggacagaatggagatcattcaggttccaggttatacacaggaggagaagatagagattgcccataggcacttgatccccaagcagctggaacaacatgggctgactccacagcagattcagataccccaggtcaccactcttgacatcatcaccaggtataccagagaggcaggggttcgttctctggatagaaaacttggggccatttgccgagctgtggccgtgaaggtggcagaaggacagcataaggaagccaagttggaccgttctgatgtgactgagagagaaggttgcagagaacacatcttagaagatgaaaaacctgaatctatcagtgacactactgacttggctctaccacctgaaatgccgattttgattgatttccatgctctgaaagacatccttgggcccccgatgtatgaaatggaggtatctcagcgtttgagtcagccaggagtagcaataggtttggcttggactcccttaggtggagaaatcatgttcgtggaggcgagtcgaatggatggcgagggccagttaactctgaccggccagctcggggacgtgatgaaggagtccgcccacctcgctatcagctggctccgcagcaacgcaaagaagtaccagctgaccaatgcttttggaagttttgatcttcttgacaacacagacatccatctgcacttcccagctggagctgtcacaaaagatggaccatctgctggagttaccatagtaacctgtctcgcctcactttttagtgggcggctggtacgttcagatgtagccatgactggagaaattacactgagaggtcttgttcttccagtgggtggaattaaagacaaagtgctggcggcacacagagcgggactgaagcaagtcattattcctcggagaaatgaaaaagaccttgagggaatcccaggcaacgtacgacaggatttaagttttgtcacagcaagctgcctggatgaggttcttaatgcagcttttgatggtggctttactgtcaagaccagacctggtctgttaaatagcaaactgtaggtccaaatctcaattttttagaattttaagttatgaagtgctcaaaggtactgacacagttgattttattcacaccattaggggtatgcaagatgtccctgttttataaacataatcacaacagtaataaacctcaagtagtggctagtgtttagtatagaaatataagatgttgatttagtaaactgataaaaatcgaattcttgtctttttagtgggatccttactgtccctggaaagatatagcatagtggttctcagcacagtctccagaacagaagcatctgtagtacctggtaacttgttagaaatgtacattctcaggctccacagcaggccgcctgaatcaaatcctgggaggtggggacagaaatctgtgttttaagaagccttccaggtaattctgctgcacactcaagttcaggaaccaccggtatagaccattaccttagtggatttacctgtagagtttattggatcctgaaaccaatcaattacttagaactaggcaaagatgaaagtatagccaactattcttggctatatatatatattcaagtgggccgggcgtgatggctcacacctgtaattccagcactttgggaggtcgaggtaggcagatcaccgagcccaagagttcaagacaatcctggccaacggcgaaactctgtctctacaaaaaatatacaggcgtgttagcatgtgcctgtaatcccagcttcttgggaagctgaggcacaagaattgcctgaacccaggaggtggaggttgcagtgagctgggatcgcgccattgcactccagcctggctgacagagcgagactgtctctaaaaaaaaaagactcaagtggaccctacaatgaagcctacacatcccaatagaagccccttcttatgctgagggaagcagccctcagaacatgatagcttgtatccagcagagtggcacgtgctggcacacctcacagaagcaccctggccctggatgcctgcaacctcagaagagtgcagctcccagagggaggcagccatccatctgggatggtcctaagcatggaatcctaactcctgattccgtctcctatttcttgcttggctacgccagttcccaaatctggtagatgtccatgcccatgtgctcctgctgggactcaattcaggctatgtatgactatgaagtcaggctcatctgcttactggctgtgtgaactttttgtatcttggttttcttcatccatgaaatccaagtaatactacctaattgttactgtggagattaagttcaaatgcaatgtatagtaatattaagcaatttctagttattattctagccagtaatggacttcagaatcttttattacacaatataagaatatgtatgtaaagacattttggaatttcctggatgagaaggaagtctgggctgggcatggtggctcacgcctgtaaccctagcactttaggaaatcgaggcgagtggatcacttaagctcaggagttcaaggccagcctgggcaacatggcaaaaccccatttctacaaaaaatacaaaaattagctgggcatggtggcacccgcctgtagtccagctacttgaggctgagatgggaggatgagggaggtcggggctgcagtgagccaagatcacgccactgcactccagcaccctgggcgacagagtgagaccctgtctcaaaaaaaaaaaaaaaaaaaaagattgggccaaaatactgtgataaaatagcaggcctgctgataaaagtttatctgaatgcattgagaggaaaagtccagacctaggactagttatggcagttggagagaaagaacatcgggatgtttgaaaatatgccattgactatcttaactactgtaattttatcatttccaacgtcatctaactggggactagaacaaactgtgaattcactttcagcaaccagagggcgctaatccacacccacatcgctctgccctgttccacccagcaggggcaacaaggatataacttggggttctcggtattcttcctttagtcctgacacaggcagccttgcactttgtagcagcaggagggcacttgctttaagcatatctttcgaaaggcatccattgagagaataatgcattctccccttgctgtgtatgacatggaacagtatgaccattgcactagctttgtttttggtttgttttgttttttttttaattccaggggtgggaggttggttggttgaagtctaagctcttcctttttcacctgggttttttttttttggggggggtggggggttaggggtggggcgggtggggaagagccaaaattttaaccatttttaagcatataatttgggggtatcagttactggatctaagcatgtccactctacacgctttttttttttttttttttttttttttttgagatggagtcttgctctgttacccaggctgcactgcagtggcatgatctcggctcactgcaacctctgcctccccagttcaagcaattctcatgcctcagcctcccaagtagctgggaccacaggtgtgtgccaccacgcccagctaatttttgtattttttagtagagacagggtttcaccatgttggccaggctggtctcaaactcccaacctcaaatgatccggccaccttggcctcccaaaatgctggcattacaggcgtgagccaccacacccggcttacatgcattttttatcaccacaaactgaaactctgtacccactgaaaaagagctccaaattccaccctcaccccagaccctggtaaccactatttcactttctttctgaatttcccttcatatgagtgggatcaaacaagagttgtccttttgtgtttagcattcttacttagcaagccatcaactgctcgaacagtcactggggcaactacttttcgcccagtgtcctccagaaaagaaagatctggagggtcaggccactctttttcttcaaaataatggggtgcagaagggtagggatgaacctcttcctcctttgccactttagctttagctcaaaggaactccaactttttattatttgcaacagttagctttctttgtttcacatctctgccttgcagaaccatgacctatcaaggtgttttgtcaaacaaaaactaatactttccctgggaaaaagccatgtggtagcaagtaccagaaatttttatggccaaataatacaccactatatccatagaccgcatttggtttatccactcatctgctgattgtttccccctcttgggtattatgagtaatgctatgaacatgggtgtacacatctctcttgaagtcccttcttaggtcctttagggatacatatccaggagcagaactactagatcacatatgctaaggtctgaatgtccccccaccaaattcgtatgttgaagcaaccaccaacgtgataggtgaggctttaggaggtgattatgtcatgagagctccatcctcattaatggatttagtgcctttataaaggggctcaagggaaccaattacctcctttttgcccttcgattcccttccaccatatgaggacacagcaacaggccccgtcctagaagctgagactgggccctcaatagatgataccagtctgccagcacgctgatcgtgggcttctcagtcttcacaactatgagaaataaattcgtacttttaaattacccagtctcaggtattctgttacggttaacacaaatgactaagacaacaggataattctgtttaactttttgagaactgccaaacttttccaccgcagctgcaccatttgacattccttccagcaatgcacaaatgttccagtttctccacatccttgccagcactcattttctgggttttttataatagccctccaaatgggtgtgacgtattttgattctatgtccctaatgactagtgatgttgagcattttctagcattgatttttaagatgttacccaaagaccccttgtatcaaaataagctggatttttttattgaaaattattaactctagaaattttagtttaaactagacttagggatatgtgtattttaccggtattccacgttttatgcatgggtttttaaaacttctcaagtattaaaactaaaagctttaggtgctttgcttatcaagaaatcctacactgtccactggagacatccatgtttttacttggctctgcccctttagtggtccctgtgaaccttacctcaaaccatgcatctggggcagagatccttacttgcttggtggttacaaatgcaaatacagtgaagaatgtcatctttgtgattgttcctgaaatagttcacgagaaatccatgaccgtaaagtactgtgatagtgatgtctaccactgtgagcttccagtactaggtgattggtctgcattcacagtgaccaaaatcagctatgtggccaggtaattcactgctgagggctttggattttcctttatgaactactgaaatgaggtcaacttgactattactaagggacattttgctacaaagaatgttagttttgccaattccctttccaaatctaaaatttattttaaccaggattttagatgtaaacatcaagtagttttggttgtttcaatgaagtaacatgtttaagctcacattatttgaagtacttcagttcctattgccatgaaaattgtatccagcagctaaaaaaaaaaaaaaaaaaaaagactacagttagtcattatccaatttgatgatttatggtccaacactaatgctcattttttttgtttgttttacaaacatttggtggataccacaatgaaaactgcacttaaaaaacaaaaatgctgaaagaggaaggaaatatcaaaaaggtctgaatagacaacaggcaaatatggtgagtggtcattgagatgttttaaaagttacagcaaaaggacttctaaaacaattttaggaaaagctttgtcatgaaaattcatttctttggaaatactgtagtttgtacttaatgacactgtcagcacatttctaggcaatacaaactcttgaggctaaatcctcatcctgacatgacagtgcaagcctgtcaaaatgtgaccccaaaaccaggtgtccttttgctccattatttatatctgtaaacctgttattattttcagaattcagaaaggcctaagaaaattacatctatgataataaagtgtatttctttgtcaagtttctagagctatataaggatagcgaaaatatttggttcagcaagacactggggtatcaagtcaggcataataagcactttatagcacatctagccttcctcattcccttacgcagtggacatcatacccttttgtggaggagggaccaggcagagaaggtatttaaataaaaactggtagatacagagtcagaagtcaacccaggcagttagaatctacaacccacactgtttgccaccaaatcttagtagatgcttgataaggaattttgtttggatggtgccatttttagataaacgtacgtttcttttggt

SEQ ID NO: 149595 - DNA, 2056 bp, Homo sapiens
  Payload ID: 9544
  Gene Symbol: LONP2
  Gene Name: lon peptidase 2, peroxisomal
  ENST ID: ENST00000416006
  CDS Start-End: 35-1852
tttttgacagcccccagtgcgaaaggctgccagcatgtcatcagtgagccccatccagatccccagtcgcctcccgctgctgctcacccacgagggcgtcctgctgcccggctccaccatgcgcaccagcgtggactcggcccgcaacctgcagctggtgcggagccgccttctgaagggcacgtcgctgcaaagcaccatcctgggcgtcatccccaacacgcctgaccccgccagcgacgcgcaggacctgccgccgctgcacaggattggcacagctgcactggccgttcaggttgtgggcagtaactggcccaagccccactacactctgttgattacaggcctatgccgtttccagattgtacaggtcttaaaagagaagccatatcccattgctgaagtggagcagttggaccgacttgaggagtttcccaacacctgtaaaatgagggaggagctaggagaactatcagagcagttttacaaatatgcagtacaaattttagatgctgtgagcctagaggagcggttcaagatgactataccactgcttgtcagacaaattgaaggcctgaaattgcttcaaaaaaccagaaaacccaagcaagatgatgataagagggttatagcaatacgccctattaggagaattacacatatctcaggtactttagaagatgaagatgaagatgaagataatgatgacattgtcatgctagagaaaaaaatacgaacatctagtatgccagagcaggcccataaagtctgtgtcaaagagataaagagactcaaaaaaatgcctcagtcaatgccagaatatgctctgactagaaattatttggaacttatggtagaacttccttggaacaaaagtacaactgaccgcctggacattagggcagcccggattcttctggataatgaccattacgccatggaaaaattgaagaaaagagtactggaatacttggctgtcagacagctcaaaaataacctgaagggcccaatcctatgctttgttggccctcctggagttggtaaaacaagtgtgggaagatcagtggccaagactctaggtcgagagttccacaggattgcacttggaggagtatgtgatcagtctgacattcgaggacacaggcgcacctatgttggcagcatgcctggtcgcatcatcaacggcttgaagactgtgggagtgaacaacccagtgttcctattagatgaggttgacaaactgggaaaaagtctacagggtgatccagcagcagctctgcttgaggtgttggatcctgaacaaaaccataacttcacagatcattatctaaatgtggcctttgacctttctcaagttctttttatagctactgccaacaccactgctaccattccagctgccttgttggacagaatggagatcattcaggttccaggttatacacaggaggagaagatagagattgcccataggcacttgatccccaagcagctggaacaacatgggctgactccacagcagattcagataccccaggtcaccactcttgacatcatcaccaggtataccagagaggcaggggttcgttctctggatagaaaacttggggccatttgccgagctgtggccgtgaaggtggcagaaggacagcataaggaagccaagttggaccgttctgatgtgactgagagagaaggttgcagagaacacatcttagaagatgaaaaacctgaatctatcagtgacactactgacttggctctaccacctgaaatgccgattttgattgatttccatgctctgaaagacatccttgggcccccgatgtatgaaatggagatagcatcttagaatggaagatgtggtgtgtcacatgcgtgcgtgcggagagaccaccaaacaggctttgtgtgagcaacaaggctgttatttcacctgggtacaggtatctcagcgtttgagtcagccaggagtagcaataggtttggcttggactcccttaggtggagaaatcatgttcgtggaggcgagtcgaatggatggcgagggccagtt

SEQ ID NO: 149596 - DNA, 2580 bp, Homo sapiens
  Payload ID: 9544
  Gene Symbol: LONP2
  Gene Name: lon peptidase 2, peroxisomal
  Uniprot ID: Q86WA8
  ENST ID: ENST00000535754
  CDS Start-End: 57-2483
ggggcagctgtctgtctggctctttttgacagcccccagtgcgaaaggctgccagcatgtcatcagtgagccccatccagatccccagtcgcctcccgctgctgctcacccacgagggcgtcctgctgcccggctccaccatgcgcaccagcgtggactcggcccgcaacctgcagctggtgcggagccgccttctgaagggcacgtcgctgcaaagcaccatcctgggcgtcatccccaacacgcctgaccccgccagcgacgcgcaggacctgccgccgctgcacaggattggcacagctgcactggccgttcaggttgtgggcagtaactggcccaagccccactacactctgttgattacaggcctatgccgtttccagattgtacaggtcttaaaagagaagccatatcccattgctgaagtggagcagttggaccgacttgaggagtttcccaacacctgtaaaatgagggaggagctaggagaactatcagagcagttttacaaatatgcagtacaaattttagatgctgtgagcctagaggagcggttcaagatgactataccactgcttgtcagacaaattgaaggcctgaaattgcttcaaaaaaccagaaaacccaagcaagatgatgataagagggttatagcaatacgccctattaggagaattacacatatctcaggtactttagaagatgaagatgaagatgaagataatgatgacattgtcatgctagagaaaaaaatacgaacatctagtatgccagagcaggcccataaagtctgtgtcaaagagataaagagactcaaaaaaatgcctcagtcaatgccagaatatgctctgactagaaattatttggaacttatggtagaacttccttggaacaaaagtacaactgaccgcctggacattagggcagcccggattcttctggataatgaccattacgccatggaaaaattgaagaaaagagtactggaatacttggctgtcagacagctcaaaaataacctgaagggcccaatcctatgctttgttggccctcctggagttggtaaaacaagtgtgggaagatcagtggccaagactctaggtcgagagttccacaggattgcacttggaggagtatgtgatcagtctgacattcgaggacacaggcgcacctatgttggcagcatgcctggtcgcatcatcaacggcttgaagactgtgggagtgaacaacccagtgttcctattagatgaggttgacaaactgggaaaaagtctacagggtgatccagcagcagctctgcttgaggtgttggatcctgaacaaaaccataacttcacagatcattatctaaatgtggcctttgacctttctcaagttctttttatagctactgccaacaccactgctaccattccagctgccttgttggacagaatggagatcattcaggttccaggttatacacaggaggagaagatagagattgcccataggcacttgatccccaagcagctggaacaacatgggctgactccacagcagattcagataccccaggtcaccactcttgacatcatcaccaggtataccagagaggcaggggttcgttctctggatagaaaacttggggccatttgccgagctgtggccgtgaaggtggcagaaggacagcataaggaagccaagttggaccgttctgatgtgactgagagagaaggttgcagagaacacatcttagaagatgaaaaacctgaatctatcagtgacactactgacttggctctaccacctgaaatgccgattttgattgatttccatgctctgaaagacatccttgggcccccgatgtatgaaatggaggtatctcagcgtttgagtcagccaggagtagcaataggtttggcttggactcccttaggtggagaaatcatgttcgtggaggcgagtcgaatggatggcgagggccagttaactctgaccggccagctcggggacgtgatgaaggagtccgcccacctcgctatcagctggctccgcagcaacgcaaagaagtaccagctgaccaatgcttttggaagttttgatcttcttgacaacacagacatccatctgcacttcccagctggagctgtcacaaaagatggaccatctgctggagttaccatagtaacctgtctcgcctcactttttagtgggcggctggtacgttcagatgtagccatgactggagaaattacactgagaggtcttgttcttccagtgggtggaattaaagacaaagtgctggcggcacacagagcgggactgaagcaagtcattattcctcggagaaatgaaaaagaccttgagggaatcccaggcaacgtacgacaggatttaagttttgtcacagcaagctgcctggatgaggttcttaatgcagcttttgatggtggctttactgtcaagaccagacctggtctgttaaatagcaaactgtaggtccaaatctcaattttttagaattttaagttatgaagtgctcaaaggtactgacacagttgattttattcacaccattaggggtatgcaagatgtc

SEQ ID NO: 149597 - DNA, 1969 bp, Homo sapiens
  Payload ID: 9544
  Gene Symbol: LONP2
  Gene Name: lon peptidase 2, peroxisomal
  ENST ID: ENST00000565867
  CDS Start-End: 1-710
tccatgctctgaaagacatccttgggcccccgatgtatgaaatggaggtatctcagcgtttgagtcagccaggagtagcaataggtttggcttggactcccttaggtggagaaatcatgttcgtggaggcgagtcgaatggatggcgagggccagttaactctgaccggccagctcggggacgtgatgaaggagtccgcccacctcgctatcagctggctccgcagcaacgcaaagaagtaccagctgaccaatgcttttggaagttttgatcttcttgacaacacagacatccatctgcacttcccagctggagctgtcacaaaagatggaccatctgctggagttaccatagtaacctgtctcgcctcactttttagtgggcggctggtacgttcagatgtagccatgactggagaaattacactgagaggtcttgttcttccagtgggtggaattaaagacaaagtgctggcggcacacagagcgggactgaagcaagtcattattcctcggagaaatgaaaaagaccttgagggaatcccaggcaacatcgaggagtcgcttcccaagtcaatcgtcgcctatgaccatttagctcaagtcggtaagcaaaattttcagcttgcttgcgtgttcctatcagctgtacgattgcgaagaactgctggtgaccatcgtatttttcctgtttctctaagactaacatgaagtgaaagccaaaacaggactgcatcatcacccagtcaacagcaccaggaagattaatgtctgtagcaagaaaaactatatcctctccctgtagggttgtaatggacttatgctgatgcatcagatggggcattacagcatccagagagccttgccatttacaggaagcaccagggcacggacaggaataaggcctaaactcacagagctcttcatggtctgctttttctgtgtgtggcagagttatttcacatccagaagacgcatatttacaggggaaaagtactgaattagccactttctccatagccaagttgcgaatggatcccaaagggccccggcaagttggacaacatgtgagctttgggcgacagttgctacaaacaagatggccactctgacattgaagaatgggcggtaacacatagtcaaagcagactggacactcaaaaagactcgccaagtcattgttggatgcagttgtgccagtcagggcaggcaccctctgggatggtggacacttcgaggtaccggtaggtaatgctgtagcagtctgacggctcatttctgaaataaatacataaggaggcaggagaaaaataattataaccatgacttactttataaataatgtttacatgccataagtccttttaaagtttcatacaaaatttactgagcaaaagaggaagaaaaataggattaaaaaagatattaaaaaaataaaattacactgaatgtgcactttattaggatctgtacactggataagctctcttttcaaaatgttccggaaaacatgtggaactcccttaatcgtctttggatagactacatagaataataaatgctaaaatagaaaatggaccataaacaactaaagaaactatacaaggaactgaagtttaatcgaatccgttttgctaggactctccctgaggctcccttactctatttctttctaatttggagtcagctgttgataggtacagggagttacaggtgaactcctgtataaaatcggcactctgtatccacacggtctgcatccgaggacttcaccagccatggattgaaaatattcagaaaaatttataaagaatacaaaatttttaaaatacagtctataacaactatttacatattgtttacattgtattaagtaatccagagatcacttaaattatacaagagaatatgcacatacaaatatgacaccattttctatcagggacttgagcatcctcaggttttggtat

SEQ ID NO: 149598 - DNA, 818 bp, Homo sapiens
  Payload ID: 9544
  Gene Symbol: LONP2
  Gene Name: lon peptidase 2, peroxisomal
  ENST ID: ENST00000570174
  CDS Start-End: 1-510
agactcaaaaaaatgcctcagtcaatgccagaatatgctctgactagaaattatttggaacttatggtagaacttccttggaacaaaagtacaactgaccgcctggacattagggcagcccggattcttctggataatgaccattacgccatggaaaaattgaagaaaagagtactggaatacttggctgtcagacagctcaaaaataacctgaagggcccaatcctatgctttgttggccctcctggagttggtaaaacaagtgtgggaagatcagtggccaagactctaggtcgagagttccacaggattgcacttggaggagtatgtgatcagtctgacattcgaggacacaggcgcacctatgttggcagcatgcctggtcgcatcatcaacggcttgaagactgtgggagtgaacaacccagtgttcctattagatgaggttgacaaactgggaaaaagtctacagggtgatccagcagcagctctgcttgagttctttttatagctactgccaacaccactgctaccattccagctgccttgttggacagaatggagatcattcaggttccaggttatacacaggaggagaagatagagattgcccataggcacttgatccccaagcagctggaacaacatgggctgactccacagcagattcagataccccaggtcaccactcttgacatcatcaccaggtataccagagaggcaggggttcgttctctggatagaaaacttggggccatttgccgagctgtggccgtgaaggtggcagaaggacagcataaggaagccaagttggaccgt

SEQ ID NO: 149599 - DNA, 2514 bp, Homo sapiens
  Payload ID: 9544
  Gene Symbol: LONP2
  Gene Name: lon peptidase 2, peroxisomal
  ENST ID: ENST00000566755
  CDS Start-End: 2-904
catgtcatcagtgagccccatccagatccccagtcgcctcccgctgctgctcacccacgagggcgtcctgctgcccggctccaccatgcgcaccagcgtggactcggcccgcaacctgcagctggtgcggagccgccttctgaagggcacgtcgctgcaaagcaccatcctgggcgtcatccccaacacgcctgaccccgccagcgacgcgcaggacctgccgccgctgcacaggattggcacagctgcactggccgttcaggttgtgggcagtaactggcccaagccccactacactctgttgattacaggcctatgccgtttccagattgtacaggtcttaaaagagaagccatatcccattgctgaagtggagcagttggaccgacttgaggagtttcccaacacctgtaaaatgagggaggagctaggagaactatcagagcagttttacaaatatgcagtacaattggttgaaatgttggatatgtctgtccctgcagttgctaaattgagacgtcttttagatagtcttccaagggaagctttaccagacatcttgacatcaattatccgaacaagcaacaaagagaaactccagattttagatgctgtgagcctagaggagcggttcaagatgactataccactgcttgtcagacaaattgaaggcctgaaattgcttcaaaaaaccagaaaacccaagcaagatgatgataagagggttatagcaatacgccctattaggagaattacacatatctcaggtactttagaagatgaagatgaagatgaagataatgatgacattgtcatgctagagaaaaaaatacgaacatctagtatgccagagcaggcccataaagtctgtgtcaaagagataaagagaccgcctggacattagggcagcccggattcttctggataatgaccattacgccatggaaaaattgaagaaaagagtactggaatacttggctgtcagacagctcaaaaataacctgaagggcccaatcctatgctttgttggccctcctggagttggtaaaacaagtgtgggaagatcagtggccaagactctaggtcgagagttccacaggattgcacttggaggagtatgtgatcagtctgacattcgaggacacaggcgcacctatgttggcagcatgcctggtcgcatcatcaacggcttgaagactgtgggagtgaacaacccagtgttcctattagatgaggttgacaaactgggaaaaagtctacagggtgatccagcagcagctctgcttgaggtgttggatcctgaacaaaaccataacttcacagatcattatctaaatgtggcctttgacctttctcaagttctttttatagctactgccaacaccactgctaccattccagctgccttgttggacagaatggagatcattcaggttccaggttatacacaggaggagaagatagagattgcccataggcacttgatccccaagcagctggaacaacatgggctgactccacagcagattcagataccccaggtcaccactcttgacatcatcaccaggtataccagagaggcaggggttcgttctctggatagaaaacttggggccatttgccgagctgtggccgtgaaggtggcagaaggacagcataaggaagccaagttggaccgttctgatgtgactgagagagaaggttgcagagaacacatcttagaagatgaaaaacctgaatctatcagtgacactactgacttggctctaccacctgaaatgccgattttgattgatttccatgctctgaaagacatccttgggcccccgatgtatgaaatggaggtatctcagcgtttgagtcagccaggagtagcaataggtttggcttggactcccttaggtggagaaatcatgttcgtggaggcgagtcgaatggatggcgagggccagttaactctgaccggccagctcggggacgtgatgaaggagtccgcccacctcgctatcagctggctccgcagcaacgcaaagaagtaccagctgaccaatgcttttggaagttttgatcttcttgacaacacagacatccatctgcacttcccagctggagctgtcacaaaagatggaccatctgctggagttaccatagtaacctgtctcgcctcactttttagtgggcggctggtacgttcagatgtagccatgactggagaaattacactgagaggtcttgttcttccagtgggtggaattaaagacaaagtgctggcggcacacagagcgggactgaagcaagtcattattcctcggagaaatgaaaaagaccttgagggaatcccaggcaacgtacgacaggatttaagttttgtcacagcaagctgcctggatgaggttcttaatgcagcttttgatggtggctttactgtcaagaccagacctggtctgttaaatagcaaactgtaggtccaaatctcaattttttagaattttaagttatgaagtgctcaaaggt

SEQ ID NO: 149600 - DNA, 3594 bp, Homo sapiens
  Payload ID: 9545
  Gene Symbol: LONRF1
  Gene Name: LON peptidase N-terminal domain and ring finger 1
  Uniprot ID: Q17RB8
  ENST ID: ENST00000398246
  CDS Start-End: 71-2392
gcggagccgcgcgcccgggaggctccgggaccgtggcggcgggcggcggcggcgcagccctccgcgggccatgtcctctccggcggtggcgaggacctccccaggagggagtcgggagatggccccagcgccgcagggccgaggccggttctgggaagtgggcggcggcagcggccatcggctggagcgcgcggccgcggagtcggagcgctgggagctgctgctccgccgcggggagctgctggcgctgggcggccacctgaagggcgcgctggaggcgttcgcggcggcgctgcgccgcggggccccggccaggcccgagtgcctgggcgccctggtggactgcctggtgttcaactaccggctccgccacgggctgggctggagcgcggccccggttgcaggcgctgacggcggcgccggcgggctcctcagatgcctgggctgccggggcttcctgagcgagccggtgaccgtgccctgtggccacagctactgccgccgctgcctgcggagggaactccgcgcccgctgccgcctctgccgggaccggctgccgcccgccaccgccagtgccactgatgctgaagggaccgccccgcggccgccgcctctggccgccgccatcgccgcttcagacttcagaaccagcgtcgtcctcaaccacctggccgagaagtggtttccgggccagcgcgagcgggcccgggcggccggcaggctcggggagctactgcaccaggggcgctaccgggaggccctggccgccgcctgcgaggcgctgcgagcagaacccagtgacttgattgtaaaaatttacagagcggaatcatatgctggtctccaagagtttaaagcagccatagaagatttaaatgcagttctttttcaacttccagattggcctgaggtctacttcaggaaaggaaaagtactctgcgatgctggttttttaggtgatgccttacaactctttcttcagtgcttagcccttgatgaagattttgcacctgcaaagctgcaagtacaaaagattttatgtgatttattattacctgaaaacttaaaagaaggcctgaaggaatcttcctggagttcattaccatgtactaaaaacagaccttttgattttcattcagtgatggaagagtctcagtctctcaatgaacctagcccaaagcagagtgaagaaataccagaggtcacttcagagcctgtcaaaggaagcttaaaccgtgctcagtcagcacagtctataaattcaacagaaatgcctgccagagaggactgtttaaaaagagtgtcctcagaacctgttctgtcagttcaagaaaaaggtgttctgctgaaaagaaagttgtctcttttagaacaggatgtgattgtaaatgaagatggaagaaataagctgaaaaaacaaggagaaactcccaatgaagtctgtatgttttccttagcttatggtgatattccagaagaattaatcgatgtctcagatttcgagtgttctctctgcatgaggttgttttttgagccagtaacaaccccttgcggacattcgttctgtaagaattgtcttgagcgttgtttagatcatgcaccatattgtcctctttgcaaagaaagcttaaaagagtatctagcagataggaggtactgtgtcacacagctgttggaagaattaatagtgaagtatctgcctgatgaactgtctgagagaaaaaaaatatatgatgaagaaactgctgaactctcacacttgaccaagaatgttccaatatttgtttgcactatggcctaccccactgtgccttgccctctccatgtatttgagccaagatacagattgatgattcgaagaagtatacagactggaaccaaacagtttggcatgtgtgtcagtgatacacaaaatagttttgcagattatggttgtatgttacaaattagaaacgtgcatttcttaccggacggaaggtctgtggttgatacagttggaggaaagcggtttagggttttaaaaagaggaatgaaagatggatattgcactgccgacattgaatatctggaagatgttaaggttgagaatgaagatgagattaagaatctcagagagcttcatgatttggtttactctcaagcctgcagctggtttcagaatttaagagacagatttcgaagccaaattcttcagcatttcggatcaatgcccgagagggaggaaaaccttcaggcagcccctaatggacctgcatggtgttggtggcttcttgcagttctccctgtagacccacgataccagctgtcggttttgtcaatgaagtctttgaaagaacggttgaccaagatacagcatatactgacctatttttctagagaccaatctaagtaactaactctttggatctccctttaaagtgaccctaatctggctgcattgatggccagattgtctgctgcctttgcacatctagtgctggtttcagaaatttaatgaaacttttctttttccttcgacctcctgaatcatgtggttctgcaaatgaataccttcaactaggatttagaccactaagaacttgcacagaaaaacacgcattgaatgtgtgtcgaacctctacattgtgaagttgcactatgtaccatactctaaaatgaaataagaactctttatgtctgtgagagagtgtgtgtgtgtgtgtgcgtgcgtgtgtgcttgtgggggttgggtagtgtgtgtgtattttctctggctttaaaattttaaaacaaacaaacaaaaaagccatagagagcagaacttgccgagggtcatttattgcccaagtttacaagagtagcgatacaagtttttgcaaattgaatttgcctcagatatatctgtcctaatgcttatatttgcacaagtatgtaaaatatcgtgttgaggatcattctttgttggaaacactgctcttgctgaactgtcttgaccattgactatgacacagtttcttatttatgtaaatacttgcatcacagtggccgacaggcattggatgcagaacctagagccagttttcaggaacaattgtaaacctgacatggtactgtgcatctattcataaaacactcaaaactgtgaaaatatggtttacatttaattgtacataaaggtaaagggagaactcaattcagtaccagttagtttgtacattttagggggcttttcacattaactgcccatttgtgtaatttatagtttgacatgatgtgtttgttttaaaaaaaaatgcatagtataaacccattaaggatctgggaaaagagaagaagtttaatatagaactaagcttttaaagtttgtttttgtttttaattctggtctcggtgcaaatgttagttatgccttattcatatcacagttagatcaccatgctgcaacatggtttatattcatgctgccctagaaacttttgtaattatttgttgcaaatttgtgactgtccttattaactttcttttatgtaagtaatttgtaaaagtttcttaaaatttttgcttttgcttatttaattttgaataaaagctaaattcctaatactttttcttaaa

SEQ ID NO: 149601 - DNA, 3043 bp, Homo sapiens
  Payload ID: 9545
  Gene Symbol: LONRF1
  Gene Name: LON peptidase N-terminal domain and ring finger 1
  ENST ID: ENST00000533751
  CDS Start-End: 1668-2918
gcggccgctcgcttcctgccgcgcgctttccgggaattggctctcgggccgggcccgccgcggggaaacgactgccggggcggggagagaatcccccgcgagggcaactaggccgggcaggcggcgtctcccttcctcacccacaaaagtcaccgggacaattgggaaccgcgggagggcagaattgcataagctgggggcggggggcgttgtgtaacgggtgacgtccggtgggcgtggcgggagctccgcgcgggcgcccggccccgggaggccctgcaggccgccgggcttggggcttggggcggagctgcccagggtggtcccttgctacctggaaatgcctgaactggttcctcttgaaagtttcagctggcctgtttcagatcctgcttatttcctatgtactttgcagtgcacctagcttatggtaaagatgagaggggctgcctgatccatagttctctgccacgcttctcctggcctttccacttaggatcaggctgtggggaaaggccttataggtcttgagtgcatttcttagtctccaagaagcagcctcggcctcctaacctaggttagcactttcttcttaaggtggttttaggcgctgaaagggggcagtttcaagcttctcttacgtaaaaggaagagttgttctatataaatcagtagttctctaccagggggattttatctcccctctctcagggggcattatttagaacaatatctggagagatttttggttgccacctcttgtgggggtggtgctggtaccgacatctagtgggagaggctggggtgctgctcagacatcctactaggcacagcaggattcccacaacaaagaattatcaggccccaagtgccactgttgataaaccttgtgttacgcgtatttcaagatcttagtgtctatccattggcatgaaatgataggggaataatccccaagaaaacagacatctagaatagcaactgactttaggtattacaggtaaatttatagactgtgtaactgaaaggatcatctttcgggtcatcttttgtcccaagtgcttagtcatattgaactaatgtcaagatcttgtgttgtttagtatctttagagttcgaagcacaaaccccggagatttttgtattctttcagtgccttcgtgaggagtaggcaggtataaaatagaaaggtaggctcagaacaaaaaaaaagtatttggaatacagaattctgatacacatgactctgcttctctgggtgaataaagagaagagaaactggactcagttgtacagaccacctagtaactgaccatgaacccagtgacttgattgtaaaaatttacagagcggaatcatatgctggtctccaagagtttaaagcagccatagaagatttaaatgcagttctttttcaacttccagattggcctgaggtctacttcaggaaaggaaaagtactctgcgatgctggttttttaggtgatgccttacaactctttcttcagtgcttagcccttgatgaagattttgcacctgcaaagctgcaagtacaaaagattttatgtgatttattattacctgaaaacttaaaagaaggcctgaaggaatcttcctggagttcattaccatgtactaaaaacagaccttttgattttcattcagtgatggaagagtctcagtctctcaatgaacctagcccaaagcagagtgaagaaataccagaggtcacttcagagcctgtcaaaggaagcttaaaccgtgctcagtcagcacagtctataaattcaacagaaatgcctgccagagaggactgtttaaaaagagtgtcctcagaacctgttctgtcagttcaagaaaaaggtgttctgctgaaaagaaagttgtctcttttagaacaggatgtgattgtaaatgaagatggaagaaataagctgaaaaaacaaggagaaactcccaatgaagtctgtatgttttccttagcttatggtgatattccagaagaattaatcgatgtctcagatttcgagtgttctctctgcatgaggttgttttttgagccagtaacaaccccttgcggacattcgttctgtaagaattgtcttgagcgttgtttagatcatgcaccatattgtcctctttgcaaagaaagcttaaaagagtatctagcagataggaggtactgtgtcacacagctgttggaagaattaatagtgaagtatctgcctgatgaactgtctgagagaaaaaaaatatatgatgaagaaactgctgaactctcacacttgaccaagaatgttccaatatttgtttgcactatggcctaccccactgtgccttgccctctccatgtatttgagccaagatacagattgatgattcgaagaagtatacagactggaaccaaacagtttggcatgtgtgtcagtgatacacaaaatagttttgcagattatggttgtatgttacaaattagaaacgtgcatttcttaccggacggaaggtctgtggttgatacagttggaggaaagcggtttagggttttaaaaagaggaatgaaagatggatattgcactgccgacattgaatatctggaagatgttaaggttgagaatgaagatgagattaagaatctcagagagcttcatgatttggtttactctcaagcctgcagctggtttcagaatttaagagacagatttcgaagccaaattcttcagcatttcggatcaatgcccgagagggaggaaaaccttcaggcagcccctaatggacctgcatggtgttggtggcttcttgcagttctccctgtagacccacgataccagctgtcggttttgtcaatgaagtctttgaaagaacggttgaccaagatacagcatatactgacctatttttctagagaccaatctaagtaactaactctttggatctccctttaaagtgaccctaatctggctgcattgatggccagattgtctgctgcctttgcacatctagtgctggtttcagaaatttaatgaaacttttctttttccttcga

SEQ ID NO: 149602 - DNA, 1246 bp, Homo sapiens
  Payload ID: 9545
  Gene Symbol: LONRF1
  Gene Name: LON peptidase N-terminal domain and ring finger 1
  ENST ID: ENST00000524526
  CDS Start-End: 1-1131
ttaaaccgtgctcagtcagcacagtctataaattcaacagaaatgcctgccagagaggactgtttaaaaagagtgtcctcagaacctgttctgtcagttcaagaaaaaggtgttctgctgaaaagaaagttgtctcttttagaacaggatgtgattgtaaatgaagatggaagaaataagctgaaaaaacaaggagcttatggtgatattccagaagaattaatcgatgtctcagatttcgagtgttctctctgcatgaggttgttttttgagccagtaacaaccccttgcggacattcgttctgtaagaattgtcttgagcgttgtttagatcatgcaccatattgtcctctttgcaaagaaagcttaaaagagtatctagcagataggaggtactgtgtcacacagctgttggaagaattaatagtgaagtatctgcctgatgaactgtctgagagaaaaaaaatatatgatgaagaaactgctgaactctcacacttgaccaagaatgttccaatatttgtttgcactatggcctaccccactgtgccttgccctctccatgtatttgagccaagatacagattgatgattcgaagaagtatacagactggaaccaaacagtttggcatgtgtgtcagtgatacacaaaatagttttgcagattatggttgtatgttacaaattagaaacgtgcatttcttaccggacggaaggtctgtggttgatacagttggaggaaagcggtttagggttttaaaaagaggaatgaaagatggatattgcactgccgacattgaatatctggaagatgttaaggttgagaatgaagatgagattaagaatctcagagagcttcatgatttggtttactctcaagcctgcagctggtttcagaatttaagagacagatttcgaagccaaattcttcagcatttcggatcaatgcccgagagggaggaaaaccttcaggcagcccctaatggacctgcatggtgttggtggcttcttgcagttctccctgtagacccacgataccagctgtcggttttgtcaatgaagtctttgaaagaacggttgaccaagatacagcatatactgacctatttttctagagaccaatctaagtaactaactctttggatctccctttaaagtgaccctaatctggctgcattgatggccagattgtctgctgcctttgcacatctagtgctggtttcagaaatttaatgaaacttttctt

SEQ ID NO: 149603 - DNA, 2841 bp, Homo sapiens
  Payload ID: 9545
  Gene Symbol: LONRF1
  Gene Name: LON peptidase N-terminal domain and ring finger 1
  ENST ID: ENST00000526680
  CDS Start-End: 312-491
catatgctggtctccaagagtttaaagcagccatagaagatttaaatgcagttctttttcaacttccagattggcctgaggtctacttcaggaaaggaaaagtactctgcgatgctggttttttaggtgatgccttacaactctttcttcagtgcttagcccttgatgaagattttgcacctgcaaagctgcaagtacaaaagattttatgtgatttattattacctgaaaacttaaaagaaggcctgaaggaatcttcctggagttcattaccatgtactaaaaacagaccttttgattttcattcagtgatggaagagtctcagtctctcaatgaacctagcccaaagcagttggatgaacccacggatgcagagcctgtggatacggagggccaactgtgctggcaaaaatcatttacttgtcacagtgttggaatcaaagtgaagaaataccagaggtcacttcagagcctgtcaaaggaagcttaaaccgtgctcagtcagcacagtctataaattcaacagaaatgcctgccagagaggactgtttaaaaagagtgtcctcagaacctgttctgtcagttcaagaaaaaggtgttctgctgaaaagaaagttgtctcttttagaacaggatgtgattgtaaatgaagatggaagaaataagctgaaaaaacaaggagaaactcccaatgaagtctgtatgttttccttagcttatggtgatattccagaagaattaatcgatgtctcagatttcgagtgttctctctgcatgaggttgttttttgagccagtaacaaccccttgcggacattcgttctgtaagaattgtcttgagcgttgtttagatcatgcaccatattgtcctctttgcaaagaaagcttaaaagagtatctagcagataggaggtactgtgtcacacagctgttggaagaattaatagtgaagtatctgcctgatgaactgtctgagagaaaaaaaatatatgatgaagaaactgctgaactctcacacttgaccaagaatgttccaatatttgtttgcactatggcctaccccactgtgccttgccctctccatgtatttgagccaagatacagattgatgattcgaagaagtatacagactggaaccaaacagtttggcatgtgtgtcagtgatacacaaaatagttttgcagattatggttgtatgttacaaattagaaacgtgcatttcttaccggacggaaggtctgtggttgatacagttggaggaaagcggtttagggttttaaaaagaggaatgaaagatggatattgcactgccgacattgaatatctggaagatgttaaggttgagaatgaagatgagattaagaatctcagagagcttcatgatttggtttactctcaagcctgcagctggtttcagaatttaagagacagatttcgaagccaaattcttcagcatttcggatcaatgcccgagagggaggaaaaccttcaggcagcccctaatggacctgcatggtgttggtggcttcttgcagttctccctgtagacccacgataccagctgtcggttttgtcaatgaagtctttgaaagaacggttgaccaagatacagcatatactgacctatttttctagagaccaatctaagtaactaactctttggatctccctttaaagtgaccctaatctggctgcattgatggccagattgtctgctgcctttgcacatctagtgctggtttcagaaatttaatgaaacttttctttttccttcgacctcctgaatcatgtggttctgcaaatgaataccttcaactaggatttagaccactaagaacttgcacagaaaaacacgcattgaatgtgtgtcgaacctctacattgtgaagttgcactatgtaccatactctaaaatgaaataagaactctttatgtctgtgagagagtgtgtgtgtgtgtgtgcgtgcgtgtgtgcttgtgggggttgggtagtgtgtgtgtattttctctggctttaaaattttaaaacaaacaaacaaaaaagccatagagagcagaacttgccgagggtcatttattgcccaagtttacaagagtagcgatacaagtttttgcaaattgaatttgcctcagatatatctgtcctaatgcttatatttgcacaagtatgtaaaatatcgtgttgaggatcattctttgttggaaacactgctcttgctgaactgtcttgaccattgactatgacacagtttcttatttatgtaaatacttgcatcacagtggccgacaggcattggatgcagaacctagagccagttttcaggaacaattgtaaacctgacatggtactgtgcatctattcataaaacactcaaaactgtgaaaatatggtttacatttaattgtacataaaggtaaagggagaactcaattcagtaccagttagtttgtacattttagggggcttttcacattaactgcccatttgtgtaatttatagtttgacatgatgtgtttgttttaaaaaaaaatgcatagtataaacccattaaggatctgggaaaagagaagaagtttaatatagaactaagcttttaaagtttgtttttgtttttaattctggtctcggtgcaaatgttagttatgccttattcatatcacagttagatcaccatgctgcaacatggtttatattcatgctgccctagaaacttttgtaattatttgttgcaaatttgtgactgtccttattaactttcttttatgtaagtaatttgtaaaagtttcttaaaatttttgcttttgcttatttaattttgaataaaagctaaattcctaata

SEQ ID NO: 149604 - DNA, 841 bp, Homo sapiens
  Payload ID: 9545
  Gene Symbol: LONRF1
  Gene Name: LON peptidase N-terminal domain and ring finger 1
  ENST ID: ENST00000525024
  CDS Start-End: 90-689
gttcggtaatatttttcttgtatgaattctaataattaaactgtttttcccttagcttgaccaagaatgttccaatatttgtttgcactatggcctaccccactgtgccttgccctctccatgtatttgagccaagatacagattgatgattcgaagaagtatacagactggaaccaaacagtttggcatgtgtgtcagtgatacacaaaatagttttgcagattatggttgtatgttacaaattagaaacgtgcatttcttaccggacggaaggtctgtggttgatacagttggaggaaagcggtttagggttttaaaaagaggaatgaaagatggatattgcactgccgacattgaatatctggaagatgttaaggttgagaatgaagatgagattaagaatctcagagagcttcatgatttggtttactctcaagcctgcagctggtttcagaatttaagagacagatttcgaagccaaattcttcagcatttcggatcaatgcccgagagggaggaaaaccttcaggcagcccctaatggacctgcatggtgttggtggcttcttgcagttctccctgtagacccacgataccagctgtcggttttgtcaatgaagtctttgaaagaacggttgaccaagatacagcatatactgacctatttttctagagaccaatctaagtaactaactctttggatctccctttaaagtgaccctaatctggctgcattgatggccagattgtctgctgcctttgcacatctagtgctggtttcagaaatttaatgaaacttttctttttccttcgacctcctgaatcatgtggttctgcaaat

SEQ ID NO: 149605 - DNA, 679 bp, Homo sapiens
  Payload ID: 9545
  Gene Symbol: LONRF1
  Gene Name: LON peptidase N-terminal domain and ring finger 1
  ENST ID: ENST00000534446
  CDS Start-End: 242-421
aggcatattcctgaggtaagcacccagaaatttgattctccagctgtctcccagcttatttcctcgctattatagggaagctgccatggggtgcttctaaccaagtattgggcagcagtaactgcccacacagattttatgtgatttattattacctgaaaacttaaaagaaggcctgaaggaatcttcctggagttcattaccatgtactaaaaacagaccttttgattttcattcagtgatggaagagtctcagtctctcaatgaacctagcccaaagcagttggatgaacccacggatgcagagcctgtggatacggagggccaactgtgctggcaaaaatcatttacttgtcacagtgttggaatcaaagtgaagaaataccagaggtcacttcagagcctgtcaaaggaagcttaaaccgtgctcagtcagcacagtctataaattcaacagaaatgcctgccagagaggactgtttaaaaagagtgtcctcagaacctgttctgtcagttcaagaaaaaggtgttctgctgaaaagaaagttgtctcttttagaacaggatgtgattgtaaatgaagatggaagaaataagctgaaaaaacaaggagcttatggtgatattccagaagaattaatcgatgtctcagatttcgagtgttctctctgcatgaggt

SEQ ID NO: 149606 - DNA, 13912 bp, Homo sapiens
  Payload ID: 9546
  Gene Symbol: LONRF2
  Gene Name: LON peptidase N-terminal domain and ring finger 2
  Uniprot ID: Q1L5Z9
  ENST ID: ENST00000393437
  CDS Start-End: 641-2905
cctccccagtcatttaggacaatttcctaagtcgaagctagagatgcgtgatgcgtttggtgacttttcctgggttcttgcttaagcggagccacaggttgtgggggcggccaggcctctggggaagagcaggtgccgcggtgccggcgcgccagcagcccgcggccaaggccacctgctcccagggccccggcacctctgcggggaggcggcaggcagaggacgcgcgcgcagtcgcgcaggagccctcaggcgagtgggggaagcatcgcaagagacgcggacctggagcgcggtcactgcgttaccgcagcgacctgggttacctaagccggcgggactgagaggccgctgcgcgtgggcaggggctcagattgcgcccgcggtgcctgtcccggcccccaccccggaacgattgcagccctgcggggctcgccgcccacaccgcgctgaggacgctgcccaagccaggcgcccgcccccgcccgcggtctcagccgctcgcagcgcgccgcccccagacgcgcgtggctgctggcgagggctgagaccgcgctcccgccggccagttcccagcagcagcgcatcctccctgctccgcgccttcgctccggacccgcgtcgtcgcagccccgcggtgatgagccccgagccggtcccgccgccgccgccgccccagtgtcctggctgcgaccgcgcggagccgatcgcccagcgcttagaggagggcgacgaggccttccgcgcgggcgactacgagatggcagccgagctctttcgctccatgctagccgggctggcgcagccggaccgcggcctgtgcctgaggctgggggacgcgctggcccgcgccggccgcctccccgaagccctgggcgcgttccgcggcgccgcgcggctcggggcgctgcggccggaggagctggaagagctggcgggcggcctggtgcgcgccgtgggcctgcgcgaccggccgctgtccgcggagaacccgggcggcgagcccgaggcgcccggcgagggagggccggccccggagccccgcgcgccccgcgacctgctcggctgcccgcgctgccggcggctgctgcataagccggtgacgctgccctgcgggctcacagtctgcaagcgctgcgtggagccagggcccgcgcggccgcaggtgcggcgcgtgaacgtggtgctgagcggcctgctggagaagtgcttcccggccgagtgccggctgcgcaggctggcaggccaggcgcggagcctgcagcgccagcagcagccggaggccgcgctgctcaggtgcgaccaggccctggagctggctcctgatgataattcattattgctgctgcgggcggagttatatttgaccatgaagaactatgagcaagctctccaagatgccagtgcagcttgtcagaatgaacctctcttgattaagggacatcaagtaaaagctcaggctctttctggattgggaagaagtaaggaagtgttaaaggaatttctctactgccttgctctgaatcctgaatgtaactctgtgaagaaagaagcacagaaggtaatgtgtgaagtgctgttttcagctacagcaaatgtgcatgaaaatttaacatcttccatccaaagcagattaaaggctcagggtcacagccacatgaatgcccaggctctgctggaagaaggtgatgcagggagctcggagaattcatctgagaaatctgatatgcttggaaataccaattcttcagttttgtattttatactgggtctacactttgaagaggataaaaaggcgttagaaagcatccttccaacagcacccagcgctggcttaaagagacagtttccggatgacgtggaggatgcacctgacctgaacgcccctggaaaaattcccaagaaagatctctcacttcaaaggagcccaaactctgagacagaagaaagtcaggggctctcgcttgatgtaactgactttgagtgtgccctctgcatgagattgctctttgaacctgtcactacgccctgtggacacacattttgcctaaaatgccttgagcgctgccttgaccacgccccacactgtcctttgtgcaaagacaaactttcggaattattggcaagcagaaactttaacataactgttctggccgaagaattaatatttcgatatttgccggatgaattgtctgataggaagagaatttatgatgaagaaatgtcagaactgtcaaatctgaccagagacgtccccatctttgtgtgtgccatggccttccccacggtcccatgtccactccacgtttttgagccccgctatcggcttatgataagaagatgcatggaaactggcaccaagcggtttggcatgtgtttatctgctgagcacgcggggctttcagagtatggatgcatgctggagattaaggacgtgagaacgtttcctgatggaagttctgttgtagacgcgattggcatcagtcggttccgagtgctaagccaccgccacagagatggctataacacagcggacattgaatatcttgaagatgaaaaggtggagggtccagagtatgaagaacttgccgctctccacgattctgtgcatcaacagtctgtttcctggttcgcgtctctccaggatcgcatgaaagaacaaattttaagtcattttggggtaatgccagacagagaacctgagcctcagagtaatcccagcggccctgcctggtcctggtggatcctggccgtgctgcccctggagcgcaaggctcagctggccatcctcggcatgacctcgctcaaagagcggctccttgccatccgacggatattagtcatcatcacgcgtaagatgaatagtcggcaagagctggctaatgccagggagagaaataattgatttttctctctgtcaaggtttctggcagcccttgtgcttttataaatgtcaggcatggacgaatagccgtccattcattgtgcttcatcaagtgcttgtggatgaggttccaaaatgggacgcttgccaaacattgagtcctcctcaaaaatgacaattctgtgtctggtgggatctgaccttgtgtgaggttagcctgaagtctgaatggagcccatagttggaaaacaacctaagaaaatctcttagaagcaggtgcttggggaatgcagttcactgacagcacaggaccctgcagatggtttacatgtggtttgggtttcacgagaaagaaggattcacttcccagtcagcatctggctctgccagatggtaaaggcgtgctttagtgtgtagacaatatgggggaaccacgtttttatctggaagtggatttcttagaacacaggctaaccaaaactacgcttaggctttgcgtgttgctgtgaagttgtctgtgaaatcgaataatcacaccattgttcagtgcaggagcccaaactagtccttacccaagaagtagtagcctctggatagaactgtgtttaatgtcctgttgtagtcccaggtgttgtaaattgcatgttgtaatcaaacgaatgtcaaaacataagaaagtataccttggatatagaaaaacctgagaacagtatcattcacttgaggatatatatatatatatttacacacaataaagtgagttaaaattgtatatgcattgggatgtcaaacataaaaccaccaagtgcaaagaatgctttgaaagtagaaccttgtctcattgatcagtggttactaagcatttaggaaacagtcatctttttctattgggatttgcattagaaattagccccatcagtaaatttcagtttactatccatttattaatatacaaaaacattaaaaaatctgccatgccatggtaatctatctattccaggaaaatagatcagaatatatgaagggaggatggccggtatgggatgtaaatattcagtaagtttttctccaacaccaacctaaaattatctttatttttttgaaagaaagttttacggtgatcagaccaggtgttatctgttaaaggacagtagtatgacttccatcctgtaatgcacgttggtgatattgattggaataactgaatctgagatactcatatgttctctctggcccaaccagctggtgcatttggttggcttcctcgtctgtaaggtggacattcttaaccagagggtcacgaccacatcacagctgcaagttttgctttgttcattgaaggtgattttttagttttaaaatatatatatctcataatatacaatgttgatggtatatcaatccatcaagcattttattagaaagactttataatattattaatttttctttagttttcagtagataaagtagtttcagtagataaagactttataatattattaatttttcttttagttttcagtctcatcatgggagttagaaaataccagcatcacttaattgtaaagagaaaatgtgaaagtattttccaatccaatgtttcaagtgcctcacttattgtgaatctcaaatatcatcttgagatggtttaatggcagtttggccaagtgatttctaagagattttattaatttatgcattaacaatagtattcaactttcttaggcattataacctaacccgatcatttgattggaataactgaatcattcattgattggaataaaataaagaaaacaaaatgcatctcacatgccagaagacctttaccagaagtggttcatgaaaatcagtatgcattgaccattctctgcctttcccttttggaaaatttttttgtaccttcatatcacagctgaatagttatcaatgccatttccatttggaagtatctaaataaccacaatgtgatcacagcttctccacgagccttcctgaagtaaagctggtatgcttgctataatacttggaacctgttgctttctcttcctcactctttaaatgtcataaggtcacacagttcttggaatcagaactattcagttatttcttcatgattctgcctggctttctgagtcttctccttcggcatgttatgtaaaagtctgaacaacaatgatgacgcagacgagagcaacatacgtttttattttttgataggtttttatttttttgataccagagggaattaactatgatcacatcgtgctctctctgttcagcatcacacgcccacatactgcagtgtgggagtagattggtacttactgagcacttagaaacatcacgcatcaggaaccgggtcagggtgacagcatcctacggtcatatcatgaaggaagcctcccttacaaacctaaaaaaaaaaaaccccagcttcagtttgctaccaattaagctaaagcagaacggtctgcttcctcctccgcctgcccccttctgcctcttttctgttggggagatgccaattctaaggatttctcagaaaataatgtaatctctcattcaatgtcaggacattccagcttaattgtactgaaagtgctccaataggcatgctctcgttacattggaatcaaagcagaaaagagtaatagcagcgtgggggagtcatttttcttcttgaggaacaatacatgctgttctgtatttttccattcatcgcccaaacctgcctgtgtctttgaaatgcaagtaagatcccaaaggcagctttctgaaagcccgtggcatttttagcttatcccatcccccgtgtgtgtcctcatcttcagaattgaaagttaggatactttttaaagtttcaaaagaaaataatttaaaatgttaaggtttatccatagaaacacaataattcttaaccaattcatgtaccaaattcaacagtattatctcatttttagggtcacaaatgtgtcctttttgcacttaaacctcctccctctctcaaaaacaaaaacaaacaaacaaacaaaaaacacaccaagactgtttaacaaattgtatctcaactcttaatatatgttaagtcttaccacaggacatttgaatcatcaaggaacagttgaagtttatggatggtagaataacaatgaactatgatattatcactttattataaactttttggaaaattggcagttgctaccatcgaaatactccattgcctgtgttacatagaatttgttataatttttaagggctttaaaaaaatacccatctgtttcttctccttcttgttttcttttgtgccccaccacttaaattacttgggtaaataccactcttcaaaatttgaatactgtctatcaaataagaagaagtgtgaaagatatgaagaagaaaggtgatagcaaattagaagaaaataaatgtgggtgatttcttttagttgaaagcacagagttttatttttccccagtataactattgagtagggtagggaggtccctgtatccccatttttattttttttgagatggggtctcactctgtcacccaggctggagtgcaatggcgcaatctcgtctcaccacaacctccgcctcctgggttcaagtgattctcttgccttggccccctgagtagctgggattacaggcacgcgccaccacacccagctaatttttgtattttttttttttagtagagatggggtttcaccatgttggtcaggctggtctcgaactcctgaccccatgatctgcccgcctcggcctcccacagtgctgggattacaggcgtgagccaccgtgcccggcccatctccccatgttttagcatagacagcagcggcattcagtggaaggagttcttccccttcaacatcgtccttcccaaaggccacattctgattctattgttcaccaaaaactaattcccagggaagcccgctctggatgggaaggatgagctgcgtgagccatcgcccacacagggagataaccgaacccctttgccagcatcaccccctctctactggggtgagacacttcattcagagcactggctctgactcccaggggaaagtctttttccctttacaactcctcacctcagcctcaccttgactttcacttctcaactgctgaattctataaaatagccttttagcagtgactcagcttttaggtgagcacagataatgaagaaattgaagtgccaccattgcactcccccaagttggggacataaactcgaatttgcacccaggtctgataaaagtaactgattgaggacgcagaaaggtggatgccattgacagcgttgactgttctcacaattcctacagaaatgaaagaaggagaggcccagcagaccacaccgggccatgaggggaagcatgggagacaggcagaagcaggagtgaggaggaacgtggctcagaccctctactgtatgttctgcaggaaagggcagggaaatagctaagactggctggtctgaataacagctcagactctaggctatacaggtggtctctagccatctggcacctagccccgggtcgttagggtgggggatattgcttcctaggttgtaagagccagatagaggaggatgggctctggattggtcactttgctcccagggtagccctttgctgtatctaagaattggctcaccctgggatgggcagtttctcctgggtcagcgaggcccctgagatgtcaaaatatcataaaatatagaaatcatgattaatacaattggtcctctgctgttttgacatactaaggtcacttttgatagcagaaacttttaaagagtagggcatacgttgccctgaagagcatagaaaacattttattctgagagtagaaaggaggaagacacgtggagatacaggagtcccttaggctggcccatagctgagtctctcatgtgtgtggcattagtcaagaatgtagttctgcagtttgcggggggggggtctctaacatttcttggtgcagttgttaacatgtgttaaacatatgagtctgatgatgatatcgcggtgtttctcggctcggggtggcaggtctggcggttgtgtggctgggggtgtgcactgatagttcagtaaaggataagtagagactcgtggtgttcatgtgtcaccacagggagggagtggctgtggagacccaggacaggaagtcgcggtggaaagcaggctggggtggtaggagaaggcaccgggggtgggtgctcctcccccaggggttgaggagttgactgatagggggcagttacctcctgggaaagcaagacgctcccttaagttttagaatggtacagagagtagtcccttctaccagagtttccatttagacatgggagtgtagggggccatgtttcggcagaagcagggcatgtatcagcattagtggactcctcagtattaaaaggaagaacagcaaacatgtcatgtgcccactttgtgcctcaggagaggtagcccgtggacatcgctagggcagaggttttaatatctgggacaaagttatctcccacggcgaggtcgtggctgggaccatgtcatcttcagccgtgagctgctgggctgggcaatgtcttctgggatgtgagacgtggggtctcctttctaagcggacccccactcgtgctgatgtgggtcccagcatttgccgcgtttggttgaaacagtggcttacctggagggtctgggtctctggatcataaaccagcgaaagcccccacatcagtggtgacaagatcaatagaccccagaatgtgtgcagctgtgcttgatagggttttggttcttgctttttggtggaagtttaggctcaagtgggtcccgtatcggatgagcagctgcacggcctgtgggagccctggggttagtgggtccaggagagaatgtgttctctctctgggctccagccctgatggggtggggataagatgcaagatttataggaatagggggaaacattatggaaggccccaatatgtaatgagcttttatatacaagaatgcaagacatagccctctttttatgtttaaaggggactatggtaatgttttttaaagtttgtgtgaggtgtgagtcaaccgaaaggccctaaattaagagagattcaggtttgtggtgcaagatagaggcccatttcggggtctgtttgcagaccagaatttgaaatggagttgtttgaggagaccattgtgtgtcttcgtgaaaccgattgtgtggaacctatcagggctgtggaagttgtagcgaatgccttttcccagagcccagcattgtggattccgagaagtggcatgtgtgtctcagtgacttccagtgatgcctgccactctgaagagatgaaggagtgtcctggcaagacctggaatcccagctgtagcacctgtggagagatgtgatttagatttggatttggggtatctgtgaggaagagtcccagagtttttcatcctgaagggggcaactcttgggcagtggtccaacagttggccataaatgtgaagctggggcgctgtgctgaccagggcatccagcgttaagacgactgcctaactttggccacatgcgttgttttttgggttccgtttcgtatcagggcatgctggctaaaagatgggaagcagcaacattctcttgggctccatcatttatatgagggttggcaatgccatctgtaccctctgtgaactcccactgctgttcactcagttaatctaagggacaccaaggggtctgcgggaggatgacctcacaagggactgaggacatgggagaccaccctcctgtgggtagaatacaccagagggcccaggcttgactctgtcctgtgttaaggaggcatcggtagttttgctgagcttgtcaggtgtttataatggacagttggagattggggtcctaggcttaggtctttgagagcctctgtgtccaggagagcccagtaggcatccagccatttactgctttaatagggtagcatgaggctgagagggatagtttcttgcatccaaagcccttaggcaccttatgtccatcctaagtgggccagagactccagggctgcatagagcttgccagagcttctataatgaaggggtctctgagggcaccaacaggagtgcccatggattttaaggtttgattatagaggttgtttatggagggtgccccatttaaagcaagctgatttgtaagcagcagcaagaagattaagtaaaatttgtaaatgaggactacattgccatcagaacctcgaaagtatctaaagatgttggacttgtatgtccttaatgagtgtgacaatgagtttcctcatttgtgctcctggagaaggcggatgtggtgaagaccctgtctgcagacattgtgtgccatggcaaagccgtggagctccctgtgggtggcctgcaaaggtgtatgtgcccctcagggcagaaggcaaacggcagccaagaagctgtgcaagtagacacttaatgggacatgttagccaaatctgtaagagcaaaatattggccagttatttattgtgtagaattaataattttaataataatggaaattgggtaatggatgggactgcagcaataaggttgtagtaatccaccatgaggcacacttgtttttttccaggtttaaggataggaaagattgggctgttcaatggagaaacaagggtataatcacccctttattaattagtaagttttaatccttgaatacctcatattaactgttttaactggaggtccatggggcatcattttatcaagctagtttataactgccaaagactgactttaattttaatttattatttgttttattagagtgtctgtgttcaatatgggatattagggcgttgggtactatgaccacaggaaatttagacaggctacagttaaagtgaagcataccttacccatccaccccccattttatatttagttgcctttttaaaaagattataggggtacaatgtttagatttagtgggatctccaggtataactgtaatttgagccccagtgttaagactatgaagctttgtcaatgggtacattttagcaaatgttacaattaatttagaacctaagttatggagacacaaaagccaataggcacccttttatgttttggttaaatgtttcagtatatacatcttatttatttgtaatattagtatataatttgttgtatacatttttagtgtataagcgttggatttctaattggatcagattagggaccttccgtttagctgcatatgtacatatacatgtacaatttattatatatttgcgttaaaatagcctatctgcatgtgtatatatgtgtgtatgtgtatgtatatgcactcacacgcataaatacacagtctatttagttacctttaatgttttttcccttgtacctaggctttttctcgctttttcctttttttctgattttgtggcaatttagttggaaggaggcggtcccagcatgttgacaggcagggtgttcagagtgcccaggcacactggtggggggtggttacaggctcacgtagctcaggggcttctgcaggtctcaggggagtgggaacaaagtgtcccaccccttccccttttcctcaaacctcaagccactggtctctatggatagatcctttgcatcccaccggattgaggaatgagtcacaacagctgcaaggctcttaaagcaacatttaaaccttttggcggctgtcatttctgtgaggagggtgcctctcaccggccgcatggccggaggatccctgcagcgctttggagaccaacacccagatcctttgcccaggagtgcgattaattcctcactggatgctgggggagggcccctcaggtgagcagcccaccactgacttcagcgttgctggctcggttatcagactctcatccaacacaagctcacagggaaagccgttccttgctccttgtggagggagctaccgtcattgccctgagaccaccagccaagaaagtaggtatgtccaggtagggaattcagagggacccagtgcatccaattatacaattatacccagaaggtcctgtgtaggggactgcgattgacatcaccctagtctgcagcaccaaggactgaatgagctcagtcctcttataatttaggctggactgtcacagacactggcagacacagcatacgtggtgcagccaaagtgcaaacatgccagcagcggccatgctccccagggtgggggtccagttagtaagccacgcgcagccaagaggcgaggcatgccctgtgccacacacggactcaccctgctcactgtgcccgtggtatcgaaatgtacccacgtttaattcataaaggagaggctgctgtcattgaaagaaaagtttgttacttgcatttctggagaaaaggagcgcaccaggccacgcagggccacaggaggaggacgcaccagagtggtcaggaggcagaactaggcgagcagctttccactgtgtctccatggcaaaggcgaagatgggcgggggcagagtgtaggattggcaggtttgaatgtcttgggcagtagctacaggggtggtctccagctgcctggtgcctggccctgggtgatcagggtgaggggatactgccttctgcagtggaagagtcaaatcgaggagatggactctgagttggttagtgtgcaaaggtgcactcccaagggacccctttgctatctctaagaattggcctgccctgggaagggcagtctctccccagtcagtgaggtccccaagatgtgaaaacattatacattataaaaaagcatgattaatataagctcattctagcatttcaggttacagcttctagaagaggtttgtagtctcaaatgagtaggtttttcctctagagaggggcgggcctggaccttcaagcaccccttggtgtgtttaggagctcaggagcagaagcacctgcctgcagccctgcagctaaggaagttctctcagtcactcagagcagggaggggctgagagagtcatgtgaggctcccggggtactacgacagccctcgaggtgaaggattggccctgatcataatagagaaccctgaggaagtttactgtcatgagtctcggctggttggcgcatgtgacctttgaaggatgaagatggagtttgcaacatgagtatctctaaccttttgcttttcagggatcattttcaaaaattgcattggggccttcgttatttaccatagtattttcactttcatagttttgtcacctttttgtactgtgaacagttcaaccagtgaccgacttctctctcatgctgtttaccccacacacaatttcccactcaattctgaaaataagaacctgttaataggttggaaagctgtgtactctattcatatattgttctttcatgctagtggagagtggtgtcattagcatcttaattttagagttgtgaaatgattttaccaattaggaattgaatgtgtattttttttctgtttaataagaagagcaaatttgaataaataagctggtgtagataaacttaataatcatgctttttcttgtttggagataggtgatgtgttgtcatatcctgtgatacaggtcactcatctggccttctgtttctgaagtttaagtctggtttgaatatgtaataatactactcagcatttcttgttgcctaagtgagacgaaacttaaatgttatgatatttacttcatgtattcttgtactgttcatttcaattaattggtattgtatatctaatatgtgatatttgaactgaataaaacttacagtgttgtaaatgttctttaataaataatcacacctaagtaataggctagactgatgagaaattagatcaaatcagtgcctaggcctttgtgtttgtgtcgtagggatgtactaacacatcaccacagactgacggcttttcacaataaatcagttttcttcgctca

SEQ ID NO: 149607 - DNA, 2363 bp, Homo sapiens
  Payload ID: 9546
  Gene Symbol: LONRF2
  Gene Name: LON peptidase N-terminal domain and ring finger 2
  Uniprot ID: Q1L5Z9
  ENST ID: ENST00000409647
  CDS Start-End: 72-1607
agtggcagtctgtttttcttgctcctgatgataattcattattgctgctgcgggcggagttatatttgaccatgaagaactatgagcaagctctccaagatgccagtgcagcttgtcagaatgaacctctcttgattaagggacatcaagtaaaagctcaggctctttctggattgggaagaagtaaggaagtgttaaaggaatttctctactgccttgctctgaatcctgaatgtaactctgtgaagaaagaagcacagaaggtaatgtgtgaagtgctgttttcagctacagcaaatgtgcatgaaaatttaacatcttccatccaaagcagattaaaggctcagggtcacagccacatgaatgcccaggctctgctggaagaaggtgatgcagggagctcggagaattcatctgagaaatctgatatgcttggaaataccaattcttcagttttgtattttatactgggtctacactttgaagaggataaaaaggcgttagaaagcatccttccaacagcacccagcgctggcttaaagagacagtttccggatgacgtggaggatgcacctgacctgaacgcccctggaaaaattcccaagaaagatctctcacttcaaaggagcccaaactctgagacagaagaaagtcaggggctctcgcttgatgtaactgactttgagtgtgccctctgcatgagattgctctttgaacctgtcactacgccctgtggacacacattttgcctaaaatgccttgagcgctgccttgaccacgccccacactgtcctttgtgcaaagacaaactttcggaattattggcaagcagaaactttaacataactgttctggccgaagaattaatatttcgatatttgccggatgaattgtctgataggaagagaatttatgatgaagaaatgtcagaactgtcaaatctgaccagagacgtccccatctttgtgtgtgccatggccttccccacggtcccatgtccactccacgtttttgagccccgctatcggcttatgataagaagatgcatggaaactggcaccaagcggtttggcatgtgtttatctgctgagcacgcggggctttcagagtatggatgcatgctggagattaaggacgtgagaacgtttcctgatggaagttctgttgtagacgcgattggcatcagtcggttccgagtgctaagccaccgccacagagatggctataacacagcggacattgaatatcttgaagatgaaaaggtggagggtccagagtatgaagaacttgccgctctccacgattctgtgcatcaacagtctgtttcctggttcgcgtctctccaggatcgcatgaaagaacaaattttaagtcattttggggtaatgccagacagagaacctgagcctcagagtaatcccagcggccctgcctggtcctggtggatcctggccgtgctgcccctggagcgcaaggctcagctggccatcctcggcatgacctcgctcaaagagcggctccttgccatccgacggatattagtcatcatcacgcgtaagatgaatagtcggcaagagctggctaatgccagggagagaaataattgatttttctctctgtcaaggtttctggcagcccttgtgcttttataaatgtcaggcatggacgaatagccgtccattcattgtgcttcatcaagtgcttgtggatgaggttccaaaatgggacgcttgccaaacattgagtcctcctcaaaaatgacaattctgtgtctggtgggatctgaccttgtgtgaggttagcctgaagtctgaatggagcccatagttggaaaacaacctaagaaaatctcttagaagcaggtgcttggggaatgcagttcactgacagcacaggaccctgcagatggtttacatgtggtttgggtttcacgagaaagaaggattcacttcccagtcagcatctggctctgccagatggtaaaggcgtgctttagtgtgtagacaatatgggggaaccacgtttttatctggaagtggatttcttagaacacaggctaaccaaaactacgcttaggctttgcgtgttgctgtgaagttgtctgtgaaatcgaataatcacaccattgttcagtgcaggagcccaaactagtccttacccaagaagtagtagcctctggatagaactgtgtttaatgtcctgttgtagtcccaggtgttgtaaattgcatgttgtaatcaaacgaatgtcaaaacataagaaagtataccttggatatagaaaaacctgagaacagtatcattcacttgaggatatatatatatatatttacacacaataaagtgagttaaaattgtatatgc

SEQ ID NO: 149608 - DNA, 2989 bp, Homo sapiens
  Payload ID: 9547
  Gene Symbol: LONRF3
  Gene Name: LON peptidase N-terminal domain and ring finger 3
  Uniprot ID: Q496Y0
  ENST ID: ENST00000304778
  CDS Start-End: 168-2324
agttattaggcggcgcggggcggccggcatggagctcccggaggcgcggcagggtcaggagctcggtggcatggcggcggtggctgccccgatttcctccagctgccactccttgcttcgtgtccccggtccctagacgcctcgtctcctcccgtgtccctcttcccatggagtcagtacggatcgaacagatgctgagcttgcccgctgaggtcagcagcgacaacttggagtcggcggagcgaggggcatcagcggcccaagtagacatgggcccccacccaaaggtggctgcagagggccccgcacctctaccgacgcgggagccagagcaagagcagtctccggggacctcaacgccggagagcaaagtcctgctcacgcaggcagacgccttggcgtcccgggggcgaatccgtgaagccctcgaggtgtatagacagctctccgagcggcagcagctggtggctgagcagctggagcagctggtgcgctgcctggcggagaaagtcccgcaaggcgaggcgctggcgccggcgcccccggacgagggtagcactgcaagcggcaccgtggcggcggaagagacgggggccgccgcggctgcggcggccaccgaggtgtgggacggctttaagtgccggaaatgtcatgggtttctatcagaccccgtgtccttgtcgtgtggccacaccttttgtaaactgtgcctggaacgtgggcgggccgccgaccggcgctgtgcgctgtgcggggtcaagctctccgccttgatggtggccactgggcgggcgcgtggagcccggcgggctgggcagcagccgccgccgccgctgcgagtcaacgtggtgctcagcggcctcctcggcaagttgtttccaggcccagcgcgagcgtcgcaactccggcacgagggcaaccgactgtaccgcgagcgccaggtggaggcggcactgctcaagtacaacgaggcagttaagttggctccaaatgaccacttgctttatagcaatcggtctcagatttatttcaccttggagtctcatgagaatgcactgcatgatgcagaaatagcatgtaagctccgcccgatgggttttaaggacaatctggagctcccacattgttctagtcaggaggaagcagcagccaggggagatggcagcagtctgatggacccagctaaagtgaagggggatggtcagcagcaccacatgaaagaccaggaagaagaggaggagaagtgggatgctacctctccaaaagctgcttccagcaagactggaaaatgccaggaaaagaaaaggaaacattgccagattgaatcccaagaagaaacggggatgcctaataaagcctccaagcaagatcctcccactgatcagggggacaaacctgctctcagtttaccacttgcatctttcgacgcatctgaccttgaatgcgctctatgtatgagattattctatgagccagtcacaacaccttgcgggcatactttttgcttaaaatgcctagaaagatgcctagatcacaacgcaaagtgtccattgtgcaaagacggtctttcacagtgcttggcatcaagaaaatacagcaaaaatgtaataatggaggagctcatagctaaattccttccagaagaactgaaggaacgaaggaagctttatgaagaggaaatggaagaactttctaaccttaataagaatgtgcctattttcgtgtgtactatggcctatcccaccgttccttgtcccctgcacatctttgagccttgttaccgcctgatgattcgtagatgcattgagacaggcacgagacagtttggcatgtgccttggagatcctgtcaaagggtttgcagaatatggctgcatcctagagatcagaaatgttcaattctttgctgatggccgctcagtggttgacagcataggcaagaggcgcttcagggtgctccatcagagccagcgggatggctacaacacagccgacattgaatacattgaagaccaaaaggttcagggagaggattgtgctgagctcatgggattacataactgtgtctatcagcaagcatcattgtggtttcattcgctcaaattatccctaaagaatcggatactcaatcactttggtcccatgccggagaaagacgccgatcctcagatgaacccgaatggcccagcctggtgctggtggatgttagcagttcttcccttggaaagccgagctcagctccccttcctagcaatgaggtccttaaaggacagactgaatggtattcgacgagtcctggccttcatatcccgaaaccaaaactagtgagtggattgccgaagaggagctcccaccttccccactgccgtcggggggagtcttcttgtaaatatatctaattgcaataatatcttaacagaagggggtgtcaaacagaggcatcagcctgctgttgatcacagagagaaattgagtagaaagaccaaaagaatgtgacctatttgaaactttctgtcttaagatgcttcttgacatgctgcataactacataaacagcagaggtgtttaagagcccagaaaaacataatttgattttaacattaaaatttccaaaagtttaaagtggttttgctttaatattctttctttcatagatcaatgactgtgtggttgaaatgtgaaaacaaagatactaataatgttgctgtataatttcactgacttgaggtctcattccaaatggttcaggttttatagagcattgtgtaaaataatgttcatacttctttctgttttaataatttattttttgcactactgtatccttttttctacatgtatgtttgtaactatttaagcgtacattgctgaaaagtccattgctttatttattgatgtggtttaccatgtacctagggggaaataacaatactagaagtgtgcagtttttgcttttatcttttttttactacaatgacactagttcttag

SEQ ID NO: 149609 - DNA, 2550 bp, Homo sapiens
  Payload ID: 9547
  Gene Symbol: LONRF3
  Gene Name: LON peptidase N-terminal domain and ring finger 3
  Uniprot ID: Q496Y0
  ENST ID: ENST00000371628
  CDS Start-End: 32-2311
acgcctcgtctcctcccgtgtccctcttcccatggagtcagtacggatcgaacagatgctgagcttgcccgctgaggtcagcagcgacaacttggagtcggcggagcgaggggcatcagcggcccaagtagacatgggcccccacccaaaggtggctgcagagggccccgcacctctaccgacgcgggagccagagcaagagcagtctccggggacctcaacgccggagagcaaagtcctgctcacgcaggcagacgccttggcgtcccgggggcgaatccgtgaagccctcgaggtgtatagacagctctccgagcggcagcagctggtggctgagcagctggagcagctggtgcgctgcctggcggagaaagtcccgcaaggcgaggcgctggcgccggcgcccccggacgagggtagcactgcaagcggcaccgtggcggcggaagagacgggggccgccgcggctgcggcggccaccgaggtgtgggacggctttaagtgccggaaatgtcatgggtttctatcagaccccgtgtccttgtcgtgtggccacaccttttgtaaactgtgcctggaacgtgggcgggccgccgaccggcgctgtgcgctgtgcggggtcaagctctccgccttgatggtggccactgggcgggcgcgtggagcccggcgggctgggcagcagccgccgccgccgctgcgagtcaacgtggtgctcagcggcctcctcggcaagttgtttccaggcccagcgcgagcgtcgcaactccggcacgagggcaaccgactgtaccgcgagcgccaggtggaggcggcactgctcaagtacaacgaggcagttaagttggctccaaatgaccacttgctttatagcaatcggtctcagatttatttcaccttggagtctcatgagaatgcactgcatgatgcagaaatagcatgtaagctccgcccgatgggttttaaggcacatttcagaaaagcccaagccttagccaccctaggcaaggtggaggaggcactaagggagtttctctactgtgtatcccttgatggaaagaacaagagagcaagatgtgaagcccaaagagacaatctggagctcccacattgttctagtcaggaggaagcagcagccaggggagatggcagcagtctgatggacccagctaaagtgaagggggatggtcagcagcaccacatgaaagaccaggaagaagaggaggagaagtgggatgctacctctccaaaagctgcttccagcaagactggaaaatgccaggaaaagaaaaggaaacattgccagattgaatcccaagaagaaacggggatgcctaataaagcctccaagcaagatcctcccactgatcagggggacaaacctgctctcagtttaccacttgcatctttcgacgcatctgaccttgaatgcgctctatgtatgagattattctatgagccagtcacaacaccttgcgggcatactttttgcttaaaatgcctagaaagatgcctagatcacaacgcaaagtgtccattgtgcaaagacggtctttcacagtgcttggcatcaagaaaatacagcaaaaatgtaataatggaggagctcatagctaaattccttccagaagaactgaaggaacgaaggaagctttatgaagaggaaatggaagaactttctaaccttaataagaatgtgcctattttcgtgtgtactatggcctatcccaccgttccttgtcccctgcacatctttgagccttgttaccgcctgatgattcgtagatgcattgagacaggcacgagacagtttggcatgtgccttggagatcctgtcaaagggtttgcagaatatggctgcatcctagagatcagaaatgttcaattctttgctgatggccgctcagtggttgacagcataggcaagaggcgcttcagggtgctccatcagagccagcgggatggctacaacacagccgacattgaatacattgaagaccaaaaggttcagggagaggattgtgctgagctcatgggattacataactgtgtctatcagcaagcatcattgtggtttcattcgctcaaattatccctaaagaatcggatactcaatcactttggtcccatgccggagaaagacgccgatcctcagatgaacccgaatggcccagcctggtgctggtggatgttagcagttcttcccttggaaagccgagctcagctccccttcctagcaatgaggtccttaaaggacagactgaatggtattcgacgagtcctggccttcatatcccgaaaccaaaactagtgagtggattgccgaagaggagctcccaccttccccactgccgtcggggggagtcttcttgtaaatatatctaattgcaataatatcttaacagaagggggtgtcaaacagaggcatcagcctgctgttgatcacagagagaaattgagtagaaagaccaaaagaatgtgacctatttgaaactttctgtcttaagatgcttcttgacatgctgcataactacataaacagcagaggtg

SEQ ID NO: 149610 - DNA, 2898 bp, Homo sapiens
  Payload ID: 9547
  Gene Symbol: LONRF3
  Gene Name: LON peptidase N-terminal domain and ring finger 3
  ENST ID: ENST00000422289
  CDS Start-End: 722-2233
atcccacgagcatgtgcggggggagggggagcgcttgcgccccgctgccctgtgactcattgtcaccgcttcctatcacacgatcctcggctgaaatagatgcccccccttgcccgccccgccaacccgtagcctgtgccctcgcctccaacccctttaacctggccagcccggcgggaggccggcgcggcaactgcttggggatccctggggaccgtgggctggctacgaatgggtcacgcctctgtcccgcttttcagtgccgcctgggagggttgggtgggctttgcagcttcaagggtaacgtgggcagtcccccatctccagctagactagggcacccgaatttccccagggagccgctctctgacccaccacgcctggacccaggaagtggctgctgagccgccagccggtgttgcccagctctggcagtttgccaggagctcggccgtggggcgcggtgtctggcgaagcatgccggggaggaggcagcagggctgggcaggcagggccctgggatccgagggtgtcctggacctgactctgtggagtggaggaggggtgtgggccggagtctccacgtgtttaatctccactcaagcttgcaacagctccaaatgaccacttgctttatagcaatcggtctcagatttatttcaccttggagtctcatgagaatgcactgcatgatgcagaaatagcatgtaagctccgcccgatgggttttaaggcacatttcagaaaagcccaagccttagccaccctaggcaaggtggaggaggcactaagggagtttctctactgtgtatcccttgatggaaagaacaagagagcaagatgtgaagcccaaagacttctccttagtttcttttcaccatcagtcccgggggattctcaggaacattctcccgatatcctgaagctgttggcacctcaccctagattaaaggaaaacgtagagtcaatgactactgaagttaccagccataatctaccaaggttgttacaggacaatctggagctcccacattgttctagtcaggaggaagcagcagccaggggagatggcagcagtctgatggacccagctaaagtgaagggggatggtcagcagcaccacatgaaagaccaggaagaagaggaggagaagtgggatgctacctctccaaaagctgcttccagcaagactggaaaatgccaggaaaagaaaaggaaacattgccagattgaatcccaagaagaaacggggatgcctaataaagcctccaagcaagatcctcccactgatcagggggacaaacctgctctcagtttaccacttgcatctttcgacgcatctgaccttgaatgcgctctatgtatgagattattctatgagccagtcacaacaccttgcgggcatactttttgcttaaaatgcctagaaagatgcctagatcacaacgcaaagtgtccattgtgcaaagacggtctttcacagtgcttggcatcaagaaaatacagcaaaaatgtaataatggaggagctcatagctaaattccttccagaagaactgaaggaacgaaggaagctttatgaagaggaaatggaagaactttctaaccttaataagaatgtgcctattttcgtgtgtactatggcctatcccaccgttccttgtcccctgcacatctttgagccttgttaccgcctgatgattcgtagatgcattgagacaggcacgagacagtttggcatgtgccttggagatcctgtcaaagggtttgcagaatatggctgcatcctagagatcagaaatgttcaattctttgctgatggccgctcagtggttgacagcataggcaagaggcgcttcagggtgctccatcagagccagcgggatggctacaacacagccgacattgaatacattgaagaccaaaaggttcagggagaggattgtgctgagctcatgggattacataactgtgtctatcagcaagcatcattgtggtttcattcgctcaaattatccctaaagaatcggatactcaatcactttggtcccatgccggagaaagacgccgatcctcagatgaacccgaatggcccagcctggtgctggtggatgttagcagttcttcccttggaaagccgagctcagctccccttcctagcaatgaggtccttaaaggacagactgaatggtattcgacgagtcctggccttcatatcccgaaaccaaaactagtgagtggattgccgaagaggagctcccaccttccccactgccgtcggggggagtcttcttgtaaatatatctaattgcaataatatcttaacagaagggggtgtcaaacagaggcatcagcctgctgttgatcacagagagaaattgagtagaaagaccaaaagaatgtgacctatttgaaactttctgtcttaagatgcttcttgacatgctgcataactacataaacagcagaggtgtttaagagcccagaaaaacataatttgattttaacattaaaatttccaaaagtttaaagtggttttgctttaatattctttctttcatagatcaatgactgtgtggttgaaatgtgaaaacaaagatactaataatgttgctgtataatttcactgacttgaggtctcattccaaatggttcaggttttatagagcattgtgtaaaataatgttcatacttctttctgttttaataatttattttttgcactactgtatccttttttctacatgtatgtttgtaactatttaagcgtacattgctgaaaagtccattgctttatttattgatgtggtttaccatgtacctagggggaaataacaatactagaagtgtgcagtttttgcttttatcttttttttactacaatgacactagttcttag

SEQ ID NO: 149611 - DNA, 1873 bp, Homo sapiens
  Payload ID: 9547
  Gene Symbol: LONRF3
  Gene Name: LON peptidase N-terminal domain and ring finger 3
  ENST ID: ENST00000439603
  CDS Start-End: 1-1576
gtgcggggtcaagctctccgccttgatggtggccactgggcgggcgcgtggagcccggcgggctgggcagcagccgccgccgccgctgcgagtcaacgtggtgctcagcggcctcctcggcaagttgtttccaggcccagcgcgagcgtcgcaactccggcacgagggcaaccgactgtaccgcgagcgccaggtggaggcggcactgctcaagtacaacgaggcagttaagttggctccaaatgaccacttgctttatagcaatcggtctcagatttatttcaccttggagtctcatgagaatgcactgcatgatgcagaaatagcatgtaagctccgcccgatgggttttaaggacaatctggagctcccacattgttctagtcaggaggaagcagcagccaggggagatggcagcagtctgatggacccagctaaagtgaagggggatggtcagcagcaccacatgaaagaccaggaagaagaggaggagaagtgggatgctacctctccaaaagctgcttccagcaagactggaaaatgccaggaaaagaaaaggaaacattgccagattgaatcccaagaagaaacggggatgcctaataaagcctccaagcaagatcctcccactgatcagggggacaaacctgctctcagtttaccacttgcatctttcgacgcatctgaccttgaatgcgctctatgtatgagattattctatgagccagtcacaacaccttgcgggcatactttttgcttaaaatgcctagaaagatgcctagatcacaacgcaaagtgtccattgtgcaaagacggtctttcacagtgcttggcatcaagaaaatacagcaaaaatgtaataatggaggagctcatagctaaattccttccagaagaactgaaggaacgaaggaagctttatgaagaggaaatggaagaactttctaaccttaataagaatgtgcctattttcgtgtgtactatggcctatcccaccgttccttgtcccctgcacatctttgagccttgttaccgcctgatgattcgtagatgcattgagacaggcacgagacagtttggcatgtgccttggagatcctgtcaaagggtttgcagaatatggctgcatcctagagatcagaaatgttcaattctttgctgatggccgctcagtggttgacagcataggcaagaggcgcttcagggtgctccatcagagccagcgggatggctacaacacagccgacattgaatacattgaagaccaaaaggttcagggagaggattgtgctgagctcatgggattacataactgtgtctatcagcaagcatcattgtggtttcattcgctcaaattatccctaaagaatcggatactcaatcactttggtcccatgccggagaaagacgccgatcctcagatgaacccgaatggcccagcctggtgctggtggatgttagcagttcttcccttggaaagccgagctcagctccccttcctagcaatgaggtccttaaaggacagactgaatggtattcgacgagtcctggccttcatatcccgaaaccaaaactagtgagtggattgccgaagaggagctcccaccttccccactgccgtcggggggagtcttcttgtaaatatatctaattgcaataatatcttaacagaagggggtgtcaaacagaggcatcagcctgctgttgatcacagagagaaattgagtagaaagaccaaaagaatgtgacctatttgaaactttctgtcttaagatgcttcttgacatgctgcataactacataaacagcagaggtgtttaagagcccagaaaaacataatttgattttaacattaaaatttccaaaagtttaaa

SEQ ID NO: 149612 - DNA, 2895 bp, Homo sapiens
  Payload ID: 9547
  Gene Symbol: LONRF3
  Gene Name: LON peptidase N-terminal domain and ring finger 3
  Uniprot ID: Q496Y0
  ENST ID: ENST00000481285
  CDS Start-End: 164-1996
attaggcggcgcggggcggccggcatggagctcccggaggcgcggcagggtcaggagctcggtggcatggcggcggtggctgccccgatttcctccagctgccactccttgcttcgtgtccccggtccctagacgcctcgtctcctcccgtgtccctcttcccatggagtcagtacggatcgaacagatgctgagcttgcccgctgaggtcagcagcgacaacttggagtcggcggagcgaggggcatcagcggcccaagtagacatgggcccccacccaaaggtggctgcagagggccccgcacctctaccgacgcgggagccagagcaagagcagtctccggggacctcaacgccggagagcaaagtcctgctcacgcaggcagacgccttggcgtcccgggggcgaatccgtgaagccctcgaggtgtatagacagctctccgagcggcagcagctggtggctgagcagctggagcagctggtgcgctgcctggcggagaaagtcccgcaaggcgaggcgctggcgccggcgcccccggacgagggtagcactgcaagcggcaccgtggcggcggaagagacgggggccgccgcggctgcggcggccaccgaggtgtgggacggctttaagtgccggaaatgtcatgggtttctatcagaccccgtgtccttgtcgtgtggccacaccttttgtaaactgtgcctggaacgtgggcgggccgccgaccggcgctgtgcgctgtgcggggtcaagctctccgccttgatggtggccactgggcgggcgcgtggagcccggcgggctgggcagcagccgccgccgccgctgcgagtcaacgtggtgctcagcggcctcctcggcaagttgtttccaggcccagcgcgagcgtcgcaactccggcacgagggcaaccgactgtaccgcgagcgccaggtggaggcggcactgctcaagtacaacgaggcagttaagttggctccaaatgaccacttgctttatagcaatcggtctcagatttatttcaccttggagtctcatgagaatgcactgcatgatgcagaaatagcatgtaagctccgcccgatgggttttaaggcacatttcagaaaagcccaagccttagccaccctaggcaaggtggaggaggcactaagggagtttctctactgtgtatcccttgatggaaagaacaagagagcaagatgtgaagcccaaagagacaatctggagctcccacattgttctagtcaggaggaagcagcagccaggggagatggcagcagtctgatggacccagctaaagtgaagggggatggtcagcagcaccacatgaaagaccaggaagaagaggaggagaagtgggatgctacctctccaaaagctgcttccagcaagactggaaaatgccaggaaaagaaaaggaaacattgccagattgaatcccaagaagaaacggggatgcctaataaagcctccaagcaagatcctcccactgatcagggggacaaacctgctctcagtttaccacttgcatctttcgacgcatctgaccttgaatgcgctctatgtatgagattattctatgagccagtcacaacaccttgcgggcatactttttgcttaaaatgcctagaaagatgcctagatcacaacgcaaagtgtccattgtgcaaagacggtctttcacagtgcttggcatcaagaaaatacagcaaaaatgtaataatggaggagctcatagctaaattccttccagaagaactgaaggaacgaaggaagctttatgaagaggaaatggaagaactttctaaccttaataagaatgtgcctattttcgtgtgtactatggcctatcccaccgttccttgtcccctgcacatctttgagccttgttaccgcctgatgattcgtagatgcattgagacaggcacgagacagtttggcatgtgccttggagatcctgtcaaagggcactgcctgttgtgtaattgaagctgtaacccagggacaggaaaataggcagaagtcccttgagccacagcatggggctacagaaatggctgggtgccagcccagggaaacagaactcatcaaggatctagtctctcgactccattctcaataaacaggtttgcagaatatggctgcatcctagagatcagaaatgttcaattctttgctgatggccgctcagtggttgacagcataggcaagaggcgcttcagggtgctccatcagagccagcgggatggctacaacacagccgacattgaatacattgaagaccaaaaggttcagggagaggattgtgctgagctcatgggattacataactgtgtctatcagcaagcatcattgtggtttcattcgctcaaattatccctaaagaatcggatactcaatcactttggtcccatgccggagaaagacgccgatcctcagatgaacccgaatggcccagcctggtgctggtggatgttagcagttcttcccttggaaagccgagctcagctccccttcctagcaatgaggtccttaaaggacagactgaatggtattcgacgagtcctggccttcatatcccgaaaccaaaactagtgagtggattgccgaagaggagctcccaccttccccactgccgtcggggggagtcttcttgtaaatatatctaattgcaataatatcttaacagaagggggtgtcaaacagaggcatcagcctgctgttgatcacagagagaaattgagtagaaagaccaaaagaatgtgacctatttgaaactttctgtcttaagatgcttcttgacatgctgcataactacataaacagcagaggtgtttaagagcccagaaaaacataatttgattttaacattaaaatttccaaaagtt

SEQ ID NO: 149613 - DNA, 441 bp, Homo sapiens
  Payload ID: 9548
  Gene Symbol: LINC00116
  Gene Name: long intergenic non-protein coding RNA 116
  Uniprot ID: Q8NCU8
  ENST ID: ENST00000611969
  CDS Start-End: 38-208
gccgcgccgtagaccgcgctgcacgccggcggcagccatggcggatgtgtcagagaggacactgcagttgtccgtgctagtagccttcgcttctggagtactcctgggctggcaggcgaaccgactgcggaggcgctacttggactggaggaaaaggaggctgcaggacaagctggcggcgacgcagaagaagctggacctggcctgagactctgcgccttccgccccattctgtccccctcatggccaccttgccatgtccgcgccggagccccggtccgccggcgcccagaaccaggcttgccacacagtccccgcctgccatggccggctcttcctggagtgttgcttgttgaagatgcatatagactaccggaaagaaatgacttcttcttgcactttatgaatcaattttatttttaaaataaaaaaattaaacat

SEQ ID NO: 149614 - DNA, 2051 bp, Homo sapiens
  Payload ID: 9548
  Gene Symbol: LINC00116
  Gene Name: long intergenic non-protein coding RNA 116
  Uniprot ID: Q8NCU8
  ENST ID: ENST00000414416
  CDS Start-End: 1401-1817
gttaaaggtcaaaggtcacctccgcaaatggcaccaactgtgtagcctggcagtgggactttgtccagctttctgatcagtagaatagaaggatgccttcctccaagacctgtttggagaattaaaccagctaatgtaggagccacggctgccgctggggagggcccagtaattattagttccctccccgtcctaggggaccccccaggagagcgtagtgtgggctcctagtggggcctctcgaggcaaatacctcccgagagggggcgcgcgccctcccctcttcccatggggcgcccccagttccagcctgacctggaactcagggttgccagagctgctgaattttcaagagaaagcggaaatctgagttttaatgagaccgctcctgattttttaaaacgttgatcatgaagttaaaacaataataatgggacagggtttcaccatgttaaccagtctggtcttgaattcctgacctcaagtgatctgcctaccttggcctcccaaagtgctgggattacaggcatgagctgtcgcactcagccaacattcctgtttttgaaaatcctccaatccctgaagtctgtattacaagaccaattctgcattgctgagagagactgtgctttacagagagtaagatccttgatactggctcagcatggaacatctggcacacagtatgcactgaggaaatacttgttggaataatcagtgaatcatagatgaaaacttaaccttggaattaattatgagactgctcagaggaagagaatgggagacaaaggacctggtgattagacccccaagacactgggctgtctgcttgtgtctcgggtggaacaggcccagcgagagtctttagggccagaactcaagaatttattgagcccttgttctaggcacttgggattcaccagtatacaatggagacaaaaatccctgccctggagcagcttacattctagcatggcaaacaggcagtaaacagcccattctggctgctgtattgagaagagaatgtggtggacagatatagaagcatggaaacctgatagggctattgcaatcactcagaaaagaggcgatggcagcttggacctgttggaagcagtagagtgcttccagggaggagaaaggacctgaaggttaatttgatcaccaatggccaatgatgtaatcagttatgcctatgtaatgaagcttccgtaaaaaccaaaaggattgggtttgattgagcttctggatagctaaacatgtggaagttcctggaggatggtggtcctaaacagggttaccagaaaatttaaagttacgccagtcactcccattctattgctgagagaaaatacagagcggtgaagagcttacagtcgggtgagcaagatacgcccccaatgttagctaatgatgtaaggcatcaacaagaaatgtgggggttcaggaaagtggaaggtggggtcgtccaaagcctgggaaagtcttcagttgaaggcgagacagatgggactattagtgagtttcgagagatccaacgcctcgccgccttcgcttcatttttgtctcacgccccacccttgaacgcgcggcgccttttgaccccgccgccgcgccgtagaccgcgctgcacgccggcggcagccatggcggatgtgtcagagaggacactgcagttgtccgtgctagtagccttcgcttctggagtactcctgggctggcaggcgaaccgactgcggaggcgctacttggactggaggaaaaggaggctgcaggacaagctggcggcgacgcagaagaagctggacctggcctgagactctgcgccttccgccccattctgtccccctcatggccaccttgccatgtccgcgccggagccccggtccgccggcgcccagaaccaggcttgccacacagtccccgcctgccatggccggctcttcctggagtgttgcttgttgaagatgcatatagactaccggaaagaaatgacttcttcttgcactttatgaatcaattttatttttaaaataaaaaaattaaacatc

SEQ ID NO: 149615 - DNA, 461 bp, Homo sapiens
  Payload ID: 9548
  Gene Symbol: LINC00116
  Gene Name: long intergenic non-protein coding RNA 116
  Uniprot ID: Q8NCU8
  ENST ID: ENST00000426713
  CDS Start-End: 58-228
aaaatacagagcggtgaagagcttacagtcggaccgcgctgcacgccggcggcagccatggcggatgtgtcagagaggacactgcagttgtccgtgctagtagccttcgcttctggagtactcctgggctggcaggcgaaccgactgcggaggcgctacttggactggaggaaaaggaggctgcaggacaagctggcggcgacgcagaagaagctggacctggcctgagactctgcgccttccgccccattctgtccccctcatggccaccttgccatgtccgcgccggagccccggtccgccggcgcccagaaccaggcttgccacacagtccccgcctgccatggccggctcttcctggagtgttgcttgttgaagatgcatatagactaccggaaagaaatgacttcttcttgcactttatgaatcaattttatttttaaaataaaaaaattaaacat

SEQ ID NO: 149616 - DNA, 305 bp, Homo sapiens
  Payload ID: 9549
  Gene Symbol: LINC01420
  Gene Name: long intergenic non-protein coding RNA 1420
  ENST ID: ENST00000451583
  CDS Start-End: 1-122
cctccgggagatccactctcccacctggaaacgcacgggaagccaagcctccaaaaaagcgctgcctcctcgctccgcgttgggattatccggaaggaactcccaacggagtctttgagtgattgcagtatgactccatttccctggtgcattcatataatagttcacctggtgaaaacaatgaagattatttacaatgctaccctgctttttctggtgtcctgaacctggaagttgtgctttttaagtcttatgatgtaatcagcgcgatttcacttcctgaatttcgatgaattctaagacat

SEQ ID NO: 149617 - DNA, 543 bp, Homo sapiens
  Payload ID: 9549
  Gene Symbol: LINC01420
  Gene Name: long intergenic non-protein coding RNA 1420
  ENST ID: ENST00000423617
  CDS Start-End: 1-207
atgggagaccaaccttgtgcctccgggagatccactctcccacctggaaacgcacgggaagccaagcctccaaaaaagcgctgcctcctcgctccgcgttgggattatccggaaggaactcccaacggaggtagtaccactctaccctccgcacctcctcctgcatcagccggcctgaagtcgcaccctcctcctccggagaagtagagaaataaatttctcccaccctaaaccagtcttatgatgtaatcagcgcgatttcacttcctgaatttcgatgaattctaagacatgggcaagatcgggttgtaagacctctgagatttaaggccatgccctggatcatggtgaacttaccaaagcaaacaatgcctgtgagatggtcctgcagcagccaaccagtgaactcttttggtgacatcctgttcttgttgtataactttatattcctataaatccattaaggccccaataaagtttgtctctaagcgctgtgttagatctatatgactacatctagtaaattgtgaattttaagtaaat

SEQ ID NO: 149618 - DNA, 1529 bp, Homo sapiens
  Payload ID: 9549
  Gene Symbol: LINC01420
  Gene Name: long intergenic non-protein coding RNA 1420
  ENST ID: ENST00000374922
  CDS Start-End: 96-302
agctctgtgcctggaggggactcgccgccatctcaggtctcttggctttgccagggcccaccggagaaaactgacgacccgtttctgtaatccttatgggagaccaaccttgtgcctccgggagatccactctcccacctggaaacgcacgggaagccaagcctccaaaaaagcgctgcctcctcgctccgcgttgggattatccggaaggaactcccaacggaggtagtaccactctaccctccgcacctcctcctgcatcagccggcctgaagtcgcaccctcctcctccggagaagtagagaaataaatttctcccaccctaaaccagtctttgagtgattgcagtatgactccatttccctggtgcattcatataatagttcacctggtgaaaacaatgaagattatttacaatgctaccctgctttttctggtgtcctgaacctggaagttgtgctttttaagtcttatgatgtaatcagcgcgatttcacttcctgaatttcgatgaattctaagacatgggcaagatcgggttgtaagacctctgagatttaaggccatgccctggatcatggtgaacttaccaaagcaaacaatgcctgtgagatggtcctgcagcagccaaccagtgaactcttttggtgacatcctgttcttgttgtataactttatattcctataaatccattaaggccccaataaagtttgtctctaagcgctgtgttagatctatatgactacatctagtaaattgtgaattttaagtaaatattttataagaactcctatgtaaagcattactaaaattagtgttgaaatatgaccttcttcctacatttattcatttatttatgtctatttattcatttattttagtgaaaaatataaggaaagtagaggaaggttaaatccaaaaaagaattgtttccagtacactttctttaatttgctgtcagtttttgcatggaatctacatctttttatgctaatcctcatcctagtattttacatcttaactatttttttctgactgaaatggttgatgtgcttgttttttgtaattttctactttccttctaaaatgcttagtattgaacaaatagaatatcctaattaaaaacagtaataaatattatggtgaaaaaatacaagtaaaatgggaaaacattagatagcagctttcaatatttcatatagttcataaatgtttcaggaattacaaggttatagaaaaaaatttatagactataataatttccagggatataaaaaaataaagcttctacctttgaattgtaataataaaagataaacagacttgaaagcatatattatatctgaaaatgtcagataaacttggcttataaattaaaatataaaataataatacaatttgttcaaataagtaattaaagcttacattgtaaaatgaatatttagagagattgtgaaacctgagtattttacccaatcctctgaaattagtccctagcatcagaattaaagaatctgaaaaatcacaaa

SEQ ID NO: 149619 - DNA, 466 bp, Homo sapiens
  Payload ID: 9550
  Gene Symbol: LINC01556
  Gene Name: long intergenic non-protein coding RNA 1556
  Uniprot ID: Q5JQF7
  ENST ID: ENST00000383656
  CDS Start-End: 28-216
tcagctcccagatggatcctggacaggatgctgcaggtggtgcaggaggggaatcctgccccatttatcatcaacacagtaaaaaggggtcgaagagaccgagagcgccagaggacgccatgggctccacatccacttggattccagggaaggcggtacatctacgaaagccctaatcatagagggaaagactcctcgttcctggcccagaaatgagatgagaaatccagggccccgtacaggaaggcctttcgcaaagtccagactcaattgccttcgcagcccttaaagtttccttaggaaggtctgtgggagaacgaggttggtttaggaattggcccctgccttgtactacgtagttttgtcatccaaagtgttttagaagtgaattgaatcatagttacgccttattttgaaacactgtaattcagagaacgtaaaaccttattaaaatgcctcataatca

SEQ ID NO: 149620 - DNA, 466 bp, Homo sapiens
  Payload ID: 9550
  Gene Symbol: LINC01556
  Gene Name: long intergenic non-protein coding RNA 1556
  Uniprot ID: Q5JQF7
  ENST ID: ENST00000434916
  CDS Start-End: 28-216
tcagctcccagatggatcctggacaggatgctgcaggtggtgcaggaggggaatcctgccccatttatcatcaacacagtaaaaaggggtcgaagagaccgagagcgccagaggacgccatgggctccacatccacttggattccaggaaaggcggtacatctacgaaagccctaatcatagagggaaagactcctcgttcctggcccagaaatgagatgagaaatctagggccccgtacaggaaggcctttcgcaaagtccagactcaattgccttcgcagcccttaaagtttccttaggaaggtctgtgggagaacgaggttggtttaggaattggcccctgccttgtactacgtagttttgtcatccaaagtgttttagaagtgaattgaatcatagttacgccttattttgaaacactgtaattcagagaacgtaaaaccttattaaaatgcctcataatca

SEQ ID NO: 149621 - DNA, 466 bp, Homo sapiens
  Payload ID: 9550
  Gene Symbol: LINC01556
  Gene Name: long intergenic non-protein coding RNA 1556
  Uniprot ID: Q5JQF7
  ENST ID: ENST00000438996
  CDS Start-End: 28-216
tcagctcccagatggatcctggacaggatgctgcaggtggtgcaggaggggaatcctgccccatttatcatcaacacagtaaaaaggggtcgaagagaccgagagcgccagaggacgccatgggctccacatccacttggattccaggaaaggcggtacatctacgaaagccctaatcatagagggaaagactcctcgttcctggcccagaaatgagatgagaaatccagggccccgtacaggaaggcctttcgcaaagtccagactcaattgccttcgcagcccttaaagtttccttaggaaggtctgtgggagaacgaggttggtttaggaattggcccctgccttgtactacgtagttttgtcatccaaagtgttttagaagtgaattgaatcatagttacgccttattttgaaacactgtaattcagagaacgtaaaaccttattaaaatgcctcataatca

SEQ ID NO: 149622 - DNA, 466 bp, Homo sapiens; identical to SEQ ID NO: 149620
  Payload ID: 9550
  Gene Symbol: LINC01556
  Gene Name: long intergenic non-protein coding RNA 1556
  Uniprot ID: Q5JQF7
  ENST ID: ENST00000438403
  CDS Start-End: 28-216

SEQ ID NO: 149623 - DNA, 466 bp, Homo sapiens; identical to SEQ ID NO: 149619
  Payload ID: 9550
  Gene Symbol: LINC01556
  Gene Name: long intergenic non-protein coding RNA 1556
  Uniprot ID: Q5JQF7
  ENST ID: ENST00000421470
  CDS Start-End: 28-216

SEQ ID NO: 149624 - DNA, 513 bp, Homo sapiens
  Payload ID: 9551
  Gene Symbol: LINC01620
  Gene Name: long intergenic non-protein coding RNA 1620
  Uniprot ID: Q4KN68
  ENST ID: ENST00000372910
  CDS Start-End: 1-513
atggcttactatttccatttctacggagaactgccatctcaggaatcacctcaccctggagtttattcccctcacccacagggtggctggcagccaacagctgactcgtacagagagtggcacaatgaagatttgaacccacgtatgtctcactggacgtatgcccaggaactggtaagctataaaaagacctcctttattgtctggagacatagaattagtccaaacggtgtcacctccaggaagccttactgtcacttccatggaggacagtggcctgggcccacaccaccctcctgcctgtcttcagcctttgctagtggatccttttcccacttcgaagactccccttacatcctcctccatgttgtcctccaaatgtgctggctgagagcccagcgcctgaatcagagggacctgggtttgaatcccacctctgccattgaacaccagctgtctgaccttgactgcgttcctttgcttctctgggcttcagattccccatctgaataa

SEQ ID NO: 149625 - DNA, 505 bp, Homo sapiens
  Payload ID: 9552
  Gene Symbol: LINC00493
  Gene Name: long intergenic non-protein coding RNA 493
  ENST ID: ENST00000411646
  CDS Start-End: 60-347
accggaagtcccgcctctgccgtgggcctgcgagaatcgaggcactcgctggcgtacccatgtatcgaaatgagttcacggcctggtaccggcggatgtcggtggtctacgggatcggcacctggtctgtgttgggctcactgctttactatagccggacaatggcgaagtcgtcagtagaccaaaaggatggctcagcaagtgaagtacccagtgaactctctgaacgcccaaaaggattttatgtggaaacagttgtcacatataaagaagattttgttccaaatacagaaaagatcctcaactattggaaatcatggactggtggccctggtacagaaccatgactggctgctgaattctgaaaaccaggacttggttcaacatttaaatttgatagttgccctgattcccattttgggtttgtgaaaagtgtatgtatttaaatttgctgtaaaacataatcactaataatatgcaataaatattttcttgaaggaaacta

SEQ ID NO: 149626 - DNA, 575 bp, Homo sapiens
  Payload ID: 9552
  Gene Symbol: LINC00493
  Gene Name: long intergenic non-protein coding RNA 493
  ENST ID: ENST00000435844
  CDS Start-End: 133-417
agagccggaagcggacgctgaaaactggcggctccttaatggttccggcggcagggaccgcagcgacgccctcaccggaagtcccgcctctgccgtgggcctgcgagaatcgaggcactcgctggcgtacccatgtatcgaaatgagttcacggcctggtaccggcggatgtcggtggtctacgggatcggcacctggtctgtgttgggctcactgctttactatagccggacaatggcgaagtcgtcagaccaaaaggatggctcagcaagtgaagtacccagtgaactctctgaacgcccaaaaggattttatgtggaaacagttgtcacatataaagaagattttgttccaaatacagaaaagatcctcaactattggaaatcatggactggtggccctggtacagaaccatgactggctgctgaattctgaaaaccaggacttggttcaacatttaaatttgatagttgccctgattcccattttgggtttgtgaaaagtgtatgtatttaaatttgctgtaaaacataatcactaataatatgcaataaatattttcttgaaggaaacta

SEQ ID NO: 149627 - DNA, 670 bp, Homo sapiens
  Payload ID: 9552
  Gene Symbol: LINC00493
  Gene Name: long intergenic non-protein coding RNA 493
  ENST ID: ENST00000608034
  CDS Start-End: 33-254
ctgcgagaatcgaggcactcgctggcgtacccatgtatcgaaatgagttcacggcctggtaccggcggatgtcggtggtctacgggatcggcacctggtctgtgttgggctcactgctttactatagccggacaatggcgaagtcgtcaggtctcaccctgtcgcccaggcttgagtgcagtggcatgatctcggctcaccacaacctgcgtctccgggctcaagtgattctcctgcctcagcctcccgagtagctgggattgcaggcgcaggccactgctgcccggcgaattgttttattttttttttgagacagagtctagctctgtcgcccaggctggagtgcactggcgctatcttggctcactgtaacctccatctcccaactcaagcagtcctcctgcctcatcctccccagtagctggggttataggcccatgccaccacgcccagctaatttttgtatttttagtagagatggggtttcactacgttggcgaggctggtctcaaacacctgacctcaggtggtccacctgcctcggcccccacaaagtgagattgggattacaggcgtgagccaccgcacccagcttttcttttcccttccttttcattccttccttcattattggggttggagagagtggatgtaattcttaccttagtta

SEQ ID NO: 149628 - DNA, 769 bp, Homo sapiens
  Payload ID: 9553
  Gene Symbol: LINC00694
  Gene Name: long intergenic non-protein coding RNA 694
  Uniprot ID: P0DN24
  ENST ID: ENST00000634610
  CDS Start-End: 88-393
agatgagttctccctgtgttgcccaagctggtctggaactcctgggctcaagcaatcctcccacctcccagtgttgagattataggtatgtctagaggtcagtttggacagggacaggaacctctagacatgtttttctgggtgaacgagataagcggagaaatcacctaccccccgcagaaggcagatgcacctgctgtttctcctgagagcccacaaaagaagcccccatttcagcccaggagtgtgcaggaggctccttgcagtccccagggcccgcctgcacagaggcctgcccttgcacctccatctaagccttctctgaaagactcaggctcaagaaacccctgcccatctgcacccacctgggccaggccaaagccggaggagtgaggagcccccaccgttctcagcaatccctgtcaccatctcatcaccaggagtgactctgcccatactcggacccctgggaccagcccttcagccaccggtctcgacctctcctctcagcccttctgcaccctgggccttcacctgcaagctgaacaatgtccttactgggaataactggttttccttttgaatcttaagaaaatttgtctggctacactctttaagcaccttcctgagccacccgtggccaggctctgctggccgcatctgcctggccccatctaccttccctggaagcacaggactcaccccaggggtctcacaggaacatgcccagtgctttcaaacccagtaaaattttacttagattttgaca

SEQ ID NO: 149629 - DNA, 729 bp, Homo sapiens
  Payload ID: 9553
  Gene Symbol: LINC00694
  Gene Name: long intergenic non-protein coding RNA 694
  Uniprot ID: P0DN24
  ENST ID: ENST00000416124
  CDS Start-End: 48-353
tgaagctccctccacagactcctccaccccagaaccttccgacaggtatgtctagaggtcagtttggacagggacaggaacctctagacatgtttttctgggtgaacgagataagcggagaaatcacctaccccccgcagaaggcagatgcacctgctgtttctcctgagagcccacaaaagaagcccccatttcagcccaggagtgtgcaggaggctccttgcagtccccagggcccgcctgcacagaggcctgcccttgcacctccatctaagccttctctgaaagactcaggctcaagaaacccctgcccatctgcacccacctgggccaggccaaagccggaggagtgaggagcccccaccgttctcagcaatccctgtcaccatctcatcaccaggagtgactctgcccatactcggacccctgggaccagcccttcagccaccggtctcgacctctcctctcagcccttctgcaccctgggccttcacctgcaagctgaacaatgtccttactgggaataactggttttccttttgaatcttaagaaaatttgtctggctacactctttaagcaccttcctgagccacccgtggccaggctctgctggccgcatctgcctggccccatctaccttccctggaagcacaggactcaccccaggggtctcacaggaacatgcccagtgctttcaaacccagtaaaattttacttagattttgaca

SEQ ID NO: 149630 - DNA, 3126 bp, Homo sapiens
  Payload ID: 9554
  Gene Symbol:
  Gene Name: Long-chain-fatty-acid--CoA ligase 6 [Source:UniProtKB/Swiss-Prot
  Acc:Q9UKU0]
  Uniprot ID: Q9UKU0
  ENST ID: ENST00000413683
  CDS Start-End: 54-2057
gccttatctgactcttgttttcaacagagtttgtcctctcacttctggagaagatgcagacacaggagatcctgaggatactgcgactgcctgagctaggtgacttgggacagtttttccgcagcctctcggccaccaccctcgtgagtatgggtgccctggctgccatccttgcctactggttcactcaccggccaaaggccttgcagccgccatgcaacctcctgatgcagtcagaagaagtagaggacagtggcggggcacggcgatctgtgattgggtctggccctcagctacttacccactactatgatgatgcccggaccatgtaccaggtgttccgccgtgggcttagcatctcagggaatgggccctgtcttggtttcaggaagcctaagcagccttaccagtggctgtcctaccaggaggtggccgacagggctgaatttctggggtccggacttctccagcacaattgtaaagcatgcactgatcagtttattggtgtttttgcacaaaatcggccagagtggatcattgtggagctggcctgctacacatattccatggtggtggtcccgctctatgacaccctgggccctggggctatccgctacatcatcaatacagcggacatcagcaccgtgattgtggacaaacctcagaaggctgtgcttctgctagagcatgtggagaggaaggagactccaggcctcaagctgatcatcctcatggacccattcgaagaagccctgaaagagagagggcagaagtgcggggtggtcattaagtccatgcaggccgtggaggactgtggccaagagaatcaccaggctcctgtgcccccgcagcctgatgacctctccattgtgtgtttcacaagcggcacgacagggaacccaaaaggtgcgatgctcacccatgggaacgtggtggctgatttctcaggctttctgaaagtgacagagagtcagtgggctcccacttgtgcggatgtgcacatttcctatttgcctttagcacacatgtttgagcgaatggtgcagtctgtcgtctattgccacggagggcgtgttggcttcttccagggagatatccgccttctctcagatgacatgaaggctctatgccccaccatcttccctgtggtcccacgactgctgaaccggatgtacgacaagatcttcagccaggcaaacacaccattaaagcgctggctcctggagtttgcagcaaagcgtaagcaagccgaggtccggagtggaatcatcaggaatgatagtatctgggatgaactcttctttaataagattcaggccagtcttggtgggtgtgtgcggatgattgttactggagcagccccagcatcaccaacagttctgggatttctccgggcagctctagggtgccaggtttatgaaggttatggccaaactgagtgcacagctggatgtaccttcaccactcctggcgactggacctcagggcacgtaggggcgccacttccctgcaatcatatcaagctcgttgatgttgaggaactgaactactgggcctgcaaaggagagggagagatatgtgtgagaggaccaaatgtgttcaaaggctacttgaaagatccagacaggacgaaggaggccctggacagcgatggctggcttcacactggagacatcggaaaatggctgccggcaggaactcttaaaattattgatcggaaaaagcatatatttaaacttgctcagggagaatatgttgcacccgagaagattgagaacatctacatccggagccaacctgtggcgcaaatctatgtccatggggacagcttaaaggcctttttggtaggcattgttgtgcctgaccctgaagttatgccctcctgggcccagaagagaggaattgaaggaacatatgcagatctctgcacaaataaggatctgaagaaagccattttggaagatatggtgaggttaggaaaagaaagtggactccattcttttgagcaggacctaccacagtgcttaatacagattaaggtgttcagtaaatattgattcaatgactcaaaacccgaggtaaaaccaggttcgaagagaaaaggcaaagtgcacggcttgtcgaagattgcagagaaagcagagcggagcaggcagggaggtagcggctctgggccgttcagccctcgcttaggagttacaggagagaaaagcctgcaagaaaataggtctagtgaagacacccaggatgagaagattgcatcgttgcgtgaatcagttactgatgacctccaggttgatagtagttcatcaaatagtgaactagtatcaggattaagtttgcaccatggtatggccagttctcttctgagctattcagtcacagactcttatgcagaatacaagagttttgaagagagctttccatcacctgaactgttcagaaaatcagattatttagactgggagtgtcccaacttggaagaacacatgcagtggaagaattctactcttctggataccagtaaagcagtagcgatagagaaggcaccacagttttcaaatgtctcagcaattttcagtacctcttcagaagactatcagaaatgccatagaaaaacagtgatgacagtagcagatcaaaatgtttctccaaaagcaaagtgtgcttcaaattcagaatcagaaaacaaattccagtactcctggtaagaaaaacagaggccttttaacaagtactccatcttcagagacagctggttttgtgattgatttgtcctcagtgcaaaaagcatcttttgaagaactatttccaaatgtcagcaattatgttaattcaaatgaaattgttcctgtgtcaagtttgcaggaaaattcttcaaatgagtttcctgcaaatgcatcagaaatatgttgtattattagaacatcaccaggaactagacaagtgaaaaataaaggtgttattgtaaagaagaagaaatattctcttcctaaggatacccctcaagatatcataataaaaatggcatgaaaaaacagctgtggctgaattttcaccactttgaagacaggagtgtgaagtcaaagtctataaagcagaatgtctgcctgaaattatatgaaa

SEQ ID NO: 149631 - DNA, 1230 bp, Homo sapiens
  Payload ID: 9555
  Gene Symbol: LOR
  Gene Name: loricrin
  Uniprot ID: P23490
  ENST ID: ENST00000368742
  CDS Start-End: 58-996
cttctctcctcactcacccttcctggtgctttgggctctccttccttctcagacaagatgtcttatcagaaaaagcagcccacccctcagcccccagtggactgcgtgaagacctctggcggcggtggcggtggcggcggcagcggcggtggtggctgcggcttcttcggcggcggcggctcagggggcggtagcagcggttctggctgcggctactccggcggcggtggctactctggcggcggctgcggcgggggctcctccggcggcgggggcgggggcggcattggaggctgcggagggggctccggtgggagcgtcaagtactccggaggcggcggctcctccggcgggggctctggctgtttctccagcggtgggggcggctccggctgcttctcctccggtggcggcggctcctccgggggcggctccggctgcttctccagcggtgggggcggctcctccgggggcggctccggctgcttctcctccggcggcggcggcttctcgggccaggcggtccagtgccagagctacggaggcgtctctagcggcggctcctccgggggcggctccggctgcttctccagcggcgggggcggcggctctgtctgcggctactctggcggcggctctggctgcggcggaggctcctctggcggcagcggctccggctacgtctcctcgcagcaggtcactcagacctcgtgcgcgccccagccgagttacggaggggggtcgtccggcggcggcggcagcggcggaagcggctgcttctccagcggcgggggcggcgggagctccggctgcggcggcggctcctccgggattggcagcggctgcatcatcagtggcgggggctccgtctgcggaggtggttcctctggaggcggcggcggcggctcctccgtgggtggctccgggagtggcaagggcgtcccgatctgccaccagacccagcagaagcaggcgcctacctggccgtccaaatagatcccccagggtaccacggaggcgaaggagttggaggtgttttccaggggcaccgatgggcttagagctctcatgatgctacccgaggtttgcaaatccttcatgtcttaacctacctggaagaagccattgagctctccggctgcatctagttctgctgtttagcctctttggtttctgtacaactacctcccaaccccagtgcctcagtcaataaatttgcaaattcatgag

SEQ ID NO: 149632 - DNA, 5337 bp, Homo sapiens
  Payload ID: 9556
  Gene Symbol: LDLR
  Gene Name: low density lipoprotein receptor
  ENST ID: ENST00000252444
  CDS Start-End: 1-2837
aggggaggcctggcgttcctccgcggttcctgtcacaaaggcgacgacaagtcccgggtccccggagccgcctccgcgacatacacgagtcgccctccgttatcctgggccctcctggcgaagtccccggtttccgctgtgctctgtggcgacacctccgtccccaccttgtcctggggggcgccctcgccccaccagccccgatcaagttcacagaggggcccccggccaccctcaaggcctcggttccttacgaggttgaaacgttgcctcagaatctccccgcccctccttggtctgcagccgagatcttcagccacgtgggcgacagatgcgaaagaaacgagttccagtgccaagacgggaaatgcatctcctacaagtgggtctgcgatggcagcgctgagtgccaggatggctctgatgagtcccaggagacgtgcttgtctgtcacctgcaaatccggggacttcagctgtgggggccgtgtcaaccgctgcattcctcagttctggaggtgcgatggccaagtggactgcgacaacggctcagacgagcaaggctgtccccccaagacgtgctcccaggacgagtttcgctgccacgatgggaagtgcatctctcggcagttcgtctgtgactcagaccgggactgcttggacggctcagacgaggcctcctgcccggtgctcacctgtggtcccgccagcttccagtgcaacagctccacctgcatcccccagctgtgggcctgcgacaacgaccccgactgcgaagatggctcggatgagtggccgcagcgctgtaggggtctttacgtgttccaaggggacagtagcccctgctcggccttcgagttccactgcctaagtggcgagtgcatccactccagctggcgctgtgatggtggccccgactgcaaggacaaatctgacgaggaaaactgcgctgtggccacctgtcgccctgacgaattccagtgctctgatggaaactgcatccatggcagccggcagtgtgaccgggaatatgactgcaaggacatgagcgatgaagttggctgcgttaatgtgacactctgcgagggacccaacaagttcaagtgtcacagcggcgaatgcatcaccctggacaaagtctgcaacatggctagagactgccgggactggtcagatgaacccatcaaagagtgcgggaccaacgaatgcttggacaacaacggcggctgttcccacgtctgcaatgaccttaagatcggctacgagtgcctgtgccccgacggcttccagctggtggcccagcgaagatgcgaagatatcgatgagtgtcaggatcccgacacctgcagccagctctgcgtgaacctggagggtggctacaagtgccagtgtgaggaaggcttccagctggacccccacacgaaggcctgcaaggctgtgggctccatcgcctacctcttcttcaccaaccggcacgaggtcaggaagatgacgctggaccggagcgagtacaccagcctcatccccaacctgaggaacgtggtcgctctggacacggaggtggccagcaatagaatctactggtctgacctgtcccagagaatgatctgcagcacccagcttgacagagcccacggcgtctcttcctatgacaccgtcatcagcagagacatccaggcccccgacgggctggctgtggactggatccacagcaacatctactggaccgactctgtcctgggcactgtctctgttgcggataccaagggcgtgaagaggaaaacgttattcagggagaacggctccaagccaagggccatcgtggtggatcctgttcatggcttcatgtactggactgactggggaactcccgccaagatcaagaaagggggcctgaatggtgtggacatctactcgctggtgactgaaaacattcagtggcccaatggcatcaccctagatctcctcagtggccgcctctactgggttgactccaaacttcactccatctcaagcatcgatgtcaacgggggcaaccggaagaccatcttggaggatgaaaagaggctggcccaccccttctccttggccgtctttgaggacaaagtattttggacagatatcatcaacgaagccattttcagtgccaaccgcctcacaggttccgatgtcaacttgttggctgaaaacctactgtccccagaggatatggttctcttccacaacctcacccagccaagaggagtgaactggtgtgagaggaccaccctgagcaatggcggctgccagtatctgtgcctccctgccccgcagatcaacccccactcgcccaagtttacctgcgcctgcccggacggcatgctgctggccagggacatgaggagctgcctcacagaggctgaggctgcagtggccacccaggagacatccaccgtcaggctaaaggtcagctccacagccgtaaggacacagcacacaaccacccgacctgttcccgacacctcccggctgcctggggccacccctgggctcaccacggtggagatagtgacaatgtctcaccaagctctgggcgacgttgctggcagaggaaatgagaagaagcccagtagcgtgagggctctgtccattgtcctccccatcgtgctcctcgtcttcctttgcctgggggtcttccttctatggaagaactggcggcttaagaacatcaacagcatcaactttgacaaccccgtctatcagaagaccacagaggatgaggtccacatttgccacaaccaggacggctacagctacccctcgagacagatggtcagtctggaggatgacgtggcgtgaacatctgcctggagtcccgtccctgcccagaacccttcctgagacctcgccggccttgttttattcaaagacagagaagaccaaagcattgcctgccagagctttgttttatatatttattcatctgggaggcagaacaggcttcggacagtgcccatgcaatggcttgggttgggattttggtttcttcctttcctcgtgaaggataagagaaacaggcccggggggaccaggatgacacctccatttctctccaggaagttttgagtttctctccaccgtgacacaatcctcaaacatggaagatgaaaggggaggggatgtcaggcccagagaagcaagtggctttcaacacacaacagcagatggcaccaacgggaccccctggccctgcctcatccaccaatctctaagccaaacccctaaactcaggagtcaacgtgtttacctcttctatgcaagccttgctagacagccaggttagcctttgccctgtcacccccgaatcatgacccacccagtgtctttcgaggtgggtttgtaccttccttaagccaggaaagggattcatggcgtcggaaatgatctggctgaatccgtggtggcaccgagaccaaactcattcaccaaatgatgccacttcccagaggcagagcctgagtcactggtcacccttaatatttattaagtgcctgagacacccggttaccttggccgtgaggacacgtggcctgcacccaggtgtggctgtcaggacaccagcctggtgcccatcctcccgacccctacccacttccattcccgtggtctccttgcactttctcagttcagagttgtacactgtgtacatttggcatttgtgttattattttgcactgttttctgtcgtgtgtgttgggatgggatcccaggccagggaaagcccgtgtcaatgaatgccggggacagagaggggcaggttgaccgggacttcaaagccgtgatcgtgaatatcgagaactgccattgtcgtctttatgtccgcccacctagtgcttccacttctatgcaaatgcctccaagccattcacttccccaatcttgtcgttgatgggtatgtgtttaaaacatgcacggtgaggccgggcgcagtggctcacgcctgtaatcccagcactttgggaggccgaggcgggtggatcatgaggtcaggagatcgagaccatcctggctaacacgtgaaaccccgtctctactaaaaatacaaaaaattagccgggcgtggtggcgggcacctgtagtcccagctactcgggaggctgaggcaggagaatggtgtgaacccgggaagcggagcttgcagtgagccgagattgcgccactgcagtccgcagtctggcctgggcgacagagcgagactccgtctcaaaaaaaaaaaacaaaaaaaaaccatgcatggtgcatcagcagcccatggcctctggccaggcatggcgaggctgaggtgggaggatggtttgagctcaggcatttgaggctgtcgtgagctatgattatgccactgctttccagcctgggcaacatagtaagaccccatctcttaaaaaatgaatttggccagacacaggtgcctcacgcctgtaatcccagcactttgggaggctgagctggatcacttgagttcaggagttggagaccaggcctgagcaacaaagcgagatcccatctctacaaaaaccaaaaagttaaaaatcagctgggtacggtggcacgtgcctgtgatcccagctacttgggaggctgaggcaggaggatcgcctgagcccaggaggtggaggttgcagtgagccatgatcgagccactgcactccagcctgggcaacagatgaagaccctatttcagaaatacaactataaaaaaataaataaatcctccagtctggatcgtttgacgggacttcaggttctttctgaaatcgccgtgttactgttgcactgatgtccggagagacagtgacagcctccgtcagactcccgcgtgaagatgtcacaagggattggcaattgtccccagggacaaaacactgtgtcccccccagtgcagggaaccgtgataagcctttctggtttcggagcacgtaaatgcgtccctgtacagatagtggggattttttgttatgtttgcactttgtatattggttgaaactgttatcacttatatatatatatatacacacatatatataaaatctatttatttttgcaaaccctggttgctgtatttgttcagtgactattctcggggccctgtgtagggggttattgcctctgaaatgcctcttctttatgtacaaagattatttgcacgaactggactgtgtgcaacgctttttgggagaatgatgtccccgttgtatgtatgagtggcttctgggagatgggtgtcactttttaaaccactgtatagaaggtttttgtagcctgaatgtcttactgtgatcaattaaatttcttaaatgaa

SEQ ID NO: 149633 - DNA, 2333 bp, Homo sapiens
  Payload ID: 9556
  Gene Symbol: LDLR
  Gene Name: low density lipoprotein receptor
  Uniprot ID: P01130
  ENST ID: ENST00000455727
  CDS Start-End: 87-2165
gtgcaatcgcgggaagccagggtttccagctaggacacagcaggtcgtgatccgggtcgggacactgcctggcagaggctgcgagcatggggccctggggctggaaattgcgctggaccgtcgccttgctcctcgccgcggcggggactgcagtgggcgacagatgcgaaagaaacgagttccagtgccaagacgggaaatgcatctcctacaagtgggtctgcgatggcagcgctgagtgccaggatggctctgatgagtcccaggagacgtgcttgtctgtcacctgcaaatccggggacttcagctgtgggggccgtgtcaaccgctgcattcctcagttctggaggtgcgatggccaagtggactgcgacaacggctcagacgagcaaggctgtctgacactctgcgagggacccaacaagttcaagtgtcacagcggcgaatgcatcaccctggacaaagtctgcaacatggctagagactgccgggactggtcagatgaacccatcaaagagtgcgggaccaacgaatgcttggacaacaacggcggctgttcccacgtctgcaatgaccttaagatcggctacgagtgcctgtgccccgacggcttccagctggtggcccagcgaagatgcgaagatatcgatgagtgtcaggatcccgacacctgcagccagctctgcgtgaacctggagggtggctacaagtgccagtgtgaggaaggcttccagctggacccccacacgaaggcctgcaaggctgtgggctccatcgcctacctcttcttcaccaaccggcacgaggtcaggaagatgacgctggaccggagcgagtacaccagcctcatccccaacctgaggaacgtggtcgctctggacacggaggtggccagcaatagaatctactggtctgacctgtcccagagaatgatctgcagcacccagcttgacagagcccacggcgtctcttcctatgacaccgtcatcagcagagacatccaggcccccgacgggctggctgtggactggatccacagcaacatctactggaccgactctgtcctgggcactgtctctgttgcggataccaagggcgtgaagaggaaaacgttattcagggagaacggctccaagccaagggccatcgtggtggatcctgttcatggcttcatgtactggactgactggggaactcccgccaagatcaagaaagggggcctgaatggtgtggacatctactcgctggtgactgaaaacattcagtggcccaatggcatcaccctagatctcctcagtggccgcctctactgggttgactccaaacttcactccatctcaagcatcgatgtcaacgggggcaaccggaagaccatcttggaggatgaaaagaggctggcccaccccttctccttggccgtctttgaggacaaagtattttggacagatatcatcaacgaagccattttcagtgccaaccgcctcacaggttccgatgtcaacttgttggctgaaaacctactgtccccagaggatatggttctcttccacaacctcacccagccaagaggagtgaactggtgtgagaggaccaccctgagcaatggcggctgccagtatctgtgcctccctgccccgcagatcaacccccactcgcccaagtttacctgcgcctgcccggacggcatgctgctggccagggacatgaggagctgcctcacagaggctgaggctgcagtggccacccaggagacatccaccgtcaggctaaaggtcagctccacagccgtaaggacacagcacacaaccacccgacctgttcccgacacctcccggctgcctggggccacccctgggctcaccacggtggagatagtgacaatgtctcaccaagctctgggcgacgttgctggcagaggaaatgagaagaagcccagtagcgtgagggctctgtccattgtcctccccatcgtgctcctcgtcttcctttgcctgggggtcttccttctatggaagaactggcggcttaagaacatcaacagcatcaactttgacaaccccgtctatcagaagaccacagaggatgaggtccacatttgccacaaccaggacggctacagctacccctcgagacagatggtcagtctggaggatgacgtggcgtgaacatctgcctggagtcccgtccctgcccagaacccttcctgagacctcgccggccttgttttattcaaagacagagaagaccaaagcattgcctgccagagctttgttttatatatttattcatctgggaggcagaacaggcttcggacagtgcccatgcaatggctt

SEQ ID NO: 149634 - DNA, 2429 bp, Homo sapiens
  Payload ID: 9556
  Gene Symbol: LDLR
  Gene Name: low density lipoprotein receptor
  Uniprot ID: P01130
  ENST ID: ENST00000545707
  CDS Start-End: 87-2135
gtgcaatcgcgggaagccagggtttccagctaggacacagcaggtcgtgatccgggtcgggacactgcctggcagaggctgcgagcatggggccctggggctggaaattgcgctggaccgtcgccttgctcctcgccgcggcggggactgcagtgggcgacagatgcgaaagaaacgagttccagtgccaagacgggaaatgcatctcctacaagtgggtctgcgatggcagcgctgagtgccaggatggctctgatgagtcccaggagacgtgcttgtctgtcacctgcaaatccggggacttcagctgtgggggccgtgtcaaccgctgcattcctcagttctggaggtgcgatggccaagtggactgcgacaacggctcagacgagcaaggctgtcctgtggccacctgtcgccctgacgaattccagtgctctgatggaaactgcatccatggcagccggcagtgtgaccgggaatatgactgcaaggacatgagcgatgaagttggctgcgttaatgtgacactctgcgagggacccaacaagttcaagtgtcacagcggcgaatgcatcaccctggacaaagtctgcaacatggctagagactgccgggactggtcagatgaacccatcaaagagtgcgggaccaacgaatgcttggacaacaacggcggctgttcccacgtctgcaatgaccttaagatcggctacgagtgcctgtgccccgacggcttccagctggtggcccagcgaagatgcgaagatatcgatgagtgtcaggatcccgacacctgcagccagctctgcgtgaacctggagggtggctacaagtgccagtgtgaggaaggcttccagctggacccccacacgaaggcctgcaaggctgtgggctccatcgcctacctcttcttcaccaaccggcacgaggtcaggaagatgacgctggaccggagcgagtacaccagcctcatccccaacctgaggaacgtggtcgctctggacacggaggtggccagcaatagaatctactggtctgacctgtcccagagaatgatctgcagcacccagcttgacagagcccacggcgtctcttcctatgacaccgtcatcagcagagacatccaggcccccgacgggctggctgtggactggatccacagcaacatctactggaccgactctgtcctgggcactgtctctgttgcggataccaagggcgtgaagaggaaaacgttattcagggagaacggctccaagccaagggccatcgtggtggatcctgttcatggcttcatgtactggactgactggggaactcccgccaagatcaagaaagggggcctgaatggtgtggacatctactcgctggtgactgaaaacattcagtggcccaatggcatcaccctagatctcctcagtggccgcctctactgggttgactccaaacttcactccatctcaagcatcgatgtcaacgggggcaaccggaagaccatcttggaggatgaaaagaggctggcccaccccttctccttggccgtctttgaggacaaagtattttggacagatatcatcaacgaagccattttcagtgccaaccgcctcacaggttccgatgtcaacttgttggctgaaaacctactgtccccagaggatatggttctcttccacaacctcacccagccaagagaggctgaggctgcagtggccacccaggagacatccaccgtcaggctaaaggtcagctccacagccgtaaggacacagcacacaaccacccgacctgttcccgacacctcccggctgcctggggccacccctgggctcaccacggtggagatagtgacaatgtctcaccaagctctgggcgacgttgctggcagaggaaatgagaagaagcccagtagcgtgagggctctgtccattgtcctccccatcgtgctcctcgtcttcctttgcctgggggtcttccttctatggaagaactggcggcttaagaacatcaacagcatcaactttgacaaccccgtctatcagaagaccacagaggatgaggtccacatttgccacaaccaggacggctacagctacccctcgagacagatggtcagtctggaggatgacgtggcgtgaacatctgcctggagtcccgtccctgcccagaacccttcctgagacctcgccggccttgttttattcaaagacagagaagaccaaagcattgcctgccagagctttgttttatatatttattcatctgggaggcagaacaggcttcggacagtgcccatgcaatggcttgggttgggattttggtttcttcctttcctcgtgaaggataagagaaacaggcccggggggaccaggatgacacctccatttctctccaggaagttttgagtttctctccaccgtgacacaatcctc

SEQ ID NO: 149635 - DNA, 2768 bp, Homo sapiens
  Payload ID: 9556
  Gene Symbol: LDLR
  Gene Name: low density lipoprotein receptor
  Uniprot ID: P01130
  ENST ID: ENST00000535915
  CDS Start-End: 87-2546
gtgcaatcgcgggaagccagggtttccagctaggacacagcaggtcgtgatccgggtcgggacactgcctggcagaggctgcgagcatggggccctggggctggaaattgcgctggaccgtcgccttgctcctcgccgcggcggggactgcagtgggcgacagatgcgaaagaaacgagttccagtgccaagacgggaaatgcatctcctacaagtgggtctgcgatggcagcgctgagtgccaggatggctctgatgagtcccaggagacgtgctcccccaagacgtgctcccaggacgagtttcgctgccacgatgggaagtgcatctctcggcagttcgtctgtgactcagaccgggactgcttggacggctcagacgaggcctcctgcccggtgctcacctgtggtcccgccagcttccagtgcaacagctccacctgcatcccccagctgtgggcctgcgacaacgaccccgactgcgaagatggctcggatgagtggccgcagcgctgtaggggtctttacgtgttccaaggggacagtagcccctgctcggccttcgagttccactgcctaagtggcgagtgcatccactccagctggcgctgtgatggtggccccgactgcaaggacaaatctgacgaggaaaactgcgctgtggccacctgtcgccctgacgaattccagtgctctgatggaaactgcatccatggcagccggcagtgtgaccgggaatatgactgcaaggacatgagcgatgaagttggctgcgttaatgtgacactctgcgagggacccaacaagttcaagtgtcacagcggcgaatgcatcaccctggacaaagtctgcaacatggctagagactgccgggactggtcagatgaacccatcaaagagtgcgggaccaacgaatgcttggacaacaacggcggctgttcccacgtctgcaatgaccttaagatcggctacgagtgcctgtgccccgacggcttccagctggtggcccagcgaagatgcgaagatatcgatgagtgtcaggatcccgacacctgcagccagctctgcgtgaacctggagggtggctacaagtgccagtgtgaggaaggcttccagctggacccccacacgaaggcctgcaaggctgtgggctccatcgcctacctcttcttcaccaaccggcacgaggtcaggaagatgacgctggaccggagcgagtacaccagcctcatccccaacctgaggaacgtggtcgctctggacacggaggtggccagcaatagaatctactggtctgacctgtcccagagaatgatctgcagcacccagcttgacagagcccacggcgtctcttcctatgacaccgtcatcagcagagacatccaggcccccgacgggctggctgtggactggatccacagcaacatctactggaccgactctgtcctgggcactgtctctgttgcggataccaagggcgtgaagaggaaaacgttattcagggagaacggctccaagccaagggccatcgtggtggatcctgttcatggcttcatgtactggactgactggggaactcccgccaagatcaagaaagggggcctgaatggtgtggacatctactcgctggtgactgaaaacattcagtggcccaatggcatcaccctagatctcctcagtggccgcctctactgggttgactccaaacttcactccatctcaagcatcgatgtcaacgggggcaaccggaagaccatcttggaggatgaaaagaggctggcccaccccttctccttggccgtctttgaggacaaagtattttggacagatatcatcaacgaagccattttcagtgccaaccgcctcacaggttccgatgtcaacttgttggctgaaaacctactgtccccagaggatatggttctcttccacaacctcacccagccaagaggagtgaactggtgtgagaggaccaccctgagcaatggcggctgccagtatctgtgcctccctgccccgcagatcaacccccactcgcccaagtttacctgcgcctgcccggacggcatgctgctggccagggacatgaggagctgcctcacagaggctgaggctgcagtggccacccaggagacatccaccgtcaggctaaaggtcagctccacagccgtaaggacacagcacacaaccacccgacctgttcccgacacctcccggctgcctggggccacccctgggctcaccacggtggagatagtgacaatgtctcaccaagctctgggcgacgttgctggcagaggaaatgagaagaagcccagtagcgtgagggctctgtccattgtcctccccatcgtgctcctcgtcttcctttgcctgggggtcttccttctatggaagaactggcggcttaagaacatcaacagcatcaactttgacaaccccgtctatcagaagaccacagaggatgaggtccacatttgccacaaccaggacggctacagctacccctcgagacagatggtcagtctggaggatgacgtggcgtgaacatctgcctggagtcccgtccctgcccagaacccttcctgagacctcgccggccttgttttattcaaagacagagaagaccaaagcattgcctgccagagctttgttttatatatttattcatctgggaggcagaacaggcttcggacagtgcccatgcaatggcttgggttgggattttggtttcttcctttcctcgtgaaggataagagaaacaggccc

SEQ ID NO: 149636 - DNA, 3144 bp, Homo sapiens
  Payload ID: 9556
  Gene Symbol: LDLR
  Gene Name: low density lipoprotein receptor
  Uniprot ID: P01130
  ENST ID: ENST00000558013
  CDS Start-End: 72-2648
gccagggtttccagctaggacacagcaggtcgtgatccgggtcgggacactgcctggcagaggctgcgagcatggggccctggggctggaaattgcgctggaccgtcgccttgctcctcgccgcggcggggactgcagtgggcgacagatgcgaaagaaacgagttccagtgccaagacgggaaatgcatctcctacaagtgggtctgcgatggcagcgctgagtgccaggatggctctgatgagtcccaggagacgtgcttgtctgtcacctgcaaatccggggacttcagctgtgggggccgtgtcaaccgctgcattcctcagttctggaggtgcgatggccaagtggactgcgacaacggctcagacgagcaaggctgtccccccaagacgtgctcccaggacgagtttcgctgccacgatgggaagtgcatctctcggcagttcgtctgtgactcagaccgggactgcttggacggctcagacgaggcctcctgcccggtgctcacctgtggtcccgccagcttccagtgcaacagctccacctgcatcccccagctgtgggcctgcgacaacgaccccgactgcgaagatggctcggatgagtggccgcagcgctgtaggggtctttacgtgttccaaggggacagtagcccctgctcggccttcgagttccactgcctaagtggcgagtgcatccactccagctggcgctgtgatggtggccccgactgcaaggacaaatctgacgaggaaaactgcgctgtggccacctgtcgccctgacgaattccagtgctctgatggaaactgcatccatggcagccggcagtgtgaccgggaatatgactgcaaggacatgagcgatgaagttggctgcgttaatgtgacactctgcgagggacccaacaagttcaagtgtcacagcggcgaatgcatcaccctggacaaagtctgcaacatggctagagactgccgggactggtcagatgaacccatcaaagagtgcgggaccaacgaatgcttggacaacaacggcggctgttcccacgtctgcaatgaccttaagatcggctacgagtgcctgtgccccgacggcttccagctggtggcccagcgaagatgcgaagatatcgatgagtgtcaggatcccgacacctgcagccagctctgcgtgaacctggagggtggctacaagtgccagtgtgaggaaggcttccagctggacccccacacgaaggcctgcaaggctgtgggctccatcgcctacctcttcttcaccaaccggcacgaggtcaggaagatgacgctggaccggagcgagtacaccagcctcatccccaacctgaggaacgtggtcgctctggacacggaggtggccagcaatagaatctactggtctgacctgtcccagagaatgatctgcagcacccagcttgacagagcccacggcgtctcttcctatgacaccgtcatcagcagagacatccaggcccccgacgggctggctgtggactggatccacagcaacatctactggaccgactctgtcctgggcactgtctctgttgcggataccaagggcgtgaagaggaaaacgttattcagggagaacggctccaagccaagggccatcgtggtggatcctgttcatggcttcatgtactggactgactggggaactcccgccaagatcaagaaagggggcctgaatggtgtggacatctactcgctggtgactgaaaacattcagtggcccaatggcatcaccctagatctcctcagtggccgcctctactgggttgactccaaacttcactccatctcaagcatcgatgtcaacgggggcaaccggaagaccatcttggaggatgaaaagaggctggcccaccccttctccttggccgtctttgaggacaaagtattttggacagatatcatcaacgaagccattttcagtgccaaccgcctcacaggttccgatgtcaacttgttggctgaaaacctactgtccccagaggatatggttctcttccacaacctcacccagccaagaggagtgaactggtgtgagaggaccaccctgagcaatggcggctgccagtatctgtgcctccctgccccgcagatcaacccccactcgcccaagtttacctgcgcctgcccggacggcatgctgctggccagggacatgaggagctgcctcacagaggctgaggctgcagtggccacccaggagacatccaccgtcaggctaaaggtcagctccacagccgtaaggacacagcacacaaccacccgacctgttcccgacacctcccggctgcctggggccacccctgggctcaccacggtggagatagtgacaatgtctcaccaagctctgggcgacgttgctggcagaggaaatgagaagaagcccagtagcgtgagggctctgtccattgtcctccccatcgtgctcctcgtcttcctttgcctgggggtcttccttctatggaagaactggcggcttaagaacatcaacagcatcaactttgacaaccccgtctatcagaagaccacagaggatgaggtccacatttgccacaaccaggacggctacagctacccctcgatggtcagtctggaggatgacgtggcgtgaacatctgcctggagtcccgtccctgcccagaacccttcctgagacctcgccggccttgttttattcaaagacagagaagaccaaagcattgcctgccagagctttgttttatatatttattcatctgggaggcagaacaggcttcggacagtgcccatgcaatggcttgggttgggattttggtttcttcctttcctcgtgaaggataagagaaacaggcccggggggaccaggatgacacctccatttctctccaggaagttttgagtttctctccaccgtgacacaatcctcaaacatggaagatgaaaggggaggggatgtcaggcccagagaagcaagtggctttcaacacacaacagcagatggcaccaacgggaccccctggccctgcctcatccaccaatctctaagccaaacccctaaactcaggagtcaacgtgtttacctcttctatgcaagccttgctagacagccaggttagcctttgccctgt

SEQ ID NO: 149637 - DNA, 928 bp, Homo sapiens
  Payload ID: 9556
  Gene Symbol: LDLR
  Gene Name: low density lipoprotein receptor
  ENST ID: ENST00000560467
  CDS Start-End: 1-928
gcttggacggctcagacgaggcctcctgcccggtgctcacctgtggtcccgccagcttccagtgcaacagctccacctgcatcccccagctgtgggcctgcgacaacgaccccgactgcgaagatggctcggatgagtggccgcagcgctgtaggggtctttacgtgttccaaggggacagtagcccctgctcggccttcgagttccactgcctaagtggcgagtgcatccactccagctggcgctgtgatggtggccccgactgcaaggacaaatctgacgaggaaaactgcgctgtggccacctgtcgccctgacgaattccagtgctctgatggaaactgcatccatggcagccggcagtgtgaccgggaatatgactgcaaggacatgagcgatgaagttggctgcgttaatgtgacactctgcgagggacccaacaagttcaagtgtcacagcggcgaatgcatcaccctggacaaagtctgcaacatggctagagactgccgggactggtcagatgaacccatcaaagagtgcgatatcgatgagtgtcaggatcccgacacctgcagccagctctgcgtgaacctggagggtggctacaagtgccagtgtgaggaaggcttccagctggacccccacacgaaggcctgcaaggctgtgggctccatcgcctacctcttcttcaccaaccggcacgaggtcaggaagatgacgctggaccggagcgagtacaccagcctcatccccaacctgaggaacgtggtcgctctggacacggaggtggccagcaatagaatctactggtctgacctgtcccagagaatgatctgcagcacccagcttgacagagcccacggcgtctcttcctatgacaccgtcatcagcagagacatccaggcccccgacgggctggctgtggactg

SEQ ID NO: 149638 - DNA, 2941 bp, Homo sapiens
  Payload ID: 9556
  Gene Symbol: LDLR
  Gene Name: low density lipoprotein receptor
  ENST ID: ENST00000557933
  CDS Start-End: 88-2934
agtgcaatcgcgggaagccagggtttccagctaggacacagcaggtcgtgatccgggtcgggacactgcctggcagaggctgcgagcatggggccctggggctggaaattgcgctggaccgtcgccttgctcctcgccgcggcggggactgcagtgggcgacagatgcgaaagaaacgagttccagtgccaagacgggaaatgcatctcctacaagtgggtctgcgatggcagcgctgagtgccaggatggctctgatgagtcccaggagacgtgcttgtctgtcacctgcaaatccggggacttcagctgtgggggccgtgtcaaccgctgcattcctcagttctggaggtgcgatggccaagtggactgcgacaacggctcagacgagcaaggctgtccccccaagacgtgctcccaggacgagtttcgctgccacgatgggaagtgcatctctcggcagttcgtctgtgactcagaccgggactgcttggacggctcagacgaggcctcctgcccggtgctcacctgtggtcccgccagcttccagtgcaacagctccacctgcatcccccagctgtgggcctgcgacaacgaccccgactgcgaagatggctcggatgagtggccgcagcgctgtaggggtctttacgtgttccaaggggacagtagcccctgctcggccttcgagttccactgcctaagtggcgagtgcatccactccagctggcgctgtgatggtggccccgactgcaaggacaaatctgacgaggaaaactgcgctgtggccacctgtcgccctgacgaattccagtgctctgatggaaactgcatccatggcagccggcagtgtgaccgggaatatgactgcaaggacatgagcgatgaagttggctgcgttaatgtgacactctgcgagggacccaacaagttcaagtgtcacagcggcgaatgcatcaccctggacaaagtctgcaacatggctagagactgccgggactggtcagatgaacccatcaaagagtgcgggaccaacgaatgcttggacaacaacggcggctgttcccacgtctgcaatgaccttaagatcggctacgagtgcctgtgccccgacggcttccagctggtggcccagcgaagatgcgaagatatcgatgagtgtcaggatcccgacacctgcagccagctctgcgtgaacctggagggtggctacaagtgccagtgtgaggaaggcttccagctggacccccacacgaaggcctgcaaggctgtgggctccatcgcctacctcttcttcaccaaccggcacgaggtcaggaagatgacgctggaccggagcgagtacaccagcctcatccccaacctgaggaacgtggtcgctctggacacggaggtggccagcaatagaatctactggtctgacctgtcccagagaatgatctgcagcacccagcttgacagagcccacggcgtctcttcctatgacaccgtcatcagcagagacatccaggcccccgacgggctggctgtggactggatccacagcaacatctactggaccgactctgtcctgggcactgtctctgttgcggataccaagggcgtgaagaggaaaacgttattcagggagaacggctccaagccaagggccatcgtggtggatcctgttcatggcttcatgtactggactgactggggaactcccgccaagatcaagaaagggggcctgaatggtgtggacatctactcgctggtgactgaaaacattcagtggcccaatggcatcaccctagatctcctcagtggccgcctctactgggttgactccaaacttcactccatctcaagcatcgatgtcaacgggggcaaccggaagaccatcttggaggatgaaaagaggctggcccaccccttctccttggccgtctttgaggacaaagtattttggacagatatcatcaacgaagccattttcagtgccaaccgcctcacaggttccgatgtcaacttgttggctgaaaacctactgtccccagaggatatggttctcttccacaacctcacccagccaagaggagtgaactggtgtgagaggaccaccctgagcaatggcggctgccagtatctgtgcctccctgccccgcagatcaacccccactcgcccaagtttacctgcgcctgcccggacggcatgctgctggccagggacatgaggagctgcctcacagaggctgaggctgcagtggccacccaggagacatccaccgtcaggctaaaggtcagctccacagccgtaaggacacagcacacaaccacccgacctgttcccgacacctcccggctgcctggggccacccctgggctcaccacggtggagatagtgacaatgtctcaccaagctctgggcgacgttgctggcagaggaaatgagaagaagcccagtagcgtgagggctctgtccattgtcctccccatcgccacggagctgggtctctggtctcgggggcagctgtgtgacagagcgtgcctctccctacagtgctcctcgtcttcctttgcctgggggtcttccttctatggaagaactggcggcttaagaacatcaacagcatcaactttgacaaccccgtctatcagaagaccacagaggatgaggtccacatttgccacaaccaggacggctacagctacccctcgagacagatggtcagtctggaggatgacgtggcgtgaacatctgcctggagtcccgtccctgcccagaacccttcctgagacctcgccggccttgttttattcaaagacagagaagaccaaagcattgcctgccagagctttgttttatatatttattcatctgggaggcagaacaggcttcggacagtgcccatgcaatggcttgggttgggattttggtttcttcctttcctcgtgaaggataa

SEQ ID NO: 149639 - DNA, 605 bp, Homo sapiens
  Payload ID: 9556
  Gene Symbol: LDLR
  Gene Name: low density lipoprotein receptor
  ENST ID: ENST00000559340
  CDS Start-End: 1-512
ggaacgtggtcgctctggacacggaggtggccagcaatagaatctactggtctgacctgtcccagagaatgatctgcagcacccagcttgacagagcccacggcgtctcttcctatgacaccgtcatcagcagagacatccaggcccccgacgggctggctgtggactggatccacagcaacatctactggaccgactctgtcctgggcactgtctctgttgcggataccaagggcgtgaagaggaaaacgttattcagggagaacggctccaagccaagggccatcgtggtggatcctgttcatggcttcatgtactggactgactggggaactcccgccaagatcaagaaagggggcctgaatggtgtggacatctactcgctggtgactgaaaacattcagtggcccaatggcatcaccctaggacaaagtattttggacagatatcatcaacgaagccattttcagtgccaaccgcctcacaggttccgatgtcaacttgttggctgaaaacctactgtccccagaggatatggttctcttccacaacctcacccagccaagaggagtgaactggtgtgagaggaccaccctgagcaatgg

SEQ ID NO: 149640 - DNA, 3617 bp, Homo sapiens
  Payload ID: 9556
  Gene Symbol: LDLR
  Gene Name: low density lipoprotein receptor
  Uniprot ID: P01130
  ENST ID: ENST00000558518
  CDS Start-End: 188-2770
ctcttgcagtgaggtgaagacatttgaaaatcaccccactgcaaactcctccccctgctagaaacctcacattgaaatgctgtaaatgacgtgggccccgagtgcaatcgcgggaagccagggtttccagctaggacacagcaggtcgtgatccgggtcgggacactgcctggcagaggctgcgagcatggggccctggggctggaaattgcgctggaccgtcgccttgctcctcgccgcggcggggactgcagtgggcgacagatgcgaaagaaacgagttccagtgccaagacgggaaatgcatctcctacaagtgggtctgcgatggcagcgctgagtgccaggatggctctgatgagtcccaggagacgtgcttgtctgtcacctgcaaatccggggacttcagctgtgggggccgtgtcaaccgctgcattcctcagttctggaggtgcgatggccaagtggactgcgacaacggctcagacgagcaaggctgtccccccaagacgtgctcccaggacgagtttcgctgccacgatgggaagtgcatctctcggcagttcgtctgtgactcagaccgggactgcttggacggctcagacgaggcctcctgcccggtgctcacctgtggtcccgccagcttccagtgcaacagctccacctgcatcccccagctgtgggcctgcgacaacgaccccgactgcgaagatggctcggatgagtggccgcagcgctgtaggggtctttacgtgttccaaggggacagtagcccctgctcggccttcgagttccactgcctaagtggcgagtgcatccactccagctggcgctgtgatggtggccccgactgcaaggacaaatctgacgaggaaaactgcgctgtggccacctgtcgccctgacgaattccagtgctctgatggaaactgcatccatggcagccggcagtgtgaccgggaatatgactgcaaggacatgagcgatgaagttggctgcgttaatgtgacactctgcgagggacccaacaagttcaagtgtcacagcggcgaatgcatcaccctggacaaagtctgcaacatggctagagactgccgggactggtcagatgaacccatcaaagagtgcgggaccaacgaatgcttggacaacaacggcggctgttcccacgtctgcaatgaccttaagatcggctacgagtgcctgtgccccgacggcttccagctggtggcccagcgaagatgcgaagatatcgatgagtgtcaggatcccgacacctgcagccagctctgcgtgaacctggagggtggctacaagtgccagtgtgaggaaggcttccagctggacccccacacgaaggcctgcaaggctgtgggctccatcgcctacctcttcttcaccaaccggcacgaggtcaggaagatgacgctggaccggagcgagtacaccagcctcatccccaacctgaggaacgtggtcgctctggacacggaggtggccagcaatagaatctactggtctgacctgtcccagagaatgatctgcagcacccagcttgacagagcccacggcgtctcttcctatgacaccgtcatcagcagagacatccaggcccccgacgggctggctgtggactggatccacagcaacatctactggaccgactctgtcctgggcactgtctctgttgcggataccaagggcgtgaagaggaaaacgttattcagggagaacggctccaagccaagggccatcgtggtggatcctgttcatggcttcatgtactggactgactggggaactcccgccaagatcaagaaagggggcctgaatggtgtggacatctactcgctggtgactgaaaacattcagtggcccaatggcatcaccctagatctcctcagtggccgcctctactgggttgactccaaacttcactccatctcaagcatcgatgtcaacgggggcaaccggaagaccatcttggaggatgaaaagaggctggcccaccccttctccttggccgtctttgaggacaaagtattttggacagatatcatcaacgaagccattttcagtgccaaccgcctcacaggttccgatgtcaacttgttggctgaaaacctactgtccccagaggatatggttctcttccacaacctcacccagccaagaggagtgaactggtgtgagaggaccaccctgagcaatggcggctgccagtatctgtgcctccctgccccgcagatcaacccccactcgcccaagtttacctgcgcctgcccggacggcatgctgctggccagggacatgaggagctgcctcacagaggctgaggctgcagtggccacccaggagacatccaccgtcaggctaaaggtcagctccacagccgtaaggacacagcacacaaccacccgacctgttcccgacacctcccggctgcctggggccacccctgggctcaccacggtggagatagtgacaatgtctcaccaagctctgggcgacgttgctggcagaggaaatgagaagaagcccagtagcgtgagggctctgtccattgtcctccccatcgtgctcctcgtcttcctttgcctgggggtcttccttctatggaagaactggcggcttaagaacatcaacagcatcaactttgacaaccccgtctatcagaagaccacagaggatgaggtccacatttgccacaaccaggacggctacagctacccctcgagacagatggtcagtctggaggatgacgtggcgtgaacatctgcctggagtcccgtccctgcccagaacccttcctgagacctcgccggccttgttttattcaaagacagagaagaccaaagcattgcctgccagagctttgttttatatatttattcatctgggaggcagaacaggcttcggacagtgcccatgcaatggcttgggttgggattttggtttcttcctttcctcgtgaaggataagagaaacaggcccggggggaccaggatgacacctccatttctctccaggaagttttgagtttctctccaccgtgacacaatcctcaaacatggaagatgaaaggggaggggatgtcaggcccagagaagcaagtggctttcaacacacaacagcagatggcaccaacgggaccccctggccctgcctcatccaccaatctctaagccaaacccctaaactcaggagtcaacgtgtttacctcttctatgcaagccttgctagacagccaggttagcctttgccctgtcacccccgaatcatgacccacccagtgtctttcgaggtgggtttgtaccttccttaagccaggaaagggattcatggcgtcggaaatgatctggctgaatccgtggtggcaccgagaccaaactcattcaccaaatgatgccacttcccagaggcagagcctgagtcactggtcacccttaatatttattaagtgcctgagacacccggttaccttggccgtgaggacacgtggcctgcacccaggtgtggctgtcaggacaccagcctggtgcccatcctcccgacccctacccacttccattcccgtggtctccttgcactttctcagttcagagttgtacactgtgta

SEQ ID NO: 149641 - DNA, 2940 bp, Homo sapiens
  Payload ID: 9557
  Gene Symbol: LDLRAP1
  Gene Name: low density lipoprotein receptor adaptor protein 1
  Uniprot ID: Q5SW96
  ENST ID: ENST00000374338
  CDS Start-End: 120-1046
gcggcggagctggcgctgggaggggaggagcgcgcagcccgcgcgccgcagggccgggcggaaagtttttcctgacggagttttggctgcggcagcggcggcggcggccggagcgggccatggacgcgctcaagtcggcggggcgggcgctgatccggagccccagcttggccaagcagagctgggggggcggtggccggcaccgcaagctgcctgagaactggacagacacgcgggagacgctgctggaggggatgctgttcagcctcaagtacctgggcatgacgctagtggagcagcccaagggtgaggagctgtcggccgccgccatcaagaggatcgtggctacagctaaggccagtgggaagaagctgcagaaggtgactctgaaggtgtcgccacggggaattatcctgacagacaacctcaccaaccagctcattgagaacgtgtccatatacaggatctcctattgcacagcagacaagatgcacgacaaggtgtttgcatacatcgcccagagccagcacaaccagagcctcgagtgccacgccttcctctgcaccaagcggaagatggcacaggctgttaccctcaccgtagcccaggccttcaaagtcgcctttgagttttggcaggtgtccaaggaagagaaagagaagagggacaaagccagccaagagggaggggacgtcctgggggcccgccaagactgcaccccctccttgaagagcttggtcgccactgggaacctgctggacttagaggagacagctaaggccccgctgtccacggtcagcgccaacaccaccaacatggacgaggtgccgcggccacaagccttgagtggcagcagtgttgtctgggagctggatgatggcctggatgaagcgttttcgaggcttgcccagtctcggacaaaccctcaggtcctggacactggcctgacagcccaggacatgcattacgcccagtgcctctcgcctgtcgactgggacaagcctgacagcagcggcacagagcaggatgacctcttcagcttctgagggcccggggccagccggacacaagcggccctgacacgtgatggaccaaagccacctgctgcgggggagccagttctggggcccgcctgccacctctcccagccctcagcattgtcagcctgaagatcagagctgcagccagtcaggcaggggagagatttttcttttaagccctgctctttctctgagaaccaaaagatgccttgaatatttattcagtgacttctggcttatgctcagaagccagtctgcgtcaggcacgtctcctgctgcgtgacatgtgcagtgctgtaatcggctcccgcttgctctcctggagcaagctctgccctggctgtgggtatcaggactgtgaccaaagcatttctagtcccttctctctttctaaggacccaaatttccctgggggcatcctgcttcctgaaagctgttggatttcagtgatttttccccccaccccccagcacaggagagcacccacagccgcagaaggggaatgtgtcctcctgctctgcttcctcagggcccagcaggcgggggtttgagccctggaccccaggctcttagagactaaggggcagctcctgaccaaagacgatacagcttggcactttaaagcattaacagcaggtgtgaccctgagggctcctccatggtgctgcattgagtccagctttccttctgcccttcctccaggagaaggggcccaaggtccccgtggatggtctccacctgtgcttggaaccagtgtaactggctgctccctgctcccagggactgacacggggatcatctctgtgaccgccctccgtcgggcccctgcctgccttctcccctccacgcaaggctgtgctcttcctctggtttctgtgtgtccgtttgagtgtctgcgccccgcctccccatacttcctgggatgatgtgtgaaacctgacacctagatttatttggaaatattctatgaccactttacagatgaggaaacaggcctcaagcgtggaggggtagagtgaagagtagaacccaggtctgatgccaaagctgctttcttctctgcctcctcctcacgcaactcacacctccttttcttctagctttgttgtcctcccaggaaccaaaaaaccccagctattttctgaccaaaatgtgtttcataacaaaccatctggtgcctttccacacagaactggcaggagcctcgtgtcctgctagctgtctctcttgttgatttccgtgaaaatgcaagtgtttgaagtctgctcattccgagggtgaaacaaaatccaaccctgtcagaatcatgctgttctctttgctgacactgtgaccctgggtcgggacagaccagcagcaatctgtctttagaatcgctttccttcctccccttttgcccccgtggggctcccggcatcctgaaagccagcaaagcctccagcatcttttccatcctgaggtgcctcccagtggcctggcttgtcggagcaagtttcatcagccctagggaaaacacggccctcctgggaacctccttacctggagtaaccggacaccttagacggaggtgcctgagggtggggtgggatttgcagggtcattatcagaacatgaggataacttccttgcccctgctctgtagccacctccttggcaccggcctctatttgtcataaggcggcgtgggcgaggcctgacacaggccagccttggcacgaggggggccaggggttctgagaagcgctgccctgtgagagccacgctggccttcgtctccatctctggttgacgggctgtccgtgtgcctcctgtgtgtctgcagacaagtcttgctgtgctttatttgtgaaactttaatgaggaaaaaacaaataataaatgttctcgttttgaaactcaa

SEQ ID NO: 149642 - DNA, 785 bp, Homo sapiens
  Payload ID: 9558
  Gene Symbol: LDLRAD1
  Gene Name: low density lipoprotein receptor class A domain containing 1
  Uniprot ID: Q5T700
  ENST ID: ENST00000371360
  CDS Start-End: 19-636
cagcaggaaaccgaagacatgaacaaggtcttcccccagggagagaatggctacactgctgctgaatccaaagcccaccctggaggggaagcaggcggcggccacctctgctgctcacgtcgcggggcctgcctctctgcctctctgctgctcctcctggcaactgtggcggccctcatcgccttggtcaccattcttggactcccatcatgcaccccaggagcccaagcttgtataacactgacaaacaggacaggcttcttgtgccatgaccagaggagctgcattccagccagtggggtctgtgatggcgttcgcacctgtacccacggcgaggacgaggatgagagcttgtgccgagatgtgccccagagcctcccccacttccttgtggcccactgtggagacccggcctcctggatctactcagaccaaaaatgtgatggcactaacaactgcggggactgttcagatgaactgagcccagtaactgtgtgcccaccctgcggccctgggtggtggcgctgtccttcaaccttcttcaagtactgcgactgtataccgaggcatctctgccgcgaccatgtacagcactgctccgactggtccgatgagtatgcctgtcccggaccctgagtgggccactcaggccagcatggaaggctggctggaatggcactgataacccttcacatgaaaatcaaatcctagcgcacaagggcaggaagcagcctttgaaatgggatctacacatcatttctgaataggaattttctctcctcctt

SEQ ID NO: 149643 - DNA, 654 bp, Homo sapiens
  Payload ID: 9558
  Gene Symbol: LDLRAD1
  Gene Name: low density lipoprotein receptor class A domain containing 1
  Uniprot ID: Q5T700
  ENST ID: ENST00000371362
  CDS Start-End: 61-411
agggaacccgtgctgagctctctgcacacagccccagtcgggcagcaggaaaccgaagacatgaacaaggtcttcccccagggagagaatggctacactgctgctgaatccaaagcccaccctggaggggaaggagatgtgccccagagcctcccccacttccttgtggcccactgtggagacccggcctcctggatctactcagaccaaaaatgtgatggcactaacaactgcggggactgttcagatgaactgagcccagtaactgtgtgcccaccctgcggccctgggtggtggcgctgtccttcaaccttcttcaagtactgcgactgtataccgaggcatctctgccgcgaccatgtacagcactgctccgactggtccgatgagtatgcctgtcccggaccctgagtgggccactcaggccagcatggaaggctggctggaatggcactgataacccttcacatgaaaatcaaatcctagcgcacaagggcaggaagcagcctttgaaatgggatctacacatcatttctgaataggaattttctctcctcctttcaagttgttcagcctctgcttgaatgcttccaatgaccaggagctcattaccatgttaggtggcttctaacaaagatgatgtggtggaacccc

SEQ ID NO: 149644 - DNA, 2194 bp, Homo sapiens
  Payload ID: 9558
  Gene Symbol: LDLRAD1
  Gene Name: low density lipoprotein receptor class A domain containing 1
  Uniprot ID: Q5T700
  ENST ID: ENST00000420619
  CDS Start-End: 11-511
cttggtgacaatgcagggaacccgtgctgagctctctgcacacagccccagtcgggcagcaggaaaccgaagacatgaacaaggtcttcccccaggagcccaagcttgtataacactgacaaacaggacaggcttcttgtgccatgaccagaggagctgcattccagccagtggggtctgtgatggcgttcgcacctgtacccacggcgaggacgaggatgagagcttgtgccgagatgtgccccagagcctcccccacttccttgtggcccactgtggagacccggcctcctggatctactcagaccaaaaatgtgatggcactaacaactgcggggactgttcagatgaactgagcccagtaactgtgtgcccaccctgcggccctgggtggtggcgctgtccttcaaccttcttcaagtactgcgactgtataccgaggcatctctgccgcgaccatgtacagcactgctccgactggtccgatgagtatgcctgtcccggaccctgagtgggccactcaggccagcatggaaggctggctggaatggcactgataacccttcacatgaaaatcaaatcctagcgcacaagggcaggaagcagcctttgaaatgggatctacacatcatttctgaataggaattttctctcctcctttcaagttgttcagcctctgcttgaatgcttccaatgaccaggagctcattaccatgttaggtggcttctaacaaagatgatgtggtggaaccccgtctctaccaaaaatacaaaaattagccaggcatggcggtgcacacctatagtcccagctactagggaggctgaggtgggaggactgtgtgaacccaggaggtcaaggctgcagtgagctgtgaccacaccactgcactccagcctgagcaacacagtgagaccctgtctcaaaaaaaaaatgaaacaaaacacaaacacaaacaaagacgaagggaatctgcttccatgatttcatgcctgtctctggggccacacagaggaaatctgctaactgctccaaggcatacttgtggatcctaatctcgtcatcccttagagtgatgacatgtctggggcttaaatgacaagccgagtttagccttcatggatggcacatacgtgaaacatatgccacttcctacccctttggtacctaaggcagatatactgggcttggatgcaactttagcatcttccccagtttagttaacccagcaggctctactgatttaaccaagtgacacagcacatgaaacaggatatctggcatcctaccagtgggaagccaccccaggaagctctgagctgtagaatagaagatctggagaaagagcagcttgaagggctcctcaccagtcttctgtctgtccaacctgctctccaccccagcactccccaccctccactctatgcccagctgcccgcctaaacagcccagttttctggaagtagggactatattttgatcctggagcctgaatgagctgcttctgtgcttatctttccagcttcacaccacccaggcaggcaaggatgaatatttccattagatggatgagaaaactgaggcccagagagggcgatgacttgtccagaatcatagagcaaagtcagcgctggaactggaacccaaatacagcctatggcaccccagcccagaaggctttccagctaccagtgtgattataccttggccagggcagtctctgcggggtattttaaaagtgagcttgtcaggtgcactggctcatgcctatgatcccagcactttgggacactgaggtggaagtgtcccacttgagcccaggagttcgagaccagcctgggcaacatagggagaacctgtctctacaaaaaataggaaaaaagtagctgggtggggtggtgcatgcttgtagtcccagccactcagaaagctaagatgggaggatcgtttgagcctgggagattgaggctgcaatgaggcatgatcatgccactgcactccagcctgggcaacaaaccctgtctcaaaaaatttctttttaataaaaataaaataaaacatgagattgagggtcagcaagtgtgacacccatattctgaaagagagacttgggatctgcctgatgggagggctcctgtcgagggagacagacatatccccactgaaaaattaataaaattggttttacatatc

SEQ ID NO: 149645 - DNA, 2246 bp, Homo sapiens
  Payload ID: 9558
  Gene Symbol: LDLRAD1
  Gene Name: low density lipoprotein receptor class A domain containing 1
  Uniprot ID: Q5T700
  ENST ID: ENST00000545928
  CDS Start-End: 75-563
cttggtgacaatgcagggaacccgtgctgagctctctgcacacagccccagtcgggcagcaggaaaccgaagacatgaacaaggtcttcccccagggagagaatggctacactgctgctgaatccaaagcccaccctggaggggaaggagcccaagcttgtataacactgacaaacaggacaggcttcttgtgccatgaccagaggagctgcattccagccagtggggtctgtgatggcgttcgcacctgtacccacggcgaggacgaggatgagagcttgtgccgagatgtgccccagagcctcccccacttccttgtggcccactgtggagacccggcctcctggatctactcagaccaaaaatgtgatggcactaacaactgcggggactgttcagatgaactgagcccagtaactgtgtgcccaccctgcggccctgggtggtggcgctgtccttcaaccttcttcaagtactgcgactgtataccgaggcatctctgccgcgaccatgtacagcactgctccgactggtccgatgagtatgcctgtcccggaccctgagtgggccactcaggccagcatggaaggctggctggaatggcactgataacccttcacatgaaaatcaaatcctagcgcacaagggcaggaagcagcctttgaaatgggatctacacatcatttctgaataggaattttctctcctcctttcaagttgttcagcctctgcttgaatgcttccaatgaccaggagctcattaccatgttaggtggcttctaacaaagatgatgtggtggaaccccgtctctaccaaaaatacaaaaattagccaggcatggcggtgcacacctatagtcccagctactagggaggctgaggtgggaggactgtgtgaacccaggaggtcaaggctgcagtgagctgtgaccacaccactgcactccagcctgagcaacacagtgagaccctgtctcaaaaaaaaaatgaaacaaaacacaaacacaaacaaagacgaagggaatctgcttccatgatttcatgcctgtctctggggccacacagaggaaatctgctaactgctccaaggcatacttgtggatcctaatctcgtcatcccttagagtgatgacatgtctggggcttaaatgacaagccgagtttagccttcatggatggcacatacgtgaaacatatgccacttcctacccctttggtacctaaggcagatatactgggcttggatgcaactttagcatcttccccagtttagttaacccagcaggctctactgatttaaccaagtgacacagcacatgaaacaggatatctggcatcctaccagtgggaagccaccccaggaagctctgagctgtagaatagaagatctggagaaagagcagcttgaagggctcctcaccagtcttctgtctgtccaacctgctctccaccccagcactccccaccctccactctatgcccagctgcccgcctaaacagcccagttttctggaagtagggactatattttgatcctggagcctgaatgagctgcttctgtgcttatctttccagcttcacaccacccaggcaggcaaggatgaatatttccattagatggatgagaaaactgaggcccagagagggcgatgacttgtccagaatcatagagcaaagtcagcgctggaactggaacccaaatacagcctatggcaccccagcccagaaggctttccagctaccagtgtgattataccttggccagggcagtctctgcggggtattttaaaagtgagcttgtcaggtgcactggctcatgcctatgatcccagcactttgggacactgaggtggaagtgtcccacttgagcccaggagttcgagaccagcctgggcaacatagggagaacctgtctctacaaaaaataggaaaaaagtagctgggtggggtggtgcatgcttgtagtcccagccactcagaaagctaagatgggaggatcgtttgagcctgggagattgaggctgcaatgaggcatgatcatgccactgcactccagcctgggcaacaaaccctgtctcaaaaaatttctttttaataaaaataaaataaaacatgagattgagggtcagcaagtgtgacacccatattctgaaagagagacttgggatctgcctgatgggagggctcctgtcgagggagacagacatatccccactgaaaaattaataaaattggttttacatatc

SEQ ID NO: 149646 - DNA, 4012 bp, Homo sapiens
  Payload ID: 9559
  Gene Symbol: LDLRAD2
  Gene Name: low density lipoprotein receptor class A domain containing 2
  Uniprot ID: Q5SZI1
  ENST ID: ENST00000344642
  CDS Start-End: 188-1006
ctgaaccaaatgaagaggatctggaaggcaaagcactaagatcatagtgaagacttgcctcccccttctccttgtgtcccaccagcctccctgctggcctgaccaggccccatactccagtctccccagagaccccaagctgaagattctgtgggtctgccccattgctgggcacagcagagcctggatggaggcttgttgtcttctgcagttgccccaaaggttgctcttgctgggggcagccgccctgactgcaactgctttggagacagccgacctggcggaactgtgcgggcagacgtggcagggggacgggctgctgctgcgctcgcacgccgcatcgcgcaggttctacttcgtggctccggacaccgactgcgggctctgggtgcaggcggcagcccccggcgaccggatccgcttccagttccgcttcttcctggtctacagcctgacccccgcgcccccggcgctcaacacctcctccccggccccggccgacccgtgcgcccccggctcctacctgcagttctacgagggcccgccgggggcgccccggcccctggggtccccactgtgcggcctgaacatcccggtgcctgtggcatcctccggaccctttctaggcctgcgcctggtcacgagaggccgccagccccgcgtggacttcgtgggcgaagtcacctctttccgtctgggaccttgtggtgcctacttccgctgccagaatggcaggtgcatcccctcaagcctcgtgtgtgacccctggggcatggacaactgtggcgatggcagtgaccagggctcctggtcaccagctgactgcagaggtccctctccggtgcccagccagacaggaagtacagatgcccatacctccagatccctgactccctccccagctctcgggtctgcaggatccctctggattgcagctgagaggagttccccagcaggcagggaccccacgagacaagacgcagctttggaaggctccactgagtgaagccctcatcaaagactcaggaggcccctggcggggatagcaccgtttattaagaaaaatcaagacaaagaccacaggagggtcccttctaggacacagaggccaggcgtcccaaccccacagtctgggggccactggcaggatggcacttgagctggatcttcaggctcctgcagatggggcagggtggtcatatccccctcctctctctctcagtcgtgagtcctgccttcccccacctaaggcactagctcttcctgagcaccagcggcatccgtccgtccgttgtctgttggaggagtccctgggccttcacttccagatgggtggggatgtggcctggggtgggcggggcccggtgggcggggccctatcagtgctgggctctgcctgtagcagctcctggtaagagttggggtgggccttcccttacagcccctgagggagggaccccaggctgtgtgctggcaggagggggtgggaatgcaggccaggaggacgtggtaggagggggagtctgccagaggaggtgccaggggctgggtggaggtgggtgggggtgctgaaaaacgagctggtggggatggggaccgcctgcccaggggtgagctgccttttgctccacagccggcactaaagacaattcccaatcctgagtgggtggcagagactcctgcgatgcccgtctcaggtagctgtggggcaccagcccacaagccgaggttggctctcctaggagtgagaactgcccaagggctgcagaaacaggccacccagctctatctgggggctccatcggtgggtagggggacagtgggggcagttctgggcccacccagccactgttcctgaccccaagtcctggtgactttctgaggtgcccactcccatccaacctgccttgctggccagccttgtggctttgcccagctgtgtgtgtgagggtggcatgcccacctccagtccagcccagggcggtagcagcaaagcgtggcatcgcctcggtttcttacaaaaattcataataatattaataataatatactcgacattgtcgggctggggcgtggcccgggagtccgtgtggggcaggcaggtgcctacgaggggcaggggcgtgtgttggccccggcctgggcgcggtgctgcaggtccaggggctgtgggggcggggcgccgggtcgggccgagtgcagcaccaggttcttgacacagcctgtgatgcctgaggagaatctgcccccggtcagcgtggccacgtcaggggctccgcctgccgggaggtgagaggacagggcctgtgggctccagcagcccaggaggcgaggaaggctgggcgagctctagccctaagggagtgccgttcctgcccctgccctgagaaggagccccagacttaccgatgtagacgctgcccttggcgttgactgccacgttgggacctggggaccggccgctgaccagctcctcaccgtcgacttggatggaacctctgcggccctccctgcagtggaactgggtcaggcccctttccacaaacttcctggtcctccccggccccacgacagagtcccctccctctgatatcgagactccagactcagaagtctgtccctgtttcccaagctctttctttcccccgctgaacgagagatcgggccccacaaacacagcttcctcatttctgcacccaggtttcctcccactcctggggcactcgcctgcccccagcggagttcagtccgagatggaagcccgagccctggctggtgggttctcccctcccctggcttcaagttctgtctccacagagctcaatacctgcctctctgcccatggtagggggcgtcctgccccactccagaacgctgggccccatcccgagtgcccggcagggtcccttaccgcagtgctgtcacccggtgccactcgccgtcattgatggggtcctcagagaccaggcgggcctccccactacccagctggtacctgcagtcatccaggcccaagaagtatgagctggggcaggaccggggggtggggtgctgggaccagggaagggagaggaagggccaggtgccaggacctacctgaagacaaggtgcccgtcttgaagcccgaggctgatgaagtccttgccttggccggcctctcccacctcctgccagggaagcacagggtctctggggtccccagcctggagagcagaggctgccgaggccagggggctctgctttcccctccccccaccactccggccaccaggaagccagcttcctgccccaggagccccaagagcccagccggatacccacactcaccacaccctgccagagcaggaggccactggctgtgctggtccgaacctccagctcgatggtctcgggcacctcgggcaggctgcggaggaagagcgggtgaggggacagaagtcccagattcccatcctccccattaggcccatgggcccttccaatgccagtctcacctcctggagaagacatggccagggaaggcgaggaagccatcatcgtggaaataggctccgtactgcccaggggcatctgtgggagagaggagggtggtgccatacctgctgcatcaggcatcaaaatcccccgtcagttcccctgacccccacctccacgccaacatgcaggactagggggctccgagcctgcagtccctggggacccacgggggctgccaacagaattcagggagcctatgaccttggatgggaaagcattacacctcaatttcactcacttctcactgaaattgagcagttctttcaatgagatgtaggcaagaaaccaaagtagcagtggtaggacctgcaactttgttactagtatttgcttatcacatgacagtagctgcaaatatttcaaaatatcatttacacatattgctgctttgaaattgtggtagctactgagatcaccagatcttgttatttgatgtgttaataaagaagcacatatatagcaagtcaggaaactt

SEQ ID NO: 149647 - DNA, 1180 bp, Homo sapiens
  Payload ID: 9559
  Gene Symbol: LDLRAD2
  Gene Name: low density lipoprotein receptor class A domain containing 2
  Uniprot ID: Q5SZI1
  ENST ID: ENST00000543870
  CDS Start-End: 90-908
ctgaccaggccccatactccagtctccccagagaccccaagctgaagattctgtgggtctgccccattgctgggcacagcagagcctggatggaggcttgttgtcttctgcagttgccccaaaggttgctcttgctgggggcagccgccctgactgcaactgctttggagacagccgacctggcggaactgtgcgggcagacgtggcagggggacgggctgctgctgcgctcgcacgccgcatcgcgcaggttctacttcgtggctccggacaccgactgcgggctctgggtgcaggcggcagcccccggcgaccggatccgcttccagttccgcttcttcctggtctacagcctgacccccgcgcccccggcgctcaacacctcctccccggccccggccgacccgtgcgcccccggctcctacctgcagttctacgagggcccgccgggggcgccccggcccctggggtccccactgtgcggcctgaacatcccggtgcctgtggcatcctccggaccctttctaggcctgcgcctggtcacgagaggccgccagccccgcgtggacttcgtgggcgaagtcacctctttccgtctgggaccttgtggtgcctacttccgctgccagaatggcaggtgcatcccctcaagcctcgtgtgtgacccctggggcatggacaactgtggcgatggcagtgaccagggctcctggtcaccagctgactgcagaggtccctctccggtgcccagccagacaggaagtacagatgcccatacctccagatccctgactccctccccagctctcgggtctgcaggatccctctggattgcagctgagaggagttccccagcaggcagggaccccacgagacaagacgcagctttggaaggctccactgagtgaagccctcatcaaagactcaggaggcccctggcggggatagcaccgtttattaagaaaaatcaagacaaagaccacaggagggtcccttctaggacacagaggccaggcgtcccaaccccacagtctgggggccactggcaggatggcacttgagctggatcttcaggctcctgcagatggggcagggtggtcatatccccctcctctctctctcagtcgtttcctcccactcctggggcactcgcctgcccccagcggagttcagtccgaga

SEQ ID NO: 149648 - DNA, 3798 bp, Homo sapiens
  Payload ID: 9560
  Gene Symbol: LDLRAD3
  Gene Name: low density lipoprotein receptor class A domain containing 3
  Uniprot ID: Q86YD5
  ENST ID: ENST00000315571
  CDS Start-End: 22-1059
agcgggagcggcggccgcgccatgtggctgctggggccgctgtgcctgctgctgagcagcgccgcggagagccagctgctccccgggaacaacttcaccaatgagtgcaacataccaggcaacttcatgtgcagcaatggacggtgcatcccgggcgcctggcagtgtgacgggctgcctgactgcttcgacaagagtgatgagaaggagtgccccaaggctaagtcgaaatgtggcccaaccttcttcccctgtgccagcggcatccattgcatcattggtcgcttccggtgcaatgggtttgaggactgtcccgatggcagcgatgaagagaactgcacagcaaaccctctgctttgctccaccgcccgctaccactgcaagaacggcctctgtattgacaagagcttcatctgcgatggacagaataactgtcaagacaacagtgatgaggaaagctgtgaaagttctcaagaacccggcagtgggcaggtgtttgtgacttcagagaaccaacttgtgtattaccccagcatcacctatgccatcatcggcagctccgtcatttttgtgctggtggtggccctgctggcactggtcttgcaccaccagcggaagcggaacaacctcatgacgctgcccgtgcaccggctgcagcaccctgtgctgctgtcccgcctggtggtcctggaccacccccaccactgcaacgtcacctacaacgtcaataatggcatccagtatgtggccagccaggcggagcagaatgcgtcggaagtaggctccccaccctcctactccgaggccttgctggaccagaggcctgcgtggtatgaccttcctccaccgccctactcttctgacacggaatctctgaaccaagccgacctgcccccctaccgctcccggtccgggagtgccaacagtgccagctcccaggcagccagcagcctcctgagcgtggaagacaccagccacagcccggggcagcctggcccccaggagggcactgctgagcccagggactctgagcccagccagggcactgaagaagtataagtcccagttattccaaagtccatatgggttaatctgctctgacttgttgccattctaacaatttgtgctcatgggaagctctttaagcacctgtaagggtgtctcaagttacagtttgggatattaactatctctgcattcccctcctcccccagacttcagagatgtttttctggcgtctcagttgacatgatctgttgtgcgtcttttctgtcaggtcactcttcccttgggacccgagatcacaccctcatttttcacattattctgtttctgttggagagacagcatataaaacagtattgaaataggctgggagagagcaatgtttctgtgctatattggatgctcagaagtgcaggagacgctggacccaattctctctgctgggtagttaccttatagcatttggggatttgggttagatgatctaaccaggaggccatcactggatggtcacccccccaaaaaaattccatttgagcatcaaaacctgctttgcacaatcctatttgatgcccccagttcagcagagtcagtggccaaagaaaactttggacgtgagtaacacccttcagcagtcgcaacgttattttggttttgtgaaggactctgaaaccatctaccctgtataaattctggctttagaaatttgcccaagaatgctcattctgagagctttcctcagcagcatatatcatcagcctcatcctaaaataggcagggagcccctcccatgagtttatccaagttctcagctcctaaaatgcaggctgccaagaccctacacctgccctggctctacagccacttacctggtttctggactgtcaccctcccagctgacctgcccgtagccaaggaatgaggacctaacttgagttggcccaaagtctgacctggctgtatgtccctgtggcccacacccagcctgtcttgctcattcatgcagcctcaacactggcctccaaagttcccttaacacttgcaaagtcctttttacctgtgcatttggacttgaggacactggtttctatcacaggtgagagccatgttcaatacctccagcaagctctcctggctccctgcactgtgcacgctcctcttcccaaggtcccaataccagcacctctagttagagttagggtcagggtcaggcctctcccaacatcccagtagtttctcctctgagacacatgggcaagagacaatttggagtcaagattttccatttggatctattttaaatcttttagaaatgcatttgaaacagtgtgtttgttttttcccttctagttaagggactatttatatgtgtataggaaagctgtctctttttttgtttttcctttaacaaggtccaaagaaagatgcaaaaggagatcacacccttgccccgctgagccccgtgataacaagtcactccagactaacctgtgtgccagacatttgtgcattgttgcactttgaggttattatttatcaagttcttgaaggaagcagaaagagggactcctctctccctccgtgtatagtctctatgtttgtgctagtttttcttttttttctctgtgtccagtcagccacagggcccgcctccctgcaggaataaggggtaaaacgttaggtgttgtttggcaagaaaccacactgactgatgaggggtaaaatggaaccaggtagagccactccgggcagctgtcacccattcagaacttctttccgcagctgaagaaatgttcagtaacctgtttgacgctaattaaaacagagcctgcaggaagtggggctaaagtggcattcagtgatcctgttctgtagacttttctttctttttttaaccaaatccaaaggatgttacagaaaagctagccactggtattttgttttgtttaaaaaaaaaaagaaagaaagaaagaaagaaaaacggaaaggaacctagctgcctgtatctttcatttttaaaatagcacttgagttattttctgagtaatccaataaagaacttttgatgacagccagaatgtgttagaactctggctgaacatttcatctcctgtgagtcagaagggctttatttctccctttgatggggccccttcttctttctggtgctctggaagttgtttagaggaaagaattctaattttaattaattgcgcagtgagttaatctcactcgcttttctgcttccaggcatcttaggaaaaacaaatggttttagtagataagggatgcctactaatgcttttttaaaacaaacagggacatttttattatagatttgatttttttaatgaatgtttttaaaaatatataaataggacaccaaagcggcagggtttttttgggggggagggggtttgttttccaactcaagatggcacattagtggccagcaatattttttaactcattccaaccaggaagcttttttatacattgcctaaatctacgccaaccagaaaatagtctcatctctttttttctcaaatgagatccgtgttttattttagcattaaattagttacactgtgatgactggcctattacctgactcagctccctctaccttgaaattgacatttttaaaaaatgcaactaagtggttaatagtgtgtgacgctcaaagttaatgtaaactggaaaggttgtgtgtcgttgctttttgtgttttggttaggcttggttttgttttttaatttttatactttctaataaatttgcagtttcattctt

SEQ ID NO: 149649 - DNA, 1879 bp, Homo sapiens
  Payload ID: 9560
  Gene Symbol: LDLRAD3
  Gene Name: low density lipoprotein receptor class A domain containing 3
  Uniprot ID: Q86YD5
  ENST ID: ENST00000528989
  CDS Start-End: 119-1009
gaaggcgggagggaggagggccaggcgggagggcggggacggcgcggcgaggggcggggtcagcgccgaggccgcgggggcagcaacgacgccgggcagcgggagcggcggccgcgccatgtggctgctggggccgctgtgcctgctgctgagcagcgccgcggccaaggctaagtcgaaatgtggcccaaccttcttcccctgtgccagcggcatccattgcatcattggtcgcttccggtgcaatgggtttgaggactgtcccgatggcagcgatgaagagaactgcacagcaaaccctctgctttgctccaccgcccgctaccactgcaagaacggcctctgtattgacaagagcttcatctgcgatggacagaataactgtcaagacaacagtgatgaggaaagctgtgaaagttctcaagaacccggcagtgggcaggtgtttgtgacttcagagaaccaacttgtgtattaccccagcatcacctatgccatcatcggcagctccgtcatttttgtgctggtggtggccctgctggcactggtcttgcaccaccagcggaagcggaacaacctcatgacgctgcccgtgcaccggctgcagcaccctgtgctgctgtcccgcctggtggtcctggaccacccccaccactgcaacgtcacctacaacgtcaataatggcatccagtatgtggccagccaggcggagcagaatgcgtcggaagtaggctccccaccctcctactccgaggccttgctggaccagaggcctgcgtggtatgaccttcctccaccgccctactcttctgacacggaatctctgaaccaagccgacctgcccccctaccgctcccggtccgggagtgccaacagtgccagctcccaggcagccagcagcctcctgagcgtggaagacaccagccacagcccggggcagcctggcccccaggagggcactgctgagcccagggactctgagcccagccagggcactgaagaagtataagtcccagttattccaaagtccatatgggttaatctgctctgacttgttgccattctaacaatttgtgctcatgggaagctctttaagcacctgtaagggtgtctcaagttacagtttgggatattaactatctctgcattcccctcctcccccagacttcagagatgtttttctggcgtctcagttgacatgatctgttgtgcgtcttttctgtcaggtcactcttcccttgggacccgagatcacaccctcatttttcacattattctgtttctgttggagagacagcatataaaacagtattgaaataggctgggagagagcaatgtttctgtgctatattggatgctcagaagtgcaggagacgctggacccaattctctctgctgggtagttaccttatagcatttggggatttgggttagatgatctaaccaggaggccatcactggatggtcacccccccaaaaaaattccatttgagcatcaaaacctgctttgcacaatcctatttgatgcccccagttcagcagagtcagtggccaaagaaaactttggacgtgagtaacacccttcagcagtcgcaacgttattttggttttgtgaaggactctgaaaccatctaccctgtataaattctggctttagaaatttgcccaagaatgctcattctgagagctttcctcagcagcatatatcatcagcctcatcctaaaataggcagggagcccctcccatgagtttatccaagttctcagctcctaaaatgcaggctgccaagaccctacacctgccctggctctacagccacttacctggtttctggactgtcaccctcccagctgacctgcccgtagccaaggaatgagg

SEQ ID NO: 149650 - DNA, 1996 bp, Homo sapiens
  Payload ID: 9560
  Gene Symbol: LDLRAD3
  Gene Name: low density lipoprotein receptor class A domain containing 3
  ENST ID: ENST00000524419
  CDS Start-End: 119-1126
gaaggcgggagggaggagggccaggcgggagggcggggacggcgcggcgaggggcggggtcagcgccgaggccgcgggggcagcaacgacgccgggcagcgggagcggcggccgcgccatgtggctgctggggccgctgtgcctgctgctgagcagcgccgcggccaaggctaagtcgaaatgtggcccaaccttcttcccctgtgccagcggcatccattgcatcattggtcgcttccggtgcaatgggtttgaggactgtcccgatggcagcgatgaagagaactgcacagcaaaccctctgctttgctccaccgcccgctaccactgcaagaacggcctctgtattgacaagagcttcatctgcgatggacagaataactgtcaagacaacagtgatgaggaaagctgtgaaagttctcaagtctcactcttgttgcccaggctggagtgcagtggcacaatctcggctcactgcaagctccgcctcccaggttcacgccattctcctgcctcagcctcccgagtagctggaactacagaacccggcagtgggcaggtgtttgtgacttcagagaaccaacttgtgtattaccccagcatcacctatgccatcatcggcagctccgtcatttttgtgctggtggtggccctgctggcactggtcttgcaccaccagcggaagcggaacaacctcatgacgctgcccgtgcaccggctgcagcaccctgtgctgctgtcccgcctggtggtcctggaccacccccaccactgcaacgtcacctacaacgtcaataatggcatccagtatgtggccagccaggcggagcagaatgcgtcggaagtaggctccccaccctcctactccgaggccttgctggaccagaggcctgcgtggtatgaccttcctccaccgccctactcttctgacacggaatctctgaaccaagccgacctgcccccctaccgctcccggtccgggagtgccaacagtgccagctcccaggcagccagcagcctcctgagcgtggaagacaccagccacagcccggggcagcctggcccccaggagggcactgctgagcccagggactctgagcccagccagggcactgaagaagtataagtcccagttattccaaagtccatatgggttaatctgctctgacttgttgccattctaacaatttgtgctcatgggaagctctttaagcacctgtaagggtgtctcaagttacagtttgggatattaactatctctgcattcccctcctcccccagacttcagagatgtttttctggcgtctcagttgacatgatctgttgtgcgtcttttctgtcaggtcactcttcccttgggacccgagatcacaccctcatttttcacattattctgtttctgttggagagacagcatataaaacagtattgaaataggctgggagagagcaatgtttctgtgctatattggatgctcagaagtgcaggagacgctggacccaattctctctgctgggtagttaccttatagcatttggggatttgggttagatgatctaaccaggaggccatcactggatggtcacccccccaaaaaaattccatttgagcatcaaaacctgctttgcacaatcctatttgatgcccccagttcagcagagtcagtggccaaagaaaactttggacgtgagtaacacccttcagcagtcgcaacgttattttggttttgtgaaggactctgaaaccatctaccctgtataaattctggctttagaaatttgcccaagaatgctcattctgagagctttcctcagcagcatatatcatcagcctcatcctaaaataggcagggagcccctcccatgagtttatccaagttctcagctcctaaaatgcaggctgccaagaccctacacctgccctggctctacagccacttacctggtttctggactgtcaccctcccagctgacctgcccgtagccaaggaatgagg

SEQ ID NO: 149651 - DNA, 8486 bp, Homo sapiens
  Payload ID: 9561
  Gene Symbol: LDLRAD4
  Gene Name: low density lipoprotein receptor class A domain containing 4
  Uniprot ID: O15165
  ENST ID: ENST00000359446
  CDS Start-End: 469-1389
agcggttcaagctctacgttcgtgacatcaaacctcctgttgggccatttccgagaactcccatcagtttctgtatagtgtaaaagtttcagaggcggagcacagagagctgcggctgggacaaggagcacccgcgtgcaggtgcgaccctgcaggatgctggcagcggcgtggccaggggcgcccgtgttctgagggcctgagggccagcccctccacccgcgccatggcctccgcgccctggctggacggctgacgggagcagggaccgccgccgcccaggtgccacacccaggtaccgcccgcccgcgcgagagccgggcaggtgggccgcggatgctcccagaggccggcccagcagagcgatggacttggacaggctaagatggaagtgacctgagcctcgcccggcggcttcctcgacgggacagcgcaagagttggagcacaggcttgtccggggagcagtatgccggaagctggttttcaggccacaaatgctttcacagagtgcaaattcacctgcaccagtggtaaatgcttgtatcttggttcgctggtctgtaaccaacagaacgactgtggggacaacagtgacgaagagaactgtctcctggtgaccgagcacccgcctccgggcatcttcaactcggagctggagttcgcccaaatcatcatcatcgtcgtggtggtcacggtgatggtggtggtcatcgtctgcctgctgaaccactacaaagtctccacgcggtccttcatcaaccgcccgaaccagagccggaggcgggaggacgggctgccgcaggaagggtgcctgtggccttcagacagcgccgcaccgcggctgggcgcctcggagatcatgcatgccccgcggtccagggacaggttcacagcgccgtccttcatccagagggatcgcttcagccgcttccagcccacctacccctatgtgcagcacgagattgatcttcctcccaccatctccctgtccgacggtgaagagccacctccttaccaggggccctgcaccctgcagctccgggaccctgaacagcagatggaactcaaccgagagtccgtgagggccccacccaaccgaaccatatttgacagtgatttaatagacattgctatgtatagcgggggtccatgcccacccagcagcaactcgggcatcagtgcaagcacctgcagcagtaacgggaggatggaggggccaccccccacatacagcgaggtgatgggccaccacccaggcgcctctttcctccatcaccagcgcagcaacgcacacaggggcagcagactgcagtttcagcagaacaatgcagagagcacaatagtacccatcaaaggcaaagataggaagcctgggaacctggtctgattccttccaacgtgcacttcagctggagaaagaaaccaagaagggaagcggccgctgggcccctcctgcgcacagtgttgttcagtttcacatggtacaaataagtaaaaccaaatgagcaaacacggtctttgtttctgattccttttaggggaattgcatgcaaactagactgaaatgatacaaacttccatctggtctgaccgcaaacagtgtttatttggggacaggggttgggatgggggtgtgggcaggggaaaacagagaacgggatgctttgaagataccatgaaataaaacccacagaggtatttgatgtatttaattgtgaaaggagactttgcagataaatgaggccagaatggcatgttttataattaactgaataaagaaggaagcattattatatattattgtggggaagaaccagccagttcgctttttctcctaaggtgtggaacttttattttgttttaaaaatatgaatcaaaattcctgtgttgtgtgccaaggtataaagtggagaagttagatgagtgcaaggagctcctttgtgttgtgatgatgtgttttaaaagttgcactatcttaatgttgaaaatatttacaagggaactgttttacgtgaagttctgtatgttgtcttttcacctgtggattgtaatcaggcccaaggaatatcctggagtggtccccagaagcatccaagaaaagatatttggggacgtagcctaacattttaccaacttacgtaaatcaaaaaagtcattattgttgcaggagtttgcatcaaatagcagtgcatcgctgaagcttttggagacttttggatggaagataagatagggaagattaagttccagcatttctgacttgttattttgagttactctgctactcttaggctgcatagtttatgagaaaatgaacacatgcatttatggatccagtatcatgcagtgctgccctcatcctccagcagtgcaatttcttcagtaatttagatttttttcactatagcatgaaatatattcaaatacataccttattttatgcaataaattgtttaaaatgcaaggtggttattctgcatactgttgaaatatgtgactcctcagtatattcccattgcctctccccctttcctcgacagcttagttcagttctgcagggctgctcagttcacaggaggctcccagcagccaccccacatccagcctacacagaacttcgtgtgggagtggtgtgggtggtggtttcttatgctttggaagcccctagaaataatgacggaagaatgccatgttgctgatcgtggtaataagccattgtgggttattgtatgtcactagtattagcatagcattcttaaaggaatgcagtgctcaaaacctacccaaattcccgcaggattctaccaaacccttccccaggccagcttttgtactgaaggcaagaactggacagtcagagaacagtggagggggcaagtgactgaagagcaccgggtaaaaagcacaacatgcagttaaaatgcaactagaaaactaattttaaatattgttagttttaatattcctgatatttacaaatattcattcttatatacaatgaaaaaaataactttcttctgcagatgtaagcactggcttttataagagcagcagccaacacgtttagcagacactgcgcgtggagaagggcttatctgcagtacactctgccatgtggagggtgggcctctgtggcctcttcacataacaagatgagctggaatgatgattccatgactcccacctatgcagccttaaagccaaatccgcgtgtgtgtgtttgtgtctgtctgtgggtctcgaaggtgatccgtcggtgcggtggctctgtgctgtaactggagagactgttccaaaccccaagagttgtctgatcctagtctgttcccttctgcttcttacctctgtagataggtcactggtttttgtttgtttgttttgaggattggaatttccattacattcatcctttgcacacagtaacatccacagaactagtccaactcttaaaaggagagaggaaaaacacaggcaccagttgtcagctcatgcttacaacctgtgtggaagtatatacagttgagagtcacagtggaggttctgagactggattcagtcttgttccagtgacagttggaaggcctctgctggagagacaccagctctcagggcagagattggcttggggccagaaggaccctccccaaccctggagacaccctgaaggttcactggctctccagattagcctctcttcctctgtcaggcaaagatgaggagcccgtgttcccatcgggccctgctggcagggacttgcagtggattcttggtcaggtgtgcccacagatgcggaggcgaggtgagtgattccatcatttcagttctcacctgcagttttggtgaagcaggagatgcaccccacagctctagctctcaaatggcttcacagtccttacttctctacctgcctcaagaaggggctcagagcagagacttgtgaattccttagtaactgtgagtatatgaatgtgttgcacatgtccacagtattggcgagataattacataattcagatacctttaatcatctttcaagaaagaggctcctcccattcaaccaccctagagaactgcctttgttaaatagttatttaaagactcatacatatcaaaccatgactttgaaaggtcttcgaggctggggctctgtaatgaattagtttaaaagccaaggtcataacatgaattgatggtcaatttcccttcagcagaaggaaaaggtgatttagatcagtagctcttttgaaggttgtggctgacctgttcataccgtgtcgcctcatggctagtgtggcgttgaaagagtagcgactgggaagatacaacttacacagtggggcctattgttctttcaagaaccctttttttagcttatagaacccatgggtccagtttagtaacgagtgatttaggcaatcaatgataggtttataatcttagattattccagcaaagtgtggattgcattgttaggaagaacatttggtgggaatgaacactcctgggcataccgctgacttttgtcccttgttcccggtgtaggagacccaaggcatcttgaatcccatctataagaacacaatcttccagcatacgtttgctttttcagaaactctagcattctctttaaatactgacgcaatccttaatggaaaagagatttcatgaagcaaattatgtatttcaatagttcttctatttttagtgtccaaaatttactaatacagaagcttgacaagcatgtcctcaccctccccaccacataaacacatggacacacacccaagccacaagaaatcccaagagagcagaagcgaatttttaaaagatttatcgtgaggactgcatttccattcactaattttggctcaaacttatgaggcaggaaataggggccaacagtaaatgggggaggcctcctgacaccagcagaggaattttgtacccaggcgaggacttcttgaacttctgcgtatctccgtttgatctctttcacctttatttcatcttcataagaatgagaaaggctcaaaaggaagcacttttagaaatcttctctgacctagaagaatccatccaaatccctgccttcctctctgaaccaacagttcccttctctgacaggggccatcctctatcttccatccagcggctcttctttttaggaaggctctggtgcagagcacttcaaatatgtcctcaggccagatactgattgctagtagagagacacccggcacccagtccgaagccctccctcaaaggaccggctcatggcgttggtcactggcaggctcagagacattctgctgtgggcgcagggagcccggccccccatgcagccatgactggatgcgcccccatctcgggggcttgctgcactgcttgtttattgaattttgctacttagaatggcaacattaactttgtgtaccattcattttttaaaaattttccaaagctcggcagtgtatgaaagaaaaaactgggaaagatacttggtttctgttaacttttgtgttgcttgcttaagtgattaaagccagtgcttggagccaagccttcatgccacgaacatgctccacagcctgccctttgctctcctgctcacactgaccaagaatgccgcgtgcttggcctactgaggtgaaaggacaattgaatgacaggtgggcaaagggagaacttccccttcttggtgcgaggaaagtcacaaatttaaaaatgttgcttccagcccagatcctaaatgctagttctcagcagctgcgtggcttaccgttcgccatttccaccaccgccagctgccagcaccgctacagatcacagagatgtgaacagacaatggaaagcactcttagccttgcagtggtctacattttttaggaaccaatatttcagcattctttattacccggcacgctgtgtcctttgcagagttcaagtttatgttactgccagggtcagacagtcatttgctgctgctgctgctgctgctgcttctcgaactggatgcattaggaagctgctgtctgagtgtaggaatgtcttgctaagaaagcaatgtcttccttcatccttttctttcttccctctgcgtgtccttgtttttgtgtaatgcgggagagggttagagctatagagattatatatacactatccgtgcacattatatatatgtagatatacccctatcatgtcagagatctgcatgtcagtttttcagcaactaaggtgcctcatgttctgagttcagcagatataggaaccaagccgccccctcctgcacttgatgctcccacctttgttgtgcctcacttaaaatggtgcttttttcagttgtctgtcttttcttatgtttttatttgtaaggtgctgtatataagttgaatatattatgcacatatcctacccaatgggtagaacaaaaagttgttaatactgtaatataatgtatagatgataccaattttaacagaaatggcatagaatttgtgaatgcctatgtgctttgtcctcttttgtaaggaaatttgcaaatggatgcatacagattaaagtctatgtagtttattttcctattaaatatcaatattataacacaagagaaagaagtgtgaacaaacaagcaacagtttatgaccagcgtatatatagcaatggaaagttgcatctttgctgtgaaaacactttaaagaaaatactttttaaaaaatcccacagctttttggttgccactagacgcttcttattttaatcattttagtaatgctcagctggaccagtgttagttatatttgagtcagaaaaatgttgtttttcaacttgctttataatctcctgcatctatctcctgctgtagcatcacgaaggtgtcaggcaacagtgaaaagtgcacatttttgttgttgcagaaactgtgtcagaggaataagtaaatcagcctgcagcagaagactttgttcagctccagaggcatctgtgaccgtctgtgtccaagtctctctgtgcctttttcttttacaaactgaagctgtggagccaatgaagtaacagtagagattgtagggaaagaatacctcaggaaaaacaaatacacttacaagaagaccctgttcttagaaaatgtgtttagttatgggttagcactagaagagacttggctgtcagccagccaagtgaaggacctctcatccattcccattcatgtcccatcataatacggacccaaaaagcaaactcggttttgccatcagttagaaattacgttttggattgtatattgttacatctctcttccggcttagtttttagtgtctgattgtgacctctgcatttatcttcaaataccctaattttaaaacaaaagaacaagaaaagtttataacaccatgttcactaaaaccacggttgaatcttgggtgtgggcatcctttcgagtgttgtccataagagcagttcgtggaattttgcccatctgacccatattatcagcttattctgccaccagagtagagtctaataaattccaaagtttttatttgctccatggtgtatgttctgactttgaaaatgtcagattctataatcatacccctaacatccaggaaacaaatgacagattatctttaaactgaaattgactctacaatgcaacccttaatgctgaatggattaaaaaagtcagcccttttagtatctgtttgaaagggccgtaaaaagttgacacttttgttgttgtggatcctgcgtgtctagacccacgtgttgtttccatcgtatactgtagggtgcaccccttgggattcatcattaagaactgaggctcactgttgtcagaaacaaagctcccaccccccaggttcaaccttgtgggagaactgttgagcatgagaatgttctagactcagaggtactaaaatttgttaccacatcattgcttcctttctacaggacgaattgaggcttaaactttactgttaatgatactggttcattttaatgtgcttgttggtatgttgctatttttcatttcatagctttcaaaaatcatgctaattgtatacttgtctagtttaaggctattttaaaatatgtacaatactattcacagcatttagttcgtttaatttttattataaagcaatctactaaaaaagtacaactgtatttgaacttttcaatagttgtttgtgagctatgataatcaaaagtcattaaagtcttttttaacaaacattcgtgcttacttttcaacataattcccagttatatacagaaaaagatttccacctgtcacgtatctgcctcttttacctgagcaatggtgtagttcttagacctaaggtctgtaattgcaatacttttaaagaaagatgttgctctaagtgctgtttgttagttatgaaatcagatttttctgcttgttcttaatgctgtggtcaaaccatagcacaaaatcattaaaaataatcagcggcatac

SEQ ID NO: 149652 - DNA, 8633 bp, Homo sapiens
  Payload ID: 9561
  Gene Symbol: LDLRAD4
  Gene Name: low density lipoprotein receptor class A domain containing 4
  Uniprot ID: O15165
  ENST ID: ENST00000399848
  CDS Start-End: 669-1535
gctgggtctccgagccccggaggaagcaggcgtgtgttgaatttctctctgcccctcaccttggaataaacaggaagcgacaagcacccagcccggcccggcacttgcctttgtgaaggggtctgccctgcacagcctttaggaagcttcctcgggaccccttcccggtgcgccgccccgggtgggcctgggggcgcgccctcggttcaagctctacgttcgtgacatcaaacctcctgttgggccatttccgagaactcccatcagtttctgtatagtgtaaaagtttcagaggcggagcacagagagctgcggctgggacaaggagcacccgcgtgcaggtgcgaccctgcaggatgctggcagcggcgtggccaggggcgcccgtgttctgagggcctgagggccagcccctccacccgcgccatggcctccgcgccctggctggacggctgacgggagcagggaccgccgccgcccaggtgccacacccaggtaccgcccgcccgcgcgagagccgggcaggtgggccgcggatgctcccagaggccggcccagcagagcgatggacttggacaggctaagatggaagtgacctgagcctcgcccggcggcttcctcgacgggacagcgcaagagttggagcacaggcttgtccggggagcagtatgccggaagctggttttcaggccacaaatgctttcacagagtgcaaattcacctgcaccagtggtaaatgcttgtatcttggttcgctggtctgtaaccaacagaacgactgtggggacaacagtgacgaagagaactgtctcctggtgaccgagcacccgcctccgggcatcttcaactcggagctggagttcgcccaaatcatcatcatcgtcgtggtggtcacggtgatggtggtggtcatcgtctgcctgctgaaccactacaaagtctccacgcggtccttcatcaaccgcccgaaccagagccggaggcgggaggacgggctgccgcagatcatgcatgccccgcggtccagggacaggttcacagcgccgtccttcatccagagggatcgcttcagccgcttccagcccacctacccctatgtgcagcacgagattgatcttcctcccaccatctccctgtccgacggtgaagagccacctccttaccaggggccctgcaccctgcagctccgggaccctgaacagcagatggaactcaaccgagagtccgtgagggccccacccaaccgaaccatatttgacagtgatttaatagacattgctatgtatagcgggggtccatgcccacccagcagcaactcgggcatcagtgcaagcacctgcagcagtaacgggaggatggaggggccaccccccacatacagcgaggtgatgggccaccacccaggcgcctctttcctccatcaccagcgcagcaacgcacacaggggcagcagactgcagtttcagcagaacaatgcagagagcacaatagtacccatcaaaggcaaagataggaagcctgggaacctggtctgattccttccaacgtgcacttcagctggagaaagaaaccaagaagggaagcggccgctgggcccctcctgcgcacagtgttgttcagtttcacatggtacaaataagtaaaaccaaatgagcaaacacggtctttgtttctgattccttttaggggaattgcatgcaaactagactgaaatgatacaaacttccatctggtctgaccgcaaacagtgtttatttggggacaggggttgggatgggggtgtgggcaggggaaaacagagaacgggatgctttgaagataccatgaaataaaacccacagaggtatttgatgtatttaattgtgaaaggagactttgcagataaatgaggccagaatggcatgttttataattaactgaataaagaaggaagcattattatatattattgtggggaagaaccagccagttcgctttttctcctaaggtgtggaacttttattttgttttaaaaatatgaatcaaaattcctgtgttgtgtgccaaggtataaagtggagaagttagatgagtgcaaggagctcctttgtgttgtgatgatgtgttttaaaagttgcactatcttaatgttgaaaatatttacaagggaactgttttacgtgaagttctgtatgttgtcttttcacctgtggattgtaatcaggcccaaggaatatcctggagtggtccccagaagcatccaagaaaagatatttggggacgtagcctaacattttaccaacttacgtaaatcaaaaaagtcattattgttgcaggagtttgcatcaaatagcagtgcatcgctgaagcttttggagacttttggatggaagataagatagggaagattaagttccagcatttctgacttgttattttgagttactctgctactcttaggctgcatagtttatgagaaaatgaacacatgcatttatggatccagtatcatgcagtgctgccctcatcctccagcagtgcaatttcttcagtaatttagatttttttcactatagcatgaaatatattcaaatacataccttattttatgcaataaattgtttaaaatgcaaggtggttattctgcatactgttgaaatatgtgactcctcagtatattcccattgcctctccccctttcctcgacagcttagttcagttctgcagggctgctcagttcacaggaggctcccagcagccaccccacatccagcctacacagaacttcgtgtgggagtggtgtgggtggtggtttcttatgctttggaagcccctagaaataatgacggaagaatgccatgttgctgatcgtggtaataagccattgtgggttattgtatgtcactagtattagcatagcattcttaaaggaatgcagtgctcaaaacctacccaaattcccgcaggattctaccaaacccttccccaggccagcttttgtactgaaggcaagaactggacagtcagagaacagtggagggggcaagtgactgaagagcaccgggtaaaaagcacaacatgcagttaaaatgcaactagaaaactaattttaaatattgttagttttaatattcctgatatttacaaatattcattcttatatacaatgaaaaaaataactttcttctgcagatgtaagcactggcttttataagagcagcagccaacacgtttagcagacactgcgcgtggagaagggcttatctgcagtacactctgccatgtggagggtgggcctctgtggcctcttcacataacaagatgagctggaatgatgattccatgactcccacctatgcagccttaaagccaaatccgcgtgtgtgtgtttgtgtctgtctgtgggtctcgaaggtgatccgtcggtgcggtggctctgtgctgtaactggagagactgttccaaaccccaagagttgtctgatcctagtctgttcccttctgcttcttacctctgtagataggtcactggtttttgtttgtttgttttgaggattggaatttccattacattcatcctttgcacacagtaacatccacagaactagtccaactcttaaaaggagagaggaaaaacacaggcaccagttgtcagctcatgcttacaacctgtgtggaagtatatacagttgagagtcacagtggaggttctgagactggattcagtcttgttccagtgacagttggaaggcctctgctggagagacaccagctctcagggcagagattggcttggggccagaaggaccctccccaaccctggagacaccctgaaggttcactggctctccagattagcctctcttcctctgtcaggcaaagatgaggagcccgtgttcccatcgggccctgctggcagggacttgcagtggattcttggtcaggtgtgcccacagatgcggaggcgaggtgagtgattccatcatttcagttctcacctgcagttttggtgaagcaggagatgcaccccacagctctagctctcaaatggcttcacagtccttacttctctacctgcctcaagaaggggctcagagcagagacttgtgaattccttagtaactgtgagtatatgaatgtgttgcacatgtccacagtattggcgagataattacataattcagatacctttaatcatctttcaagaaagaggctcctcccattcaaccaccctagagaactgcctttgttaaatagttatttaaagactcatacatatcaaaccatgactttgaaaggtcttcgaggctggggctctgtaatgaattagtttaaaagccaaggtcataacatgaattgatggtcaatttcccttcagcagaaggaaaaggtgatttagatcagtagctcttttgaaggttgtggctgacctgttcataccgtgtcgcctcatggctagtgtggcgttgaaagagtagcgactgggaagatacaacttacacagtggggcctattgttctttcaagaaccctttttttagcttatagaacccatgggtccagtttagtaacgagtgatttaggcaatcaatgataggtttataatcttagattattccagcaaagtgtggattgcattgttaggaagaacatttggtgggaatgaacactcctgggcataccgctgacttttgtcccttgttcccggtgtaggagacccaaggcatcttgaatcccatctataagaacacaatcttccagcatacgtttgctttttcagaaactctagcattctctttaaatactgacgcaatccttaatggaaaagagatttcatgaagcaaattatgtatttcaatagttcttctatttttagtgtccaaaatttactaatacagaagcttgacaagcatgtcctcaccctccccaccacataaacacatggacacacacccaagccacaagaaatcccaagagagcagaagcgaatttttaaaagatttatcgtgaggactgcatttccattcactaattttggctcaaacttatgaggcaggaaataggggccaacagtaaatgggggaggcctcctgacaccagcagaggaattttgtacccaggcgaggacttcttgaacttctgcgtatctccgtttgatctctttcacctttatttcatcttcataagaatgagaaaggctcaaaaggaagcacttttagaaatcttctctgacctagaagaatccatccaaatccctgccttcctctctgaaccaacagttcccttctctgacaggggccatcctctatcttccatccagcggctcttctttttaggaaggctctggtgcagagcacttcaaatatgtcctcaggccagatactgattgctagtagagagacacccggcacccagtccgaagccctccctcaaaggaccggctcatggcgttggtcactggcaggctcagagacattctgctgtgggcgcagggagcccggccccccatgcagccatgactggatgcgcccccatctcgggggcttgctgcactgcttgtttattgaattttgctacttagaatggcaacattaactttgtgtaccattcattttttaaaaattttccaaagctcggcagtgtatgaaagaaaaaactgggaaagatacttggtttctgttaacttttgtgttgcttgcttaagtgattaaagccagtgcttggagccaagccttcatgccacgaacatgctccacagcctgccctttgctctcctgctcacactgaccaagaatgccgcgtgcttggcctactgaggtgaaaggacaattgaatgacaggtgggcaaagggagaacttccccttcttggtgcgaggaaagtcacaaatttaaaaatgttgcttccagcccagatcctaaatgctagttctcagcagctgcgtggcttaccgttcgccatttccaccaccgccagctgccagcaccgctacagatcacagagatgtgaacagacaatggaaagcactcttagccttgcagtggtctacattttttaggaaccaatatttcagcattctttattacccggcacgctgtgtcctttgcagagttcaagtttatgttactgccagggtcagacagtcatttgctgctgctgctgctgctgctgcttctcgaactggatgcattaggaagctgctgtctgagtgtaggaatgtcttgctaagaaagcaatgtcttccttcatccttttctttcttccctctgcgtgtccttgtttttgtgtaatgcgggagagggttagagctatagagattatatatacactatccgtgcacattatatatatgtagatatacccctatcatgtcagagatctgcatgtcagtttttcagcaactaaggtgcctcatgttctgagttcagcagatataggaaccaagccgccccctcctgcacttgatgctcccacctttgttgtgcctcacttaaaatggtgcttttttcagttgtctgtcttttcttatgtttttatttgtaaggtgctgtatataagttgaatatattatgcacatatcctacccaatgggtagaacaaaaagttgttaatactgtaatataatgtatagatgataccaattttaacagaaatggcatagaatttgtgaatgcctatgtgctttgtcctcttttgtaaggaaatttgcaaatggatgcatacagattaaagtctatgtagtttattttcctattaaatatcaatattataacacaagagaaagaagtgtgaacaaacaagcaacagtttatgaccagcgtatatatagcaatggaaagttgcatctttgctgtgaaaacactttaaagaaaatactttttaaaaaatcccacagctttttggttgccactagacgcttcttattttaatcattttagtaatgctcagctggaccagtgttagttatatttgagtcagaaaaatgttgtttttcaacttgctttataatctcctgcatctatctcctgctgtagcatcacgaaggtgtcaggcaacagtgaaaagtgcacatttttgttgttgcagaaactgtgtcagaggaataagtaaatcagcctgcagcagaagactttgttcagctccagaggcatctgtgaccgtctgtgtccaagtctctctgtgcctttttcttttacaaactgaagctgtggagccaatgaagtaacagtagagattgtagggaaagaatacctcaggaaaaacaaatacacttacaagaagaccctgttcttagaaaatgtgtttagttatgggttagcactagaagagacttggctgtcagccagccaagtgaaggacctctcatccattcccattcatgtcccatcataatacggacccaaaaagcaaactcggttttgccatcagttagaaattacgttttggattgtatattgttacatctctcttccggcttagtttttagtgtctgattgtgacctctgcatttatcttcaaataccctaattttaaaacaaaagaacaagaaaagtttataacaccatgttcactaaaaccacggttgaatcttgggtgtgggcatcctttcgagtgttgtccataagagcagttcgtggaattttgcccatctgacccatattatcagcttattctgccaccagagtagagtctaataaattccaaagtttttatttgctccatggtgtatgttctgactttgaaaatgtcagattctataatcatacccctaacatccaggaaacaaatgacagattatctttaaactgaaattgactctacaatgcaacccttaatgctgaatggattaaaaaagtcagcccttttagtatctgtttgaaagggccgtaaaaagttgacacttttgttgttgtggatcctgcgtgtctagacccacgtgttgtttccatcgtatactgtagggtgcaccccttgggattcatcattaagaactgaggctcactgttgtcagaaacaaagctcccaccccccaggttcaaccttgtgggagaactgttgagcatgagaatgttctagactcagaggtactaaaatttgttaccacatcattgcttcctttctacaggacgaattgaggcttaaactttactgttaatgatactggttcattttaatgtgcttgttggtatgttgctatttttcatttcatagctttcaaaaatcatgctaattgtatacttgtctagtttaaggctattttaaaatatgtacaatactattcacagcatttagttcgtttaatttttattataaagcaatctactaaaaaagtacaactgtatttgaacttttcaatagttgtttgtgagctatgataatcaaaagtcattaaagtcttttttaacaaacattcgtgcttacttttcaacataattcccagttatatacagaaaaagatttccacctgtcacgtatctgcctcttttacctgagcaatggtgtagttcttagacctaaggtctgtaattgcaatacttttaaagaaagatgttgctctaagtgctgtttgttagttatgaaatcagatttttctgcttgttcttaatgctgtggtcaaaccatagcacaaaatcattaaaaataatcagcggcataca

SEQ ID NO: 149653 - DNA, 743 bp, Homo sapiens
  Payload ID: 9561
  Gene Symbol: LDLRAD4
  Gene Name: low density lipoprotein receptor class A domain containing 4
  ENST ID: ENST00000587905
  CDS Start-End: 536-743
cagcagggccggtggccgcggagccgcactgcgggcagtccccgcctccgctccgggggggcggcccagcggttcaagctctacgttcgtgacatcaaacctcctgttgggccatttccgagaactcccatcagtttctgtatagtgtaaaagtttcagaggcggagcacagagagctgcggctgggacaaggagcacccgcgtgcaggtgcgaccctgcaggatgctggcagcggcgtggccaggggcgcccgtgttctgagggcctgagggccagcccctccacccgcgccatggcctccgcgccctggctggacggctgacgggagcagggaccgccgccgcccaggtgccacacccaggtaccgcccgcccgcgcgagagccgggcaggtgggccgcggatgctcccagaggccggcccagcagagcgatggacttggacaggctaagatggaagtgacctgagcctcgcccggcggcttcctcgacgggacagcgcaagagttggagcacaggcttgtccggggagcagtatgccggaagctggttttcaggccacaaatgctttcacagagtgcaaattcacctgcaccagtggtaaatgcttgtatcttggttcgctggtctgtaaccaacagaacgactgtggggacaacagtgacgaagagaactgtctcctggtgaccgagcacccgcctccgggcatcttcaactcggagctggagttcgcccaaatcatca

SEQ ID NO: 149654 - DNA, 685 bp, Homo sapiens
  Payload ID: 9561
  Gene Symbol: LDLRAD4
  Gene Name: low density lipoprotein receptor class A domain containing 4
  ENST ID: ENST00000586222
  CDS Start-End: 557-685
atttatttcctggttagtcctgcccatcttcccagtataaatagaacctccatgtgtgtgtgcgtgtgtgtgtgcgtgtgtgtgcgtgtgtgcatgtgtgtgcgtgtgtgtgtagaatgatgaccatgtgcttgctgccttgggggggatcttgactgtgaccttgcgtcctggtttcagaggcggagcacagagagctgcggctgggacaaggagcacccgcgtgcaggtgcgaccctgcaggatgctggcagcggcgtggccaggggcgcccgtgttctgagggcctgagggccagcccctccacccgcgccatggcctccgcgccctggctggacggctgacgggagcagggaccgccgccgcccaggtgccacacccaggtaccgcccgcccgcgcgagagccgggcaggtgggccgcggatgctcccagaggccggcccagcagagcgatggacttggacaggctaagatggaagtgacctgagcctcgcccggcggcttcctcgacgggacagcgcaagagttggagcacaggcttgtccggggagcagtatgccggaagctggttttcaggccacaaatgctttcacagagtgcaaattcacctgcaccagtggtaaatgcttgtatcttggttcgctggtctgtaaccaacagaacgactgtggggacaacagtgac

SEQ ID NO: 149655 - DNA, 2171 bp, Homo sapiens
  Payload ID: 9561
  Gene Symbol: LDLRAD4
  Gene Name: low density lipoprotein receptor class A domain containing 4
  Uniprot ID: O15165
  ENST ID: ENST00000587757
  CDS Start-End: 1242-2051
acacagcctgggggcatccgaatgcacgggagatgttttacactcagatgaaacaaactgtttagacctcggggaaaagagactgtgcttgaacaaaatgaaccaggagaaagcgccctcctgagacatgtctctgctttcatgtttgaattgcctgggattctgttctctaatttctgatccttataaactaaaactgcctaggaacattgagcatcctgactttgaaggagtctctgtggtgtttttgtgctaccatacatggggaataatgatgtgaggcagagggagagggaatgaatgggagagccaagagggaagagcgagccggggggaaaggagcgcgcagtgtttcctgctgcggttaggacctcacgccttgccagtacagagctcggtggcaagagccgctgggagctgctcccatcagttagaggatgtggagagggagcaccagaagaggacagcccgcagcctggctcgcagcctgagggacgctgtgggtgctcccagccgggcgagcacgctctgggagcggatctgcaggggagaagcacgcgagcctaacgtgagcgtcccgcctgtcgcgtgtcctgccttggtaagcgccctctccggtccttccacactgaaagcttccagcagagatcaagggaaggagtattgtgtgagacttgcagatttcctcctttctgtctggactggtttgatatttgcctgttgaaaagattactgaacgcagtgtgacaagatgagccgtctagctgcgttctgcttgcctgtgtgtgtgacacgtccaggtgtgaggccaaacctgagaagtgcagactgctcactgatagacgttgctgtaaacagtagtgccctgggtgtacagctggtctcaggatcggagaccccggacttattctctgctcggtgacacggccggcttcctgccgcagagctcctggtttctgttgatggcagttgataattggtagccacagtctgcggtcggagccacagcatttgagtctagcacctggggtgggccctgctgatacagtagagagagagtgaacgaggcagacagaaacacaccccccccccctccacgctcacacactctcccacaccccatgccagctataactgcagctctgagctgcctggagaggagattgccggaagctgaagggatgctttgaacgtgggggggctgcgtcacagttggactcccacttgcagaggacctgattatgtccagtgaccacctgaacaacagcacactgaaggaggctcagttcaaagacctgttcttaaaaaaagcggagctggagttcgcccaaatcatcatcatcgtcgtggtggtcacggtgatggtggtggtcatcgtctgcctgctgaaccactacaaagtctccacgcggtccttcatcaaccgcccgaaccagagccggaggcgggaggacgggctgccgcaggaagggtgcctgtggccttcagacagcgccgcaccgcggctgggcgcctcggagatcatgcatgccccgcggtccagggacaggttcacagcgccgtccttcatccagagggatcgcttcagccgcttccagcccacctacccctatgtgcagcacgagattgatcttcctcccaccatctccctgtccgacggtgaagagccacctccttaccaggggccctgcaccctgcagctccgggaccctgaacagcagatggaactcaaccgagagtccgtgagggccccacccaaccgaaccatatttgacagtgatttaatagacattgctatgtatagcgggggtccatgcccacccagcagcaactcgggcatcagtgcaagcacctgcagcagtaacgggaggatggaggggccaccccccacatacagcgaggtgatgggccaccacccaggcgcctctttcctccatcaccagcgcagcaacgcacacaggggcagcagactgcagtttcagcagaacaatgcagagagcacaatagtacccatcaaaggcaaagataggaagcctgggaacctggtctgattccttccaacgtgcacttcagctggagaaagaaaccaagaagggaagcggccgctgggcccctcctgcgcacagtgttgttcagtttcacatggtacaaataagtaaaaccaaatgagc

SEQ ID NO: 149656 - DNA, 572 bp, Homo sapiens
  Payload ID: 9561
  Gene Symbol: LDLRAD4
  Gene Name: low density lipoprotein receptor class A domain containing 4
  ENST ID: ENST00000593236
  CDS Start-End: 469-572
aagaggggtgctgcccaccggaaacgatggcgcgaggccgcagagctaaatgggggcctctccagggagtgctctgttcacggctccatcgctgttaggaaggagcaaaagccccttgccatccctgtgtgacagcaatgaggtgaacccaggggccgaagcccacccagggagttgatgggtagctgggacgatgaaagcatcccaagacctcccttttccatctgtggctgatcacctctggaacccacagctagccggctgctcctccactatcagatggcggctgtcagtcatgggcttgtcaccgagtgcatccgtcatgctcgggccatgggccggcacctgtgtgtgtgtgtccagcttaacgacagagatttttggaaagacgccctaagatagacatacttgaaactgacggagctggagttcgcccaaatcatcatcatcgtcgtggtggtcacggtgatggtggtggtcatcgtctgcctgctgaaccactacaaagtctccacgcggtccttcatcaaccgcccgaaccagagccggaggcgggaggacgggctgccgca

SEQ ID NO: 149657 - DNA, 1640 bp, Homo sapiens
  Payload ID: 9561
  Gene Symbol: LDLRAD4
  Gene Name: low density lipoprotein receptor class A domain containing 4
  Uniprot ID: O15165
  ENST ID: ENST00000592991
  CDS Start-End: 959-1585
gccgggcctcgggggcgcagccggactggacggcggctcctgtgggcacttggccgggtttgctggtttttcgggaaataaggccactggggacagtcactacgttttcaggaaccgctcagcccctctgagtgccccgcagatggacctggcggcgttcctggctacggctgactgggctcccggagcgaggagcgcccctgcgggcccagcctgggccctgggcggtgggagggcctccgcccccttcccgcttccgccccgctggcgccggacccccgccctcgtctgtgcctgccaggccgggcccttccctcccgtcacaggcggtccctgagcccacccttcgtctccgagcagctggaccgccgtatacgtttgccactgattccaggatgtccccgagtatcttaggaaagggccgtgttggacaaacgcggggctcggtgtttcttccgcgccgtccctcgctgctggcgccggggccgtcggaggctcagtgatggcccagcccgcccgtttccgagaattccccaaacgcgggcccctacacgctgagttcgcgctctcccgtgacggccgacagccccgcggaccctgctgacagccacactctgggctgaaaagggtaccacgcgtactttttttcccagcacgcgtggggccttggaaagaacctttactgaggcctgtggctggcctgtcaccttgtcaatctggccaaacgtttttgaaaaaggatgctaactcaccagatgtgaagttgcatctgccctgtgaataggtggactggagaagacactcgctggaggatcctgagcccaggctcggaaagggccgtccacctgcgagcgcggacttgcgcctctgctggaggccgggcagggcacgggcgggccccgggccacctctgccagggcttcctcaacccagcctgccctcatcgggcggccactgaatgcggttggacagtcatcttgaatgtatttcaagcacacaggaagggtgcctgtggccttcagacagcgccgcaccgcggctgggcgcctcggagatcatgcatgccccgcggtccagggacaggttcacagcgccgtccttcatccagagggatcgcttcagccgcttccagcccacctacccctatgtgcagcacgagattgatcttcctcccaccatctccctgtccgacggtgaagagccacctccttaccaggggccctgcaccctgcagctccgggaccctgaacagcagatggaactcaaccgagagtccgtgagggccccacccaaccgaaccatatttgacagtgatttaatagacattgctatgtatagcgggggtccatgcccacccagcagcaactcgggcatcagtgcaagcacctgcagcagtaacgggaggatggaggggccaccccccacatacagcgaggtgatgggccaccacccaggcgcctctttcctccatcaccagcgcagcaacgcacacaggggcagcagactgcagtttcagcagaacaatgcagagagcacaatagtacccatcaaaggcaaagataggaagcctgggaacctggtctgattccttccaacgtgcacttcagctggagaaagaaaccaagaagggaagcggccgc

SEQ ID NO: 149658 - DNA, 2118 bp, Homo sapiens
  Payload ID: 9561
  Gene Symbol: LDLRAD4
  Gene Name: low density lipoprotein receptor class A domain containing 4
  Uniprot ID: O15165
  ENST ID: ENST00000585931
  CDS Start-End: 352-1041
atgggagagccaagagggaagagcgagccggggggaaaggagcgcgcagtgtttcctgctgcggttaggacctcacgccttgccagtacagagctcggtggcaagagccgctgggagctgctcccatcagttagaggatgtggagagggagcaccagaagaggacagcccgcagcctggctcgcagcctgagggacgctgtgggtgctcccagccgggcgagcacgctctgggagcggatctgcaggggagaagcacgcgagcctaacgtgagcgtcccgcctgtcgcgtgtcctgccttgcggagctggagttcgcccaaatcatcatcatcgtcgtggtggtcacggtgatggtggtggtcatcgtctgcctgctgaaccactacaaagtctccacgcggtccttcatcaaccgcccgaaccagagccggaggcgggaggacgggctgccgcaggaagggtgcctgtggccttcagacagcgccgcaccgcggctgggcgcctcggagatcatgcatgccccgcggtccagggacaggttcacagcgccgtccttcatccagagggatcgcttcagccgcttccagcccacctacccctatgtgcagcacgagattgatcttcctcccaccatctccctgtccgacggtgaagagccacctccttaccaggggccctgcaccctgcagctccgggaccctgaacagcagatggaactcaaccgagagtccgtgagggccccacccaaccgaaccatatttgacagtgatttaatagacattgctatgtatagcgggggtccatgcccacccagcagcaactcgggcatcagtgcaagcacctgcagcagtaacgggaggatggaggggccaccccccacatacagcgaggtgatgggccaccacccaggcgcctctttcctccatcaccagcgcagcaacgcacacaggggcagcagactgcagtttcagcagaacaatgcagagagcacaatagtacccatcaaaggcaaagataggaagcctgggaacctggtctgattccttccaacgtgcacttcagctggagaaagaaaccaagaagggaagcggccgctgggcccctcctgcgcacagtgttgttcagtttcacatggtacaaataagtaaaaccaaatgagcaaacacggtctttgtttctgattccttttaggggaattgcatgcaaactagactgaaatgatacaaacttccatctggtctgaccgcaaacagtgtttatttggggacaggggttgggatgggggtgtgggcaggggaaaacagagaacgggatgctttgaagataccatgaaataaaacccacagaggtatttgatgtatttaattgtgaaaggagactttgcagataaatgaggccagaatggcatgttttataattaactgaataaagaaggaagcattattatatattattgtggggaagaaccagccagttcgctttttctcctaaggtgtggaacttttattttgttttaaaaatatgaatcaaaattcctgtgttgtgtgccaaggtataaagtggagaagttagatgagtgcaaggagctcctttgtgttgtgatgatgtgttttaaaagttgcactatcttaatgttgaaaatatttacaagggaactgttttacgtgaagttctgtatgttgtcttttcacctgtggattgtaatcaggcccaaggaatatcctggagtggtccccagaagcatccaagaaaagatatttggggacgtagcctaacattttaccaacttacgtaaatcaaaaaagtcattattgttgcaggagtttgcatcaaatagcagtgcatcgctgaagcttttggagacttttggatggaagataagatagggaagattaagttccagcatttctgacttgttattttgagttactctgctactcttaggctgcatagtttatgagaaaatgaacacatgcatttatggatccagtatcatgcagtgctgccctcatcctccagcagtgcaatttcttcagtaatttagatttttttcactatagcatgaaatatattcaaatacataccttattttatgcaataaattgtttaaaatgcaa

SEQ ID NO: 149659 - DNA, 844 bp, Homo sapiens
  Payload ID: 9561
  Gene Symbol: LDLRAD4
  Gene Name: low density lipoprotein receptor class A domain containing 4
  Uniprot ID: O15165
  ENST ID: ENST00000586765
  CDS Start-End: 87-842
agaggagattgccggaagctgaagggatgctttgaacgtgggggggctgcgtcacagttggactcccacttgcagaggacctgattatgtccagtgaccacctgaacaacagcacactgaaggaggctcagttcaaagacctgttcttaaaaaaagcggagctggagttcgcccaaatcatcatcatcgtcgtggtggtcacggtgatggtggtggtcatcgtctgcctgctgaaccactacaaagtctccacgcggtccttcatcaaccgcccgaaccagagccggaggcgggaggacgggctgccgcagatcatgcatgccccgcggtccagggacaggttcacagcgccgtccttcatccagagggatcgcttcagccgcttccagcccacctacccctatgtgcagcacgagattgatcttcctcccaccatctccctgtccgacggtgaagagccacctccttaccaggggccctgcaccctgcagctccgggaccctgaacagcagatggaactcaaccgagagtccgtgagggccccacccaaccgaaccatatttgacagtgatttaatagacattgctatgtatagcgggggtccatgcccacccagcagcaactcgggcatcagtgcaagcacctgcagcagtaacgggaggatggaggggccaccccccacatacagcgaggtgatgggccaccacccaggcgcctctttcctccatcaccagcgcagcaacgcacacaggggcagcagactgcagtttcagcagaacaatgcagagagcacaatagtacccatcaaaggcaaagataggaagcctgggaacctggtctgatt

SEQ ID NO: 149660 - DNA, 14897 bp, Homo sapiens
  Payload ID: 9562
  Gene Symbol: LRP1
  Gene Name: low density lipoprotein receptor-related protein 1
  Uniprot ID: Q07954
  ENST ID: ENST00000243077
  CDS Start-End: 467-14101
cagcggtgcgagctccaggcccatgcactgaggaggcggaaacaaggggagcccccagagctccatcaagccccctccaaaggctcccctacccggtccacgccccccaccccccctccccgcctcctcccaattgtgcatttttgcagccggaggcggctccgagatggggctgtgagcttcgcccggggagggggaaagagcagcgaggagtgaagcgggggggtggggtgaagggtttggatttcggggcagggggcgcacccccgtcagcaggccctccccaaggggctcggaactctacctcttcacccacgcccctggtgcgctttgccgaaggaaagaataagaacagagaaggaggagggggaaaggaggaaaagggggaccccccaactggggggggtgaaggagagaagtagcaggaccagaggggaaggggctgctgcttgcatcagcccacaccatgctgaccccgccgttgctcctgctgctgcccctgctctcagctctggtcgcggcggctatcgacgcccctaagacttgcagccccaagcagtttgcctgcagagatcaaataacctgtatctcaaagggctggcggtgcgacggtgagagggactgcccagacggatctgacgaggcccctgagatttgtccacagagtaaggcccagcgatgccagccaaacgagcataactgcctgggtactgagctgtgtgttcccatgtcccgcctctgcaatggggtccaggactgcatggacggctcagatgaggggccccactgccgagagctccaaggcaactgctctcgcctgggctgccagcaccattgtgtccccacactcgatgggcccacctgctactgcaacagcagctttcagcttcaggcagatggcaagacctgcaaagattttgatgagtgctcagtgtacggcacctgcagccagctatgcaccaacacagacggctccttcatatgtggctgtgttgaaggatacctcctgcagccggataaccgctcctgcaaggccaagaacgagccagtagaccggccccctgtgctgttgatagccaactcccagaacatcttggccacgtacctgagtggggcccaggtgtctaccatcacacctacgagcacgcggcagaccacagccatggacttcagctatgccaacgagaccgtatgctgggtgcatgttggggacagtgctgctcagacgcagctcaagtgtgcccgcatgcctggcctaaagggcttcgtggatgagcacaccatcaacatctccctcagtctgcaccacgtggaacagatggccatcgactggctgacaggcaacttctactttgtggatgacatcgatgataggatctttgtctgcaacagaaatggggacacatgtgtcacattgctagacctggaactctacaaccccaagggcattgccctggaccctgccatggggaaggtgtttttcactgactatgggcagatcccaaaggtggaacgctgtgacatggatgggcagaaccgcaccaagctcgtcgacagcaagattgtgtttcctcatggcatcacgctggacctggtcagccgccttgtctactgggcagatgcctatctggactatattgaagtggtggactatgagggcaagggccgccagaccatcatccagggcatcctgattgagcacctgtacggcctgactgtgtttgagaattatctctatgccaccaactcggacaatgccaatgcccagcagaagacgagtgtgatccgtgtgaaccgctttaacagcaccgagtaccaggttgtcacccgggtggacaagggtggtgccctccacatctaccaccagaggcgtcagccccgagtgaggagccatgcctgtgaaaacgaccagtatgggaagccgggtggctgctctgacatctgcctgctggccaacagccacaaggcgcggacctgccgctgccgttccggcttcagcctgggcagtgacgggaagtcatgcaagaagccggagcatgagctgttcctcgtgtatggcaagggccggccaggcatcatccggggcatggatatgggggccaaggtcccggatgagcacatgatccccattgaaaacctcatgaacccccgagccctggacttccacgctgagaccggcttcatctactttgccgacaccaccagctacctcattggccgccagaagattgatggcactgagcgggagaccatcctgaaggacggcatccacaatgtggagggtgtggccgtggactggatgggagacaatctgtactggacggacgatgggcccaaaaagacaatcagcgtggccaggctggagaaagctgctcagacccgcaagactttaatcgagggcaaaatgacacaccccagggctattgtggtggatccactcaatgggtggatgtactggacagactgggaggaggaccccaaggacagtcggcgtgggcggctggagagggcgtggatggatggctcacaccgagacatctttgtcacctccaagacagtgctttggcccaatgggctaagcctggacatcccggctgggcgcctctactgggtggatgccttctacgaccgcatcgagacgatactgctcaatggcacagaccggaagattgtgtatgaaggtcctgagctgaaccacgcctttggcctgtgtcaccatggcaactacctcttctggactgagtatcggagtggcagtgtctaccgcttggaacggggtgtaggaggcgcaccccccactgtgacccttctgcgcagtgagcggccccccatctttgagatccgaatgtatgatgcccagcagcagcaagttggcaccaacaaatgccgggtgaacaatggcggctgcagcagcctgtgcttggccacccctgggagccgccagtgcgcctgtgctgaggaccaggtgttggacgcagacggcgtcacttgcttggcgaacccatcctacgtgcctccaccccagtgccagccaggcgagtttgcctgtgccaacagccgctgcatccaggagcgctggaagtgtgacggagacaacgattgcctggacaacagtgatgaggccccagccctctgccatcagcacacctgcccctcggaccgattcaagtgcgagaacaaccggtgcatccccaaccgctggctctgcgacggggacaatgactgtgggaacagtgaagatgagtccaatgccacttgttcagcccgcacctgcccccccaaccagttctcctgtgccagtggccgctgcatccccatctcctggacgtgtgatctggatgacgactgtggggaccgctctgatgagtctgcttcgtgtgcctatcccacctgcttccccctgactcagtttacctgcaacaatggcagatgtatcaacatcaactggagatgcgacaatgacaatgactgtggggacaacagtgacgaagccggctgcagccactcctgttctagcacccagttcaagtgcaacagcgggcgttgcatccccgagcactggacctgcgatggggacaatgactgcggagactacagtgatgagacacacgccaactgcaccaaccaggccacgaggccccctggtggctgccacactgatgagttccagtgccggctggatggactatgcatccccctgcggtggcgctgcgatggggacactgactgcatggactccagcgatgagaagagctgtgagggagtgacccacgtctgcgatcccagtgtcaagtttggctgcaaggactcagctcggtgcatcagcaaagcgtgggtgtgtgatggcgacaatgactgtgaggataactcggacgaggagaactgcgagtccctggcctgcaggccaccctcgcacccttgtgccaacaacacctcagtctgcctgccccctgacaagctgtgtgatggcaacgacgactgtggcgacggctcagatgagggcgagctctgcgaccagtgctctctgaataacggtggctgcagccacaactgctcagtggcacctggcgaaggcattgtgtgttcctgccctctgggcatggagctggggcccgacaaccacacctgccagatccagagctactgtgccaagcatctcaaatgcagccaaaagtgcgaccagaacaagttcagcgtgaagtgctcctgctacgagggctgggtcctggaacctgacggcgagagctgccgcagcctggaccccttcaagccgttcatcattttctccaaccgccatgaaatccggcgcatcgatcttcacaaaggagactacagcgtcctggtgcccggcctgcgcaacaccatcgccctggacttccacctcagccagagcgccctctactggaccgacgtggtggaggacaagatctaccgcgggaagctgctggacaacggagccctgactagtttcgaggtggtgattcagtatggcctggccacacccgagggcctggctgtagactggattgcaggcaacatctactgggtggagagtaacctggatcagatcgaggtggccaagctggatgggaccctccggaccaccctgctggccggtgacattgagcacccaagggcaatcgcactggatccccgggatgggatcctgttttggacagactgggatgccagcctgccccgcattgaggcagcctccatgagtggggctgggcgccgcaccgtgcaccgggagaccggctctgggggctggcccaacgggctcaccgtggactacctggagaagcgcatcctttggattgacgccaggtcagatgccatttactcagcccgttacgacggctctggccacatggaggtgcttcggggacacgagttcctgtcgcacccgtttgcagtgacgctgtacgggggggaggtctactggactgactggcgaacaaacacactggctaaggccaacaagtggaccggccacaatgtcaccgtggtacagaggaccaacacccagccctttgacctgcaggtgtaccacccctcccgccagcccatggctcccaatccctgtgaggccaatgggggccagggcccctgctcccacctgtgtctcatcaactacaaccggaccgtgtcctgcgcctgcccccacctcatgaagctccacaaggacaacaccacctgctatgagtttaagaagttcctgctgtacgcacgtcagatggagatccgaggtgtggacctggatgctccctactacaactacatcatctccttcacggtgcccgacatcgacaacgtcacagtgctagactacgatgcccgcgagcagcgtgtgtactggtctgacgtgcggacacaggccatcaagcgggccttcatcaacggcacaggcgtggagacagtcgtctctgcagacttgccaaatgcccacgggctggctgtggactgggtctcccgaaacctgttctggacaagctatgacaccaataagaagcagatcaatgtggcccggctggatggctccttcaagaacgcagtggtgcagggcctggagcagccccatggccttgtcgtccaccctctgcgtgggaagctctactggaccgatggtgacaacatcagcatggccaacatggatggcagcaatcgcaccctgctcttcagtggccagaagggccccgtgggcctggctattgacttccctgaaagcaaactctactggatcagctccgggaaccataccatcaaccgctgcaacctggatgggagtgggctggaggtcatcgatgccatgcggagccagctgggcaaggccaccgccctggccatcatgggggacaagctgtggtgggctgatcaggtgtcggaaaagatgggcacatgcagcaaggctgacggctcgggctccgtggtccttcggaacagcaccaccctggtgatgcacatgaaggtctatgacgagagcatccagctggaccataagggcaccaacccctgcagtgtcaacaacggtgactgctcccagctctgcctgcccacgtcagagacgacccgctcctgcatgtgcacagccggctatagcctccggagtggccagcaggcctgcgagggcgtaggttcctttctcctgtactctgtgcatgagggaatcaggggaattcccctggatcccaatgacaagtcagatgccctggtcccagtgtccgggacctcgctggctgtcggcatcgacttccacgctgaaaatgacaccatctactgggtggacatgggcctgagcacgatcagccgggccaagcgggaccagacgtggcgtgaagacgtggtgaccaatggcattggccgtgtggagggcattgcagtggactggatcgcaggcaacatctactggacagaccagggctttgatgtcatcgaggtcgcccggctcaatggctccttccgctacgtggtgatctcccagggtctagacaagccccgggccatcaccgtccacccggagaaagggtacttgttctggactgagtggggtcagtatccgcgtattgagcggtctcggctagatggcacggagcgtgtggtgctggtcaacgtcagcatcagctggcccaacggcatctcagtggactaccaggatgggaagctgtactggtgcgatgcacggacagacaagattgaacggatcgacctggagacaggtgagaaccgcgaggtggttctgtccagcaacaacatggacatgttttcagtgtctgtgtttgaggatttcatctactggagtgacaggactcatgccaacggctctatcaagcgcgggagcaaagacaatgccacagactccgtgcccctgcgaaccggcatcggcgtccagcttaaagacatcaaagtcttcaaccgggaccggcagaaaggcaccaacgtgtgcgcggtggccaatggcgggtgccagcagctgtgcctgtaccggggccgtgggcagcgggcctgcgcctgtgcccacgggatgctggctgaagacggagcatcgtgccgcgagtatgccggctacctgctctactcagagcgcaccattctcaagagtatccacctgtcggatgagcgcaacctcaatgcgcccgtgcagcccttcgaggaccctgagcacatgaagaacgtcatcgccctggcctttgactaccgggcaggcacctctccgggcacccccaatcgcatcttcttcagcgacatccactttgggaacatccaacagatcaacgacgatggctccaggaggatcaccattgtggaaaacgtgggctccgtggaaggcctggcctatcaccgtggctgggacactctctattggacaagctacacgacatccaccatcacgcgccacacagtggaccagacccgcccaggggccttcgagcgtgagaccgtcatcactatgtctggagatgaccacccacgggccttcgttttggacgagtgccagaacctcatgttctggaccaactggaatgagcagcatcccagcatcatgcgggcggcgctctcgggagccaatgtcctgacccttatcgagaaggacatccgtacccccaatggcctggccatcgaccaccgtgccgagaagctctacttctctgacgccaccctggacaagatcgagcggtgcgagtatgacggctcccaccgctatgtgatcctaaagtcagagcctgtccaccccttcgggctggccgtgtatggggagcacattttctggactgactgggtgcggcgggcagtgcagcgggccaacaagcacgtgggcagcaacatgaagctgctgcgcgtggacatcccccagcagcccatgggcatcatcgccgtggccaacgacaccaacagctgtgaactctctccatgccgaatcaacaacggtggctgccaggacctgtgtctgctcactcaccagggccatgtcaactgctcatgccgagggggccgaatcctccaggatgacctcacctgccgagcggtgaattcctcttgccgagcacaagatgagtttgagtgtgccaatggcgagtgcatcaacttcagcctgacctgcgacggcgtcccccactgcaaggacaagtccgatgagaagccatcctactgcaactcccgccgctgcaagaagactttccggcagtgcagcaatgggcgctgtgtgtccaacatgctgtggtgcaacggggccgacgactgtggggatggctctgacgagatcccttgcaacaagacagcctgtggtgtgggcgagttccgctgccgggacgggacctgcatcgggaactccagccgctgcaaccagtttgtggattgtgaggacgcctcagatgagatgaactgcagtgccaccgactgcagcagctacttccgcctgggcgtgaagggcgtgctcttccagccctgcgagcggacctcactctgctacgcacccagctgggtgtgtgatggcgccaatgactgtggggactacagtgatgagcgcgactgcccaggtgtgaaacgccccagatgccctctgaattacttcgcctgccctagtgggcgctgcatccccatgagctggacgtgtgacaaagaggatgactgtgaacatggcgaggacgagacccactgcaacaagttctgctcagaggcccagtttgagtgccagaaccatcgctgcatctccaagcagtggctgtgtgacggcagcgatgactgtggggatggctcagacgaggctgctcactgtgaaggcaagacgtgcggcccctcctccttctcctgccctggcacccacgtgtgcgtccccgagcgctggctctgtgacggtgacaaagactgtgctgatggtgcagacgagagcatcgcagctggttgcttgtacaacagcacttgtgacgaccgtgagttcatgtgccagaaccgccagtgcatccccaagcacttcgtgtgtgaccacgaccgtgactgtgcagatggctctgatgagtcccccgagtgtgagtacccgacctgcggccccagtgagttccgctgtgccaatgggcgctgtctgagctcccgccagtgggagtgtgatggcgagaatgactgccacgaccagagtgacgaggctcccaagaacccacactgcaccagccaagagcacaagtgcaatgcctcgtcacagttcctgtgcagcagtgggcgctgtgtggctgaggcactgctctgcaacggccaggatgactgtggcgacagctcggacgagcgtggctgccacatcaatgagtgtctcagccgcaagctcagtggctgcagccaggactgtgaggacctcaagatcggcttcaagtgccgctgtcgccctggcttccggctgaaggacgacggccggacgtgtgctgatgtggacgagtgcagcaccaccttcccctgcagccagcgctgcatcaacactcatggcagctataagtgtctgtgtgtggagggctatgcaccccgcggcggcgacccccacagctgcaaggctgtgactgacgaggaaccgtttctgatcttcgccaaccggtactacctgcgcaagctcaacctggacgggtccaactacacgttacttaagcagggcctgaacaacgccgttgccttggattttgactaccgagagcagatgatctactggacagatgtgaccacccagggcagcatgatccgaaggatgcaccttaacgggagcaatgtgcaggtcctacaccgtacaggcctcagcaaccccgatgggctggctgtggactgggtgggtggcaacctgtactggtgcgacaaaggccgggacaccatcgaggtgtccaagctcaatggggcctatcggacggtgctggtcagctctggcctccgtgagcccagggctctggtggtggatgtgcagaatgggtacctgtactggacagactggggtgaccattcactgatcggccgcatcggcatggatgggtccagccgcagcgtcatcgtggacaccaagatcacatggcccaatggcctgacgctggactatgtcactgagcgcatctactgggccgacgcccgcgaggactacattgaatttgccagcctggatggctccaatcgccacgttgtgctgagccaggacatcccgcacatctttgcactgaccctgtttgaggactacgtctactggaccgactgggaaacaaagtccattaaccgagcccacaagaccacgggcaccaacaaaacgctcctcatcagcacgctgcaccggcccatggacctgcatgtcttccatgccctgcgccagccagacgtgcccaatcacccctgcaaggtcaacaatggtggctgcagcaacctgtgcctgctgtcccccgggggagggcacaaatgtgcctgccccaccaacttctacctgggcagcgatgggcgcacctgtgtgtccaactgcacggctagccagtttgtatgcaagaacgacaagtgcatccccttctggtggaagtgtgacaccgaggacgactgcggggaccactcagacgagcccccggactgccctgagttcaagtgccggcccggacagttccagtgctccacaggtatctgcacaaaccctgccttcatctgcgatggcgacaatgactgccaggacaacagtgacgaggccaactgtgacatccacgtctgcttgcccagtcagttcaaatgcaccaacaccaaccgctgtattcccggcatcttccgctgcaatgggcaggacaactgcggagatggggaggatgagagggactgccccgaggtgacctgcgcccccaaccagttccagtgctccattaccaaacggtgcatcccccgggtctgggtctgcgaccgggacaatgactgtgtggatggcagtgatgagcccgccaactgcacccagatgacctgtggtgtggacgagttccgctgcaaggattcgggccgctgcatcccagcgcgttggaagtgtgacggagaggatgactgtggggatggctcggatgagcccaaggaagagtgtgatgaacgcacctgtgagccataccagttccgctgcaagaacaaccgctgcgtgcccggccgctggcagtgcgactacgacaacgattgcggtgacaactccgatgaagagagctgcacccctcggccctgctccgagagtgagttctcctgtgccaacggccgctgcatcgcggggcgctggaaatgcgatggagaccacgactgcgcggacggctcggacgagaaagactgcaccccccgctgtgacatggaccagttccagtgcaagagcggccactgcatccccctgcgctggcgctgtgacgcagacgccgactgcatggacggcagcgacgaggaggcctgcggcactggcgtgcggacctgccccctggacgagttccagtgcaacaacaccttgtgcaagccgctggcctggaagtgcgatggcgaggatgactgtggggacaactcagatgagaaccccgaggagtgtgcccggttcgtgtgccctcccaaccggcccttccgttgcaagaatgaccgcgtctgtctgtggatcgggcgccaatgcgatggcacggacaactgtggggatgggactgatgaagaggactgtgagccccccacagcccacaccacccactgcaaagacaagaaggagtttctgtgccggaaccagcgctgcctctcctcctccctgcgctgcaacatgttcgatgactgcggggacggctctgacgaggaggactgcagcatcgaccccaagctgaccagctgcgccaccaatgccagcatctgtggggacgaggcacgctgcgtgcgcaccgagaaagcggcctactgtgcctgccgctcgggcttccacaccgtgcccggccagcccggatgccaagacatcaacgagtgcctgcgcttcggcacctgctcccagctctgcaacaacaccaagggcggccacctctgcagctgcgctcggaacttcatgaagacgcacaacacctgcaaggccgaaggctctgagtaccaggtcctgtacatcgctgatgacaatgagatccgcagcctgttccccggccacccccattcggcttacgagcaggcattccagggtgacgagagtgtccgcattgatgctatggatgtccatgtcaaggctggccgtgtctattggaccaactggcacacgggcaccatctcctaccgcagcctgccacctgctgcgcctcctaccacttccaaccgccaccggcgacagattgaccggggtgtcacccacctcaacatttcagggctgaagatgcccagaggcatcgccatcgactgggtggccggaaacgtgtactggaccgactcgggccgagatgtgattgaggtggcgcagatgaagggcgagaaccgcaagacgctcatctcgggcatgattgacgagccccacgccattgtggtggacccactgagggggaccatgtactggtcagactggggcaaccaccccaagattgagacggcagcgatggatgggacgcttcgggagacactggtgcaggacaacattcagtggcccacaggcctggccgtggattatcacaatgagcggctgtactgggcagacgccaagctttcagtcatcggcagcatccggctcaatggcacggaccccattgtggctgctgacagcaaacgaggcctaagtcaccccttcagcatcgacgtctttgaggattacatctatggtgtcacctacatcaataatcgtgtcttcaagatccataagtttggccacagccccttggtcaacctgacagggggcctgagccacgcctctgacgtggtcctttaccatcagcacaagcagcccgaagtgaccaacccatgtgaccgcaagaaatgcgagtggctctgcctgctgagccccagtgggcctgtctgcacctgtcccaatgggaagcggctggacaacggcacatgcgtgcctgtgccctctccaacgccccccccagatgctccccggcctggaacctgtaacctgcagtgcttcaacggtggcagctgtttcctcaatgcacggaggcagcccaagtgccgctgccaaccccgctacacgggtgacaagtgtgaactggaccagtgctgggagcactgtcgcaatgggggcacctgtgctgcctccccctctggcatgcccacgtgccggtgccccacgggcttcacgggccccaaatgcacccagcaggtgtgtgcgggctactgtgccaacaacagcacctgcactgtcaaccagggcaaccagccccagtgccgatgcctacccggcttcctgggcgaccgctgccagtaccggcagtgctctggctactgtgagaactttggcacatgccagatggctgctgatggctcccgacaatgccgctgcactgcctactttgagggatcgaggtgtgaggtgaacaagtgcagccgctgtctcgaaggggcctgtgtggtcaacaagcagagtggggatgtcacctgcaactgcacggatggccgggtggcccccagctgtctgacctgcgtcggccactgcagcaatggcggctcctgtaccatgaacagcaaaatgatgcctgagtgccagtgcccaccccacatgacagggccccggtgtgaggagcacgtcttcagccagcagcagccaggacatatagcctccatcctaatccctctgctgttgctgctgctgctggttctggtggccggagtggtattctggtataagcggcgagtccaaggggctaagggcttccagcaccaacggatgaccaacggggccatgaacgtggagattggaaaccccacctacaagatgtacgaaggcggagagcctgatgatgtgggaggcctactggacgctgactttgccctggaccctgacaagcccaccaacttcaccaaccccgtgtatgccacactctacatggggggccatggcagtcgccactccctggccagcacggacgagaagcgagaactcctgggccggggccctgaggacgagataggggaccccttggcatagggccctgccccgtcggactgcccccagaaagcctcctgccccctgccagtgaagtccttcagtgagcccctccccagccagcccttccctggccccgccggatgtataaatgtaaaaatgaaggaattacattttatatgtgagcgagcaagccggcaagcgagcacagtattatttctccatcccctccctgcctgctccttggcacccccatgctgccttcagggagacaggcagggagggcttggggctgcacctcctaccctcccaccagaacgcaccccactgggagagctggtggtgcagccttcccctccctgtataagacactttgccaaggctctcccctctcgccccatccctgcttgcccgctcccacagcttcctgagggctaattctgggaagggagagttctttgctgcccctgtctggaagacgtggctctgggtgaggtaggcgggaaaggatggagtgttttagttcttgggggaggccaccccaaaccccagccccaactccaggggcacctatgagatggccatgctcaacccccctcccagacaggccctccctgtctccagggcccccaccgaggttcccagggctggagacttcctctggtaaacattcctccagcctcccctcccctggggacgccaaggaggtgggccacacccaggaagggaaagcgggcagccccgttttggggacgtgaacgttttaataatttttgctgaattcctttacaactaaataacacagatattgttataaataaaattgtaaaaaaaaaaa

SEQ ID NO: 149661 - DNA, 2169 bp, Homo sapiens
  Payload ID: 9562
  Gene Symbol: LRP1
  Gene Name: low density lipoprotein receptor-related protein 1
  Uniprot ID: Q07954
  ENST ID: ENST00000338962
  CDS Start-End: 250-1128
gcgggggggtggggtgaagggtttggatttcggggcagggggcgcacccccgtcagcaggccctccccaaggggctcggaactctacctcttcacccacgcccctggtgcgctttgccgaaggaaagaataagaacagagaaggaggagggggaaaggaggaaaagggggaccccccaactggggggggtgaaggagagaagtagcaggaccagaggggaaggggctgctgcttgcatcagcccacaccatgctgaccccgccgttgctcctgctgctgcccctgctctcagctctggtcgcggcggctatcgacgcccctaagacttgcagccccaagcagtttgcctgcagagatcaaataacctgtatctcaaagggctggcggtgcgacggtgagagggactgcccagacggatctgacgaggcccctgagatttgtccacagagtaaggcccagcgatgccagccaaacgagcataactgcctgggtactgagctgtgtgttcccatgtcccgcctctgcaatggggtccaggactgcatggacggctcagatgaggggccccactgccgagagctccaaggcaactgctctcgcctgggctgccagcaccattgtgtccccacactcgatgggcccacctgctactgcaacagcagctttcagcttcaggcagatggcaagacctgcaaagattttgatgagtgctcagtgtacggcacctgcagccagctatgcaccaacacagacggctccttcatatgtggctgtgttgaaggatacctcctgcagccggataaccgctcctgcaaggccaagaacgagccagtagaccggccccctgtgctgttgatagccaactcccagaacatcttggccacgtacctgagtggggcccaggtgtctaccatcacacctacgagcacgcggcagaccacagccatggacttcagctatgccaacgagaccgtatgctgggtgcatgttggggacagtgctgctcagacgcagctcaagtgtgcccgcatgcctggcctaaagggcttcgtggatgagcacaccatcaacatctccctcagtctgcacctgtgtgtgttttcgaaatcacaacaggaaatggggtagtgatttgtctagaggggaggcaaagaaggggcagacagcagtccctctgagtctaatgaactggctgctgctgctggaaggggtgctacctccccactgtgctgggcacccctggaccctctcagcctcccaccctgcctacaaagcacttccagacttcacatgtgaaagctaaccatgcccatccttggcctttctgacccatgggatgccaggctgtttggggaggggtggctctagccaccccactctttggccttaggccccctgcatcctggcacttttgcttcccattcctgttctgagtttcctaatcatttaacagctcactcttgctcctcctctctcctggcccgggccagccctgtgtctcccggcccagatccagccctgtcctctcctcccccgctgtctccttgaaattgcctctccacccagactgctcccagcactccccttgctgttttcaagccaaaggaagtaacttaagcaagagagatgtgttttagagcccggcaaggatttctcaatagagggaagaccctaagatgggctgagtggaatccaggcatcatccctgggatctaggtcgaaatgcctcttggggacctaagccaggcaggggaaggtagcaggacataaccacaggctggaatcacaggcaggagcaggaagagagcccaggagaacgaggtgacacaacacggctaagctccagactggctggtggaaggaagagctgaagtcgggacccagcaggaaacaaggagcatgaggccacatcgtttagcagagcttctgccaggctcgccaggaggtctccttcccaccttcgaagtcctcagactctccgccatctctcccaggcccaggcgagatccctgagtaggattactagacagactgtcctctcccactgtcttggagtgtcccaaggccagagaggcaggatcctggcagtagaagagagggggaaaatgatgtcccagctctagaacaacagactcagtcttcaataaatatttgttcaatggatcaata

SEQ ID NO: 149662 - DNA, 550 bp, Homo sapiens
  Payload ID: 9562
  Gene Symbol: LRP1
  Gene Name: low density lipoprotein receptor-related protein 1
  ENST ID: ENST00000555124
  CDS Start-End: 1-550
aatgggcaggacaactgcggagatggggaggatgagagggactgccccgaggtgacctgcgcccccaaccagttccagtgctccattaccaaacggtgcatcccccgggtctgggtctgcgaccgggacaatgactgtgtggatggcagtgatgagcccgccaactgcacccagatgacctgtggtgtggacgagttccgctgcaaggattcgggccgctgcatcccagcgcgttggaagtgtgacggagaggatgactgtggggatggctcggatgagcccaaggaagagtgtggtgagccgagaccccactccaggaggaagacagtctacctggatgaacgcacctgtgagccataccagttccgctgcaagaacaaccgctgcgtgcccggccgctggcagtgcgactacgacaacgattgcggtgacaactccgatgaagagagctgcacccctcggccctgctccgagagtgagttctcctgtgccaacggccgctgcatcgcggggcgctggaaatgcgatggagaccacgactgcgcggacg

SEQ ID NO: 149663 - DNA, 1693 bp, Homo sapiens
  Payload ID: 9562
  Gene Symbol: LRP1
  Gene Name: low density lipoprotein receptor-related protein 1
  ENST ID: ENST00000553277
  CDS Start-End: 473-1363
ggggaacagcggtgcgagctccaggcccatgcactgaggaggcggaaacaaggggagcccccagagctccatcaagccccctccaaaggctcccctacccggtccacgccccccaccccccctccccgcctcctcccaattgtgcatttttgcagccggaggcggctccgagatggggctgtgagcttcgcccggggagggggaaagagcagcgaggagtgaagcgggggggtggggtgaagggtttggatttcggggcagggggcgcacccccgtcagcaggccctccccaaggggctcggaactctacctcttcacccacgcccctggtgcgctttgccgaaggaaagaataagaacagagaaggaggagggggaaaggaggaaaagggggaccccccaactggggggggtgaaggagagaagtagcaggaccagaggggaaggggctgctgcttgcatcagcccacaccatgctgaccccgccgttgctcctgctgctgcccctgctctcagctctggtcgcggcggctatcgacgcccctaagacttgcagccccaagcagtttgcctgcagagatcaaataacctgtatctcaaagggctggcggtgcgacggtgagagggactgcccagacggatctgacgaggcccctgagatttgtccacagagtaaggcccagcgatgccagccaaacgagcataactgcctgggtactgagctgtgtgttcccatgtcccgcctctgcaatggggtccaggactgcatggacggctcagatgaggggccccactgccgagagctccaaggcaactgctctcgcctgggctgccagcaccattgtgtccccacactcgatgggcccacctgctactgcaacagcagctttcagcttcaggcagatggcaagacctgcaaagattttgatgagtgctcagtgtacggcacctgcagccagctatgcaccaacacagacggctccttcatatgtggctgtgttgaaggatacctcctgcagccggataaccgctcctgcaaggccaagaacgagccagtagaccggccccctgtgctgttgatagccaactcccagaacatcttggccacgtacctgagtggggcccaggtgtctaccatcacacctacgagcacgcggcagaccacagccatggacttcagctatgccaacgagaccgtatgctgggtgcatgttggggacagtgctgctcagacgcagctcaagtgtgcccgcatgcctggcctaaagggcttcgtggatgagcacaccatcaacatctccctcagtctgcaccgcaggagcaggaagagagcccaggagaacgaggtgacacaacacggctaagctccagactggctggtggaaggaagagctgaagtcgggacccagcaggaaacaaggagcatgaggccacatcgtttagcagagcttctgccaggctcgccaggaggtctccttcccaccttcgaagtcctcagactctccgccatctctcccaggcccaggcgagatccctgagtaggattactagacagactgtcctctcccactgtcttggagtgtcccaaggccagagaggcaggatcctggcagtagaagagagggggaaaatgatgtcccagctctagaacaacagactcagtcttcaataaatatttgttcaatggatcaata

SEQ ID NO: 149664 - DNA, 418 bp, Homo sapiens
  Payload ID: 9562
  Gene Symbol: LRP1
  Gene Name: low density lipoprotein receptor-related protein 1
  ENST ID: ENST00000554118
  CDS Start-End: 1-418
cccgcccaggggccttcgagcgtgagaccgtcatcactatgtctggagatgaccacccacgggccttcgttttggacgagtgccagaacctcatgttctggaccaactggaatgagcagcatcccagcatcatgcgggcggcgctctcgggagccaatgtcctgacccttatcgagaaggacatccgtacccccaatggcctggccatcgaccaccgtgccgagaagctctacttctctgacgccaccctggacaagatcgagcggtgcgagtatgacggctcccaccgctatgtgaactctctccatgccgaatcaacaacggtggctgccaggacctgtgtctgctcactcaccagggccatgtcaactgctcatgccgagggggccgaatcctccaggatgacctcacctgccga

SEQ ID NO: 149665 - DNA, 2175 bp, Homo sapiens
  Payload ID: 9562
  Gene Symbol: LRP1
  Gene Name: low density lipoprotein receptor-related protein 1
  ENST ID: ENST00000554174
  CDS Start-End: 57-1376
ggagagaagtagcaggaccagaggggaaggggctgctgcttgcatcagcccacaccatgctgaccccgccgttgctcctgctgctgcccctgctctcagctctggtcgcggcggctatcgacgcccctaagacttgcagccccaagcagtttgcctgcagagatcaaataacctgtatctcaaagggctggcggtgcgacggtgagagggactgcccagacggatctgacgaggcccctgagatttgtccacagagtaaggcccagcgatgccagccaaacgagcataactgcctgggtactgagctgtgtgttcccatgtcccgcctctgcaatggggtccaggactgcatggacggctcagatgaggggccccactgccgagagctccaaggcaactgctctcgcctgggctgccagcaccattgtgtccccacactcgatgggcccacctgctactgcaacagcagctttcagcttcaggcagatggcaagacctgcaaagattttgatgagtgctcagtgtacggcacctgcagccagctatgcaccaacacagacggctccttcatatgtggctgtgttgaaggatacctcctgcagccggataaccgctcctgcaaggccaagaacgagccagtagaccggccccctgtgctgttgatagccaactcccagaacatcttggccacgtacctgagtggggcccaggtgtctaccatcacacctacgagcacgcggcagaccacagccatggacttcagctatgccaacgagaccgtatgctgggtgcatgttggggacagtgctgctcagacgcagctcaagtgtgcccgcatgcctggcctaaagggcttcgtggatgagcacaccatcaacatctccctcagtctgcaccacgtggaacagatggccatcgactggctgacaggcaacttctactttgtggatgacatcgatgataggatctttgtctgcaacagaaatggggacacatgtgtcacattgctagacctggaactctacaaccccaagggcattgccctggaccctgccatggggaaggtgtttttcactgactatgggcagatcccaaaggtggaacgctgtgacatggatgggcagaaccgcaccaagctcgtcgacagcaagattgtgtttcctcatggcatcacgctggacctggtcagccgccttgtctactgggcagatgcctatctggactatattgaagtggtggactatgagggcaagggccgccagaccatcatccagggcatcctggtgagggagctactgtctgaggttttgtgggggaaccatgatccagggccttctggtgaggggggaagcctctgtaggggaaccgttctctgagtctcctggtaaagagcgtggatgccccaggcctctagtgggagtggggtgggcttgaatactgcagagaaaggacaagatacgggttccactgtgatgggaacagtcattttagaaacaccacttctgtttacttcctgtttctcatttgacccttataataacccctagctgatgaacagggaggtggttcagttccctttcagcagatgaaaaagcaggatcaaagaggttaggtgatttgcctgtgtttacaaagccgggtgatagcactggaacttgttctagaagccttgctggctcagaggtggcatctccattgtgggataattagtgtgagcaaccagcccagtttgcctaggactgtcccagttttagccctgaaagtctggtaagccagcaaacccttacctttgtcttaggcaaactaggacagttggccaccgcagataagctatgtgggtagtcaggggtgttacaggacttgcttggggcaagtgtgtcctcttagccctcataacagactaagaatgtcctctgtggacagagtttagagcccatctctaattcagtctaaaatcactaaagtgtctaacgagtgcctaattctgtgaaggacagggtttctgccctcaaggggtctgagtagagtgggtgagataagtccacaaatcactgtgccagacacggatagatagcagtgtcacggaggatgtatagaaggagaaaacatctctggttagaagattccataaattctttaaagacatgctctgtagaggatgagtgggatcttggt

SEQ ID NO: 149666 - DNA, 6886 bp, Homo sapiens
  Payload ID: 9563
  Gene Symbol: LRP10
  Gene Name: low density lipoprotein receptor-related protein 10
  Uniprot ID: Q7Z4F1
  ENST ID: ENST00000359591
  CDS Start-End: 692-2833
aaatgtggaagctgaagctgcaagtcaagggcccgtctgacaagtccggcagggccgggaaaggggttaaggcgagcaagtgggtgtggcccgtgcgttgattggcaggggtgggaccgggcttgtcacccgccccggctactccaacccctgggcgggcgggggtaccgcctgggcaagggccggggcgccgggccgagccacctcttcccctcccccgcttccctgtcgcgctccgctggctggacgcgctggaggagtggagcagcacccggccggccctgggggctgacagtcggcaaagtttggcccgaagaggaagtggtctcaaaccccggcaggtggcgaccaggccagaccaggggcgctcgctgcctgcgggcgggctgtaggcgagggcgcgccccagtgccgagacccggggcttcaggagccggccccgggagagaagagtgcggcggcggacggagaaaacaactccaaagttggcgaaaggcaccgcccctactcccgggctgccgccgcctccccgcccccagccctggcatccagagtacgggtcgagcccgggccatggagcccccctggggaggcggcaccagggagcctgggcgcccggggctccgccgcgaccccatcgggtagaccacagaagctccgggacccttccggcacctctggacagcccaggatgctgttggccaccctcctcctcctcctccttggaggcgctctggcccatccagaccggattatttttccaaatcatgcttgtgaggaccccccagcagtgctcttagaagtgcagggcaccttacagaggcccctggtccgggacagccgcacctcccctgccaactgcacctggctcatcctgggcagcaaggaacagactgtcaccatcaggttccagaagctacacctggcctgtggctcagagcgcttaaccctacgctcccctctccagccactgatctccctgtgtgaggcacctcccagccctctgcagctgcccgggggcaacgtcaccatcacttacagctatgctggggccagagcacccatgggccagggcttcctgctctcctacagccaagattggctgatgtgcctgcaggaagagtttcagtgcctgaaccaccgctgtgtatctgctgtccagcgctgtgatggggttgatgcctgtggcgatggctctgatgaagcaggttgcagctcagaccccttccctggcctgaccccaagacccgtcccctccctgccttgcaatgtcaccttggaggacttctatggggtcttctcctctcctggatatacacacctagcctcagtctcccacccccagtcctgccattggctgctggacccccatgatggccggcggctggccgtgcgcttcacagccctggacttgggctttggagatgcagtgcatgtgtatgacggccctgggccccctgagagctcccgactactgcgtagtctcacccacttcagcaatggcaaggctgtcactgtggagacactgtctggccaggctgttgtgtcctaccacacagttgcttggagcaatggtcgtggcttcaatgccacctaccatgtgcggggctattgcttgccttgggacagaccctgtggcttaggctctggcctgggagctggcgaaggcctaggtgagcgctgctacagtgaggcacagcgctgtgacggctcatgggactgtgctgacggcacagatgaggaggactgcccaggctgcccacctggacacttcccctgtggggctgctggcacctctggtgccacagcctgctacctgcctgctgaccgctgcaactaccagactttctgtgctgatggagcagatgagagacgctgtcggcattgccagcctggcaatttccgatgccgggacgagaagtgcgtgtatgagacgtgggtgtgcgatgggcagccagactgtgcggacggcagtgatgagtgggactgctcctatgttctgccccgcaaggtcattacagctgcagtcattggcagcctagtgtgcggcctgctcctggtcatcgccctgggctgcacctgcaagctctatgccattcgcacccaggagtacagcatctttgcccccctctcccggatggaggctgagattgtgcagcagcaggcacccccttcctacgggcagctcattgcccagggtgccatcccacctgtagaagactttcctacagagaatcctaatgataactcagtgctgggcaacctgcgttctctgctacagatcttacgccaggatatgactccaggaggtggcccaggtgcccgccgtcgtcagcggggccgcttgatgcgacgcctggtacgccgtctccgccgctggggcttgctccctcgaaccaacaccccggctcgggcctctgaggccagatcccaggtcacaccttctgctgctccccttgaggccctagatggtggcacaggtccagcccgtgagggcggggcagtgggtgggcaagatggggagcaggcacccccactgcccatcaaggctcccctcccatctgctagcacgtctccagcccccactactgtccctgaagccccagggccactgccctcactgcccctagagccatcactattgtctggagtggtgcaggccctgcgaggccgcctgttgcccagcctggggcccccaggaccaacccggagcccccctggaccccacacagcagtcctggccctggaagatgaggacgatgtgctactggtgccactggctgagccgggggtgtgggtagctgaggcagaggatgagccactgcttacctgaggggacctgggggctctactgaggcctctcccctgggggctctactcatagtggcacaaccttttagaggtgggtcagcctcccctccaccacttccttccctgtccctggatttcagggacttggtgggcctcccgttgaccctatgtagctgctataaagttaagtgtccctcaggcagggagagggctcacagagtctcctctgtacgtggccatggccagacaccccagtcccttcaccaccacctgctccccacgccaccaccatttgggtggctgtttttaaaaagtaaagttcttagaggatcataggtctggacactccatccttgccaaacctctacccaaaagtggccttaagcaccggaatgccaattaactagagaccctccagcccccaaggggaggatttgggcagaacctgaggttttgccatccacaatccctcctacagggcctggctcacaaaaagagtgcaacaaatgcttctattccatagctacggcattgctcagtaagttgaggtcaaaaataaaggaatcatacatctcaaaattttgcaaattagctgcgagcctgagccccgcctctgcccatctcagtctatgctcacctcatcccactcctccctgtggagccctttgcttggccctctacctcctgccctcttcctgttcatctcccaaccactgcactcttgatttttataccacacagaaggtaagaaaattctaggaaccctaaggatcaatcctctccattttcactcaaatgcctggggcccagctctgcaatgactgactccagggcctctttcctcactgccagcatagaagtcaggggagccagctgggccctgcggtcaggaaggttctcatttttggagcataccctgagcccagatcataggagcagctgtccctggtgggacacaggagtcatgactcctaccctccaccctccacacccaccaggcatttagcagtctgtcctatgcaagacagatgaattctcagccaggatacctcaaggcaggcaaaggtgagtggagggagaattcacaaacattcagggtgtgtggtgctggcatcaccatggccaaatccaagaggtcttcctggaagagggcccaaactggaaccaaaagaatgctgtcagcagttggaatagagctgtgaattctagacagggggagtgtccccagaacaagcaaacggaggagacaagagggcaagggttataggaaagaccctgggcctgagagcacaagcagcggccagagctgcagcgctggggtgggtgatggagggaatgattcgcaagcagtgttggaacccagcccctagtgagcaaagtgacagaagctgccccagagtttggaaggaagatcgaggcagaagatgtagaaggaagctgtgggggtgggagtgatgcctcaggaacaaaactgaggaattccctaacggacccagtccctggggaaagaggctcccctcaggctctccttgtctagccccacacctggcagagcctgtcacccagcctagccccacgcctggcagagcccatcacccagcctagccccacacctggtggagaggccctgttgattacaccctgtcagcctcctcaaacccagcactaattgcacaattttcctctcttctagtgagcaagagcctgaggaagtagcagagaggggtgtgggcccatgtgcagttctgggaccctggcaccttggctcagggaagacccgagctcctttcactgcagaccctctccagagactggggagagggctctggagaacctggttcttgcttactgttctccctttgggccctccttcccaaacgcaaacaatccaggatccactcagcgtcaggcccaatggaaatagtgaagcagtgattttccctcccctgcctctccatagcctggtcttttgccctctcctttgctcttctcttcccccatagccacctcaaatacctgcagcctgatatcttcatcccttcatccagaccttttctctcctagtggtattgcaaactgaaagtggacaaagacttaaggtaaacctgctcctcatggtggaatgcttccaaatgctggaaggaggactttagggcagagttcactaaggaggcttgtgcttatagatcagtgggcctgaaagaagtttctctaggttctggttgtgtgctgtacgaggtgtaggtagtaataatactcttgtcagccacagtgaagccccaagctagccgggataggggactgaccttgtacaggcagcatggagaaactaagacagagtgtcctgcccaagtgatggcactggggagcagtcactcaggtttatttccaccagggcccaagaaaaaaagaaatgaggcaacctaaaattccatcaagatagataccaatatccaaggtgcttggtcttagcggtgtgggacccacgttaaggctcttggtgggaaggtgggaggtgttttcagcatgagatagggttcaggctgtgaatcagagtctagagcctaagataaaagaagataccagggctgggccacggtggctttcgcctgtaatcctagcactttgggaggccaaggcaggcagactgcctgagctcaggagttcgagactagcctgagcaacacggtgaaaccctgtctctactaaaatacaaaaaagtagccaggtgtggcggcatgcacctgtagtcccagctactcgagaggctgaggcaggagaattgcttgaacccgggaggcggaggttgcagtgagtggagatcgcgccactgcactctagcctgggtgacagagcgagactccttctccaaaaaaaaagaaaagaagataccagaactcagtccttaagaaacaaaattctgccaggcgcagtagctcacacctgtaatcccagcactttggaggggccaaggcaggcggatcgcttgaggccaagagttcaagaacagcctgggcaacatgatgaaaccctgtctctaccaaaaatactaaaaattagccagtctcacaacctggtctcaaaataaataaatagatttaaaaaaaaaatcatgggcctgaaccaagctccagacctcactaggaggggagaaggaccccccagccacacagcccaaggctgcagaagcacctaggtggttagagagtgagtgcctggatggggcgcagtggctcacacctgtaatcccagcactttgggaggccgaggcaggcggatcacgaggtcaagagatcaagaccatcctggccaacatggtgacaccgtgtctctactaaaaatacaaaaataagctgggcatggtggtgcgtgcctgtagtcccatctactcgggaggctgaagcaggagaatcacttgaacctgggaggcaaaggttgcagtgagctgagatcgcgccactgcactccagcctggcaacagagcgagacaagactccatctcaaaaaaaaaagtgagtgcccgatgatgccagattcttcatcacctgaagtgaacccacacaacagggctgggccatgggcatcataaaccccattttgcaagctcaggaggagctttagggaaatcagaagactggcccagtctctaccaagtggtggatttagagccggcatggcttcgttccaaatctcacccttgtcccaccattccatgggacctcccattcctgagggagcctggatacgggcaagtgcacaacccgggaggttgaggttacagtgagccatgatcgcaccactgcagtccagcccgagcaatagggtgagaccctccctctgaaaaaaataaaaatactcattttggaaggaagtcattctaaaatgttacacttgtcttcagcatatctgcaatataataattttctgcataactgaggatcattcacagaaaccaatggcttttctccagcagtgtcttctgaagttgtaacagtaggggcacggggagctatttgcttttatgctaaatgaccttagaccacttataaaatgcatatgagtgctttaaatgtta

SEQ ID NO: 149667 - DNA, 1780 bp, Homo sapiens
  Payload ID: 9563
  Gene Symbol: LRP10
  Gene Name: low density lipoprotein receptor-related protein 10
  Uniprot ID: Q7Z4F1
  ENST ID: ENST00000546834
  CDS Start-End: 1-1671
atgctgttggccaccctcctcctcctcctccttggaggcgctctggcccatccagaccggattatttttccaaatcatgcttgtgaggaccccccagcagtgctcttagaagtgcagggcaccttacagaggcccctggtccgggacagccgcacctcccctgccaactgcacctggctcatcctgggcagcaaggaacagactgtcaccatcaggttccagaagctacacctggcctgtggctcagagcgcttaaccctacgctcccctctccagccactgatctccctgtgtgaggcacctcccagccctctgcagctgcccgggggcaacgtcaccatcacttacagctatgctggggccagagcacccatgggccagggcttcctgctctcctacagccaagattggctgatgtgcctgcaggaagagtttcagtgcctgaaccaccgctgtgtatctgctgtccagcgctgtgatggggttgatgcctgtggcgatggctctgatgaagcaggttgcagctcagaccccttccctggcctgaccccaagacccgtcccctccctgccttgcaatgtcaccttggaggacttctatggggtcttctcctctcctggatatacacacctagcctcagtctcccacccccagtcctgccattggctgctggacccccatgatggccggcggctggccgtgcgcttcacagccctggacttgggctttggagatgcagtgcatgtgtatgacggccctgggccccctgagagctcccgactactgcgtagtctcacccacttcagcaatggcaaggctgtcactgtggagacactgtctggccaggctgttgtgtcctaccacacagttgcttggagcaatggtcgtggcttcaatgccacctaccatgtgcggggctattgcttgccttgggacagaccctgtggcttaggctctggcctgggagctggcgaaggcctaggtgagcgctgctacagtgaggcacagcgctgtgacggctcatgggactgtgctgacggcacagatgaggaggactgcccaggctgcccacctggacacttcccctgtggggctgctggcacctctggtgccacagcctgctacctgcctgctgaccgctgcaactaccagactttctgtgctgatggagcagatgagagacgctgtcggcattgccagcctggcaatttccgatgccgggacgagaagtgcgtgtatgagacgtgggtgtgcgatgggcagccagactgtgcggacggcagtgatgagtgggactgctcctatgttctgccccgcaaggtcattacagctgcagtcattggcagcctagtgtgcggcctgctcctggtcatcgccctgggctgcacctgcaagctctatgccattcgcacccaggagtacagcatctttgcccccctctcccggatggaggctgagattgtgcagcagcaggcacccccttcctacgggcagctcattgcccagggtgccatcccacctgtagaagactttcctacagagaatcctaatgataactcagtgctgggcaacctgcgttctctgctacagatcttacgccaggatatgactccaggaggtggcccaggtgcccgccgtcgtcagcggggccgcttgatgcgacgcctgtgagcaagagcctgaggaagtagcagagaggggtgtgggcccatgtgcagttctgggaccctggcaccttggctcagggaagacccgagctcctttcactgcagaccctctc

SEQ ID NO: 149668 - DNA, 2566 bp, Homo sapiens
  Payload ID: 9563
  Gene Symbol: LRP10
  Gene Name: low density lipoprotein receptor-related protein 10
  ENST ID: ENST00000551466
  CDS Start-End: 1-1375
ggcacctcccagccctctgcagctgcccgggggcaacgtcaccatcacttacagctatgctggggccagagcacccatgggccagggcttcctgctctcctacagccaagattggctgatgtgcctgcaggaagagtttcagtgcctgaaccaccgctgtgtatctgctgtccagcgctgtgatggggttgatgcctgtggcgatggctctgatgaagcaggttgcagctcagaccccttccctggcctgaccccaagacccgtcccctccctgccttgcaatgtcaccttggaggacttctatggggtcttctcctctcctggatatacacacctagcctcagtctcccacccccagtcctgccattggctgctggacccccatgatggccggcggctggccgtgcgcttcacagccctggacttgggctttggagatgcagtgcatgtgtatgacggccctgggccccctgagagctcccgactactgcgtagtctcacccacttcagcaatggcaaggctgtcactgtggagacactgtctggccaggctgttgtgtcctaccacacagttgcttggagcaatggtcgtggcttcaatgccacctaccatgtgcggggctattgcttgccttgggacagaccctgtggcttaggctctggcctgggagctggcgaaggcctaggtgagcgctgctacagtgaggcacagcgctgtgacggctcatgggactgtgctgacggcacagatgaggaggactgcccaggctgcccacctggacacttcccctgtggggctgctggcacctctggtgccacagcctgctacctgcctgctgaccgctgcaactaccagactttctgtgctgatggagcagatgagagacgctgtcggcattgccagcctggcaatttccgatgccgggacgagaagtgcgtgtatgagacgtgggtgtgcgatgggcagccagactgtgcggacggcagtgatgagtgggactgctcctatgttctgccccgcaaggtcattacagctgcagtcattggcagcctagtgtgcggcctgctcctggtcatcgccctgggctgcacctgcaagctctatgccattcgcacccaggagtacagcatctttgcccccctctcccggatggaggctgagattgtgcagcagcaggcacccccttcctacgggcagctcattgcccagggtgccatcccacctgtagaagactttcctacagagaatcctaatgataactcagtgctgggcaacctgcgttctctgctacagatcttacgccaggatatgactccaggaggtggcccaggtgcccgccgtcgtcagcggggccgcttgatgcgacgcctgtgagcaagagcctgaggaagtagcagagaggggtgtgggcccatgtgcagttctgggaccctggcaccttggctcagggaagacccgagctcctttcactgcagaccctctccagagactggggagagggctctggagaacctggttcttgcttactgttctccctttgggccctccttcccaaacgcaaacaatccaggatccactcagcgtcaggcccaatggaaatagtgaagcagtgattttccctcccctgcctctccatagcctggtcttttgccctctcctttgctcttctcttcccccatagccacctcaaatacctgcagcctgatatcttcatcccttcatccagaccttttctctcctagtggtattgcaaactgaaagtggacaaagacttaaggtaaacctgctcctcatggtggaatgcttccaaatgctggaaggaggactttagggcagagttcactaaggaggcttgtgcttatagatcagtgggcctgaaagaagtttctctaggttctggttgtgtgctgtacgaggtgtaggtagtaataatactcttgtcagccacagtgaagccccaagctagccgggataggggactgaccttgtacaggcagcatggagaaactaagacagagtgtcctgcccaagtgatggcactggggagcagtcactcaggtttatttccaccagggcccaagaaaaaaagaaatgaggcaacctaaaattccatcaagatagataccaatatccaaggtgcttggtcttagcggtgtgggacccacgttaaggctcttggtgggaaggtgggaggtgttttcagcatgagatagggttcaggctgtgaatcagagtctagagcctaagataaaagaagataccagggctgggccacggtggctttcgcctgtaatcctagcactttgggaggccaaggcaggcagactgcctgagctcaggagttcgagactagcctgagcaacacggtgaaaccctgtctctactaaaatacaaaaaagtagccaggtgtggcggcatgcacctgtagtcccagctactcgagaggctgaggcaggagaattgcttgaacccgggaggcggaggttgcagtgagtggagatcgcgccactgcactctagcctgggtgacagagcgagactccttctccaaaaaaaaagaaaagaa

SEQ ID NO: 149669 - DNA, 3260 bp, Homo sapiens
  Payload ID: 9564
  Gene Symbol: LRP11
  Gene Name: low density lipoprotein receptor-related protein 11
  Uniprot ID: Q86VZ4
  ENST ID: ENST00000239367
  CDS Start-End: 7-1509
gtcgccatggcctccgtcgcccaggagagcgcgggctcgcagcgccggctaccgccgcgtcacggggcgctgcgcgggctgctactgctctgcctgtggctgccaagcggccgtgcggccttgccgcccgcggcgccgctgtccgaactgcacgcgcagctgtcgggcgtggagcagctgctggaggagttccgccggcaactgcagcaggagcggcctcaggaggagctggagctggagctgcgcgcgggcggcggcccccaggaggactgcccgggcccgggcagcggcggctacagcgcaatgcctgacgccatcatccgcaccaaggactccctggcggcgggtgccagcttcctgcgggcgccggcggccgtgcggggctggcggcaatgcgtggcggcctgctgctccgagccgcgctgctccgtggccgtggtggagctgccccggcgccccgcgcccccggcagccgtgctcggctgctacctcttcaactgcacggcgcgcggccgcaacgtctgcaagttcgcgctgcacagcggctacagcagctacagcctcagccgcgcgccggacggcgccgccctggccaccgcgcgcgcctcgccccggcaggaaaaggatgcgcctccacttagcaaggctgggcaggatgtggttctgcatctgcccacagacggggtggttctagacggccgcgagagcacagatgaccacgccatcgtccagtatgagtgggcactgctgcagggggacccgtcagtggacatgaaggtgcctcaatcaggaaccctgaagctgtcccacctacaggagggaacctacaccttccagctgaccgtgacggacactgccgggcagagaagctctgacaacgtgtcagtgacagtgcttcgcgcagcctactccacaggaggatgtttgcacacttgctcacgctaccacttcttctgtgacgatggctgctgcattgacatcacgctcgcctgcgatggagtgcagcagtgtcctgatgggtctgatgaagacttctgccagaatctgggcctggaccgcaagatggtaacccacacggcagctagtcctgccctgccaagaaccacagggccgagtgaagatgcagggggtgactccttggtggaaaagtctcagaaagccactgccccaaacaagccacctgcattatcaaacacagagaagaggaatcattccgccttttggggaccagagagtcaaatcattcctgtgatgccagatagtagttcctcagggaagaacagaaaagaggaaagttatatatttgagtcaaagggtgatggaggaggaggggaacacccagccccagaaacaggtgcagtgctacccctggcgctgggtttggctatcactgctctgctgcttctcatggttgcatgccgactacgactggtgaaacagaaactgaaaaaagctcgtcccattacatctgaggaatcggactacctcataaatgggatgtatctatagtaatgtaatttcaataccttggggcagggacatgttttgtttataatttatacatctattaagttctggatatttacagcttcttttgtttttaattgggccagaagattctgcaaatcccaaatctttctttattatttattgtaaaaaaagtttccttagaagtcataaaatattttgaaatttagagaggaattcatgattaaagattcctaaaaatataattctgatttatgtaagctgtccctgaaaatagaaatgtgtacttagctgagagaaaattcagcatctcaggaggtggtattaggatgactgtgttaacccattaccttttagaagccaactgttggccccttaccatgctggactgctataggcccagcttccccttgttctgtggcccttttcttcctccttgaagctcccagtattctttttcttttcccctctaaacctgtttctgagagtggatctcaagcaagttcatgccttcaatcagatgttacttagggtgggtatacctaaattataaaccttatgtacaagtcagtaagccttagggaaggtgagtgtgggtccttcctaatccctctgacgtcatgtcatataggtggctgcctccttagactgacctttgggagaaaaaaaccccagactttgaattagtaacagctctaagatggtcatgcagtgagataggaaatcaagatggaagcagagaatctggcatgccaaaaactaacagaaacttagttgaaggcaaagagagcaaggagaacgtttaatacttcattacatcaaatcaacactgctccatggtgagagcacagcaactcatttatatatatatatataggctttgttgatgaaaaacgacaattgaagagaggacgttgagtggattcctgggtacagcttttgtaaaaatgtcaccatggctttcatccaatggaatgagtcgatgttttttaatgctataaaatgttagaatgtgccatcagctaatgccaggcttacgtatttctagaccataaagcagtttttcacaaattcatctttacagaaaaccagcatctagcttagcatctttccccttttaatttgtaggcttttaaaggcaaatcattcccaccatcacttaacgccgggattatacacattctagaaatgattctgagaggagtgtatagtatggtgcctatctacactcacatgatattcttattcacgttttttttaaccataagtggcaaatattttaaaatatttgaaaaacactccagaatctagtacgctttatttttagactgaacctaaagtaggttgttcttttaacaaagggtttaattcgggtggggaatataacatatcaaaatacatgaacaaatggaaagttacttctagaaaagcaaagaaattgggtatcatttttgtttcttgggaagctaattttgttgaatgtttagaattgagcaaagatgtaaatttttgaagggcagtttagaaaaattaactttgtgaatgaacttaagatgtctgtactctatatgtgatgctgtgcagtttgtttttatatggaaagatgtcaactatagccataaccaataaaataaaaactgatgaggcatgcagctttcagcacatcttttatacatgaagaaattaattttgtgttgctatggtgttgaaatatccaagatgttctgtatctatgtaaacatgattcctttaataaattgtattttattatt

SEQ ID NO: 149670 - DNA, 1042 bp, Homo sapiens
  Payload ID: 9564
  Gene Symbol: LRP11
  Gene Name: low density lipoprotein receptor-related protein 11
  ENST ID: ENST00000367368
  CDS Start-End: 7-984
gtcgccatggcctccgtcgcccaggagagcgcgggctcgcagcgccggctaccgccgcgtcacggggcgctgcgcgggctgctactgctctgcctgtggctgccaagcggccgtgcggccttgccgcccgcggcgccgctgtccgaactgcacgcgcagctgtcgggcgtggagcagctgctggaggagttccgccggcaactgcagcaggagcggcctcaggaggagctggagctggagctgcgcgcgggcggcggcccccaggaggactgcccgggcccgggcagcggcggctacagcgcaatgcctgacgccatcatccgcaccaaggactccctggcggcgggtgccagcttcctgcgggcgccggcggccgtgcggggctggcggcaatgcgtggcggcctgctgctccgagccgcgctgctccgtggccgtggtggagctgccccggcgccccgcgcccccggcagccgtgctcggctgctacctcttcaactgcacggcgcgcggccgcaacgtctgcaagttcgcgctgcacagcggctacagcagctacagcctcagccgcgcgccggacggcgccgccctggccaccgcgcgcgcctcgccccggcaggaaaaggatgcgcctccacttagcaaggctgggcaggatgtggttctgcatctgcccacagacggggtggttctagacggccgcgagagcacagatgaccacgccatcgtccagtatgagtgggcactgctgcagggggacccgtcagtggacatgaaggtgcctcaatcaggaaccctgaagctgtcccacctacaggagggaacctacaccttccagctgaccgtgacggacactgccgggcagagaagctctgacaacgtgtcagtgacagtgcttcgcgcagcctactccacaggagatggatggtccatttgctgcatctgttccaagagggaagctaaggagtttagtgaaaccagttgaactcgtggaagcagagagtggaatggcggttactggaggctgtgcgggggacggactg

SEQ ID NO: 149671 - DNA, 4112 bp, Homo sapiens
  Payload ID: 9565
  Gene Symbol: LRP12
  Gene Name: low density lipoprotein receptor-related protein 12
  Uniprot ID: Q9Y561
  ENST ID: ENST00000276654
  CDS Start-End: 110-2689
ggtggctcggcggcggcggcggcggcggcggcggcgtcggcgtcgtctacctccagcttctcctccctcctcctccgtctcctcctctctctctccatctgctgtggttatggcctgtcgctggagcacaaaagagtctccgcggtggaggtctgcgttgctcttgcttttcctcgctggggtgtacggaaatggtgctcttgcagaacattctgaaaatgtgcatatttcaggagtgtcaactgcttgtggagagactccagagcaaatacgagcaccaagtggcataatcacaagcccaggctggccttctgaatatcctgcaaaaatcaactgtagctggttcataagggcaaacccaggcgaaatcattactataagttttcaggattttgatattcaaggatccagaaggtgcaatttggactggttgacaatagaaacatacaagaatattgaaagttacagagcttgtggttccacaattccacctccgtatatctcttcacaagaccacatctggattaggtttcattcggatgacaacatctctagaaagggtttcagactggcatatttttcagggaaatctgaggaaccaaattgtgcttgtgatcagtttcgttgtggtaatggaaagtgtataccagaagcctggaaatgtaataacatggatgaatgtggagatagttccgatgaagagatctgtgccaaagaagcaaatcctccaactgctgctgcttttcaaccctgtgcttacaaccagttccagtgtttatcccgttttaccaaagtttacacttgcctccccgaatctttaaaatgtgatgggaacattgactgccttgacctaggagatgagatagactgtgatgtgccaacatgtgggcaatggctaaaatatttttatggtacttttaattctcccaattatccagacttttatcctcctggaagcaattgcacctggttaatagacactggtgatcaccgtaaagtcattttacgcttcactgactttaaacttgatggtactggttatggtgattatgtcaaaatatatgatggattagaggagaatccacacaagcttttgcgtgtgttgacagcttttgattctcatgcacctcttacagttgtttcttcttctggacagataagggtacatttttgtgctgataaagtgaatgctgcaaggggatttaatgctacttaccaagtagatgggttctgtttgccatgggaaataccctgtggaggtaactgggggtgttatactgagcagcagcgttgtgatgggtattggcattgcccaaatggaagggatgaaaccaattgtaccatgtgccagaaggaagaatttccatgttcccgaaatggtgtctgttatcctcgttctgatcgctgcaactaccagaatcattgcccaaatggctcagatgaaaaaaactgctttttttgccaaccaggaaatttccattgtaaaaacaatcgttgtgtgtttgaaagttgggtgtgtgattctcaagatgactgtggtgatggcagcgatgaagaaaattgcccagtaatcgtgcctacaagagtcatcactgctgccgtcatagggagcctcatctgtggcctgttactcgtcatagcattgggatgtacttgtaagctttattctctgagaatgtttgaaagaagatcatttgaaacacagttgtcaagagtggaagcagaattgttaagaagagaagctcctccctcgtatggacaattgattgctcagggtttaattccaccagttgaagattttcctgtttgttcacctaatcaggcttctgttttggaaaatctgaggctagcggtacgatctcagcttggatttacttcagtcaggcttcctatggcaggcagatcaagcaacatttggaaccgtatttttaattttgcaagatcacgtcattctgggtcattggctttggtctcagcagatggagatgaggttgtccctagtcagagtaccagtagagaacctgagagaaatcatactcacagaagtttgttttccgtggagtctgatgatacagacacagaaaatgagagaagagatatggcaggagcatctggtggggttgcagctcctttgcctcaaaaagtccctcccacaacggcagtagaagcgacagtaggagcatgtgcaagttcctcaactcagagtacccgaggtggtcatgcagataatggaagggatgtgacaagtgtggaacccccaagtgtgagtccagcacgtcaccagcttacaagtgcactcagtcgtatgactcaggggctacgctgggtacgttttacattaggacgatcaagttccctaagtcagaaccagagtcctttgagacaacttgataatggggtaagtggaagagaagatgatgatgatgttgaaatgctaattccaatttctgatggatcttcagactttgatgtgaatgactgctccagacctcttcttgatcttgcctcagatcaaggacaagggcttagacaaccatataatgcaacaaatcctggagtaaggccaagtaatcgagatggcccctgtgagcgctgtggtattgtccacactgcccagataccagacacttgcttagaagtaacactgaaaaacgaaacgagtgatgatgaggctttgttactttgttaggtacgaatcacataagggagattgtatacaagttggagcaatatccatttattattttgtaactttacagttaaactagttttagtttaaaaagaaaaaatgcagggtgatttcttattattatatgttagcctgcatggttaaattcgacaacttgtaactctatgaacttagagtttactattttagcagctaaaaatgcatcacatattcatattgttcaataatgtcctttcatttgtttctgattgttttcatcctgatactgtagttcactgtagaaatgtggctgctgaaactcatttgattgtcatttttatctatcctatgttaaatggtttgtttttacaaaataataccttattttaattgaaacgtttatgcttttgccaacacatcttgtaacttaatatactagatgttaaggttgttaatgtacaaaaaaaaaacccttatactcacctgcgttttcatttgtttgacatttgtctattattggatttcattatcatatgaacttgtcagtgggaaacaaactgtctaaaaatttttctcttacgtttaacatacaatcatgtgaaatttaggcagagttcgataaattactggcaaaaacaaaactcttttataaagattttctaatgttgactttaatactctaacatggtacaaaccaaatggtaaaatcccaagtcatttcttttttcatctctatttagcaacagaattaagtggatgaagatattctactatgcattaaatcttgaactttataaaacatgtacaaaaattgtacaagataagttccacctggtaatgtctttccctaatacagggttgcgcttgcattggaccctagggatttgcactaaaattatatcaaggtctcagatgagcttagtgcacaagcactatcactttaaatactattatttgctaccacagcaactatatatttccatagcttttggctgggggcgggggacatttttattacaacttgaaattgctttgctggtttcatatttatttgttgtatttaaaaaatacattgttgtaagagtgattttttcaatatattttattcctgggggggatcatgctacactctcaaaagaaaattaagaaatcattcagatcatcccccctttttaagtagtgtgaattgcaaaacccaacatattttttttactgtcagttgcggtttatttattctttaactgtctgttttagtagtttaatgattatgaaaaatgtatctgtgtgtgatttgctatttattaaattttaagtactttgctgaatgtcattttaaagcatgtttgaagtcttgtgtatttgtctgtgttaatgctgtcaggaggaactgactaagatgttttaatatgtatcaaaaattaaaatgattttttttattgccttg

SEQ ID NO: 149672 - DNA, 4092 bp, Homo sapiens
  Payload ID: 9565
  Gene Symbol: LRP12
  Gene Name: low density lipoprotein receptor-related protein 12
  Uniprot ID: Q9Y561
  ENST ID: ENST00000424843
  CDS Start-End: 128-2650
agagcgcagggagcagccggtggctcggcggcggcggcggcggcggcggcggcgtcggcgtcgtctacctccagcttctcctccctcctcctccgtctcctcctctctctctccatctgctgtggttatggcctgtcgctggagcacaaaagagtctccgcggtggaggtctgcgttgctcttgcttttcctcgctggggtgtacgcttgtggagagactccagagcaaatacgagcaccaagtggcataatcacaagcccaggctggccttctgaatatcctgcaaaaatcaactgtagctggttcataagggcaaacccaggcgaaatcattactataagttttcaggattttgatattcaaggatccagaaggtgcaatttggactggttgacaatagaaacatacaagaatattgaaagttacagagcttgtggttccacaattccacctccgtatatctcttcacaagaccacatctggattaggtttcattcggatgacaacatctctagaaagggtttcagactggcatatttttcagggaaatctgaggaaccaaattgtgcttgtgatcagtttcgttgtggtaatggaaagtgtataccagaagcctggaaatgtaataacatggatgaatgtggagatagttccgatgaagagatctgtgccaaagaagcaaatcctccaactgctgctgcttttcaaccctgtgcttacaaccagttccagtgtttatcccgttttaccaaagtttacacttgcctccccgaatctttaaaatgtgatgggaacattgactgccttgacctaggagatgagatagactgtgatgtgccaacatgtgggcaatggctaaaatatttttatggtacttttaattctcccaattatccagacttttatcctcctggaagcaattgcacctggttaatagacactggtgatcaccgtaaagtcattttacgcttcactgactttaaacttgatggtactggttatggtgattatgtcaaaatatatgatggattagaggagaatccacacaagcttttgcgtgtgttgacagcttttgattctcatgcacctcttacagttgtttcttcttctggacagataagggtacatttttgtgctgataaagtgaatgctgcaaggggatttaatgctacttaccaagtagatgggttctgtttgccatgggaaataccctgtggaggtaactgggggtgttatactgagcagcagcgttgtgatgggtattggcattgcccaaatggaagggatgaaaccaattgtaccatgtgccagaaggaagaatttccatgttcccgaaatggtgtctgttatcctcgttctgatcgctgcaactaccagaatcattgcccaaatggctcagatgaaaaaaactgctttttttgccaaccaggaaatttccattgtaaaaacaatcgttgtgtgtttgaaagttgggtgtgtgattctcaagatgactgtggtgatggcagcgatgaagaaaattgcccagtaatcgtgcctacaagagtcatcactgctgccgtcatagggagcctcatctgtggcctgttactcgtcatagcattgggatgtacttgtaagctttattctctgagaatgtttgaaagaagatcatttgaaacacagttgtcaagagtggaagcagaattgttaagaagagaagctcctccctcgtatggacaattgattgctcagggtttaattccaccagttgaagattttcctgtttgttcacctaatcaggcttctgttttggaaaatctgaggctagcggtacgatctcagcttggatttacttcagtcaggcttcctatggcaggcagatcaagcaacatttggaaccgtatttttaattttgcaagatcacgtcattctgggtcattggctttggtctcagcagatggagatgaggttgtccctagtcagagtaccagtagagaacctgagagaaatcatactcacagaagtttgttttccgtggagtctgatgatacagacacagaaaatgagagaagagatatggcaggagcatctggtggggttgcagctcctttgcctcaaaaagtccctcccacaacggcagtagaagcgacagtaggagcatgtgcaagttcctcaactcagagtacccgaggtggtcatgcagataatggaagggatgtgacaagtgtggaacccccaagtgtgagtccagcacgtcaccagcttacaagtgcactcagtcgtatgactcaggggctacgctgggtacgttttacattaggacgatcaagttccctaagtcagaaccagagtcctttgagacaacttgataatggggtaagtggaagagaagatgatgatgatgttgaaatgctaattccaatttctgatggatcttcagactttgatgtgaatgactgctccagacctcttcttgatcttgcctcagatcaaggacaagggcttagacaaccatataatgcaacaaatcctggagtaaggccaagtaatcgagatggcccctgtgagcgctgtggtattgtccacactgcccagataccagacacttgcttagaagtaacactgaaaaacgaaacgagtgatgatgaggctttgttactttgttaggtacgaatcacataagggagattgtatacaagttggagcaatatccatttattattttgtaactttacagttaaactagttttagtttaaaaagaaaaaatgcagggtgatttcttattattatatgttagcctgcatggttaaattcgacaacttgtaactctatgaacttagagtttactattttagcagctaaaaatgcatcacatattcatattgttcaataatgtcctttcatttgtttctgattgttttcatcctgatactgtagttcactgtagaaatgtggctgctgaaactcatttgattgtcatttttatctatcctatgttaaatggtttgtttttacaaaataataccttattttaattgaaacgtttatgcttttgccaacacatcttgtaacttaatatactagatgttaaggttgttaatgtacaaaaaaaaaacccttatactcacctgcgttttcatttgtttgacatttgtctattattggatttcattatcatatgaacttgtcagtgggaaacaaactgtctaaaaatttttctcttacgtttaacatacaatcatgtgaaatttaggcagagttcgataaattactggcaaaaacaaaactcttttataaagattttctaatgttgactttaatactctaacatggtacaaaccaaatggtaaaatcccaagtcatttcttttttcatctctatttagcaacagaattaagtggatgaagatattctactatgcattaaatcttgaactttataaaacatgtacaaaaattgtacaagataagttccacctggtaatgtctttccctaatacagggttgcgcttgcattggaccctagggatttgcactaaaattatatcaaggtctcagatgagcttagtgcacaagcactatcactttaaatactattatttgctaccacagcaactatatatttccatagcttttggctgggggcgggggacatttttattacaacttgaaattgctttgctggtttcatatttatttgttgtatttaaaaaatacattgttgtaagagtgattttttcaatatattttattcctgggggggatcatgctacactctcaaaagaaaattaagaaatcattcagatcatcccccctttttaagtagtgtgaattgcaaaacccaacatattttttttactgtcagttgcggtttatttattctttaactgtctgttttagtagtttaatgattatgaaaaatgtatctgtgtgtgatttgctatttattaaattttaagtactttgctgaatgtcattttaaagcatgtttgaagtcttgtgtatttgtctgtgttaatgctgtcaggaggaactgactaagatgttttaatatgtatcaaaaattaaaatgattttttttattgccttgaggtactttttaaatcaaa

SEQ ID NO: 149673 - DNA, 889 bp, Homo sapiens
  Payload ID: 9565
  Gene Symbol: LRP12
  Gene Name: low density lipoprotein receptor-related protein 12
  ENST ID: ENST00000523007
  CDS Start-End: 288-889
aaatatatgatggattagaggagaatccacacaagcttttgcgtgtgttgacagcttttgattctcatgcacctcttacagttgtttcttcttctggacagataagggtacatttttgtgctgataaagtgaatgctgcaaggggatttaatgctacttaccaagtagatgggttctgtttgccatgggaaataccctgtggaggtaactgggggtgttatactgagcagcagcgttgtgatgggtattggcattgcccaaatggaagggatgaaaccaattgtaccatgtgccagaaggaagaatttccatgttcccgaaatggtgtctgttatcctcgttctgatcgctgcaactaccagaatcattgcccaaatggctcagatgaaaaaaactgctttttttgccaaccaggaaatttccattgtaaaaacaatcgttgtgtgtttgaaagttgggtgtgtgattctcaagatgactgtggtgatggcagcgatgaagaaaattgcccagtaatcgtgcctacaagagtcatcactgctgccgtcatagggagcctcatctgtggcctgttactcgtcatagcattgggatgtacttgtaagctttattctctgagaatgtttgaaagaagatcatttgaaacacagttgtcaagagtggaagcagaattgttaagaagagaagctcctccctcgtatggacaattgattgctcagggtttaattccaccagttgaagattttcctgtttgttcacctaatcaggcttctgttttggaaaatctgaggctagcggtacgatctcagcttggatttacttcagtcaggcttcctatggcaggcagatcaagcaacatttggaaccgtatttttaattttgcaagatc

SEQ ID NO: 149674 - DNA, 16535 bp, Homo sapiens
  Payload ID: 9566
  Gene Symbol: LRP1B
  Gene Name: low density lipoprotein receptor-related protein 1B
  Uniprot ID: Q9NZR2
  ENST ID: ENST00000389484
  CDS Start-End: 973-14772
aaagacagaaccccagagaaaaacgctgccaattcgttgctttattgttccctgcctggggacctcaatagccttttccattaaccttcccttcttacgcaacggttaatgactttgggggttgttttgctttctgtttctgctgagtcactaaattttgcctctttgtccccaggtgctgctcagcataaaagttaaaagtgcaattcaggaagtactgggattctgtgtagagccgaggaaaccatttccctaagagaagctctgttccttggcttgtccttccttcccgggaaggaagcttccgaggaacgaagggagaagctttgttttgcctgcagaagcagccctgtgctcggctgagggttctcagctggctgtgaactgcggagcattgtaggcgcctggctggctcaggccaatgcagaagtctctcccttctccaaagacccaaatccccacagaaccagcttcgagttactttcccttcaaggggattaaaataattgtgatttgtggcgctctccgttcgcggtggtattttcctgttgtgttaaatgcctcttattaagtaatagatgtgatttatgtgaacgacgaaggggtgtgtggtggattcggtgattaatcagtgaattcccatccgctggcatctctcactgcccctcttgcgtgatgtaagatcagacgtaccctgcattgaaaagtcaagacacacgggcgtctcgctcgcgctcacacacgctctgcctcctctctcccgcacgcgcgcatccctccaccttccacatcctgctccaggcaggagaaggctgactggctggactcattgagctgaagaatttccagtgacatttgtaaatgacgccgctcgattccaggctccaagcggcccctgccgccgccgccgccgccgggccgaaggtgccgccgagcagtctccagcgcaggcttccttaccgggcgaccacaatgtccgagtttctcctcgccttactcactctctcgggattattgccgattgccagggtgctgaccgtgggagccgaccgagatcagcagttgtgtgatcctggtgaatttctttgccacgatcacgtgacttgtgtctcccagagctggctgtgtgatggggaccctgactgccctgatgattcagacgagtctttagatacctgtcccgaggaggtagaaatcaagtgccccttgaatcacattgcttgccttggtaccaacaaatgtgttcatttatcccagctgtgcaatggtgtcttggactgcccagatgggtatgacgaaggagtacattgtcaggaactgttatccaattgccaacagctgaattgtcagtataaatgtacaatggtcagaaatagtacaagatgttactgtgaggatggattcgaaataacagaagatgggagaagctgtaaagatcaagatgaatgtgctgtttatggtacatgcagccagacctgcagaaacacacatggatcctacacttgcagttgtgtggaaggctacctaatgcagccagacaacagatcttgcaaggctaaaattgaacctacagatagaccacctatactattaattgcaaattttgaaacaattgaggttttctatcttaatggaagtaaaatggcaactctaagctcagtcaatggaaatgaaattcatactctggattttatttataatgaagatatgatttgttggattgaatcaagagaatcttcaaatcaactcaaatgtatccagataacaaaagcaggaggattaacagatgaatggacaatcaatattcttcaatccttccacaatgtgcaacaaatggcgattgactggctcactcgaaatctctattttgtggaccatgtcggtgaccggatctttgtttgtaattccaacggttctgtatgtgtcaccctgattgatctggagcttcacaatcctaaagcaatagcagtagatccaatagcaggaaaacttttctttactgactacgggaatgtcgccaaagtggagagatgtgacatggatgggatgaaccgaacaaggataattgattcaaagacagagcagccagctgcactggcactagacctagtcaacaaattggtttactgggtagatctttacttggactatgtgggagtagtggactatcaaggaaaaaatagacacactgtcattcaaggcagacaagttagacatctttatggtataactgtgtttgaagattatttgtatgcaaccaattctgataactacaatatcgtaaggataaaccgatttaatgggactgatattcactcattaattaaaattgagaatgcttggggaatccgaatttatcaaaaaagaactcaaccaacagtcagaagccatgcatgtgaagtcgatccatatggaatgccagggggctgttcacacatctgtctactcagcagcagttacaaaactcggacttgtcgctgcaggactggcttcaacttgggaagtgatggcaggtcatgcaaaagaccaaagaatgagttgttcctcttttatgggaaaggacgcccaggaattgttagaggaatggacttgaataccaagatagctgatgaatacatgatccccatagaaaatctggtaaaccctcgtgctttagactttcacgcagaaaccaattacatctactttgctgacaccaccagtttcctaattggccggcagaagatagatggcacagagagagaaaccatcctgaaagatgatctggataatgtagagggcattgctgtggactggattggaaataatctttactggaccaatgatggccataggaaaaccattaatgtggccaggctggaaaaagcttctcagagtcggaagactcttttagagggtgaaatgtctcatcccagaggaattgtggtggatccagttaatggttggatgtattggacagactgggaggaagatgaaatagatgacagcgtgggaaggattgagaaggcctggatggatggattcaatcggcagatttttgtgacttcaaagatgctgtggccaaacggtttaactctggactttcacaccaacacattatactggtgtgatgcctattacgatcatattgaaaaagtatttttgaatgggactcacaggaagattgtttacagtgggagagagttgaaccaccctttcggactgtcgcatcatggaaattatgtgttctggactgattatatgaatggttccatttttcaactagatttgataacaagtgaggtgacattgctgaggcatgaaagaccacccctatttgggcttcagatttatgatccacgaaagcaacaaggtgacaatatgtgccgagtaaataatgggggctgtagtacactttgcttggctatcccaggaggccgggtgtgtgcttgtgccgataatcaacttttggatgaaaatgggacaacttgcacatttaatcctggagaagcactacctcacatatgtaaagctggagagtttcgctgcaaaaacagacactgtatccaagctcggtggaaatgtgatggcgacgatgactgcctagacggaagcgatgaggattcagtaaactgcttcaatcatagctgtcctgatgatcagtttaaatgccagaataatcgctgcatccccaagagatggctttgtgatggagctaatgactgtgggagcaatgaagatgaatccaatcaaacttgcacagccagaacatgccaggtagaccagttttcttgcggaaatgggcgttgcattcccagagcatggctgtgtgacagggaagacgactgtggtgaccagacagatgaaatggcatcttgtgaattcccaacttgtgagccactaacccaattcgtatgcaaaagtggaagatgcattagcagcaaatggcactgcgactctgatgacgactgtggggacgggagtgatgaggtgggctgtgttcactcttgctttgataatcagttcagatgttccagtggcagatgcatcccaggccactgggcctgtgatggtgacaatgactgtggggacttcagtgatgaagcccagatcaattgtactaaagaagagattcattctcctgctggttgtaacggaaatgaatttcagtgccaccctgatggtaattgcgttcctgatttgtggcgctgtgatggagaaaaagactgtgaagatggtagtgatgaaaaaggttgcaatggtaccatacgattgtgtgaccacaaaaccaagttttcctgttggagtacagggagatgcatcaacaaagcatgggtgtgtgatggagatattgattgcgaagatcagtcagatgaagatgactgtgacagtttcttgtgtggaccacccaagcatccttgtgctaatgacacctcagtctgcctgcagccagagaaactctgcaatgggaaaaaggattgtcctgatggctctgatgaaggctatctctgtgatgagtgttcgctgaacaatggaggctgtagcaaccactgttctgttgttcctggaagaggaattgtctgttcctgccctgaaggacttcaactcaacaaagacaataaaacatgtgaaattgtggattattgtagcaatcatctaaagtgcagccaagtatgtgagcagcacaagcacacagtcaagtgctcatgttatgaaggttggaagctggatgtagacggtgaaagttgtacaagtgttgatccttttgaagcattcatcatcttttctattcgtcatgagatcagaaggattgatcttcacaaaagagactatagtctacttgttcctggattgagaaacacaatagcacttgattttcacttcaatcaaagtttactttattggacagatgttgtagaagacagaatataccggggaaagctttctgaaagtggaggtgtcagtgccattgaagtggttgtggagcatggcctggctactccagaaggcctgacagtcgactggatagcaggaaacatatactggatagacagcaatctggaccaaatcgaagtggccaaactagatggctccctaagaactacactaatagcaggagccatggaacaccccagggccattgctttggacccaagatatggaattcttttctggacagactgggatgcaaattttcctcgcattgaatctgcctctatgagtggtgctgggagaaaaaccatctataaagacatgaaaactggggcttggcctaatggactaactgtggaccactttgagaaaaggatagtgtggacagacgccaggtcagatgctatttattcagccctctatgatggaacaaacatgatagaaatcatccgaggtcatgaatacctttcccatccctttgctgtgtctctatatgggagtgaagtctactggacagactggaggaccaacacattgtccaaagccaataagtggacagggcagaatgtcagtgtgattcagaaaaccagtgcacagccatttgaccttcagatataccatcccagtcgccagccacaggctcccaatccttgtgcagctaatgatggcaaaggcccctgctctcacatgtgtctaatcaatcacaataggagtgctgcctgtgcgtgcccccacttgatgaagctttcttcagacaagaagacctgctatgaaatgaaaaaatttcttctttatgcaagacgttctgaaatcagaggagtggatattgacaatccatactttaacttcatcacggcatttacagtccctgatattgatgacgttactgtgatagacttcgatgcatctgaggaacgtttatactggacagatattaaaacacaaaccattaaacgagcttttattaacggaactgggttagaaactgttatttcaagagatattcagagtatcagagggctagcagtggattgggtgtcacgtaatttatactggattagctcagaatttgatgaaacgcaaattaatgtggcaaggctagatggctctttgaaaacctcaattatccatggaatcgataagccacagtgtcttgcagctcacccagtcaggggaaaactctactggaccgatggaaacacaattaacatggcaaatatggatggcagtaatagcaagattctgtttcagaatcagaaggagccagttggtctatcgatagactatgtggaaaacaagctttattggatcagttcagggaatggaaccataaatagatgcaacctggatggtggtaatttagaagtaatcgagtcaatgaaagaagaattaacaaaagctacagccctaaccatcatggataagaaactgtggtgggcagaccaaaacttagcccagctaggaacctgcagcaaaagagacggaagaaaccccaccatcctacggaataagacttctggggtagttcatatgaaagtctatgataaagaagcacagcaaggcagcaattcctgccaactaaacaatggtggatgctctcaactttgtttaccaacatctgaaactacaaggacttgtatgtgtacagtgggatattatctccaaaagaaccgtatgtcatgtcaaggtatagaatcatttcttatgtactctgttcatgaaggaatcaggggaatacctcttgaaccaagtgacaaaatggatgctttgatgcctatatcaggaacttcatttgccgtgggaatagatttccatgcagaaaatgataccatctactggacagacatgggcttcaataaaattagcagagctaaaagagatcagacttggaaagaagatatcattaccaatggcttgggaagagtggaagggatagctgttgactggattgctggtaacatatattggacagatcatggtttcaacttaattgaagttgcaagactcaatggttctttccgttatgtaattatttcccaaggcctggatcaaccaagatctatagctgtgcacccagagaaaggcctcttgttctggactgaatggggacaaatgccctgtattggaaaggctcgcttggatggctcagagaaggttgtccttgtaagcatgggaatagcatggccgaatggcatctccatcgactatgaggaaaataaattgtactggtgtgatgctcgcacagacaagatagagagaatcgaccttgagactggagggaatcgcgagatggtgctgtcaggaagcaatgtggatatgttttcagttgcagtctttggggcttacatctactggtctgacagagcacatgcaaacgggtctgtcagaaggggccacaagaatgatgccacagaaacgataaccatgagaaccggccttggagtcaacctgaaggaggttaaaatatttaaccgagtaagagagaaagggaccaatgtttgtgccagggacaatggtggctgtaagcaactctgtctttatcgaggaaattcccggagaacttgtgcttgtgcccatggatatttggcagaagatggagttacttgcctgaggcatgaaggctatttactgtattcaggaagaacaatattaaaaagtatacatctttctgatgaaaccaatttaaattccccaataaggccatatgagaatccacgttatttcaagaatgtcatagccttggcttttgactataatcaaagaagaaaaggtaccaaccgaatcttttacagtgatgcacactttggaaatatacagcttattaaagacaactgggaagacagacaagtaattgttgaaaatgtgggttctgtggaaggacttgcctatcacagagcctgggatacactgtactggacaagctctaccacctcatccatcaccagacacactgtggaccagactcggcctggagcatttgacagggaagctgtcatcaccatgtcagaagatgaccatccacatgtgctagccttggatgaatgtcaaaatttaatgttttggaccaactggaatgaacaacatccaagtatcatgagatctactctgactgggaaaaatgctcaagtggtggtcagtacagacatactcactccaaatggacttactatcgactaccgtgcagagaagctgtatttctcagatggcagtctaggaaaaattgaaaggtgtgaatacgatggatcccagagacatgtgatagttaaatctgggccagggactttcctcagtttggctgtttatgacaattatatattctggtcggactggggaagaagagctatactgcggtccaacaagtacacaggaggagatacaaaaattcttcgttccgatattccacatcagccaatgggaatcatagctgttgccaatgacaccaatagctgtgaactttctccatgtgcattattgaatggaggctgccatgacttgtgccttttaactcccaatgggagagtgaattgttcctgcagaggggaccgaatattgctagaggacaacagatgtgtgactaaaaattcctcctgcaacgcttattcggagtttgaatgtggaaatggtgagtgcattgactaccagctcacctgtgatggcattcctcactgtaaagataaatcagatgaaaaactgctctactgtgaaaacagaagctgtcgaagaggcttcaagccatgctataatcgccgctgcattcctcatggcaagttatgtgatggagaaaatgactgcggagacaactctgatgaattagattgtaaagtttcaacctgtgccacggttgagttccgctgtgcagatgggacttgtattccaagatcagcacgatgcaaccagaacatagattgtgcagatgcttcagatgaaaagaactgcaataacacagactgcacacatttctataagcttggagtgaaaaccacagggttcataagatgtaattctacctcactgtgtgttctgccaacctggatatgcgacgggtctaatgactgtggagactattcagatgaattaaagtgcccagttcaaaacaaacacaaatgtgaagaaaattattttagttgtcctagtggaagatgcattttgaatacctggatatgcgatggtcagaaagattgtgaggatggacgtgatgaattccactgtgattcttcttgctcttggaaccaatttgcttgttccgcacaaaaatgtatttctaagcattggatttgtgatggagaagatgactgtggggatgggttagatgaaagtgacagcatttgtggtgccataacctgtgctgctgacatgttcagctgccagggctctcgtgcctgcgtgccccgacattggctttgtgatggtgaaagggactgtccagatggaagcgatgagctttccacagcaggctgcgctcccaataatacatgtgatgaaaatgctttcatgtgccataataaagtatgcattcccaagcaatttgtttgtgaccatgatgacgactgtggagatggctctgatgagtcaccgcagtgtggatatcgacagtgtggtacagaagaatttagttgtgctgatgggcggtgtcttctaaatactcaatggcagtgtgatggagactttgactgtcctgaccattctgatgaagcacctttaaacccaaagtgtaaaagtgcagaacagtcatgcaacagttcattttttatgtgcaaaaatggcaggtgcattcccagtggaggtctttgcgacaataaggatgactgtggcgatggttcagatgagagaaactgccatataaatgaatgtttgagtaagaaagtcagtggatgttctcaagactgtcaagaccttccggtcagttataagtgcaaatgctggcctggattccaactgaaggatgacggcaaaacatgtgtagacattgatgaatgctcttcaggctttccctgtagccagcaatgcatcaatacatacgggacttacaagtgcctctgtacagatgggtatgaaatacaacctgataacccaaatggctgcaaatcgctctcagatgaagaaccttttttaattcttgctgatcatcatgagataaggaaaattagcactgatggctccaactacacacttttaaaacagggattaaacaatgttattgctatagactttgattacagagaagaattcatctattggatcgattctagccgacccaatggcagtcgcataaatagaatgtgtttaaatggaagtgacattaaggtagttcataacacagcggtccccaatgcacttgctgtcgattggattggaaaaaacctctattggtctgacacagaaaaaagaatcattgaagtatccaaactcaatggcttgtaccctactatactcgttagcaaaaggctgaagtttcccagagacttgtctttagatcctcaagctggatatttgtattggattgactgctgcgagtatcctcatattggccgtgttggaatggatggaaccaatcagagtgttgtcatagaaaccaagatttctagacctatggcactaacaatagattatgttaatcgtagactctactgggccgatgaaaatcacattgaatttagcaacatggatggatctcatagacacaaagtccctaatcaagatattccaggggtgattgcactaacattgtttgaagactacatctactggactgatgggaaaaccaagtcactcagccgtgcccataaaacatcgggagcagacagactctcactgatttactcatggcatgccatcacagatatccaggtgtatcattcttatagacaacctgatgtctccaaacatctctgcatgataaataatggtggttgcagtcatttgtgccttttagcccctggaaaaacccacacttgtgcatgtcccactaacttctatctggcagctgataataggacttgcttatccaactgcacagccagccagtttcgttgcaaaactgacaaatgtattccattctggtggaaatgtgacaccgtggatgactgtggtgatggatctgatgaacctgatgactgtcctgaatttagatgtcagccaggccgatttcagtgtgggactggactctgtgctctaccagctttcatctgtgatggagagaatgattgtggagacaattctgatgaactcaactgtgacacacatgtctgcctgtcaggtcaattcaaatgtaccaagaaccagaaatgtatcccagtaaacttaagatgtaatgggcaagatgactgtggtgatgaggaagatgaaagagactgtcctgaaaacagctgttctccagactatttccagtgtaagactacgaagcattgcatttccaagctgtgggtttgtgacgaggatccagactgtgcagatgcatcagacgaggccaactgcgataaaaagacttgtggacctcatgaattccagtgtaaaaacaacaactgtattcccgatcactggcggtgtgatagccaaaatgactgcagtgataattcagatgaagaaaactgtaagccacagacatgtacattgaaagatttcctctgtgccaatggggactgtgtttcttcaaggttttggtgtgatggagattttgactgtgcagatggctctgatgagagaaattgtgagacaagttgttccaaagatcagttccggtgttccaatggtcagtgtataccagcaaaatggaaatgtgatggccatgaagactgcaaatatggggaagatgagaaaagctgtgagccagcttctcctacttgctcatcacgtgaatatatatgtgccagtgatggatgtatttcagcatctttgaaatgtaatggagaatatgattgtgctgatggttcagatgagatggactgtgtgactgaatgtaaggaagatcagtttcggtgcaaaaataaagcccactgtattccaattagatggctgtgtgatggaattcatgactgtgtggatggcagtgatgaagagaactgtgaaagaggaggaaatatatgtagagctgatgagttcctttgcaataattctctctgcaaactacatttctgggtgtgtgatggagaggacgactgtggagacaactctgatgaagcccctgatatgtgtgtcaaatttctttgtccatccacgagacctcacagatgcagaaataacagaatatgcctacagtcggagcaaatgtgcaatgggattgatgaatgcggtgacaattcagatgaagatcactgtggtggtaagctgacatataaagcaaggccttgtaaaaaggatgagtttgcttgtagtaataaaaaatgcatccctatggatctccagtgtgatcgacttgatgactgcggagatggttcagatgagcaaggatgcagaatagctcctactgaatatacctgtgaagataatgtgaatccatgtggagatgatgcatattgtaatcaaataaaaacatctgttttctgtcgctgtaagcctggatttcagagaaacatgaaaaacagacaatgtgaagaccttaatgaatgtttggtgtttggcacatgttcccatcaatgtataaatgtggaaggatcatataaatgtgtgtgtgaccagaattttcaagaaagaaataacacctgcatagcagaaggctctgaagatcaagttctctacattgctaatgacactgatatcctgggttttatatatccattcaactacagtggcgatcatcaacaaatttctcatattgaacataattcaagaataacagggatggatgtatattatcaaagagatatgattatttggagtactcagtttaatccaggcggaattttctacaaaaggatccatggcagagaaaaaaggcaagcaaacagtggcttgatttgtcctgaatttaaaaggcccagggacattgcagttgactgggtggctggaaacatttactggactgatcattctagaatgcattggttcagttactacactactcactggaccagtctgaggtactctatcaacgtagggcagctgaatggccccaactgcaccagactcttaacaaatatggctggagaaccctatgctattgcagtaaatcctaaaagagggatgatgtactggactgttgttggggatcattcccatatagaagaagcagccatggatggtacactgagaaggattttagtacaaaagaacttacagagacccacaggtttggctgtggattattttagtgaacgcatatattgggctgactttgagctctccatcattggcagtgttctgtatgatggctctaattcagtagtctctgtcagcagcaaacaaggtttattacatccacataggatcgatatctttgaagattatatatatggagcaggacctaaaaatggtgtatttcgagttcaaaaatttggccatggttcagtagagtacttagctttaaatattgataaaacaaaaggtgttttgatatctcatcgttataaacaactagatttacccaatccatgcttggatttagcatgcgaatttctttgcttgctaaatccttctggggccacttgtgtgtgtccagaaggaaaatatttgattaatggcacctgcaatgatgacagcctgttagatgattcatgtaagttaacttgtgaaaatggaggaagatgcattttaaatgagaaaggtgatttgaggtgtcactgttggcccagttattcaggagaaagatgtgaagtcaaccactgtagcaactactgccagaatggaggaacttgcgtaccatcagttctagggagacccacctgcagctgtgcactgggtttcactgggccaaactgtggtaagacagtctgtgaggatttttgtcaaaatggaggaacctgcattgtgactgctggaaaccagccttactgccactgccagccggaatacaccggagacagatgtcagtactacgtgtgccaccactattgtgtgaattctgaatcatgtaccattggggatgatggaagtgttgaatgtgtctgtccaacgcgctatgaaggaccaaaatgtgaggttgacaagtgtgtaaggtgccatggggggcactgcattataaataaagacagtgaagatatattttgcaactgcactaatggaaagattgcctctagctgtcagttatgtgatggctactgttacaatggtggcacatgccagctggaccccgagacaaatgtacctgtgtgtctatgctccaccaactggtcaggcacacagtgtgaaaggccagccccaaagagcagcaagtctgatcatatcagcacaagaagcattgccatcattgtgcctctcgtcctcttggtgactttgataaccaccttagtaattggtttagtgctttgtaaaagaaaaagaaggacaaaaacaattagaagacaacctattatcaatggaggaataaatgtagaaattggcaatccatcttataacatgtatgaggtagatcatgatcacaacgatggaggtcttttagatcctggctttatgatagacccaacaaaggccaggtacatagggggaggacccagtgctttcaagcttccacacacagcgccgcccatctacctaaactctgatttgaaaggaccactaactgctgggccaacaaattactccaatccggtatatgcaaaattatatatggatgggcaaaactgtcgaaactccttaggaagtgttgatgaaaggaaagaactgcttccaaagaaaatagaaattggtataagagagacagtggcataatcagtgatatcttttatatgctgtataaatgtataaaatataaggattacttttgtatgttccaacagtattatacttgttttggcatcagcattacctctttctttatctttttcctggttaattgttttctgagttttttgggttttattttttgctgatgactattgattgaccatttgtatggtatttttatgaaaaagaactgcactacagtacaatttacaacaatgctgctgatatgacacacctttgaatttgttaaaattaaaaacaacgtattcctttgtagtgtgaatatgagcaatctattttatatgaacttttttggttgtacttaatcaacgaggagaatctctgcacttttccattatacggtttgaaggctgtaatacagtgtcatattatttttctgtttaaattgatggaaaaatgattgaatggtcaactctcttctttgtgcccataaagatcgattcagactctgctgaaaatatatagctctcacaagttcagcatcacctgctttgaaattagccttagattgccaaccaatagatgagaattttgaggaaaaaaattaaaaatatgtaaaattaataatttgcatgaacacagatgactacattttccaaaacttagtggactctatgtgatgtactaaatgtatacaccttgtaagcaatagttatatttaggtggtagaacatagcaaaaatataaccgaaagttggccgactgcacttgctatggaataagaccttttattctccctcagtctcgagataaatagccagcctagagcacaacagggcattgggtacttgcatcttaggtatttcttcccagtcacatccattttgtggaagattaacccaaccccttacactacactgaacactaaagaataatatataagcacacaaattggtgacagaatttcaattacgtgaacgcatcctctttgctaggtcaaaaaacaaagggcaaagcagacattttagtatacagagtgattggcaaatattttcaagatttaatatgagcaacccattatttgccctatccaaaatatattcaagggccttccaagttgtagaagaacaatgatcttcccataatcaaaagtggagagtcgaaatgctgtgccagttgctctggtattcaggtttctctgggttttacagaacgcatggaccccattcacgtttggtttgtttatcttcaaatttgagttgaaacgagtgcgatttatttaagttgtatataaaaataaaaggatagcatttttatacaaatatctttaaaggcacaaaagatttattcacaagttttggagggctttttgttcctctgatagacatgactgacttttagctgtcataatgtattaacctaacagatgaaatatgttaaatatgtggttgctctttatccctttgtacaagcattaaaaaaactgctgttttataagaagactttttgttgtactatgtgcatgcatactacctatttctaaactttgccatattgaggcctttataaactattgatttatgtaatactagtgcaattttgcttgaacaatgttatgcatatcataaactttttcaggttcttgtttaagtacattttttaaattgaacagtatttttcattttggttataatatagtcattttgcctatgtttctacaatgaagtgttaaatactttataaaaaattgttgactgacttatttaaatgaaattctacatatttaa

SEQ ID NO: 149675 - DNA, 839 bp, Homo sapiens
  Payload ID: 9566
  Gene Symbol: LRP1B
  Gene Name: low density lipoprotein receptor-related protein 1B
  ENST ID: ENST00000442974
  CDS Start-End: 1-839
ggagacccacctgcagctgtgcactgggtttcactgggccaaactgtggtaagacagtctgtgaggatttttgtcaaaatggaggaacctgcattgtgactgctggaaaccagccttactgccactgccagccggaatacaccggagacagatgtcagtactacgtgtgccaccactattgtgtgaattctgaatcatgtaccattggggatgatggaagtgttgaatgtgtctgtccaacgcgctatgaaggaccaaaatgtgaggttgacaagtgtgtaaggtgccatggggggcactgcattataaataaagacagtgaagatatattttgcaactgcactaatggaaagattgcctctagctgtcagttatgtgatggctactgttacaatggtggcacatgccagctggaccccgagacaaatgtacctgtgtgtctatgctctgtggggtttaaaagtcagcgctgtgaccagaaagagaacccttgtgatcactactgtcagaatgaggggatttgcactttaactgcgtttaatgagccgagatgcaaatgctccaccaactggtcaggcacacagtgtgaaaggccagccccaaagagcagcaagtctgatcatatcagcacaagaagcattgccatcattgtgcctctcgtcctcttggtgactttgataaccaccttagtaattggtttagtgctttgtaaaagaaaaagaaggacaaaaacaattagaagacaacctattatcaatggaggaataaatgtagaaattggcaatccatcttataacatgtatgaggtagatcatgatcacaacgatggaggtctttta

SEQ ID NO: 149676 - DNA, 2621 bp, Homo sapiens
  Payload ID: 9566
  Gene Symbol: LRP1B
  Gene Name: low density lipoprotein receptor-related protein 1B
  ENST ID: ENST00000434794
  CDS Start-End: 277-2621
gcattgaaaagtcaagacacacgggcgtctcgctcgcgctcacacacgctctgcctcctctctcccgcacgcgcgcatccctccaccttccacatcctgctccaggcaggagaaggctgactggctggactcattgagctgaagaatttccagtgacatttgtaaatgacgccgctcgattccaggctccaagcggcccctgccgccgccgccgccgccgggccgaaggtgccgccgagcagtctccagcgcaggcttccttaccgggcgaccacaatgtccgagtttctcctcgccttactcactctctcgggattattgccgattgccagggtgctgaccgtgggagccgaccgagatcagcagttgtgtgatcctggtgaatttctttgccacgatcacgtgacttgtgtctcccagagctggctgtgtgatggggaccctgactgccctgatgattcagacgagtctttagatacctccagaacatgccaggtagaccagttttcttgcggaaatgggcgttgcattcccagagcatggctgtgtgacagggaagacgactgtggtgaccagacagatgaaatggcatcttgtgaattcccaacttgtgagccactaacccaattcgtatgcaaaagtggaagatgcattagcagcaaatggcactgcgactctgatgacgactgtggggacgggagtgatgaggtgggctgtgttcactcttgctttgataatcagttcagatgttccagtggcagatgcatcccaggccactgggcctgtgatggtgacaatgactgtggggacttcagtgatgaagcccagatcaattgtactaaagaagagattcattctcctgctggttgtaacggaaatgaatttcagtgccaccctgatggtaattgcgttcctgatttgtggcgctgtgatggagaaaaagactgtgaagatggtagtgatgaaaaaggttgcaatggtaccatacgattgtgtgaccacaaaaccaagttttcctgttggagtacagggagatgcatcaacaaagcatgggtgtgtgatggagatattgattgcgaagatcagtcagatgaagatgactgtgacagtttcttgtgtggaccacccaagcatccttgtgctaatgacacctcagtctgcctgcagccagagaaactctgcaatgggaaaaaggattgtcctgatggctctgatgaaggctatctctgtgatgagtgttcgctgaacaatggaggctgtagcaaccactgttctgttgttcctggaagaggaattgtctgttcctgccctgaaggacttcaactcaacaaagacaataaaacatgtgaaattgtggattattgtagcaatcatctaaagtgcagccaagtatgtgagcagcacaagcacacagtcaagtgctcatgttatgaaggttggaagctggatgtagacggtgaaagttgtacaagtgttgatccttttgaagcattcatcatcttttctattcgtcatgagatcagaaggattgatcttcacaaaagagactatagtctacttgttcctggattgagaaacacaatagcacttgattttcacttcaatcaaagtttactttattggacagatgttgtagaagacagaatataccggggaaagctttctgaaagtggaggtgtcagtgccattgaagtggttgtggagcatggcctggctactccagaaggcctgacagtcgactggatagcaggaaacatatactggatagacagcaatctggaccaaatcgaagtggccaaactagatggctccctaagaactacactaatagcaggagccatggaacaccccagggccattgctttggacccaagatatggaattcttttctggacagactgggatgcaaattttcctcgcattgaatctgcctctatgagtggtgctgggagaaaaaccatctataaagacatgaaaactggggcttggcctaatggactaactgtggaccactttgagaaaaggatagtgtggacagacgccaggtcagatgctatttattcagccctctatgatggaacaaacatgatagaaatcatccgaggtcatgaatacctttcccatccctttgctgtgtctctatatgggagtgaagtctactggacagactggaggaccaacacattgtccaaagccaataagtggacagggcagaatgtcagtgtgattcagaaaaccagtgcacagccatttgaccttcagatataccatcccagtcgccagccacaggctcccaatccttgtgcagctaatgatggcaaaggcccctgctctcacatgtgtctaatcaatcacaataggagtgctgcctgtgcgtgcccccacttgatgaagctttcttcagacaagaagacctgctatgaaatgaaaaaatttcttctttatgcaagacgttctgaaatcagaggagtggatattgacaatccatactttaacttcatcacggcatttacagtccctgatattgatgacgttactgtgatagacttcgatgcatctgaggaacgtttatactggacagatattaaaacacaaaccattaaacgagcttttattaacgg

SEQ ID NO: 149677 - DNA, 3810 bp, Homo sapiens
  Payload ID: 9566
  Gene Symbol: LRP1B
  Gene Name: low density lipoprotein receptor-related protein 1B
  ENST ID: ENST00000437977
  CDS Start-End: 1-2396
gtagtaataaaaaatgcatccctatggatctccagtgtgatcgacttgatgactgcggagatggttcagatgagcaaggatgcagaatagctcctactgaatatacctgtgaagataatgtgaatccatgtggagatgatgcatattgtaatcaaataaaaacatctgttttctgtcgctgtaagcctggatttcagagaaacatgaaaaacagacaatgtgaagaccttaatgaatgtttggtgtttggcacatgttcccatcaatgtataaatgtggaaggatcatataaatgtgtgtgtgaccagaattttcaagaaagaaataacacctgcatagcagaaggctctgaagatcaagttctctacattgctaatgacactgatatcctgggttttatatatccattcaactacagtggcgatcatcaacaaatttctcatattgaacataattcaagaataacagggatggatgtatattatcaaagagatatgattatttggagtactcagtttaatccaggcggaattttctacaaaaggatccatggcagagaaaaaaggcaagcaaacagtggcttgatttgtcctgaatttaaaaggcccagggacattgcagttgactgggtggctggaaacatttactggactgatcattctagaatgcattggttcagttactacactactcactggaccagtctgaggtactctatcaacgtagggcagctgaatggccccaactgcaccagactcttaacaaatatggctggagaaccctatgctattgcagtaaatcctaaaagagggatgatgtactggactgttgttggggatcattcccatatagaagaagcagccatggatggtacactgagaaggattttagtacaaaagaacttacagagacccacaggtttggctgtggattattttagtgaacgcatatattgggctgactttgagctctccatcattggcagtgttctgtatgatggctctaattcagtagtctctgtcagcagcaaacaaggtttattacatccacataggatcgatatctttgaagattatatatatggagcaggacctaaaaatggtgtatttcgagttcaaaaatttggccatggttcagtagagtacttagctttaaatattgataaaacaaaaggtgttttgatatctcatcgttataaacaactagatttacccaatccatgcttggatttagcatgcgaatttctttgcttgctaaatccttctggggccacttgtgtgtgtccagaaggaaaatatttgattaatggcacctgcaatgatgacagcctgttagatgattcatgtaagttaacttgtgaaaatggaggaagatgcattttaaatgagaaaggtgatttgaggtgtcactgttggcccagttattcaggagaaagatgtgaagtcaaccactgtagcaactactgccagaatggaggaacttgcgtaccatcagttctagggagacccacctgcagctgtgcactgggtttcactgggccaaactgtggtaagacagtctgtgaggatttttgtcaaaatggaggaacctgcattgtgactgctggaaaccagccttactgccactgccagccggaatacaccggagacagatgtcagtactacgtgtgccaccactattgtgtgaattctgaatcatgtaccattggggatgatggaagtgttgaatgtgtctgtccaacgcgctatgaaggaccaaaatgtgaggttgacaagtgtgtaaggtgccatggggggcactgcattataaataaagacagtgaagatatattttgcaactgcactaatggaaagattgcctctagctgtcagttatgtgatggctactgttacaatggtggcacatgccagctggaccccgagacaaatgtacctgtgtgtctatgctccaccaactggtcaggcacacagtgtgaaaggccagccccaaagagcagcaagtctgatcatatcagcacaagaagcattgccatcattgtgcctctcgtcctcttggtgactttgataaccaccttagtaattggtttagtgctttgtaaaagaaaaagaaggacaaaaacaattagaagacaacctattatcaatggaggaataaatgtagaaattggcaatccatcttataacatgtatgaggtagatcatgatcacaacgatggaggtcttttagatcctggctttatgatagacccaacaaagccaacaaattactccaatccggtatatgcaaaattatatatggatgggcaaaactgtcgaaactccttaggaagtgttgatgaaaggaaagaactgcttccaaagaaaatagaaattggtataagagagacagtggcataatcagtgatatcttttatatgctgtataaatgtataaaatataaggattacttttgtatgttccaacagtattatacttgttttggcatcagcattacctctttctttatctttttcctggttaattgttttctgagttttttgggttttattttttgctgatgactattgattgaccatttgtatggtatttttatgaaaaagaactgcactacagtacaatttacaacaatgctgctgatatgacacacctttgaatttgttaaaattaaaaacaacgtattcctttgtagtgtgaatatgagcaatctattttatatgaacttttttggttgtacttaatcaacgaggagaatctctgcacttttccattatacggtttgaaggctgtaatacagtgtcatattatttttctgtttaaattgatggaaaaatgattgaatggtcaactctcttctttgtgcccataaagatcgattcagactctgctgaaaatatatagctctcacaagttcagcatcacctgctttgaaattagccttagattgccaaccaatagatgagaattttgaggaaaaaaattaaaaatatgtaaaattaataatttgcatgaacacagatgactacattttccaaaacttagtggactctatgtgatgtactaaatgtatacaccttgtaagcaatagttatatttaggtggtagaacatagcaaaaatataaccgaaagttggccgactgcacttgctatggaataagaccttttattctccctcagtctcgagataaatagccagcctagagcacaacagggcattgggtacttgcatcttaggtatttcttcccagtcacatccattttgtggaagattaacccaaccccttacactacactgaacactaaagaataatatataagcacacaaattggtgacagaatttcaattacgtgaacgcatcctctttgctaggtcaaaaaacaaagggcaaagcagacattttagtatacagagtgattggcaaatattttcaagatttaatatgagcaacccattatttgccctatccaaaatatattcaagggccttccaagttgtagaagaacaatgatcttcccataatcaaaagtggagagtcgaaatgctgtgccagttgctctggtattcaggtttctctgggttttacagaacgcatggaccccattcacgtttggtttgtttatcttcaaatttgagttgaaacgagtgcgatttatttaagttgtatataaaaataaaaggatagcatttttatacaaatatctttaaaggcacaaaagatttattcacaagttttggagggctttttgttcctctgatagacatgactgacttttagctgtcataatgtattaacctaacagatgaaatatgtt

SEQ ID NO: 149678 - DNA, 13219 bp, Homo sapiens
  Payload ID: 9566
  Gene Symbol: LRP1B
  Gene Name: low density lipoprotein receptor-related protein 1B
  ENST ID: ENST00000618808
  CDS Start-End: 1-13218
gaactgttatccaattgccaacagctgaattgtcagtataaatgtacaatggtcagaaatagtacaagatgttactgtgaggatggattcgaaataacagaagatgggagaagctgtaaagatcaagatgaatgtgctgtttatggtacatgcagccagacctgcagaaacacacatggatcctacacttgcagttgtgtggaaggctacctaatgcagccagacaacagatcttgcaaggctaaaattgaacctacagatagaccacctatactattaattgcaaattttgaaacaattgaggttttctatcttaatggaagtaaaatggcaactctaagctcagtcaatggaaatgaaattcatactctggattttatttataatgaagatatgatttgttggattgaatcaagagaatcttcaaatcaactcaaatgtatccagataacaaaagcaggaggattaacagatgaatggacaatcaatattcttcaatccttccacaatgtgcaacaaatggcgattgactggctcactcgaaatctctattttgtggaccatgtcggtgaccggatctttgtttgtaattccaacggttctgtatgtgtcaccctgattgatctggagcttcacaatcctaaagcaatagcagtagatccaatagcaggaaaacttttctttactgactacgggaatgtcgccaaagtggagagatgtgacatggatgggatgaaccgaacaaggataattgattcaaagacagagcagccagctgcactggcactagacctagtcaacaaattggtttactgggtagatctttacttggactatgtgggagtagtggactatcaaggaaaaaatagacacactgtcattcaaggcagacaagttagacatctttatggtataactgtgtttgaagattatttgtatgcaaccaattctgataactacaatatcgtaaggataaaccgatttaatgggactgatattcactcattaattaaaattgagaatgcttggggaatccgaatttatcaaaaaagaactcaaccaacagtcagaagccatgcatgtgaagtcgatccatatggaatgccagggggctgttcacacatctgtctactcagcagcagttacaaaactcggacttgtcgctgcaggactggcttcaacttgggaagtgatggcaggtcatgcaaaagaccaaagaatgagttgttcctcttttatgggaaaggacgcccaggaattgttagaggaatggacttgaataccaagatagctgatgaatacatgatccccatagaaaatctggtaaaccctcgtgctttagactttcacgcagaaaccaattacatctactttgctgacaccaccagtttcctaattggccggcagaagatagatggcacagagagagaaaccatcctgaaagatgatctggataatgtagagggcattgctgtggactggattggaaataatctttactggaccaatgatggccataggaaaaccattaatgtggccaggctggaaaaagcttctcagagtcggaagactcttttagagggtgaaatgtctcatcccagaggaattgtggtggatccagttaatggttggatgtattggacagactgggaggaagatgaaatagatgacagcgtgggaaggattgagaaggcctggatggatggattcaatcggcagatttttgtgacttcaaagatgctgtggccaaacggtttaactctggactttcacaccaacacattatactggtgtgatgcctattacgatcatattgaaaaagtatttttgaatgggactcacaggaagattgtttacagtgggagagagttgaaccaccctttcggactgtcgcatcatggaaattatgtgttctggactgattatatgaatggttccatttttcaactagatttgataacaagtgaggtgacattgctgaggcatgaaagaccacccctatttgggcttcagatttatgatccacgaaagcaacaaggtgacaatatgtgccgagtaaataatgggggctgtagtacactttgcttggctatcccaggaggccgggtgtgtgcttgtgccgataatcaacttttggatgaaaatgggacaacttgcacatttaatcctggagaagcactacctcacatatgtaaagctggagagtttcgctgcaaaaacagacactgtatccaagctcggtggaaatgtgatggcgacgatgactgcctagacggaagcgatgaggattcagtaaactgcttcaatcatagctgtcctgatgatcagtttaaatgccagaataatcgctgcatccccaagagatggctttgtgatggagctaatgactgtgggagcaatgaagatgaatccaatcaaacttgcacagccagaacatgccaggtagaccagttttcttgcggaaatgggcgttgcattcccagagcatggctgtgtgacagggaagacgactgtggtgaccagacagatgaaatggcatcttgtgaattcccaacttgtgagccactaacccaattcgtatgcaaaagtggaagatgcattagcagcaaatggcactgcgactctgatgacgactgtggggacgggagtgatgaggtgggctgtgttcactcttgctttgataatcagttcagatgttccagtggcagatgcatcccaggccactgggcctgtgatggtgacaatgactgtggggacttcagtgatgaagcccagatcaattgtactaaagaagagattcattctcctgctggttgtaacggaaatgaatttcagtgccaccctgatggtaattgcgttcctgatttgtggcgctgtgatggagaaaaagactgtgaagatggtagtgatgaaaaaggttgcaatggtaccatacgattgtgtgaccacaaaaccaagttttcctgttggagtacagggagatgcatcaacaaagcatgggtgtgtgatggagatattgattgcgaagatcagtcagatgaagatgactgtgacagtttcttgtgtggaccacccaagcatccttgtgctaatgacacctcagtctgcctgcagccagagaaactctgcaatgggaaaaaggattgtcctgatggctctgatgaaggctatctctgtgatgagtgttcgctgaacaatggaggctgtagcaaccactgttctgttgttcctggaagaggaattgtctgttcctgccctgaaggacttcaactcaacaaagacaataaaacatgtgaaattgtggattattgtagcaatcatctaaagtgcagccaagtatgtgagcagcacaagcacacagtcaagtgctcatgttatgaaggttggaagctggatgtagacggtgaaagttgtacaagtgttgatccttttgaagcattcatcatcttttctattcgtcatgagatcagaaggattgatcttcacaaaagagactatagtctacttgttcctggattgagaaacacaatagcacttgattttcacttcaatcaaagtttactttattggacagatgttgtagaagacagaatataccggggaaagctttctgaaagtggaggtgtcagtgccattgaagtggttgtggagcatggcctggctactccagaaggcctgacagtcgactggatagcaggaaacatatactggatagacagcaatctggaccaaatcgaagtggccaaactagatggctccctaagaactacactaatagcaggagccatggaacaccccagggccattgctttggacccaagatatggaattcttttctggacagactgggatgcaaattttcctcgcattgaatctgcctctatgagtggtgctgggagaaaaaccatctataaagacatgaaaactggggcttggcctaatggactaactgtggaccactttgagaaaaggatagtgtggacagacgccaggtcagatgctatttattcagccctctatgatggaacaaacatgatagaaatcatccgaggtcatgaatacctttcccatccctttgctgtgtctctatatgggagtgaagtctactggacagactggaggaccaacacattgtccaaagccaataagtggacagggcagaatgtcagtgtgattcagaaaaccagtgcacagccatttgaccttcagatataccatcccagtcgccagccacaggctcccaatccttgtgcagctaatgatggcaaaggcccctgctctcacatgtgtctaatcaatcacaataggagtgctgcctgtgcgtgcccccacttgatgaagctttcttcagacaagaagacctgctatgaaatgaaaaaatttcttctttatgcaagacgttctgaaatcagaggagtggatattgacaatccatactttaacttcatcacggcatttacagtccctgatattgatgacgttactgtgatagacttcgatgcatctgaggaacgtttatactggacagatattaaaacacaaaccattaaacgagcttttattaacggaactgggttagaaactgttatttcaagagatattcagagtatcagagggctagcagtggattgggtgtcacgtaatttatactggattagctcagaatttgatgaaacgcaaattaatgtggcaaggctagatggctctttgaaaacctcaattatccatggaatcgataagccacagtgtcttgcagctcacccagtcaggggaaaactctactggaccgatggaaacacaattaacatggcaaatatggatggcagtaatagcaagattctgtttcagaatcagaaggagccagttggtctatcgatagactatgtggaaaacaagctttattggatcagttcagggaatggaaccataaatagatgcaacctggatggtggtaatttagaagtaatcgagtcaatgaaagaagaattaacaaaagctacagccctaaccatcatggataagaaactgtggtgggcagaccaaaacttagcccagctaggaacctgcagcaaaagagacggaagaaaccccaccatcctacggaataagacttctggggtagttcatatgaaagtctatgataaagaagcacagcaaggcagcaattcctgccaactaaacaatggtggatgctctcaactttgtttaccaacatctgaaactacaaggacttgtatgtgtacagtgggatattatctccaaaagaaccgtatgtcatgtcaaggtatagaatcatttcttatgtactctgttcatgaaggaatcaggggaatacctcttgaaccaagtgacaaaatggatgctttgatgcctatatcaggaacttcatttgccgtgggaatagatttccatgcagaaaatgataccatctactggacagacatgggcttcaataaaattagcagagctaaaagagatcagacttggaaagaagatatcattaccaatggcttgggaagagtggaagggatagctgttgactggattgctggtaacatatattggacagatcatggtttcaacttaattgaagttgcaagactcaatggttctttccgttatgtaattatttcccaaggcctggatcaaccaagatctatagctgtgcacccagagaaaggcctcttgttctggactgaatggggacaaatgccctgtattggaaaggctcgcttggatggctcagagaaggttgtccttgtaagcatgggaatagcatggccgaatggcatctccatcgactatgaggaaaataaattgtactggtgtgatgctcgcacagacaagatagagagaatcgaccttgagactggagggaatcgcgagatggtgctgtcaggaagcaatgtggatatgttttcagttgcagtctttggggcttacatctactggtctgacagagcacatgcaaacgggtctgtcagaaggggccacaagaatgatgccacagaaacgataaccatgagaaccggccttggagtcaacctgaaggaggttaaaatatttaaccgagtaagagagaaagggaccaatgtttgtgccagggacaatggtggctgtaagcaactctgtctttatcgaggaaattcccggagaacttgtgcttgtgcccatggatatttggcagaagatggagttacttgcctgaggcatgaaggctatttactgtattcaggaagaacaatattaaaaagtatacatctttctgatgaaaccaatttaaattccccaataaggccatatgagaatccacgttatttcaagaatgtcatagccttggcttttgactataatcaaagaagaaaaggtaccaaccgaatcttttacagtgatgcacactttggaaatatacagcttattaaagacaactgggaagacagacaagtaattgttgaaaatgtgggttctgtggaaggacttgcctatcacagagcctgggatacactgtactggacaagctctaccacctcatccatcaccagacacactgtggaccagactcggcctggagcatttgacagggaagctgtcatcaccatgtcagaagatgaccatccacatgtgctagccttggatgaatgtcaaaatttaatgttttggaccaactggaatgaacaacatccaagtatcatgagatctactctgactgggaaaaatgctcaagtggtggtcagtacagacatactcactccaaatggacttactatcgactaccgtgcagagaagctgtatttctcagatggcagtctaggaaaaattgaaaggtgtgaatacgatggatcccagagacatgtgatagttaaatctgggccagggactttcctcagtttggctgtttatgacaattatatattctggtcggactggggaagaagagctatactgcggtccaacaagtacacaggaggagatacaaaaattcttcgttccgatattccacatcagccaatgggaatcatagctgttgccaatgacaccaatagctgtgaactttctccatgtgcattattgaatggaggctgccatgacttgtgccttttaactcccaatgggagagtgaattgttcctgcagaggggaccgaatattgctagaggacaacagatgtgtgactaaaaattcctcctgcaacgcttattcggagtttgaatgtggaaatggtgagtgcattgactaccagctcacctgtgatggcattcctcactgtaaagataaatcagatgaaaaactgctctactgtgaaaacagaagctgtcgaagaggcttcaagccatgctataatcgccgctgcattcctcatggcaagttatgtgatggagaaaatgactgcggagacaactctgatgaattagattgtaaagtttcaacctgtgccacggttgagttccgctgtgcagatgggacttgtattccaagatcagcacgatgcaaccagaacatagattgtgcagatgcttcagatgaaaagaactgcaataacacagactgcacacatttctataagcttggagtgaaaaccacagggttcataagatgtaattctacctcactgtgtgttctgccaacctggatatgcgacgggtctaatgactgtggagactattcagatgaattaaagtgcccagttcaaaacaaacacaaatgtgaagaaaattattttagttgtcctagtggaagatgcattttgaatacctggatatgcgatggtcagaaagattgtgaggatggacgtgatgaattccactgtgattcttcttgctcttggaaccaatttgcttgttccgcacaaaaatgtatttctaagcattggatttgtgatggagaagatgactgtggggatgggttagatgaaagtgacagcatttgtggtgccataacctgtgctgctgacatgttcagctgccagggctctcgtgcctgcgtgccccgacattggctttgtgatggtgaaagggactgtccagatggaagcgatgagctttccacagcaggctgcgctcccaataatacatgtgatgaaaatgctttcatgtgccataataaagtatgcattcccaagcaatttgtttgtgaccatgatgacgactgtggagatggctctgatgagtcaccgcagtgtggatatcgacagtgtggtacagaagaatttagttgtgctgatgggcggtgtcttctaaatactcaatggcagtgtgatggagactttgactgtcctgaccattctgatgaagcacctttaaacccaaagtgtaaaagtgcagaacagtcatgcaacagttcattttttatgtgcaaaaatggcaggtgcattcccagtggaggtctttgcgacaataaggatgactgtggcgatggttcagatgagagaaactgccatataaatgaatgtttgagtaagaaagtcagtggatgttctcaagactgtcaagaccttccggtcagttataagtgcaaatgctggcctggattccaactgaaggatgacggcaaaacatgtgtagacattgatgaatgctcttcaggctttccctgtagccagcaatgcatcaatacatacgggacttacaagtgcctctgtacagatgggtatgaaatacaacctgataacccaaatggctgcaaatcgctctcagatgaagaaccttttttaattcttgctgatcatcatgagataaggaaaattagcactgatggctccaactacacacttttaaaacagggattaaacaatgttattgctatagactttgattacagagaagaattcatctattggatcgattctagccgacccaatggcagtcgcataaatagaatgtgtttaaatggaagtgacattaaggtagttcataacacagcggtccccaatgcacttgctgtcgattggattggaaaaaacctctattggtctgacacagaaaaaagaatcattgaagtatccaaactcaatggcttgtaccctactatactcgttagcaaaaggctgaagtttcccagagacttgtctttagatcctcaagctggatatttgtattggattgactgctgcgagtatcctcatattggccgtgttggaatggatggaaccaatcagagtgttgtcatagaaaccaagatttctagacctatggcactaacaatagattatgttaatcgtagactctactgggccgatgaaaatcacattgaatttagcaacatggatggatctcatagacacaaagtccctaatcaagatattccaggggtgattgcactaacattgtttgaagactacatctactggactgatgggaaaaccaagtcactcagccgtgcccataaaacatcgggagcagacagactctcactgatttactcatggcatgccatcacagatatccaggtgtatcattcttatagacaacctgatgtctccaaacatctctgcatgataaataatggtggttgcagtcatttgtgccttttagcccctggaaaaacccacacttgtgcatgtcccactaacttctatctggcagctgataataggacttgcttatccaactgcacagccagccagtttcgttgcaaaactgacaaatgtattccattctggtggaaatgtgacaccgtggatgactgtggtgatggatctgatgaacctgatgactgtcctgaatttagatgtcagccaggccgatttcagtgtgggactggactctgtgctctaccagctttcatctgtgatggagagaatgattgtggagacaattctgatgaactcaactgtgacacacatgtctgcctgtcaggtcaattcaaatgtaccaagaaccagaaatgtatcccagtaaacttaagatgtaatgggcaagatgactgtggtgatgaggaagatgaaagagactgtcctgaaaacagctgttctccagactatttccagtgtaagactacgaagcattgcatttccaagctgtgggtttgtgacgaggatccagactgtgcagatgcatcagacgaggccaactgcgataaaaagacttgtggacctcatgaattccagtgtaaaaacaacaactgtattcccgatcactggcggtgtgatagccaaaatgactgcagtgataattcagatgaagaaaactgtaagccacagacatgtacattgaaagatttcctctgtgccaatggggactgtgtttcttcaaggttttggtgtgatggagattttgactgtgcagatggctctgatgagagaaattgtgagacaagttgttccaaagatcagttccggtgttccaatggtcagtgtataccagcaaaatggaaatgtgatggccatgaagactgcaaatatggggaagatgagaaaagctgtgagccagcttctcctacttgctcatcacgtgaatatatatgtgccagtgatggatgtatttcagcatctttgaaatgtaatggagaatatgattgtgctgatggttcagatgagatggactgtgtgactgaatgtaaggaagatcagtttcggtgcaaaaataaagcccactgtattccaattagatggctgtgtgatggaattcatgactgtgtggatggcagtgatgaagagaactgtgaaagaggaggaaatatatgtagagctgatgagttcctttgcaataattctctctgcaaactacatttctgggtgtgtgatggagaggacgactgtggagacaactctgatgaagcccctgatatgtgtgtcaaatttctttgtccatccacgagacctcacagatgcagaaataacagaatatgcctacagtcggagcaaatgtgcaatgggattgatgaatgcggtgacaattcagatgaagatcactgtggtggtaagctgacatataaagcaaggccttgtaaaaaggatgagtttgcttgtagtaataaaaaatgcatccctatggatctccagtgtgatcgacttgatgactgcggagatggttcagatgagcaaggatgcagaatagctcctactgaatatacctgtgaagataatgtgaatccatgtggagatgatgcatattgtaatcaaataaaaacatctgttttctgtcgctgtaagcctggatttcagagaaacatgaaaaacagacaatgtgaagaccttaatgaatgtttggtgtttggcacatgttcccatcaatgtataaatgtggaaggatcatataaatgtgtgtgtgaccagaattttcaagaaagaaataacacctgcatagcagaaggctctgaagatcaagttctctacattgctaatgacactgatatcctgggttttatatatccattcaactacagtggcgatcatcaacaaatttctcatattgaacataattcaagaataacagggatggatgtatattatcaaagagatatgattatttggagtactcagtttaatccaggcggaattttctacaaaaggatccatggcagagaaaaaaggcaagcaaacagtggcttgatttgtcctgaatttaaaaggcccagggacattgcagttgactgggtggctggaaacatttactggactgatcattctagaatgcattggttcagttactacactactcactggaccagtctgaggtactctatcaacgtagggcagctgaatggccccaactgcaccagactcttaacaaatatggctggagaaccctatgctattgcagtaaatcctaaaagagggatgatgtactggactgttgttggggatcattcccatatagaagaagcagccatggatggtacactgagaaggattttagtacaaaagaacttacagagacccacaggtttggctgtggattattttagtgaacgcatatattgggctgactttgagctctccatcattggcagtgttctgtatgatggctctaattcagtagtctctgtcagcagcaaacaaggtttattacatccacataggatcgatatctttgaagattatatatatggagcaggacctaaaaatggtgtatttcgagttcaaaaatttggccatggttcagtagagtacttagctttaaatattgataaaacaaaaggtgttttgatatctcatcgttataaacaactagatttacccaatccatgcttggatttagcatgcgaatttctttgcttgctaaatccttctggggccacttgtgtgtgtccagaaggaaaatatttgattaatggcacctgcaatgatgacagcctgttagatgattcatgtaagttaacttgtgaaaatggaggaagatgcattttaaatgagaaaggtgatttgaggtgtcactgttggcccagttattcaggagaaagatgtgaagtcaaccactgtagcaactactgccagaatggaggaacttgcgtaccatcagttctagggagacccacctgcagctgtgcactgggtttcactgggccaaactgtggtaagacagtctgtgaggatttttgtcaaaatggaggaacctgcattgtgactgctggaaaccagccttactgccactgccagccggaatacaccggagacagatgtcagtactacgtgtgccaccactattgtgtgaattctgaatcatgtaccattggggatgatggaagtgttgaatgtgtctgtccaacgcgctatgaaggaccaaaatgtgaggttgacaagtgtgtaaggtgccatggggggcactgcattataaataaagacagtgaagatatattttgcaactgcactaatggaaagattgcctctagctgtcagttatgtgatggctactgttacaatggtggcacatgccagctggaccccgagacaaatgtacctgtgtgtctatgctccaccaactggtcaggcacacagtgtgaaaggccagccccaaagagcagcaagtctgatcatatcagcacaagaagcattgccatcattgtgcctctcgtcctcttggtgactttgataaccaccttagtaattggtttagtgctttgtaaaagaaaaagaaggacaaaaacaattagaagacaacctattatcaatggaggaataaatgtagaaattggcaatccatcttataacatgtatgaggtagatcatgatcacaacgatggaggtcttttagatcctggctttatgatagacccaacaaagg

SEQ ID NO: 149679 - DNA, 15808 bp, Homo sapiens
  Payload ID: 9567
  Gene Symbol: LRP2
  Gene Name: low density lipoprotein receptor-related protein 2
  Uniprot ID: P98164
  ENST ID: ENST00000263816
  CDS Start-End: 287-14254
aaagtgcagggggcgggccgggcggcagggggcctgcccgctggattcccgcatgcttgttccggggcggtcgggtctaaagggctttatgcactgtctggagggtggggactggcgcgggtagaaaacgggatgcctcgggcgtgggggcaggcttttggccactaggagctggcggaggtgcagacctaaaggagcgttcgctagcagaggcgctgccggtgcggtgtgctacgcgcgcccacctcccggggaaggaacggcgaggccggggaccgtcgcggagatggatcgcgggccggcagcagtggcgtgcacgctgctcctggctctcgtcgcctgcctagcgccggccagtggccaagaatgtgacagtgcgcattttcgctgtggaagtgggcattgcatccctgcagactggaggtgtgatgggaccaaagactgttcagatgacgcggatgaaattggctgcgctgttgtgacctgccagcagggctatttcaagtgccagagtgagggacaatgcatccccaactcctgggtgtgtgaccaagatcaagactgtgatgatggctcagatgaacgtcaagattgctcacaaagtacatgctcaagtcatcagataacatgctccaatggtcagtgtatcccaagtgaatacaggtgcgaccacgtcagagactgccccgatggagctgatgagaatgactgccagtacccaacatgtgagcagcttacttgtgacaatggggcctgctataacaccagtcagaagtgtgattggaaagttgattgcagggactcctcagatgaaatcaactgcactgagatatgcttgcacaatgagttttcatgtggcaatggagagtgtatccctcgtgcttatgtctgtgaccatgacaatgattgccaagacggcagtgacgaacatgcttgcaactatccgacctgcggtggttaccagttcacttgccccagtggccgatgcatttatcaaaactgggtttgtgatggagaagatgactgtaaagataatggagatgaagatggatgtgaaagcggtcctcatgatgttcataaatgttccccaagagaatggtcttgcccagagtcgggacgatgcatctccatttataaagtttgtgatgggattttagattgcccaggaagagaagatgaaaacaacactagtaccggaaaatactgtagtatgactctgtgctctgccttgaactgccagtaccagtgccatgagacgccgtatggaggagcgtgtttttgtcccccaggttatatcatcaaccacaatgacagccgtacctgtgttgagtttgatgattgccagatatggggaatttgtgaccagaagtgtgaaagccgacctggccgtcacctgtgccactgtgaagaagggtatatcttggagcgtggacagtattgcaaagctaatgattcctttggcgaggcctccattatcttctccaatggtcgggatttgttaattggtgatattcatggaaggagcttccggatcctagtggagtctcagaatcgtggagtggccgtgggtgtggctttccactatcacctgcaaagagttttttggacagacaccgtgcaaaataaggttttttcagttgacattaatggtttaaatatccaagaggttctcaatgtttctgttgaaaccccagagaacctggctgtggactgggttaataataaaatctatctagtggaaaccaaggtcaaccgcatagatatggtaaatttggatggaagctatcgggttacccttataactgaaaacttggggcatcctagaggaattgccgtggacccaactgttggttatttatttttctcagattgggagagcctttctggggaacctaagctggaaagggcattcatggatggcagcaaccgtaaagacttggtgaaaacaaagctgggatggcctgctggggtaactctggatatgatatcgaagcgtgtttactgggttgactctcggtttgattacattgaaactgtaacttatgatggaattcaaaggaagactgtagttcatggaggctccctcattcctcatccctttggagtaagcttatttgaaggtcaggtgttctttacagattggacaaagatggccgtgctgaaggcaaacaagttcacagagaccaacccacaagtgtactaccaggcttccctgaggccctatggagtgactgtttaccattccctcagacagccctatgctaccaatccgtgtaaagataacaatgggggctgtgagcaggtctgtgtcctcagccacagaacagataatgatggtttgggtttccgttgcaagtgcacattcggcttccaactggatacagatgagcgccactgcattgctgttcagaatttcctcattttttcatcccaagttgctattcgtgggatcccgttcaccttgtctacccaggaagatgtcatggttccagtttcggggaatccttctttctttgtcgggattgattttgacgcccaggacagcactatctttttttcagatatgtcaaaacacatgatttttaagcaaaagattgatggcacaggaagagaaattctcgcagctaacagggtggaaaatgttgaaagtttggcttttgattggatttcaaagaatctctattggacagactctcattacaagagtatcagtgtcatgaggctagctgataaaacgagacgcacagtagttcagtatttaaataacccacggtcggtggtagttcatccttttgccgggtatctattcttcactgattggttccgtcctgctaaaattatgagagcatggagtgacggatctcacctcttgcctgtaataaacactactcttggatggcccaatggcttggccatcgattgggctgcttcacgattgtactgggtagatgcctattttgataaaattgagcacagcacctttgatggtttagacagaagaagactgggccatatagagcagatgacacatccgtttggacttgccatctttggagagcatttattttttactgactggagactgggtgccattattcgagtcaggaaagcagatggtggagaaatgacagttatccgaagtggcattgcttacatactgcatttgaaatcgtatgatgtcaacatccagactggttctaacgcctgtaatcaacccacgcatcctaacggtgactgcagccacttctgcttcccggtgccaaatttccagcgagtgtgtgggtgcccttatggaatgaggctggcttccaatcacttgacatgcgagggggacccaaccaatgaaccacccacagagcagtgtggcttattttccttcccctgtaaaaatggcagatgtgtgcccaattactatctctgtgatggagtcgatgattgtcatgataacagtgatgagcaactatgtggcacacttaataatacctgttcatcttcggcgttcacctgtggccatggggagtgcattcctgcacactggcgctgtgacaaacgcaacgactgtgtggatggcagtgatgagcacaactgccccacccacgcacctgcttcctgccttgacacccaatacacctgtgataatcaccagtgtatctcaaagaactgggtctgtgacacagacaatgattgtggggatggatctgatgaaaagaactgcaattcgacagagacatgccaacctagtcagtttaattgccccaatcatcgatgtattgacctatcgtttgtctgtgatggtgacaaggattgtgttgatggatctgatgaggttggttgtgtattaaactgtactgcttctcaattcaagtgtgccagtggggataaatgtattggcgtcacaaatcgttgtgatggtgtttttgattgcagtgacaactcggatgaagcaggctgtccaaccaggcctcctggtatgtgccactcagatgaatttcagtgccaagaagatggtatctgcatcccgaacttctgggaatgtgatgggcatccagactgcctctatggatctgatgagcacaatgcctgtgtccccaagacttgcccttcatcatatttccactgtgacaacggaaactgcatccacagggcatggctctgtgatcgggacaatgactgcggggatatgagtgatgagaaggactgccctactcagccctttcgctgtcctagttggcaatggcagtgtcttggccataacatctgtgtgaatctgagtgtagtgtgtgatggcatctttgactgccccaatgggacagatgagtccccactttgcaatgggaacagctgctcagatttcaatggtggttgtactcacgagtgtgttcaagagccctttggggctaaatgcctatgtccattgggattcttacttgccaatgattctaagacctgtgaagacatagatgaatgtgatattctaggctcttgtagccagcactgttacaatatgagaggttctttccggtgctcgtgtgatacaggctacatgttagaaagtgatgggaggacttgcaaagttacagcatctgagagtctgctgttacttgtggcaagtcagaacaaaattattgccgacagtgtcacctcccaggtccacaatatctattcattggtcgagaatggttcttacattgtagctgttgattttgattcaattagtggtcgtatcttttggtctgatgcaactcagggtaaaacctggagtgcgtttcaaaatggaacggacagaagagtggtatttgacagtagcatcatcttgactgaaactattgcaatagattgggtaggtcgtaatctttactggacagactatgctctggaaacaattgaagtctccaaaattgatgggagccacaggactgtgctgattagtaaaaacctaacaaatccaagaggactagcattagatcccagaatgaatgagcatctactgttctggtctgactggggccaccaccctcgcatcgagcgagccagcatggacggcagcatgcgcactgtcattgtccaggacaagatcttctggccctgcggcttaactattgactaccccaacagactgctctacttcatggactcctatcttgattacatggacttttgtgattataatggacaccatcggagacaggtgatagccagtgatttgattatacggcacccctatgccctaactctctttgaagactctgtgtactggactgaccgtgctactcgtcgggttatgcgagccaacaagtggcatggagggaaccagtcagttgtaatgtataatattcaatggccccttgggattgttgcggttcatccttcgaaacaaccaaattccgtgaatccatgtgccttttcccgctgcagccatctctgcctgctttcctcacaggggcctcatttttactcctgtgtttgtccttcaggatggagtctgtctcctgatctcctgaattgcttgagagatgatcaacctttcttaataactgtaaggcaacatataatttttggaatctcccttaatcctgaggtgaagagcaatgatgctatggtccccatagcagggatacagaatggtttagatgttgaatttgatgatgctgagcaatacatctattgggttgaaaatccaggtgaaattcacagagtgaagacagatggcaccaacaggacagtatttgcttctatatctatggtggggccttctatgaacctggccttagattggatttcaagaaacctttattctaccaatcctagaactcagtcaatcgaggttttgacactccacggagatatcagatacagaaaaacattgattgccaatgatgggacagctcttggagttggctttccaattggcataactgttgatcctgctcgtgggaagctgtactggtcagaccaaggaactgacagtggggttcctgccaagatcgccagtgctaacatggatggcacatctgtgaaaactctctttactgggaacctcgaacacctggagtgtgtcactcttgacatcgaagagcagaaactctactgggcagtcactggaagaggagtgattgaaagaggaaacgtggatggaacagatcgaatgatcctggtacaccagctttcccacccctggggaattgcagtccatgattctttcctttattatactgatgaacagtatgaggtcattgaaagagttgataaggccactggggccaacaaaatagtcttgagagataatgttccaaatctgaggggtcttcaagtttatcacagacgcaatgccgccgaatcctcaaatggctgtagcaacaacatgaatgcctgtcagcagatttgcctgcctgtaccaggaggattgttttcctgcgcctgtgccactggatttaaactcaatcctgataatcggtcctgctctccatataactctttcattgttgtttcaatgctgtctgcaatcagaggctttagcttggaattgtcagatcattcagaaaccatggtgccggtggcaggccaaggacgaaacgcactgcatgtggatgtggatgtgtcctctggctttatttattggtgtgattttagcagctcagtggcatctgataatgcgatccgtagaattaaaccagatggatcttctctgatgaacattgtgacacatggaataggagaaaatggagtccggggtattgcagtggattgggtagcaggaaatctttatttcaccaatgcctttgtttctgaaacactgatagaagttctgcggatcaatactacttaccgccgtgttcttcttaaagtcacagtggacatgcctaggcatattgttgtagatcccaagaacagatacctcttctgggctgactatgggcagagaccaaagattgagcgttctttccttgactgtaccaatcgaacagtgcttgtgtcagagggcattgtcacaccacggggcttggcagtggaccgaagtgatggctacgtttattgggttgatgattctttagatataattgcaaggattcgtatcaatggagagaactctgaagtgattcgttatggcagtcgttacccaactccttatggcatcactgtttttgaaaattctatcatatgggtagataggaatttgaaaaagatcttccaagccagcaaggaaccagagaacacagagccacccacagtgataagagacaatatcaactggctaagagatgtgaccatctttgacaagcaagtccagccccggtcaccagcagaggtcaacaacaacccttgcttggaaaacaatggtgggtgctctcatctctgctttgctctgcctggattgcacaccccaaaatgtgactgtgcctttgggaccctgcaaagtgatggcaagaattgtgccatttcaacagaaaatttcctcatctttgccttgtctaattccttgagaagcttacacttggaccctgaaaaccatagcccacctttccaaacaataaatgtggaaagaactgtcatgtctctagactatgacagtgtaagtgatagaatctacttcacacaaaatttagcctctggagttggacagatttcctatgccaccctgtcttcagggatccatactccaactgtcattgcttcaggtatagggactgctgatggcattgcctttgactggattactagaagaatttattacagtgactacctcaaccagatgattaattccatggctgaagatgggtctaaccgcactgtgatagcccgcgttccaaaaccaagagcaattgtgttagatccctgccaagggtacctgtactgggctgactgggatacacatgccaaaatcgagagagccacattgggaggaaacttccgcgtacccattgtgaacagcagtctggtcatgcccagtgggctgactctggactatgaagaggaccttctctactgggtggatgctagtctgcagaggattgaacgcagcactctgacgggcgtggatcgtgaagtcattgtcaatgcagccgttcatgcttttggcttgactctctatggccagtatatttactggactgacttgtacacacaaagaatttaccgagctaacaaatatgacgggtcaggtcagattgcaatgaccacaaatttgctctcccagcccaggggaatcaacactgttgtgaagaaccagaaacaacagtgtaacaatccttgtgaacagtttaatgggggctgcagccatatctgtgcaccaggtccaaatggtgccgagtgccagtgtccacatgagggcaactggtatttggccaacaacaggaagcactgcattgtggacaatggtgaacgatgtggtgcatcttccttcacctgctccaatgggcgctgcatctcggaagagtggaagtgtgataatgacaacgactgtggggatggcagtgatgagatggaaagtgtctgtgcacttcacacctgctcaccgacagccttcacctgtgccaatgggcgatgtgtccaatactcttaccgctgtgattactacaatgactgtggtgatggcagtgatgaggcagggtgcctgttcagggactgcaatgccaccacggagtttatgtgcaataacagaaggtgcatacctcgtgagtttatctgcaatggtgtagacaactgccatgataataacacttcagatgagaaaaattgccctgatcgcacttgccagtctggatacacaaaatgtcataattcaaatatttgtattcctcgcgtttatttgtgtgacggagacaatgactgtggagataacagtgatgaaaaccctacttattgcaccactcacacgtgcagcagcagtgagttccaatgcgcatctgggcgctgtattcctcaacattggtattgtgatcaagaaacagattgttttgatgcctctgatgaacctgcctcttgtggtcactctgagcgaacatgcctagctgatgagttcaagtgtgatggtgggaggtgcatcccaagcgaatggatctgtgacggtgataatgactgtggggatatgagtgacgaggataaaaggcaccagtgtcagaatcaaaactgctcggattccgagtttctctgtgtaaatgacagacctccggacaggaggtgcattccccagtcttgggtctgtgatggcgatgtggattgtactgacggctacgatgagaatcagaattgcaccaggagaacttgctctgaaaatgaattcacctgtggttacggactgtgtatcccaaagatattcaggtgtgaccggcacaatgactgtggtgactatagcgacgagaggggctgcttataccagacttgccaacagaatcagtttacctgtcagaacgggcgctgcattagtaaaaccttcgtctgtgatgaggataatgactgtggagacggatctgatgagctgatgcacctgtgccacaccccagaacccacgtgtccacctcacgagttcaagtgtgacaatgggcgctgcatcgagatgatgaaactctgcaaccacctagatgactgtttggacaacagcgatgagaaaggctgtggcattaatgaatgccatgacccttcaatcagtggctgcgatcacaactgcacagacaccttaaccagtttctattgttcctgtcgtcctggttacaagctcatgtctgacaagcggacttgtgttgatattgatgaatgcacagagatgccttttgtctgtagccagaagtgtgagaatgtaataggctcctacatctgtaagtgtgccccaggctacctccgagaaccagatggaaagacctgccggcaaaacagtaacatcgaaccctatctcatttttagcaaccgttactatttgagaaatttaactatagatggctatttttactccctcatcttggaaggactggacaatgttgtggcattagattttgaccgagtagagaagagattgtattggattgatacacagaggcaagtcattgagagaatgtttctgaataagacaaacaaggagacaatcataaaccacagactaccagctgcagaaagtctggctgtagactgggtttccagaaagctctactggttggatgcccgcctggatggcctctttgtctctgacctcaatggtggacaccgccgcatgctggcccagcactgtgtggatgccaacaacaccttctgctttgataatcccagaggacttgcccttcaccctcaatatgggtacctctactgggcagactggggtcaccgcgcatacattgggagagtaggcatggatggaaccaacaagtctgtgataatctccaccaagttagagtggcctaatggcatcaccattgattacaccaatgatctactctactgggcagatgcccacctgggttacatagagtactctgatttggagggccaccatcgacacacggtgtatgatggggcactgcctcaccctttcgctattaccatttttgaagacactatttattggacagattggaatacaaggacagtggaaaagggaaacaaatatgatggatcaaatagacagacactggtgaacacaacacacagaccatttgacatccatgtgtaccatccatataggcagcccattgtgagcaatccctgtggtaccaacaatggtggctgttctcatctctgcctcatcaagccaggaggaaaagggttcacttgcgagtgtccagatgacttccgcacccttcagctgagtggcagcacctactgcatgcccatgtgctccagcacccagttcctgtgcgctaacaatgaaaagtgcattcctatctggtggaaatgtgatggacagaaagactgctcagatggctctgatgaactggccctttgcccgcagcgcttctgccgactgggacagttccagtgcagtgacggcaactgcaccagcccgcagactttatgcaatgctcaccaaaattgccctgatgggtctgatgaagaccgtcttctttgtgagaatcaccactgtgactccaatgaatggcagtgcgccaacaaacgttgcatcccagaatcctggcagtgtgacacatttaacgactgtgaggataactcagatgaagacagttcccactgtgccagcaggacctgccggccgggccagtttcggtgtgctaatggccgctgcatcccgcaggcctggaagtgtgatgtggataatgattgtggagaccactcggatgagcccattgaagaatgcatgagctctgcccatctctgtgacaacttcacagaattcagctgcaaaacaaattaccgctgcatcccaaagtgggccgtgtgcaatggtgtagatgactgcagggacaacagtgatgagcaaggctgtgaggagaggacatgccatcctgtgggggatttccgctgtaaaaatcaccactgcatccctcttcgttggcagtgtgatgggcaaaatgactgtggagataactcagatgaggaaaactgtgctccccgggagtgcacagagagcgagtttcgatgtgtcaatcagcagtgcattccctcgcgatggatctgtgaccattacaacgactgtggggacaactcagatgaacgggactgtgagatgaggacctgccatcctgaatattttcagtgtacaagtggacattgtgtacacagtgaactgaaatgcgatggatccgctgactgtttggatgcgtctgatgaagctgattgtcccacacgctttcctgatggtgcatactgccaggctactatgttcgaatgcaaaaaccatgtttgtatcccgccatattggaaatgtgatggcgatgatgactgtggcgatggttcagatgaagaacttcacctgtgcttggatgttccctgtaattcaccaaaccgtttccggtgtgacaacaatcgctgcatttatagtcatgaggtgtgcaatggtgtggatgactgtggagatggaactgatgagacagaggagcactgtagaaaaccgacccctaaaccttgtacagaatatgaatataagtgtggcaatgggcattgcattccacatgacaatgtgtgtgatgatgccgatgactgtggtgactggtccgatgaactgggttgcaataaaggaaaagaaagaacatgtgctgaaaatatatgcgagcaaaattgtacccaattaaatgaaggaggatttatctgctcctgtacagctgggttcgaaaccaatgtttttgacagaacctcctgtctagatatcaatgaatgtgaacaatttgggacttgtccccagcactgcagaaataccaaaggaagttatgagtgtgtctgtgctgatggcttcacgtctatgagtgaccgccctggaaaacgatgtgcagctgagggtagctctcctttgttgctactgcctgacaatgtccgaattcgaaaatataatctctcatctgagaggttctcagagtatcttcaagatgaggaatatatccaagctgttgattatgattgggatcccaaggacataggcctcagtgttgtgtattacactgtgcgaggggagggctctaggtttggtgctatcaaacgtgcctacatccccaactttgaatccggccgcaataatcttgtgcaggaagttgacctgaaactgaaatacgtaatgcagccagatggaatagcagtggactgggttggaaggcatatttactggtcagatgtcaagaataaacgcattgaggtggctaaacttgatggaaggtacagaaagtggctgatttccactgacctggaccaaccagctgctattgctgtgaatcccaaactagggcttatgttctggactgactggggaaaggaacctaaaatcgagtctgcctggatgaatggagaggaccgcaacatcctggttttcgaggaccttggttggccaactggcctttctatcgattatttgaacaatgaccgaatctactggagtgacttcaaggaggacgttattgaaaccataaaatatgatgggactgataggagagtcattgcaaaggaagcaatgaacccttacagcctggacatctttgaagaccagttatactggatatctaaggaaaagggagaagtatggaaacaaaataaatttgggcaaggaaagaaagagaaaacgctggtagtgaacccttggctcactcaagttcgaatctttcatcaactcagatacaataagtcagtgcccaacctttgcaaacagatctgcagccacctctgccttctgagacctggaggatacagctgtgcctgtccccaaggctccagctttatagaggggagcaccactgagtgtgatgcagccatcgaactgcctatcaacctgccccccccatgcaggtgcatgcacggaggaaattgctattttgatgagactgacctccccaaatgcaagtgtcctagcggctacaccggaaaatattgtgaaatggcgttttcaaaaggcatctctccaggaacaaccgcagtagctgtgctgttgacaatcctcttgatcgtcgtaattggagctctggcaattgcaggattcttccactatagaaggaccggctcccttttgcctgctctgcccaagctgccaagcttaagcagtctcgtcaagccctctgaaaatgggaatggggtgaccttcagatcaggggcagatcttaacatggatattggagtgtctggttttggacctgagactgctattgacaggtcaatggcaatgagtgaagactttgtcatggaaatggggaagcagcccataatatttgaaaacccaatgtactcagccagagacagtgctgtcaaagtggttcagccaatccaggtgactgtatctgaaaatgtggataataagaattatggaagtcccataaacccttctgagatagttccagagacaaacccaacttcaccagctgctgatggaactcaggtgacaaaatggaatctcttcaaacgaaaatctaaacaaactaccaactttgaaaatccaatctatgcacagatggagaacgagcaaaaggaaagtgttgctgcgacaccacctccatcaccttcgctccctgctaagcctaagcctccttcgagaagagacccaactccaacctattctgcaacagaagacacttttaaagacaccgcaaatcttgttaaagaagactctgaagtatagctataccagctatttagggaataattagaaacacacttttgcacatatattttttacaaacagatgaaaaaagttaacattcagtactttatgaaaaaaatatatttttccctgtttgcctatagttggaggtatcctgtgtgtctttttttacttatgccgtctcatatttttacaaataattatcacaatgtactatatgtatatctttgcactgaagttgtctgaaggtaatactataaatatattgtatatttgtaaattttggaaagattatcctgttactgaatttgctaataaagatgtctgctgatttggttggtgatcattatagtaaatgatccaacaagaaaaggaattgactggggacctttagccgtgtctaaagaagaggcaccactcatatttcctataaaattatctaggaaaggaatccaggccccgctcttgggtccatttttacacattagcacttaattaatgttcaatattacatgtcaatttgattaatggctatgttgataggggccactatgtgttgtatagacatctggacttgactgtagactcctcagataatacagaaggtaggaaaagcaattcagtttggcccttctgtgtgttggcattgtctaaccagaactctctgtttcatgtgtgttctctcactagctgccaagacaacatttttatttgtgatgtctatgaggaaatcccatatcattaagtgccagtgtcctgcattgagtttgtggttaattaaatgagctcttctgctgatggaccctggagcaatttctcccctcacctgacattcaaggtggtcacctgccctagtagttggagctcagtagctgaatttctgaaaccaaatctgtgtcttcataaaataaggtgcaaaaaaaaaaaataccagttaagtaaagcctcaactgggtttttgtttctatgaaaatatcattataatcactatttatttcctaagttgaacctgaatagaaagggaaaccattcttattaagctttttattaggccctgtggctaaatgtgtacatttatattagaatgtactgtacagtccagatcttttctttaattcttattggttttttttttttttttttttttagagatggagtcttgctatattgccaaggctgatcttgaagtcctgggctcaagtgatcctcccacctcagcctcctgagtggttggggttacgggcgtgagccactgtgcctggcttccagctctcctcttaaatagtgggtatagtctgcacaacaggaaccatggcaggaatatacactttcccatagcaaatagcatacctgactctctgtgctaatattgcacatttgttaaacaatgaatgaatggatggatggatggatggatgaatgaatgaaacatatactactgattattttattccagagttctcaaaatatttgttgctgatattttgagtgctgactgtaattactttgattagataaacaactggaaataatgctgctgaaaaagttctaataaatgtgtattttatcaga

SEQ ID NO: 149680 - DNA, 4007 bp, Homo sapiens
  Payload ID: 9567
  Gene Symbol: LRP2
  Gene Name: low density lipoprotein receptor-related protein 2
  ENST ID: ENST00000443831
  CDS Start-End: 136-3813
aggcttttggccactaggagctggcggaggtgcagacctaaaggagcgttcgctagcagaggcgctgccggtgcggtgtgctacgcgcgcccacctcccggggaaggaacggcgaggccggggaccgtcgcggagatggatcgcgggccggcagcagtggcgtgcacgctgctcctggctctcgtcgcctgcctagcgccggccagtggccaagaatgtgacagtgcgcattttcgctgtggaagtgggcattgcatccctgcagactggaggtgtgatgggaccaaagactgttcagatgacgcggatgaaattggctgcgctgttgtgacctgccagcagggctatttcaagtgccagagtgagggacaatgcatccccaactcctgggtgtgtgaccaagatcaagactgtgatgatggctcagatgaacgtcaagattgctcacaaagtacatgctcaagtcatcagataacatgctccaatggtcagtgtatcccaagtgaatacaggtgcgaccacgtcagagactgccccgatggagctgatgagaatgactgccagtacccaacatgtgagcagcttacttgtgacaatggggcctgctataacaccagtcagaagtgtgattggaaagttgattgcagggactcctcagatgaaatcaactgcactgagatatgcttgcacaatgagttttcatgtggcaatggagagtgtatccctcgtgcttatgtctgtgaccatgacaatgattgccaagacggcagtgacgaacatgcttgcaactatccgacctgcggtggttaccagttcacttgccccagtggccgatgcatttatcaaaactgggtttgtgatggagaagatgactgtaaagataatggagatgaagatggatgtgaaagcggtcctcatgatgttcataaatgttccccaagagaatggtcttgcccagagtcgggacgatgcatctccatttataaagtttgtgatgggattttagattgcccaggaagagaagatgaaaacaacactagtaccggaaaatactgtagtatgactctgtgctctgccttgaactgccagtaccagtgccatgagacgccgtatggaggagcgtgtttttgtcccccaggttatatcatcaaccacaatgacagccgtacctgtgttgagtttgatgattgccagatatggggaatttgtgaccagaagtgtgaaagccgacctggccgtcacctgtgccactgtgaagaagggtatatcttggagcgtggacagtattgcaaagctaatgattcctttggcgaggcctccattatcttctccaatggtcgggatttgttaattggtgatattcatggaaggagcttccggatcctagtggagtctcagaatcgtggagtggccgtgggtgtggctttccactatcacctgcaaagagttttttggacagacaccgtgcaaaataaggttttttcagttgacattaatggtttaaatatccaagaggttctcaatgtttctgttgaaaccccagagaacctggctgtggactgggttaataataaaatctatctagtggaaaccaaggtcaaccgcatagatatggtaaatttggatggaagctatcgggttacccttataactgaaaacttggggcatcctagaggaattgccgtggacccaactgttgggaagactgtagttcatggaggctccctcattcctcatccctttggagtaagcttatttgaaggtcaggtgttctttacagattggacaaagatggccgtgctgaaggcaaacaagttcacagagaccaacccacaagtgtactaccaggcttccctgaggccctatggagtgactgtttaccattccctcagacagccctatgctaccaatccgtgtaaagataacaatgggggctgtgagcaggtctgtgtcctcagccacagaacagataatgatggtttgggtttccgttgcaagtgcacattcggcttccaactggatacagatgagcgccactgcattggaagagaaattctcgcagctaacagggtggaaaatgttgaaagtttggcttttgattggatttcaaagaatctctattggacagactctcattacaagagtatcagtgtcatgaggctagctgataaaacgagacgcacagtagttcagtatttaaataacccacggtcggtggtagttcatccttttgccgggtatctattcttcactgattggttccgtcctgctaaaattatgagagcatggagtgacggatctcacctcttgcctgtaataaacactactcttggatggcccaatggcttggccatcgattgggctgcttcacgattgtactgggtagatgcctattttgataaaattgagcacagcacctttgatggtttagacagaagaagactgggccatatagagcagatgacacatccgtttggacttgccatctttggagagcatttattttttactgactggagactgggtgccattattcgagtcaggaaagcagatggtggagaaatgacagttatccgaagtggcattgcttacatactgcatttgaaatcgtatgatgtcaacatccagactggttctaacgcctgtaatcaacccacgcatcctaacggtgactgcagccacttctgcttcccggtgccaaatttccagcgagtgtgtgggtgcccttatggaatgaggctggcttccaatcacttgacatgcgagggggacccaaccaatgaaccacccacagagcagtgtggcttattttccttcccctgtaaaaatggcagatgtgtgcccaattactatctctgtgatggagtcgatgattgtcatgataacagtgatgagcaactatgtggcacacttaataatacctgttcatcttcggcgttcacctgtggccatggggagtgcattcctgcacactggcgctgtgacaaacgcaacgactgtgtggatggcagtgatgagcacaactgccccacccacgcacctgcttcctgccttgacacccaatacacctgtgataatcaccagtgtatctcaaagaactgggtctgtgacacagacaatgattgtggggatggatctgatgaaaagaactgcaattcgacagagacatgccaacctagtcagtttaattgccccaatcatcgatgtattgacctatcgtttgtctgtgatggtgacaaggattgtgttgatggatctgatgaggttggttgtgtattaaactgtactgcttctcaattcaagtgtgccagtggggataaatgtattggcgtcacaaatcgttgtgatggtgtttttgattgcagtgacaactcggatgaagcaggctgtccaaccaggcctcctggtatgtgccactcagatgaatttcagtgccaagaagatggtatctgcatcccgaacttctgggaatgtgatgggcatccagactgcctctatggatctgatgagcacaatgcctgtgtccccaagacttgcccttcatcatatttccactgtgacaacggaaactgcatccacagggcatggctctgtgatcgggacaatgactgcggggatatgagtgatgagaaggactgccctactcagccctttcgctgtcctagttggcaatggcagtgtcttggccataacatctgtgtgaatctgagtgtagtgtgtgatggcatctttgactgccccaatgggacagatgagtccccactttgcagtaagtttcctgaccacagtttactggccataaactcattctgaacagtagcctggtgtgcatcaccattgtcacagtcactgtgtagctttgtaggaaggatttcagttcctctatgagttcacatctgtgtagggggtaaccataattgaattcaaatacatcaccattggataattttctgattaaatcctttgtacttggttatgtgtttttacttctttttatgtctttgttt

SEQ ID NO: 149681 - DNA, 3807 bp, Homo sapiens
  Payload ID: 9568
  Gene Symbol: LRP3
  Gene Name: low density lipoprotein receptor-related protein 3
  Uniprot ID: O75074
  ENST ID: ENST00000253193
  CDS Start-End: 203-2515
tacgggcctgcaccgccaccgcacaaagacgcctcgggagccgccgcctgcacccgggccgcagcagccacgccagccggagcccgagccctagcccgagcccgagcccgagccgcagccagagccagagccggagccgcagccggaaccggagccggagccgcggggcaggaggcggcgcccgcgggcggccgggcccggcatggagaagcgcgcggccgcggggctggagggcgcgccgggcgcccgggcgcagctggccgtcgtctgtctggtgaacatctttctcaccgggagactcagcagtgcggttcctgccttagcggcctgcagtgggaagctggagcagcacacggagcggcgtggggtcatctacagcccggcctggcccctcaactacccgccaggcaccaactgcagctggtacatccagggcgaccgtggtgacatgattaccatcagcttccgcaactttgacgtggaggagtcccaccagtgctccctggactggctcctgctgggcccagcagccccaccccgccaggaggccttccgcctctgtggctccgccatcccacctgccttcatctctgcccgcgaccatgtctggattttcttccactcagacgcctccagctccggccaggcccagggcttccgtctgtcttacatccgagggaagctgggccaggcatcctgccaggcagatgagttccgctgtgacaacggcaagtgcctgcccggcccgtggcagtgcaacacggtggacgagtgtggagacggctctgatgagggcaactgctcggcgcccgcctccgagcctccaggcagcctgtgccccggggggaccttcccatgcagcggggcgcgctccacgcgctgcctgcctgtggagcggcgctgtgacggcttgcaggactgcggcgacggctcggatgaggcgggctgccccgacctggcgtgcggccggcggctgggcagcttctacggctcctttgcctccccagacctgttcggcgccgctcgcgggccctcagaccttcactgcacgtggctggtggacacacaggactcccggcgggtgctgctgcagctggaactgcggctgggctatgacgactacgtgcaggtatacgagggcctgggcgagcgcggggaccgcctgctgcagacgctgtcctaccgcagcaaccaccggcccgtgagcctggaggccgcccagggccgcctcactgtggcctaccacgcgcgcgcccgcagcgccggccacggcttcaatgccacctaccaggtgaagggctattgcctcccctgggagcagccgtgcgggagcagtagtgacagtgacgggggcagcctgggcgaccagggctgcttctcagagccacagcgctgtgatggctggtggcattgtgccagcggccgagacgagcagggctgccctgcctgcccgcccgaccagtacccctgcgagggtggcagtggtctgtgctacacgcctgccgaccgctgcaacaaccagaaaagctgtcccgacggcgccgacgagaagaactgcttctcctgccagcccggcaccttccactgcggtaccaacctgtgcatcttcgagacgtggcgctgtgacggccaggaagactgccaggacggcagcgatgagcatgggtgcctggccgccgtgccccgcaaggtcatcacggcggcgctcattggcagcctggtgtgtggcctgctgctggtcatcgcgctgggctgcgccttcaagctctactcactgcgcacgcaggaatacagggccttcgagacccagatgacgcgcctggaggctgagttcgtgcggcgggaggcacccccatcctatggtcagctcatcgcccagggcctcattccacccgtggaggactttcctgtctacagtgcgtcccaggcctctgtgctgcagaatcttcgcacagccatgcggagacagatgcgtcggcacgcctcccgccgggggccctcccgccgccgcctcggccgcctctggaaccggctctttcaccggccgcgggcgccccgaggccagatcccactgctgaccgcagcacgcccctcacagaccgtgctgggcgatggcttcctccagcctgctccaggggctgcccccgaccccccagcaccgctcatggacacaggcagcaccagggcggccggagacaggccccccagtgcccccggccgtgcaccggaggtgggaccttcagggccacccttgccctcgggcctgcgagacccagagtgcaggcccgtggacaaggacagaaaggtctgcagggagccactggtagacggcccagctcctgcagatgcacctcgggagccctgctcagcccaggacccgcacccccaggtctccactgccagcagcaccctgggcccccactcgccagagccactgggggtctgcaggaaccccccgcccccctgctccccaatgctggaggccagcgatgatgaggccctgttggtctgttgaccgctgggctcgctggtgaccgccacagccccgctttgtaaccagggaatacacagtcatttctaccctgcctctgcgtcctttcttatggagaggccctccggggaccccagcggaggggctggcccctaagccagctggctgcactggtgggcgggagctgtgggactgaacggcgggggggagaagagtggagtggtgagcccgtctgcagggtcccattgtacacaagcaccctggggtctcacttctctccccccactccattctgggaacccatttccagagaagcaggggaccagagcctttttgcttcatctgccctgcagtggcaacagctgcccctagagctgggagttgtcatgaggatggggccgggccatggggacgctgggtctcatccgtggtgactattttgctcacgcctcaccctcttcctgtccagcaaggcctctggaggacctgggttgggtggctcctgccaaaccctcatgcccctggccaggcaggcgccctttgccctccctgaaggtccaatctcctgggcaccgtggaagggctggggtgtgtgcctgctgtacatgaagcccctggagttccctgcaggcctcaaagcccccaggacatgctgctctgtgctttctggggacagagaggccgaggcaccaacagcagtggccacgtctgttccatcctatctcagggcctcggtttccccacctgtaagccagggtgagactgtgggctctgaagtcctgaccttcactctgtggtgatttacgggaagaaagacaatcccagcctggagcccctgagctctcctgggtggccgagctcagactggcatcgaggggcctggggtaggggcggactgagctgctaccccatcctcgacatccctttagggcagggggactctgggtgccatggtagggagcgcctgtgtcaagcagcaaagccccctaatgtcaagagcctcctccagggcctgccacggcatcttcctggccagcaacatgtgtgcacccaccgaggtacgccccagccactcccatctgtgcccatcagggactccccatagcacgagcgaacagccagccctgtttatttataggccttttcaggaagagctagcagggcagtgctaagacaggaaacccagtccacattttagggcttccttaaacaggcttctgagagtcgtatcttttttcttttttttccagaaaaaaacaaaacaaaacttttttgccaaaacacctcctcaataaacaacatgtaaacagaaacaa

SEQ ID NO: 149682 - DNA, 575 bp, Homo sapiens
  Payload ID: 9568
  Gene Symbol: LRP3
  Gene Name: low density lipoprotein receptor-related protein 3
  ENST ID: ENST00000592484
  CDS Start-End: 301-575
gcaaaggcctgaagattgcccgtctccctgcagccgcgcagtgggtgcagccttttcacaaatgcaagacctggaccggcggcgaggccaaggggaccccgtgtggagggatgcgggactgagtccgtgaacatctttctcaccgggagactcagcagtgcggttcctgccttagcggcctgcagtgggaagctggagcagcacacggagcggcgtggggtcatctacagcccggcctggcccctcaactacccgccaggcaccaactgcagctggtacatccagggcgaccgtggtgacatgattaccatcagcttccgcaactttgacgtggaggagtcccaccagtgctccctggactggctcctgctgggcccagcagccccaccccgccaggaggccttccgcctctgtggctccgccatcccacctgccttcatctctgcccgcgaccatgtctggattttcttccactcagacgcctccagctccggccaggcccagggcttccgtctgtcttacatccgagggaagctgggccaggcatcctgccaggcagatgagttccgctgtga

SEQ ID NO: 149683 - DNA, 8076 bp, Homo sapiens
  Payload ID: 9569
  Gene Symbol: LRP4
  Gene Name: low density lipoprotein receptor-related protein 4
  Uniprot ID: O75096
  ENST ID: ENST00000378623
  CDS Start-End: 244-5961
gtggccggggctgcggcgcggggggcggggcggtcgggcccgggacaccccctcccggtcccctggcggggcagcgtcggctctggcagcactggaggcggcggcggcccgagggcgacttgcggggcgcgcaggccgccgtgcacccgggacgcttccccctcggggaccctccgcgggcttctccgccgcgccgtccggcgggagccggcgggaccccgggcgagcggcgcgggcggcaccatgaggcggcagtggggcgcgctgctgcttggcgccctgctctgcgcacacggcctggccagcagccccgagtgtgcttgtggtcggagccacttcacatgtgcagtgagtgctcttggagagtgtacctgcatccctgcccagtggcagtgtgatggagacaatgactgcggggaccacagcgatgaggatggatgtatactacctacctgttcccctcttgactttcactgtgacaatggcaagtgcatccgccgctcctgggtgtgtgacggggacaacgactgtgaggatgactcggatgagcaggactgtcccccccgggagtgtgaggaggacgagtttccctgccagaatggctactgcatccggagtctgtggcactgcgatggtgacaatgactgtggcgacaacagcgatgagcagtgtgacatgcgcaagtgctccgacaaggagttccgctgtagtgacggaagctgcattgctgagcattggtactgcgacggtgacaccgactgcaaagatggctccgatgaggagaactgtccctcagcagtgccagcgcccccctgcaacctggaggagttccagtgtgcctatggacgctgcatcctcgacatctaccactgcgatggcgacgatgactgtggagactggtcagacgagtctgactgctcctcccaccagccctgccgctctggggagttcatgtgtgacagtggcctgtgcatcaatgcaggctggcgctgcgatggtgacgcggactgtgatgaccagtctgatgagcgcaactgcaccacctccatgtgtacggcagaacagttccgctgtcactcaggccgctgtgtccgcctgtcctggcgctgtgatggggaggacgactgtgcagacaacagcgatgaagagaactgtgagaatacaggaagcccccaatgtgccttggaccagttcctgtgttggaatgggcgctgcattgggcagaggaagctgtgcaacggggtcaacgactgtggtgacaacagcgacgaaagcccacagcagaattgccggccccggacgggtgaggagaactgcaatgttaacaacggtggctgtgcccagaagtgccagatggtgcggggggcagtgcagtgtacctgccacacaggctaccggctcacagaggatgggcacacgtgccaagatgtgaatgaatgtgccgaggaggggtattgcagccagggctgcaccaacagcgaaggggctttccaatgctggtgtgaaacaggctatgaactacggcccgaccggcgcagctgcaaggctctggggccagagcctgtgctgctgttcgccaatcgcatcgacatccggcaggtgctgccacaccgctctgagtacacactgctgcttaacaacctggagaatgccattgcccttgatttccaccaccgccgcgagcttgtcttctggtcagatgtcaccctggaccggatcctccgtgccaacctcaacggcagcaacgtggaggaggttgtgtctactgggctggagagcccagggggcctggctgtggattgggtccatgacaaactctactggaccgactcaggcacctcgaggattgaggtggccaatctggatggggcccaccggaaagtgttgctgtggcagaacctggagaagccccgggccattgccttgcatcccatggagggtaccatttactggacagactggggcaacaccccccgtattgaggcctccagcatggatggctctggacgccgcatcattgccgatacccatctcttctggcccaatggcctcaccatcgactatgccgggcgccgtatgtactgggtggatgctaagcaccatgtcatcgagagggccaatctggatgggagtcaccgtaaggctgtcattagccagggcctcccgcatcccttcgccatcacagtgtttgaagacagcctgtactggacagactggcacaccaagagcatcaatagcgctaacaaatttacggggaagaaccaggaaatcattcgcaacaaactccacttccctatggacatccacaccttgcacccccagcgccaacctgcagggaaaaaccgctgtggggacaacaacggaggctgcacgcacctgtgtctgcccagtggccagaactacacctgtgcctgccccactggcttccgcaagatcagcagccacgcctgtgcccagagtcttgacaagttcctgctttttgcccgaaggatggacatccgtcgaatcagctttgacacagaggacctgtctgatgatgtcatcccactggctgacgtgcgcagtgctgtggcccttgactgggactcccgggatgaccacgtgtactggacagatgtcagcactgataccatcagcagggccaagtgggatggaacaggacaggaggtggtagtggataccagtttggagagcccagctggcctggccattgattgggtcaccaacaaactgtactggacagatgcaggtacagaccggattgaagtagccaacacagatggcagcatgagaacagtactcatctgggagaaccttgatcgtcctcgggacatcgtggtggaacccatgggcgggtacatgtattggactgactggggtgcgagccccaagattgaacgagctggcatggatgcctcaggccgccaagtcattatctcttctaatctgacctggcctaatgggttagctattgattatgggtcccagcgtctatactgggctgacgccggcatgaagacaattgaatttgctggactggatggcagtaagaggaaggtgctgattggaagccagctcccccacccatttgggctgaccctctatggagagcgcatctattggactgactggcagaccaagagcatacagagcgctgaccggctgacagggctggaccgggagactctgcaggagaacctggaaaacctaatggacatccatgtcttccaccgccgccggcccccagtgtctacaccatgtgctatggagaatggcggctgtagccacctgtgtcttaggtccccaaatccaagcggattcagctgtacctgccccacaggcatcaacctgctgtctgatggcaagacctgctcaccaggcatgaacagtttcctcatcttcgccaggaggatagacattcgcatggtctccctggacatcccttattttgctgatgtggtggtaccaatcaacattaccatgaagaacaccattgccattggagtagacccccaggaaggaaaggtgtactggtctgacagcacactgcacaggatcagtcgtgccaatctggatggctcacagcatgaggacatcatcaccacagggctacagaccacagatgggctcgcggttgatgccattggccggaaagtatactggacagacacgggaacaaaccggattgaagtgggcaacctggacgggtccatgcggaaagtgttggtgtggcagaaccttgacagtccccgggccatcgtactgtaccatgagatggggtttatgtactggacagactggggggagaatgccaagttagagcggtccggaatggatggctcagaccgcgcggtgctcatcaacaacaacctaggatggcccaatggactgactgtggacaaggccagctcccaactgctatgggccgatgcccacaccgagcgaattgaggctgctgacctgaatggtgccaatcggcatacattggtgtcaccggtgcagcacccatatggcctcaccctgctcgactcctatatctactggactgactggcagactcggagcatccaccgtgctgacaagggtactggcagcaatgtcatcctcgtgaggtccaacctgccaggcctcatggacatgcaggctgtggaccgggcacagccactaggttttaacaagtgcggctcgagaaatggcggctgctcccacctctgcttgcctcggccttctggcttctcctgtgcctgccccactggcatccagctgaagggagatgggaagacctgtgatccctctcctgagacctacctgctcttctccagccgtggctccatccggcgtatctcactggacaccagtgaccacaccgatgtgcatgtccctgttcctgagctcaacaatgtcatctccctggactatgacagcgtggatggaaaggtctattacacagatgtgttcctggatgttatcaggcgagcagacctgaacggcagcaacatggagacagtgatcgggcgagggctgaagaccactgacgggctggcagtggactgggtggccaggaacctgtactggacagacacaggtcgaaataccattgaggcgtccaggctggatggttcctgccgcaaagtactgatcaacaatagcctggatgagccccgggccattgctgttttccccaggaaggggtacctcttctggacagactggggccacattgccaagatcgaacgggcaaacttggatggttctgagcggaaggtcctcatcaacacagacctgggttggcccaatggccttaccctggactatgatacccgcaggatctactgggtggatgcgcatctggaccggatcgagagtgctgacctcaatgggaaactgcggcaggtcttggtcagccatgtgtcccacccctttgccctcacacagcaagacaggtggatctactggacagactggcagaccaagtcaatccagcgtgttgacaaatactcaggccggaacaaggagacagtgctggcaaatgtggaaggactcatggatatcatcgtggtttcccctcagcggcagacagggaccaatgcctgtggtgtgaacaatggtggctgcacccacctctgctttgccagagcctcggacttcgtatgtgcctgtcctgacgaacctgatagccggccctgctcccttgtgcctggcctggtaccaccagctcctagggctactggcatgagtgaaaagagcccagtgctacccaacacaccacctaccaccttgtattcttcaaccacccggacccgcacgtctctggaggaggtggaaggaagatgctctgaaagggatgccaggctgggcctctgtgcacgttccaatgacgctgttcctgctgctccaggggaaggacttcatatcagctacgccattggtggactcctcagtattctgctgattttggtggtgattgcagctttgatgctgtacagacacaaaaaatccaagttcactgatcctggaatggggaacctcacctacagcaacccctcctaccgaacatccacacaggaagtgaagattgaagcaatccccaaaccagccatgtacaaccagctgtgctataagaaagagggagggcctgaccataactacaccaaggagaagatcaagatcgtagagggaatctgcctcctgtctggggatgatgctgagtgggatgacctcaagcaactgcgaagctcacgggggggcctcctccgggatcatgtatgcatgaagacagacacggtgtccatccaggccagctctggctccctggatgacacagagacggagcagctgttacaggaagagcagtctgagtgtagcagcgtccatactgcagccactccagaaagacgaggctctctgccagacacgggctggaaacatgaacgcaagctctcctcagagagccaggtctaaatgcccacattctcttccctgcctgcctgttccttctcctttatggacgtctagtccttgtgctcgcttacaccgcaggccccgcttctgtgtgcttgtcctcctcctcctcccaccccataactgttcctaagccttcaccggagctgtttaccacgtgagtccataactacctgtgcacaagaaatgatggcacatcacgagaatttagacctggattttaccatgaacctcacatcttgtactccatcctgggccccctgaaactgcttattcgtgattcctcaccagcgtagagctccacctcccctttccccagtaccctcagtgcctgcttctcagtgctgatgcagctgatgacccaggactgcgctctgccccatcacagccagcatgactgcttctctgagagaacttgcccatcaggggctgggacatgggggtgtgggtaaagacagggatgaaggatagaggctgagagaagaaggaagaatcagcccagcaggtatgggcatctgggaaacctccagcctcaagtgtgttagtaacatgaaaaagctttggggggtagttggatctgggtgtctggtccattgctggcagtggacattattcttgccctaagagacactgccttttcagcagcagatactggtgagatgggggtggctcaggctgttcttcctcctcctagaatgtctggagctgtttctacattcagataactgggtcccctatcacaaggctactggctaataggaattccctcctggtgccaccactggccagtacctttcctaagtctttgctcaaattaaccaggttgtgagccagtggcttgagtgaatgttaggccttgggggctgagtctctgaaaagtctaagaagctctgcctagaccaaatatggtatacctcctgacccctctctccctcatgtcctgggattctggggaagagacctagaaacaagctttcaaagaaaaaccagaagttgtcataaatggtcagaaagaacgatcaggttggagacttgggaaacccagggcctaaagagaagtatccatgagggtcaaacttcctgttgaacttcctatgttctttctcaagtgctcagggatctaagttagtggacagcaagcctgtggctacggggtggtgatgttcctcttccagctgtcccctcagctaaggggcttagtttccatgtgggatgccatcacttggttcatgctcattcacacaaagggcacgtgtctcagcctggtatcagggaaattgagacttatttttgccctaaaacgtctccctagctgttcttcgtggggtttttttgtttgtttttttgcctaatttgctttttctgaccaagccttgtggcaccagcaatctccaaagtcctgtggtgggagggctgaataaataaaaatacaaagaggtgggtaaggagtaggaaggtagagagcaccactgatgaggccctcctagcccatggcagacccagacctcttctcccccaggaattagaagtggcaggagagaacaacaggggctgggaatggaggggagaatttctaggggaagtttcctgagttgaaacttctcctgtggttactggtattgagaaatcagctaccaaagtgaaaaaggacaagatcaattcttttctagtcagttctaagactgctagagagagataccaggcccttagccttgctctcagtagcgtcagccccagttctgagcctccccacattacacttaacaagcagtaaaggagtgagcactttgggtccttagactcacgtctggggaggaagagcaagtagaaaagtggcattttcttgattggaaagggggaaggatcttattgcacttgggctgttcagaatgtagaaaggacatatttgaggaagtatctatttgagcactgatttactctgtaaaaagcaaaatctctctgtcctaaactaatggaagcgattctcccatgctcatgtgtaatggttttaacgttactcactggagagattggactttctggagttatttaaccactatgttcagtattttaggactttatgataatttaatataaatttagcttttcttaatc

SEQ ID NO: 149684 - DNA, 663 bp, Homo sapiens
  Payload ID: 9569
  Gene Symbol: LRP4
  Gene Name: low density lipoprotein receptor-related protein 4
  ENST ID: ENST00000534404
  CDS Start-End: 264-663
cgggcccaggcgcggtggcggtggccggggctgcggcgcggggggcggggcggtcgggcccgggacaccccctcccggtcccctggcggggcagcgtcggctctggcagcactggaggcggcggcggcccgagggcgacttgcggggcgcgcaggccgccgtgcacccgggacgcttccccctcggggaccctccgcgggcttctccgccgcgccgtccggcgggagccggcgggaccccgggcgagcggcgcgggcggcaccatgaggcggcagtggggcgcgctgctgcttggcgccctgctctgcgcacacgtactacctacctgttcccctcttgactttcactgtgacaatggcaagtgcatccgccgctcctgggtgtgtgacggggacaacgactgtgaggatgactcggatgagcaggactgtcccccccgggagtgtgaggaggacgagtttccctgccagaatggctactgcatccggagtctgtggcactgcgatggtgacaatgactgtggcgacaacagcgatgagcagtgtgacatgcgcaagtgctccgacaaggagttccgctgtagtgacggaagctgcattgctgagcattggtactgcgacggtgacaccgactgcaaagatggctccgatgaggagaactgtc

SEQ ID NO: 149685 - DNA, 5159 bp, Homo sapiens
  Payload ID: 9570
  Gene Symbol: LRP5
  Gene Name: low density lipoprotein receptor-related protein 5
  Uniprot ID: O75197
  ENST ID: ENST00000294304
  CDS Start-End: 107-4954
gcccgaggggggaggcggaggcgccgggagccgcgcgaggagccgccgccgccgcgccatggagcccgagtgagcgcggcgcgggcccgtccggccgccggacaacatggaggcagcgccgcccgggccgccgtggccgctgctgctgctgctgctgctgctgctggcgctgtgcggctgcccggcccccgccgcggcctcgccgctcctgctatttgccaaccgccgggacgtacggctggtggacgccggcggagtcaagctggagtccaccatcgtggtcagcggcctggaggatgcggccgcagtggacttccagttttccaagggagccgtgtactggacagacgtgagcgaggaggccatcaagcagacctacctgaaccagacgggggccgccgtgcagaacgtggtcatctccggcctggtctctcccgacggcctcgcctgcgactgggtgggcaagaagctgtactggacggactcagagaccaaccgcatcgaggtggccaacctcaatggcacatcccggaaggtgctcttctggcaggaccttgaccagccgagggccatcgccttggaccccgctcacgggtacatgtactggacagactggggtgagacgccccggattgagcgggcagggatggatggcagcacccggaagatcattgtggactcggacatttactggcccaatggactgaccatcgacctggaggagcagaagctctactgggctgacgccaagctcagcttcatccaccgtgccaacctggacggctcgttccggcagaaggtggtggagggcagcctgacgcaccccttcgccctgacgctctccggggacactctgtactggacagactggcagacccgctccatccatgcctgcaacaagcgcactggggggaagaggaaggagatcctgagtgccctctactcacccatggacatccaggtgctgagccaggagcggcagcctttcttccacactcgctgtgaggaggacaatggcggctgctcccacctgtgcctgctgtccccaagcgagcctttctacacatgcgcctgccccacgggtgtgcagctgcaggacaacggcaggacgtgtaaggcaggagccgaggaggtgctgctgctggcccggcggacggacctacggaggatctcgctggacacgccggacttcaccgacatcgtgctgcaggtggacgacatccggcacgccattgccatcgactacgacccgctagagggctatgtctactggacagatgacgaggtgcgggccatccgcagggcgtacctggacgggtctggggcgcagacgctggtcaacaccgagatcaacgaccccgatggcatcgcggtcgactgggtggcccgaaacctctactggaccgacacgggcacggaccgcatcgaggtgacgcgcctcaacggcacctcccgcaagatcctggtgtcggaggacctggacgagccccgagccatcgcactgcaccccgtgatgggcctcatgtactggacagactggggagagaaccctaaaatcgagtgtgccaacttggatgggcaggagcggcgtgtgctggtcaatgcctccctcgggtggcccaacggcctggccctggacctgcaggaggggaagctctactggggagacgccaagacagacaagatcgaggtgatcaatgttgatgggacgaagaggcggaccctcctggaggacaagctcccgcacatttttgggttcacgctgctgggggacttcatctactggactgactggcagcgccgcagcatcgagcgggtgcacaaggtcaaggccagccgggacgtcatcattgaccagctgcccgacctgatggggctcaaagctgtgaatgtggccaaggtcgtcggaaccaacccgtgtgcggacaggaacggggggtgcagccacctgtgcttcttcacaccccacgcaacccggtgtggctgccccatcggcctggagctgctgagtgacatgaagacctgcatcgtgcctgaggccttcttggtcttcaccagcagagccgccatccacaggatctccctcgagaccaataacaacgacgtggccatcccgctcacgggcgtcaaggaggcctcagccctggactttgatgtgtccaacaaccacatctactggacagacgtcagcctgaagaccatcagccgcgccttcatgaacgggagctcggtggagcacgtggtggagtttggccttgactaccccgagggcatggccgttgactggatgggcaagaacctctactgggccgacactgggaccaacagaatcgaagtggcgcggctggacgggcagttccggcaagtcctcgtgtggagggacttggacaacccgaggtcgctggccctggatcccaccaagggctacatctactggaccgagtggggcggcaagccgaggatcgtgcgggccttcatggacgggaccaactgcatgacgctggtggacaaggtgggccgggccaacgacctcaccattgactacgctgaccagcgcctctactggaccgacctggacaccaacatgatcgagtcgtccaacatgctgggtcaggagcgggtcgtgattgccgacgatctcccgcacccgttcggtctgacgcagtacagcgattatatctactggacagactggaatctgcacagcattgagcgggccgacaagactagcggccggaaccgcaccctcatccagggccacctggacttcgtgatggacatcctggtgttccactcctcccgccaggatggcctcaatgactgtatgcacaacaacgggcagtgtgggcagctgtgccttgccatccccggcggccaccgctgcggctgcgcctcacactacaccctggaccccagcagccgcaactgcagcccgcccaccaccttcttgctgttcagccagaaatctgccatcagtcggatgatcccggacgaccagcacagcccggatctcatcctgcccctgcatggactgaggaacgtcaaagccatcgactatgacccactggacaagttcatctactgggtggatgggcgccagaacatcaagcgagccaaggacgacgggacccagccctttgttttgacctctctgagccaaggccaaaacccagacaggcagccccacgacctcagcatcgacatctacagccggacactgttctggacgtgcgaggccaccaataccatcaacgtccacaggctgagcggggaagccatgggggtggtgctgcgtggggaccgcgacaagcccagggccatcgtcgtcaacgcggagcgagggtacctgtacttcaccaacatgcaggaccgggcagccaagatcgaacgcgcagccctggacggcaccgagcgcgaggtcctcttcaccaccggcctcatccgccctgtggccctggtggtggacaacacactgggcaagctgttctgggtggacgcggacctgaagcgcattgagagctgtgacctgtcaggggccaaccgcctgaccctggaggacgccaacatcgtgcagcctctgggcctgaccatccttggcaagcatctctactggatcgaccgccagcagcagatgatcgagcgtgtggagaagaccaccggggacaagcggactcgcatccagggccgtgtcgcccacctcactggcatccatgcagtggaggaagtcagcctggaggagttctcagcccacccatgtgcccgtgacaatggtggctgctcccacatctgtattgccaagggtgatgggacaccacggtgctcatgcccagtccacctcgtgctcctgcagaacctgctgacctgtggagagccgcccacctgctccccggaccagtttgcatgtgccacaggggagatcgactgtatccccggggcctggcgctgtgacggctttcccgagtgcgatgaccagagcgacgaggagggctgccccgtgtgctccgccgcccagttcccctgcgcgcggggtcagtgtgtggacctgcgcctgcgctgcgacggcgaggcagactgtcaggaccgctcagacgaggcggactgtgacgccatctgcctgcccaaccagttccggtgtgcgagcggccagtgtgtcctcatcaaacagcagtgcgactccttccccgactgtatcgacggctccgacgagctcatgtgtgaaatcaccaagccgccctcagacgacagcccggcccacagcagtgccatcgggcccgtcattggcatcatcctctctctcttcgtcatgggtggtgtctattttgtgtgccagcgcgtggtgtgccagcgctatgcgggggccaacgggcccttcccgcacgagtatgtcagcgggaccccgcacgtgcccctcaatttcatagccccgggcggttcccagcatggccccttcacaggcatcgcatgcggaaagtccatgatgagctccgtgagcctgatggggggccggggcggggtgcccctctacgaccggaaccacgtcacaggggcctcgtccagcagctcgtccagcacgaaggccacgctgtacccgccgatcctgaacccgccgccctccccggccacggacccctccctgtacaacatggacatgttctactcttcaaacattccggccactgcgagaccgtacaggccctacatcattcgaggaatggcgcccccgacgacgccctgcagcaccgacgtgtgtgacagcgactacagcgccagccgctggaaggccagcaagtactacctggatttgaactcggactcagacccctatccacccccacccacgccccacagccagtacctgtcggcggaggacagctgcccgccctcgcccgccaccgagaggagctacttccatctcttcccgccccctccgtccccctgcacggactcatcctgacctcggccgggccactctggcttctctgtgcccctgtaaatagttttaaatatgaacaaagaaaaaaatatattttatgatttaaaaaataaatataattgggattttaaaaacatgagaaatgtgaactgtgatggggtgggcagggctgggagaactttgtacagtggagaaatatttataaacttaattttgtaaaacagaa

SEQ ID NO: 149686 - DNA, 586 bp, Homo sapiens
  Payload ID: 9570
  Gene Symbol: LRP5
  Gene Name: low density lipoprotein receptor-related protein 5
  ENST ID: ENST00000529702
  CDS Start-End: 1-518
cgtccagcagctcgtccagcacgaaggccacgctgtacccgccggggctcggatctggctgtatgctttccaggatggccttggagacccacataagccctacaccctttgggaagctgcatgttgggttggggtgccgtcagtggcacttgtggaagatcctgaacccgccgccctccccggccacggacccctccctgtacaacatggacatgttctactcttcaaacattccggccactgcgagaccgtacaggccctacatcattcgaggaatggcgcccccgacgacgccctgcagcaccgacgtgtgtgacagcgactacagcgccagccgctggaaggccagcaagtactacctggatttgaactcggactcagacccctatccacccccacccacgccccacagccagtacctgtcggcggaggacagctgcccgccctcgcccgccaccgagaggagctacttccatctcttcccgccccctccgtccccctgcacggactcatcctgacctcggccgggccactctggcttctctgtgcccctgtaaatagttttaaatatgaacaaagaaaaaaa

SEQ ID NO: 149687 - DNA, 5103 bp, Homo sapiens
  Payload ID: 9570
  Gene Symbol: LRP5
  Gene Name: low density lipoprotein receptor-related protein 5
  ENST ID: ENST00000529993
  CDS Start-End: 32-1447
gcggcgcgggcccgtccggccgccggacaacatggaggcagcgccgcccgggccgccgtggccgctgctgctgctgctgctgctgctgctggcgctgtgcggctgcccggcccccgccgcggcctcgccgctcctgctatttgccaaccgccgggacgtacggctggtggacgccggcggagtcaagctggagtccaccatcgtggtcagcggcctggaggatgcggccgcagtggacttccagttttccaagggagccgtgtactggacagacgtgagcgaggaggccatcaagcagacctacctgaaccagacgggggccgccgtgcagaacgtggtcatctccggcctggtctctcccgacggcctcgcctgcgactgggtgggcaagaagctgtactggacggactcagagaccaaccgcatcgaggtggccaacctcaatggcacatcccggaaggtgctcttctggcaggaccttgaccagccgagggccatcgccttggaccccgctcacgggtacatgtactggacagactggggtgagacgccccggattgagcgggcagggatggatggcagcacccggaagatcattgtggactcggacatttactggcccaatggactgaccatcgacctggaggagcagaagctctactgggctgacgccaagctcagcttcatccaccgtgccaacctggacggctcgttccggcagaaggtggtggagggcagcctgacgcaccccttcgccctgacgctctccggggacactctgtactggacagactggcagacccgctccatccatgcctgcaacaagcgcactggggggaagaggaaggagatcctgagtgccctctactcacccatggacatccaggtgctgagccaggagcggcagcctttcttccacactcgctgtgaggaggacaatggcggctgctcccacctgtgcctgctgtccccaagcgagcctttctacacatgcgcctgccccacgggtgtgcagctgcaggacaacggcaggacgtgtaaggcaggagccgaggaggtgctgctgctggcccggcggacggacctacggaggatctcgctggacacgccggacttcaccgacatcgtgctgcaggtggacgacatccggcacgccattgccatcgactacgacccgctagagggctatgtctactggacagatgacgaggtgcgggccatccgcagggcgtacctggacgggtctggggcgcagacgctggtcaacaccgagatcaacgaccccgatggcatcgcggtcgactgggtggcccgaaacctctactggaccgacacgggcacggaccgcatcgaggtgacgcgcctcaacggcacctcccgcaagatcctggtgtcggaggacctggacgagccccgagccatcgcactgcaccccgtgatggggtgatcaatgttgatgggacgaagaggcggaccctcctggaggacaagctcccgcacatttttgggttcacgctgctgggggacttcatctactggactgactggcagcgccgcagcatcgagcgggtgcacaaggtcaaggccagccgggacgtcatcattgaccagctgcccgacctgatggggctcaaagctgtgaatgtggccaaggtcgtcggtgacagagttacactggagagagcagcatccaggtgcggcagggacaggcctggggctcgcgggcagggactctgtgtcctgccggggtcccacactgcacctgcttgtcagaggcactcagtcaatctttgctgatgaaggatgagaggacagaggacgtgatgcttgctgctgcattgcctgcagtcctgggaaccaacccgtgtgcggacaggaacggggggtgcagccacctgtgcttcttcacaccccacgcaacccggtgtggctgccccatcggcctggagctgctgagtgacatgaagacctgcatcgtgcctgaggccttcttggtcttcaccagcagagccgccatccacaggatctccctcgagaccaataacaacgacgtggccatcccgctcacgggcgtcaaggaggcctcagccctggactttgatgtgtccaacaaccacatctactggacagacgtcagcctgaagaccatcagccgcgccttcatgaacgggagctcggtggagcacgtggtggagtttggccttgactaccccgagggcatggccgttgactggatgggcaagaacctctactgggccgacactgggaccaacagaatcgaagtggcgcggctggacgggcagttccggcaagtcctcgtgtggagggacttggacaacccgaggtcgctggccctggatcccaccaagggctacatctactggaccgagtggggcggcaagccgaggatcgtgcgggccttcatggacgggaccaactgcatgacgctggtggacaaggtgggccgggccaacgacctcaccattgactacgctgaccagcgcctctactggaccgacctggacaccaacatgatcgagtcgtccaacatgctgggtcaggagcgggtcgtgattgccgacgatctcccgcacccgttcggtctgacgcagtacagcgattatatctactggacagactggaatctgcacagcattgagcgggccgacaagactagcggccggaaccgcaccctcatccagggccacctggacttcgtgatggacatcctggtgttccactcctcccgccaggatggcctcaatgactgtatgcacaacaacgggcagtgtgggcagctgtgccttgccatccccggcggccaccgctgcggctgcgcctcacactacaccctggaccccagcagccgcaactgcagcccgcccaccaccttcttgctgttcagccagaaatctgccatcagtcggatgatcccggacgaccagcacagcccggatctcatcctgcccctgcatggactgaggaacgtcaaagccatcgactatgacccactggacaagttcatctactgggtggatgggcgccagaacatcaagcgagccaaggacgacgggacccagccctttgttttgacctctctgagccaaggccaaaacccagacaggcagccccacgacctcagcatcgacatctacagccggacactgttctggacgtgcgaggccaccaataccatcaacgtccacaggctgagcggggaagccatgggggtggtgctgcgtggggaccgcgacaagcccagggccatcgtcgtcaacgcggagcgagggtacctgtacttcaccaacatgcaggaccgggcagccaagatcgaacgcgcagccctggacggcaccgagcgcgaggtcctcttcaccaccggcctcatccgccctgtggccctggtggtggacaacacactgggcaagctgttctgggtggacgcggacctgaagcgcattgagagctgtgacctgtcaggggccaaccgcctgaccctggaggacgccaacatcgtgcagcctctgggcctgaccatccttggcaagcatctctactggatcgaccgccagcagcagatgatcgagcgtgtggagaagaccaccggggacaagcggactcgcatccagggccgtgtcgcccacctcactggcatccatgcagtggaggaagtcagcctggaggagttctcagcccacccatgtgcccgtgacaatggtggctgctcccacatctgtattgccaagggtgatgggacaccacggtgctcatgcccagtccacctcgtgctcctgcagaacctgctgacctgtggagagccgcccacctgctccccggaccagtttgcatgtgccacaggggagatcgactgtatccccggggcctggcgctgtgacggctttcccgagtgcgatgaccagagcgacgaggagggctgccccgtgtgctccgccgcccagttcccctgcgcgcggggtcagtgtgtggacctgcgcctgcgctgcgacggcgaggcagactgtcaggaccgctcagacgaggcggactgtgacgccatctgcctgcccaaccagttccggtgtgcgagcggccagtgtgtcctcatcaaacagcagtgcgactccttccccgactgtatcgacggctccgacgagctcatgtgtgaaatcaccaagccgccctcagacgacagcccggcccacagcagtgccatcgggcccgtcattggcatcatcctctctctcttcgtcatgggtggtgtctattttgtgtgccagcgcgtggtgtgccagcgctatgcgggggccaacgggcccttcccgcacgagtatgtcagcgggaccccgcacgtgcccctcaatttcatagccccgggcggttcccagcatggccccttcacaggcatcgcatgcggaaagtccatgatgagctccgtgagcctgatggggggccggggcggggtgcccctctacgaccggaaccacgtcacaggggcctcgtccagcagctcgtccagcacgaaggccacgctgtacccgccgatcctgaacccgccgccctccccggccacggacccctccctgtacaacatggacatgttctactcttcaaacattccggccactgcgagaccgtacaggccctacatcattcgaggaatggcgcccccgacgacgccctgcagcaccgacgtgtgtgacagcgactacagcgccagccgctggaaggccagcaagtactacctggatttgaactcggactcagacccctatccacccccacccacgccccacagccagtacctgtcggcggaggacagctgcccgccctcgcccgccaccgagaggagctacttccatctcttcccgccccctccgtccccctgcacggactcatcctgacctcggccgggccactctggcttctctgtgcccctgtaaatagttttaaatatgaacaaagaaaaaaatatattttatgatttaaaaaataaatataattgggattttaaaaacatgagaaatgtgaactgtgatggggtgggcagggctgggagaactttgtacagtggagaaatatttataaacttaattttgtaaaaca

SEQ ID NO: 149688 - DNA, 1661 bp, Homo sapiens
  Payload ID: 9571
  Gene Symbol: LRP5L
  Gene Name: low density lipoprotein receptor-related protein 5-like
  Uniprot ID: A4QPB2
  ENST ID: ENST00000402859
  CDS Start-End: 525-1283
tacatgtactgggcagattggggtgagacgccctggatcgagcaggtggggatggacgacagcacccagaagatcattgtggacttggacatttactggcccaatagactgaccatcgacctgggggagaagaagctctactgggctgacactaagctcggcttcatccaccgtgccaacctggacggctcgttccggcagaaggtggtgaagggcagcctgacgcaccccttcaccctgacactctccggggacactctgcactggatggactggctgacgtgctccatccatgcctgcaacaggaacactgcggggaagaggaacgagatcttgagcgccctctactcagcatggatatccaggtgctgagccaggagcagcagcctttctgagccaaggaggtcctgctgctggcccggtagacggaccaatggagggtctcgctggacacaccggacttcaccgacatcgtgctgcagctggacgacatccagcatgccatcgccatcaactatgacccaatggagggccacgtctactggacggatgacgaggtgtgggccatccgcagggcatacctggatgggtctggggcgcagacgctgatcaacaccaagatcaacgaccccgatgacatcgcagtcaactgggtggcccgaagcctctattggacccacacaggcactgaacacatcgaggtgacgtgcctcaacagcacctcccacaagatcctggtgtcagaggacatggacgagccccgtgccattgcactgcatcccgagatgggcctcacgtactggatagactggggagagaaccctgaaatcaagcgtgccaacctggacaggcaggagctgcgcgtgctggtcaatgcttccctcgggtggcccaacggcctggccctggacctgcaggaagggaagctctactggggagatgccaagacagacaagatcgaggcgatcagtgtcgatgagacgaagaggcagaccctcctgaaggacaagctcccacacattttcaggttcaccctgctgggggacttcatctactggaccgcctggcagcaccacagcatcaagcgggtacacaaggtcaaggccaaccgggacgtcatcattgaccagctgcccgacctgatggggctcaaagctgtgaacgtggacaaggtcgtcggaaccaaccctcatgcggacaggaatgggggtgcagccacctgtgcttcttcacgccccacacaacccggtttggctgccccatctagggcctggaactgctgagtgacatgaagacctgcatcatgcccaaggccttcttggtcttcaccagtagagccgccatccacaggatctccctcgagaccaacaacaacgatgtggccatcctgctctcggcgtcaaggaggcctcggccctggactttgatgtgtccagcaaccacatctactggacagacatcagcctgaaggtagcgtgggcccgaacatgcacacgtgcagcctatatgggaaaaccttccctctgtacctgcctcaaaggtttcagacatttttcttaaagcactataatatttattgtaacacaattcaagctaattaaatatgagcaagcctatttcaaaaaaaatagacgattataatgagcaaatccggtagacac

SEQ ID NO: 149689 - DNA, 1193 bp, Homo sapiens
  Payload ID: 9571
  Gene Symbol: LRP5L
  Gene Name: low density lipoprotein receptor-related protein 5-like
  Uniprot ID: A4QPB2
  ENST ID: ENST00000402785
  CDS Start-End: 98-856
ggaccaatggagggtctcgctggacacaccggacttcaccgacatcgtgctgcagctggacgacatccagcatgccatcgccatcaactatgacccaatggagggccacgtctactggacggatgacgaggtgtgggccatccgcagggcatacctggatgggtctggggcgcagacgctgatcaacaccaagatcaacgaccccgatgacatcgcagtcaactgggtggcccgaagcctctattggacccacacaggcactgaacacatcgaggtgacgtgcctcaacagcacctcccacaagatcctggtgtcagaggacatggacgagccccgtgccattgcactgcatcccgagatgggcctcacgtactggatagactggggagagaaccctgaaatcaagcgtgccaacctggacaggcaggagctgcgcgtgctggtcaatgcttccctcgggtggcccaacggcctggccctggacctgcaggaagggaagctctactggggagatgccaagacagacaagatcgaggcgatcagtgtcgatgagacgaagaggcagaccctcctgaaggacaagctcccacacattttcaggttcaccctgctgggggacttcatctactggaccgcctggcagcaccacagcatcaagcgggtacacaaggtcaaggccaaccgggacgtcatcattgaccagctgcccgacctgatggggctcaaagctgtgaacgtggacaaggtcgtcggaaccaaccctcatgcggacaggaatgggggtgcagccacctgtgcttcttcacgccccacacaacccggtttggctgccccatctagggcctggaactgctgagtgacatgaagacctgcatcatgcccaaggccttcttggtcttcaccagtagagccgccatccacaggatctccctcgagaccaacaacaacgatgtggccatcctgctctcggcgtcaaggaggcctcggccctggactttgatgtgtccagcaaccacatctactggacagacatcagcctgaaggtagcgtgggcccgaacatgcacacgtgcagcctatatgggaaaaccttccctctgtacctgcctcaaaggtttcagacatttttcttaaagcactataatatttattgtaacacaattcaagctaattaaatatgagcaagcctatttc

SEQ ID NO: 149690 - DNA, 1714 bp, Homo sapiens
  Payload ID: 9571
  Gene Symbol: LRP5L
  Gene Name: low density lipoprotein receptor-related protein 5-like
  Uniprot ID: A4QPB2
  ENST ID: ENST00000444995
  CDS Start-End: 702-1376
agacgaagatgcagggacacgcgcgaggagccgccgcagccgccgccgccgcgctgtggagcccgagtgagcgcggcgccagcccgtccggccgctggacaacatggaggctgcactgcccgggccgccgtggccgctgctgctggcgctgtgcggctgcccggcccccgccgcaggtacatgtactgggcagattggggtgagacgccctggatcgagcaggtggggatggacgacagcacccagaagatcattgtggacttggacatttactggcccaatagactgaccatcgacctgggggagaagaagctctactgggctgacactaagctcggcttcatccaccgtgccaacctggacggctcgttccggcagaaggtggtgaagggcagcctgacgcaccccttcaccctgacactctccggggacactctgcactggatggactggctgacgtgctccatccatgcctgcaacaggaacactgcggggaagaggaacgagatcttgagcgccctctactcagcatggatatccaggtgctgagccaggagcagcagcctttctgagccaaggaggtcctgctgctggcccggtagacggaccaatggagggtctcgctggacacaccggacttcaccgacatcgtgctgcagctggacgacatccagcatgccatcgccatcaactatgacccaatggagggccacgtctactggacggatgacgaggtgtgggccatccgcagggcatacctggatgggtctggggcgcagacgctgatcaacaccaagatcaacgaccccgatgacatcgcagtcaactgggtggcccgaagcctctattggacccacacaggcactgaacacatcgaggtgacgtgcctcaacagcacctcccacaagatcctggtgtcagaggacatggacgagccccgtgccattgcactgcatcccgagatgggcctcacgtactggatagactggggagagaaccctgaaatcaagcgtgccaacctggacaggcaggagctgcgcgtgctggtcaatgcttccctcgggtggcccaacggcctggccctggacctgcaggaagggaagctctactggggagatgccaagacagacaagatcgaggcgatcagtgtcgatgagacgaagaggcagaccctcctgaaggacaagctcccacacattttcaggttcaccctgctgggggacttcatctactggaccgcctggcagcaccacagcatcaagcgggtacacaaggtcaaggccaaccgggacgtcatcattgaccagctgcccgacctgatggggctcaaagctgtgaacgtggacaaggtcgtcgggcctggaactgctgagtgacatgaagacctgcatcatgcccaaggccttcttggtcttcaccagtagagccgccatccacaggatctccctcgagaccaacaacaacgatgtggccatcctgctctcggcgtcaaggaggcctcggccctggactttgatgtgtccagcaaccacatctactggacagacatcagcctgaaggtagcgtgggcccgaacatgcacacgtgcagcctatatgggaaaaccttccctctgtacctgcctcaaaggtttcagacatttttcttaaagcactataatatttattgtaacacaattcaagctaattaaatatgagcaagcctatttcaaaaa

SEQ ID NO: 149691 - DNA, 600 bp, Homo sapiens
  Payload ID: 9571
  Gene Symbol: LRP5L
  Gene Name: low density lipoprotein receptor-related protein 5-like
  ENST ID: ENST00000468442
  CDS Start-End: 590-600
tggggatggacgacagcacccagaagatcattgtggacttggacatttactggcccaatagactgaccatcgacctgggggagaagaagctctactgggctgacactaagctcggcttcatccaccgtgccaacctggacggctcgttccggcagaaggtggtgaagggcagcctgacgcaccccttcaccctgacactctccggggacactctgcactggatggactggctgacgtgctccatccatgcctgcaacaggaacactgcggggaagaggaacgagatcttgagcgccctctactcagcatggatatccaggtgctgagccaggagcagcagcctttctagagggggtttttgagactagaatcacctcagcatcctcctgtccccagctgtgtccagcctgtctgcagggacatcctgagaggactaggctctcccctcatccacctgcgagccaaggaggtcctgctgctggcccggtagacggaccaatggagggtctcgctggacacaccggacttcaccgacatcgtgctgcagctggacgacatccagcatgccatcgccatcaactatgacccaatggagggcca

SEQ ID NO: 149692 - DNA, 814 bp, Homo sapiens
  Payload ID: 9571
  Gene Symbol: LRP5L
  Gene Name: low density lipoprotein receptor-related protein 5-like
  ENST ID: ENST00000474163
  CDS Start-End: 134-346
aggagccaaggaggtcctgctgctggcccggtagacggaccaatggagggtctcgctggacacaccggacttcaccgacatcgtgctgcagctggacgacatccagcatgccatcgccatcaactatgacccaatggagggccacgtctactggacggatgacgaggtgtgggccatccgcagggcatacctggatgggtctggggcgcagacgctgatcaacaccaagatcaacgaccccgatgacatcgcagtcaactgggtggcccgaagcctctattggacccacacaggcactgaacacatcgagcctcacgtactggatagactggggagagaaccctgaaatcaagcgtgccaacctggacaggcaggagctgcgcgtgctggtcaatgcttccctcgggtggcccaacggcctggccctggacctgcaggaagggaagctctactggggagatgccaagacagacaagatcgaggcgatcagtgtcgatgagacgaagaggcagaccctcctgaaggacaagctcccacacattttcaggttcaccctgctgggggacttcatctactggaccgcctggcagcaccacagcatcaagcgggtacacaaggtcaaggccaaccgggacgtcatcattgaccagctgcccgacctgatggggctcaaagctgtgaacgtggacaaggtcgtcggaaccaaccctcatgcggacaggaatgggggtgcagccacctgtgcttcttcacgccccacacaacccggtttggctgccccatctagggcctggaactgctgagtgacatgaag

SEQ ID NO: 149693 - DNA, 3602 bp, Homo sapiens
  Payload ID: 9571
  Gene Symbol: LRP5L
  Gene Name: low density lipoprotein receptor-related protein 5-like
  Uniprot ID: A4QPB2
  ENST ID: ENST00000610821
  CDS Start-End: 2466-3224
gcctagagggagaaaacttgttgaaattcagagatccccctccccctaccaatacacaccaaatcagacgcctctgaccagatctgaatttggctctcagagatttccattgtagccaggcagttggggcactttctgagtgctgcctccacctcactgtccccagcctgcctgcctccgtttccctagccctgggcctgtgccgctgtcaccatcacctgggcgccctctagtggatgaatcggattatgcacgagggggcttggagcaggattcagaaggggctcctgtccttccttgaaatgctggacgccgggatcctggaacagctcttcaggtctctgcattcctcctggcaacagccagagcctgggcgcagggggctactgttgtttgaaggctgaaggctgcagcctggtagggcactcaggagacctggcagttggctgcagggccaggtctaggggccagggcatgagggatgctctgggctggctcagccccgggcccccatgcggattgtgactgtgggggcatggccacatgatgttgaggggggatctctgaccctgaccttcttggctctgtgcatccttgaaaccagaaaggtctggaacaaatcagtgaacaatgccctaactcggggagggagccacatcctgaccccagcagcctcagaaggatccgtgtcagggttatggggcaccctgggggccccgagtctgcatgggtctccacatgcaacttctgccggaaactctgaaaaatcccaactggggggtcataggacacaatcagaaatgctgatgccactgtgtgtggatccccgggccctggggggtcaggagcatgtagaaggtgggccacagggggttcataagagaatcctgtaaccgcccctgccccccaaacttagaagcccactggagggccatgggtgaaagcttgggggggtgtcctgtggagtgggtggtggggggtctttgggtttacatgctgctgggcctgagcagcaggaccccgtccacagctgatccctgggccctgctgctcagctgctctcttgagtgttgctgtggctgccgagagagcctgagtcgagcctctcttgtgccggccgtacgctgtcaggccacgctggtgagtttggcaaggcacagatgcccagagcagagaactttccttggggatttaatatgtgcgaatcttgaggtccggcaaatctttccctcagctagagagggggtttttgagactagaatcacctcagcatcctcctgtccccagctgtgtccagcctgtctgcagggacatcctgagaggactaggctctcccctcatccacctgcgtaagtgccaccctgaagcctgtccacccatgcttggagaggcttggcctcaacctgcttagccagcagcaggcttgggcctggggtgcagcagagacccaggtggctgtggggtggttgcttcatggggtggttctgaaacgcagttggaagtgcatggacagtgccttacctgttctctgtgggaccctgtttagaaaccaggtctgagttactgggggtcatcgctacattctgatggcctagctgtgtggaggccacggtggagccccatccaaggagccagggccctgggtctagccgtgaccagaacgcatgccctggaggtgtttctcatcttgcacctgtgttgcctggtgtctcaagtggccacaaaactgtgttagctcttggtgcccctgggcttcggaaccagggtttcccttcatctcagtgacccgggagcatctgggcagtgagtaaagagggtgatttacttgatgggtacgtttggtcctgcctgggagcccccccaggcacggtcctgggacctgaagctgccctcgttggtggaggggagggagagagcttcagggatgaggtggcgttgagctgggcgggaagggtgagcccctgcaaggtggggtgggtgtgctggggacgctgagcagcacggccagcaggtgggtcttcagctcggtacccggtgggacttgtggttggggctggtgtgtggccaggagaggggctggcagaagacaagggggactgtgaggcagctcccatccagcggttgaagcctgatggcctggctctgtgcctcagttctctcatctataaaatgagaaaacagtgccagcctcccagacctgtcatgaggatgaacgagtgaccacgtagcatgggctgggtgcgtgtcacctaacattaccagcctttgcaaggagagccctggggacctggctgagtttttcccttgcctggcccactgcacctgtccccacaggagccaaggaggtcctgctgctggcccggtagacggaccaatggagggtctcgctggacacaccggacttcaccgacatcgtgctgcagctggacgacatccagcatgccatcgccatcaactatgacccaatggagggccacgtctactggacggatgacgaggtgtgggccatccgcagggcatacctggatgggtctggggcgcagacgctgatcaacaccaagatcaacgaccccgatgacatcgcagtcaactgggtggcccgaagcctctattggacccacacaggcactgaacacatcgaggtgacgtgcctcaacagcacctcccacaagatcctggtgtcagaggacatggacgagccccgtgccattgcactgcatcccgagatgggcctcacgtactggatagactggggagagaaccctgaaatcaagcgtgccaacctggacaggcaggagctgcgcgtgctggtcaatgcttccctcgggtggcccaacggcctggccctggacctgcaggaagggaagctctactggggagatgccaagacagacaagatcgaggcgatcagtgtcgatgagacgaagaggcagaccctcctgaaggacaagctcccacacattttcaggttcaccctgctgggggacttcatctactggaccgcctggcagcaccacagcatcaagcgggtacacaaggtcaaggccaaccgggacgtcatcattgaccagctgcccgacctgatggggctcaaagctgtgaacgtggacaaggtcgtcggaaccaaccctcatgcggacaggaatgggggtgcagccacctgtgcttcttcacgccccacacaacccggtttggctgccccatctagggcctggaactgctgagtgacatgaagacctgcatcatgcccaaggccttcttggtcttcaccagtagagccgccatccacaggatctccctcgagaccaacaacaacgatgtggccatcctgctctcggcgtcaaggaggcctcggccctggactttgatgtgtccagcaaccacatctactggacagacatcagcctgaaggtagcgtgggcccgaacatgcacacgtgcagcctatatgggaaaaccttccctctgtacctgcctcaaaggtttcagacatttttcttaaagcactataatatttattgtaacacaattcaagctaattaaatatgagcaagcctatttcaaaaaaaatagacgattataatgagcaaatccggtagacac

SEQ ID NO: 149694 - DNA, 10020 bp, Homo sapiens
  Payload ID: 9572
  Gene Symbol: LRP6
  Gene Name: low density lipoprotein receptor-related protein 6
  Uniprot ID: O75581
  ENST ID: ENST00000261349
  CDS Start-End: 78-4919
gcggccgccccggctcctcgcctcccccacttctggccacccctcgccggtgagagaagagaacgcgagaagggaagatgggggccgtcctgaggagcctcctggcctgcagcttctgtgtgctcctgagagcggcccctttgttgctttatgcaaacagacgggacttgcgattggttgatgctacaaatggcaaagagaatgctacgattgtagttggaggcttggaggatgcagctgcggtggactttgtgtttagtcatggcttgatatactggagtgatgtcagcgaagaagccattaaacgaacagaatttaacaaaactgagagtgtgcagaatgttgttgtttctggattattgtcccccgatgggctggcatgtgattggcttggagaaaaattgtactggacagattctgaaactaatcggattgaagtttctaatttagatggatctttacgaaaagttttattttggcaagagttggatcaacccagagctattgccttagatccttcaagtgggttcatgtactggacagactggggagaagtgccaaagatagaacgtgctggaatggatggttcaagtcgcttcattataataaacagtgaaatttactggccaaatggactgactttggattatgaagaacaaaagctttattgggcagatgcaaaacttaatttcatccacaaatcaaatctggatggaacaaatcggcaggcagtggttaaaggttcccttccacatccttttgccttgacgttatttgaggacatattgtactggactgactggagcacacactccattttggcttgcaacaagtatactggtgagggtctgcgtgaaatccattctgacatcttctctcccatggatatacatgccttcagccaacagaggcagccaaatgccacaaatccatgtggaattgacaatgggggttgttcccatttgtgtttgatgtctccagtcaagcctttttatcagtgtgcttgccccactggggtcaaactcctggagaatggaaaaacctgcaaagatggtgccacagaattattgcttttagctcgaaggacagacttgagacgcatttctttggatacaccagattttacagacattgttctgcagttagaagacatccgtcatgccattgccatagattacgatcctgtggaaggctacatctactggactgatgatgaagtgagggccatacgccgttcatttatagatggatctggcagtcagtttgtggtcactgctcaaattgcccatcctgatggtattgctgtggactgggttgcacgaaatctttattggacagacactggcactgatcgaatagaagtgacaaggctcaatgggaccatgaggaagatcttgatttcagaggacttagaggaaccccgggctattgtgttagatcccatggttgggtacatgtattggactgactggggagaaattccgaaaattgagcgagcagctctggatggttctgaccgtgtagtattggttaacacttctcttggttggccaaatggtttagccttggattatgatgaaggcaaaatatactggggagatgccaaaacagacaagattgaggttatgaatactgatggcactgggagacgagtactagtggaagacaaaattcctcacatatttggatttactttgttgggtgactatgtttactggactgactggcagaggcgtagcattgaaagagttcataaacgaagtgcagagagggaagtgatcatagatcagctgcctgacctcatgggcctaaaggctacaaatgttcatcgagtgattggttccaacccctgtgctgaggaaaacgggggatgtagccatctctgcctctatagacctcagggccttcgctgtgcttgccctattggctttgaactcatcagtgacatgaagacctgcattgtcccagaggctttccttttgttttcacggagagcagatatcagacgaatttctctggaaacaaacaataataatgtggctattccactcactggtgtcaaagaagcttctgctttggattttgatgtgacagacaaccgaatttattggactgatatatcactcaagaccatcagcagagcctttatgaatggcagtgcactggaacatgtggtagaattcggcttagattatccagaaggcatggcagtagactggcttgggaagaacttgtactgggcagacacaggaacgaatcgaattgaggtgtcaaagttggatgggcagcaccgacaagttttggtgtggaaagacctagatagtcccagagctctcgcgttggaccctgccgaaggatttatgtattggactgaatggggtggaaaacctaagatagacagagctgcaatggatggaagtgaacgtactaccttagttccaaatgtggggcgggcaaacggcctaactattgattatgctaaaaggaggctttattggacagacctggacaccaacttaatagaatcttcaaatatgcttgggctcaaccgtgaagttatagcagatgacttgcctcatccttttggcttaactcagtaccaagattatatctactggacggactggagccgacgcagcattgagcgtgccaacaaaaccagtggccaaaaccgcaccatcattcagggccatttggattatgtgatggacatcctcgtctttcactcatctcgacagtcagggtggaatgaatgtgcttccagcaatgggcactgctcccacctctgcttggctgtgccagttgggggttttgtttgtggatgccctgcccactactctcttaatgctgacaacaggacttgtagtgctcctacgactttcctgctcttcagtcaaaagagtgccatcaaccgcatggtgattgatgaacaacagagccccgacatcatccttcccatccacagccttcggaatgtccgggccattgactatgacccactggacaagcaactctattggattgactcacgacaaaacatgatccgaaaggcacaagaagatggcagccagggctttactgtggttgtgagctcagttccgagtcagaacctggaaatacaaccctatgacctcagcattgatatttacagccgctacatctactggacttgtgaggctaccaatgtcattaatgtgacaagattagatgggagatcagttggagtggtgctgaaaggcgagcaggacagacctcgagccgttgtggtaaacccagagaaagggtatatgtattttaccaatcttcaggaaaggtctcctaaaattgaacgggctgctttggatgggacagaacgggaggtcctctttttcagtggcttaagtaaaccaattgctttagcccttgatagcaggctgggcaagctcttttgggctgattcagatctccggcgaattgaaagcagtgatctctcaggtgctaaccggatagtattagaagactccaatatcttgcagcctgtgggacttactgtgtttgaaaactggctctattggattgataaacagcagcaaatgattgaaaaaattgacatgacaggtcgagagggtagaaccaaagtccaagctcgaattgcccagcttagtgacattcatgcagtaaaggagctgaaccttcaagaatacagacagcacccttgtgctcaggataatggtggctgttcacatatttgtcttgtaaagggggatggtactacaaggtgttcttgccccatgcacctggttctacttcaagatgagctatcatgtggagaacctccaacatgttctcctcagcagtttacttgtttcacgggggaaattgactgtatccctgtggcttggcggtgcgatgggtttactgaatgtgaagaccacagtgatgaactcaattgtcctgtatgctcagagtcccagttccagtgtgccagtgggcagtgtattgatggtgccctccgatgcaatggagatgcaaactgccaggacaaatcagatgagaagaactgtgaagtgctttgtttaattgatcagttccgctgtgccaatggtcagtgcattggaaagcacaagaagtgtgatcataatgtggattgcagtgacaagtcagatgaactggattgttatccgactgaagaaccagcaccacaggccaccaatacagttggttctgttattggcgtaattgtcaccatttttgtgtctggaactgtatactttatctgccagaggatgttgtgtccacgtatgaagggagatggggaaactatgactaatgactatgtagttcatggaccagcttctgtgcctcttggttatgtgccacacccaagttctttgtcaggatctcttccaggaatgtctcgaggtaaatcaatgatcagctccctcagtatcatggggggaagcagtggacccccctatgaccgagcccatgttacaggagcatcatcaagtagttcttcaagcaccaaaggcacttacttccctgcaattttgaaccctccaccatccccagccacagagcgatcacattacactatggaatttggatattcttcaaacagtccttccactcataggtcatacagctacaggccatatagctaccggcactttgcaccccccaccacaccctgcagcacagatgtttgtgacagtgactatgctcctagtcggagaatgacctcagtggcaacagccaagggctataccagtgacttgaactatgattcagaacctgtgcccccacctcccacaccccgaagccaatacttgtcagcagaggagaactatgaaagctgcccaccttctccatacacagagaggagctattctcatcacctctacccaccgccaccctctccctgtacagactcctcctgaggaggggccctcctcctctgactgcctccaacgtaaaaatgtaaatataaatttggttgagatctggagggggggagggagctattagagaaggatgaggcagaccatgtacagttaaaattataaaatggggtagggaatactggagatatttgtacagaagaaaaggatatttatatattttcttaaaacagcagatttgctgcttgtgccataaaagtttgtataaaaaaaatttgtactaaaagttttatttttgcaaactaaatacacaaagcatgccttaaacccagtgaagcaactgagtacaaaggaaacaggaataataaaggcatcactgaccaggaatatctgggctttattgataccaaaaataaaaaagaggaagaagaaaaattaagtccatctcagagcagcaaaccatagatacatggatgtagccagatagccttcagttaactaacatttgagggccaacaagtaagaaatgatgaaaggaaaaaaatgcaattaatactaaccttggacgaagggctttgttttctctaggaatccaacagtgctagtgaggaaagtagatatttctaaaaacccattctgggtgttgctgttgtaggagagatcagccctctggtaagatgccatgaagctgtgtgtgtgtgcaagtctctgtccctacctttagaatccatacctctgtcaaaatgaatttttttctctaggtatgtttaccttgctgcctcctccagcaacttggtaagtcattttgctaagataccatgatttttttaagctgaagcattgactaaatggaattttctaaattaaacttgattttaatatttcttctagctccattccccagtaggcttagctcttcaatttgactgctgtttttgcataatgatcaaaagttagacatattatttctcttcttccaagattgttttaatgctcattaaaatgtctttttacaacacatatagacaatgtttaagaattaaaaatttaaccattatgtttttgttgtaaatctcatatccttgcactactttcagcatatatcacagtacgaaatcatttatatatatatatatatatatatatatatatatatatatatatatatatatattttgtttgtttgtttgttttctgagtaaaacatttaaatatgttctggttagagacaatctatttaaaaagatttttttcttattaggattttccctatattaacagtttgtgatgttttcatgttctttagaccggtttttctcagaataatgtctacatacatacctcttctaatgtgtgacatgaatttaatatctttctgttacccactgtgaatgttaggctgttttcaaattatccacaaattattcttgtaatcacccaatatttttatgtgggtcctctcttacccattatggattaagatagtttaacaaatttaacaatgaggattaaatgagaaggcaaactgttaacttctcagctgtcagaatttgggtggaagggaataatggaagcctcttttgtgatctgcctgacctgctgtcatgtatggtactggggctgctacatcttgagctatcagggctgacctgtggaatgattctagcacttgctctgccaccttgccagaagttcgtttcctgctttttacacatgtgtagcacttctctgctaaaattgaatggttttaaactaatgtatttttagcttaagaggtgttggtcagttaattattgaattttttttttttcttttttaattctgtcttgccaaggcctctctgggtttcagggcccaagagaaaacagtggaagaaaggattcagaatttgggcaagggtgaagtaactgttcatgcaagttaaaaatacctaagtaaagtttttgaagataaaattgtggtttcagaataatgctgattgttggagactgtaagaatcaggtgcacttgattttgcatataagcaaatggtaaatctatcagaatcctaaaacagacaagcatgaactcttcccattgctggaactaagtgcccacagtgtcagacaaaatggacattgaacttggattctgtgatacacagggcacttgatgcttaaatgaagatggaaaggttagcaatacctgggtgtcagttagaatttgagaattctatatgtttacatatttaaatgtgcatcttgatctggtgggcttcccatgtggagacttgcactctaattaactaagaagaatattgccttgttggatctcagtccacgtgcttgcactgcgatggcaatggcctcttcttcaaaatactaatttgtgtgccaatttgtttaaaattatttgaaggcagttcagcctaatctcagtgttctctttctggggtagatgagatggattcttaatatttctgggagtactttttaatgagagaattgtcaaatttggaaagatttattgagccttaggttacatggacagttaagcttaagtaaactgtatattgattatcaaacacaagctgtaattggaaaagttgagaggaaaagcatgagatcacaaattagggggaaaaaagaaaagggatttttaaatttggtgtattaaattcattgtccaagggggaaaatgaataatgtttcattagattccttatatgcaaaagtatttattttgaacatgtgtcctaaaatatatgcactaactgatgtgattaaaattgtccaagaaataaacttgagcataacatactttgtgtgcaccacagtaagctattctgcattgaagtggtcttttataactaaggcctggactttgctccaacagagtcgtggtcttctgaatagtgacttaaggagttttgtttgcttaagtcagataatagcacattcacagggaaacaaagagagttggtggatagaattttctgactattaatttttcttccatgaaattttattatgcctttggcactttctgccactcttacagcatatcacaagatatctgtttagcagaagattatgtagttactttaattttaatataaaagtagcttgtgatacattaccaagagatctctgattctttagtaagtttgagaacacctattctacagagatgataggtacttagaaatgaagactttaaagtacattttaatctaatataggccagtaattgggggaaggggctttgagcagtacaattttaagatgattttgagggttgtatttctttatcatttaaaaatatcctaaagtcagtaatttatatgaaggaaactcattcattattgaaggtattaaaaatagccatcatctgtattaggtagcagttttggaggatcatctttttcttttgctataaagccctattaatgaagaatacttccagtagagttaatagctgtagcttacctagtgtgttaatgaagtgtgtttatttatgtgacttgataccagtagtcataatagagactgaagaggtatgcgttaagcacgcctacttctatgcagtaaacaggctgcagctgcctagattagattcttagaaatgtcatattttgaattgttttatttcttgtaggggaagctttgtcccacttcattcatttgcatgccataggaattacatattggttatcattacgtatctaacaagattcagaaacaaaaatcttggacttttcacatccgaaatatgtcagctcttaataaatgtgtggtgcttaagtctacatatggcatccatagttgatttagagtatggatatgagtgtgttgaccagttatcagtaggtggacaaatatttgggcatctacagatgagactatgcactaagtgtggactgagtcctaaagaagcttatagtcaggtgttgtttaaaacattatcagaattcttaaacccaaggaatttaattttatttggtatttcttaagcctaaaatgaaccaagagaaagatgattttagaaagtacttgtagtgaaagatgattttagaaagtacttgtagtgcatgtgtggcttctgacttttgggatggcaccattttataatagtttcaaaatttagcttttgaaattctcaacattttatggtagaagactttggacctcaagtataaaattatacgtttataatttttttaaaatttaaattataagtattgtgaattcacactctcaggctattgtctgacttgatctacgtctcataaagcctgtacctgagtggagtggaaggtggagtcttaggttaatcagttactgactctaccctcaccctctttcaattgaggtaaactttgctgtttttctttttcataaagcattctcaaattgttgagtttattgctgaaaaaaatctccatgactttacagatagaattacaaactaaatgatgtcttgtatttagaagcagagtacagacctaacgaactgttagattctccaccatcacttagggtttgcccagaagcaacaccagagaattacagacaacgcgcttttgctgaactgtccattttggtggttgtgtttttcagtcaaatataagcaggatgggcgatagagatatatttatatatagatacatattctatatatctaatgcctaaatatgggtattaaagggaaaatttttaaagtctgattaaatccaatatgacatgaaattaaatatatggattagtaaggaaaaatgttaaaaagtagagaggataccaagaagattaaactggactagccttatttgcaagtgaaggatctggtgctgctttcagatgtttatcttttatttttttcccttaagctttaatcttcgtcattgtcttaaagtcaactggtgtttcttgttcattgactttggtacgatggtgctttgcaaggatgtatttatgttataatggccaacatttggtcagcccttgtccacttattcacttccctccttttgtaaaataagtgctttaattataaactgtataaaaataccttgtataaaccccttttttgattattacaataaataagctgaattgtaacaaatgaaatttgatttttgtaataaaacagtggaaaagtaaaa

SEQ ID NO: 149695 - DNA, 562 bp, Homo sapiens
  Payload ID: 9572
  Gene Symbol: LRP6
  Gene Name: low density lipoprotein receptor-related protein 6
  ENST ID: ENST00000535731
  CDS Start-End: 337-562
gaatgaggagctgcgcgggggaagcggggcgccgggggaggaggcggcgggatggaagcagacgctggcgtcgcgcgagcccggggccgagcggcgcggtagagagggcggcggcggcgcgcgcggaaccttgacgtgcccctttctttcttctctcgctgggaagctgggaagtatgagcgtgcagccctgccgctgcggcggccgccccggctcctcgcctcccccacttctggccacccctcgccggtgagagaagagaacgcgagaagggaagatgggggccgtcctgaggagcctcctggcctgcagcttctgtgtgctcctgagaggttcatgtactggacagactggggagaagtgccaaagatagaacgtgctggaatggatggttcaagtcgcttcattataataaacagtgaaatttactggccaaatggactgactttggattatgaagaacaaaagctttattgggcagatgcaaaacttaatttcatccacaaatcaaatctggatggaacaaatcggcaggcagtggttaaaggttcccttccacatc

SEQ ID NO: 149696 - DNA, 4774 bp, Homo sapiens
  Payload ID: 9572
  Gene Symbol: LRP6
  Gene Name: low density lipoprotein receptor-related protein 6
  ENST ID: ENST00000543091
  CDS Start-End: 35-4741
tcgccggtgagagaagagaacgcgagaagggaagatgggggccgtcctgaggagcctcctggcctgcagcttctgtgtgctcctgagagcggcccctttgttgctttatgcaaacagacgggacttgcgattggttgatgctacaaatggcaaagagaatgctacgattgtagttggaggcttggaggatgcagctgcggtggactttgtgtttagtcatggcttgatatactggagtgatgtcagcgaagaagccattaaacgaacagaatttaacaaaactgagagtgtgcagaatgttgttgtttctggattattgtcccccgatgggctggcatgtgattggcttggagaaaaattgtactggacagattctgaaactaatcggattgaagtttctaatttagatggatctttacgaaaagttttattttggcaagagttggatcaacccagagctattgccttagatccttcaagtgggttcatgtactggacagactggggagaagtgccaaagatagaacgtgctggaatggatggttcaagtcgcttcattataataaacagtgaaatttactggccaaatggactgactttggattatgaagaacaaaagctttattgggcagatgcaaaacttaatttcatccacaaatcaaatctggatggaacaaatcggcaggcagtggttaaaggttcccttccacatccttttgccttgacgttatttgaggacatattgtactggactgactggagcacacactccattttggcttgcaacaagtatactggtgagggtctgcgtgaaatccattctgacatcttctctcccatggatatacatgccttcagccaacagaggcagccaaatgccacaaatccatgtggaattgacaatgggggttgttcccatttgtgtttgatgtctccagtcaagcctttttatcagtgtgcttgccccactggggtcaaactcctggagaatggaaaaacctgcaaagatggtgccacagaattattgcttttagctcgaaggacagacttgagacgcatttctttggatacaccagattttacagacattgttctgcagttagaagacatccgtcatgccattgccatagattacgatcctgtggaaggctacatctactggactgatgatgaagtgagggccatacgccgttcatttatagatggatctggcagtcagtttgtggtcactgctcaaattgcccatcctgatggtattgctgtggactgggttgcacgaaatctttattggacagacactggcactgatcgaatagaagtgacaaggctcaatgggaccatgaggaagatcttgatttcagaggacttagaggaaccccgggctattgtgttagatcccatggttgggtacatgtattggactgactggggagaaattccgaaaattgagcgagcagctctggatggttctgaccgtgtagtattggttaacacttctcttggttggccaaatggtttagccttggattatgatgaaggcaaaatatactggggagatgccaaaacagacaagattgaggttatgaatactgatggcactgggagacgagtactagtggaagacaaaattcctcacatatttggatttactttgttgggtgactatgtttactggactgactggcagaggcgtagcattgaaagagttcataaacgaagtgcagagagggaagtgatcatagatcagctgcctgacctcatgggcctaaaggctacaaatgttcatcgagtgattggttccaacccctgtgctgaggaaaacgggggatgtagccatctctgcctctatagacctcagggccttcgctgtgcttgccctattggctttgaactcatcagtgacatgaagacctgcattgtcccagaggctttccttttgttttcacggagagcagatatcagacgaatttctctggaaacaaacaataataatgtggctattccactcactggtgtcaaagaagcttctgctttggattttgatgtgacagacaaccgaatttattggactgatatatcactcaagaccatcagcagagcctttatgaatggcagtgcactggaacatgtggtagaattcggcttagattatccagaaggcatggcagtagactggcttgggaagaacttgtactgggcagacacaggaacgaatcgaattgaggtgtcaaagttggatgggcagcaccgacaagttttggtgtggaaagacctagatagtcccagagctctcgcgttggaccctgccgaaggatttatgtattggactgaatggggtggaaaacctaagatagacagagctgcaatggatggaagtgaacgtactaccttagttccaaatgtggggcgggcaaacggcctaactattgattatgctaaaaggaggctttattggacagacctggacaccaacttaatagaatcttcaaatatgcttgggctcaaccgtgaagttatagcagatgacttgcctcatccttttggcttaactcagtaccaagattatatctactggacggactggagccgacgcagcattgagcgtgccaacaaaaccagtggccaaaaccgcaccatcattcagggccatttggattatgtgatggacatcctcgtctttcactcatctcgacagtcagggtggaatgaatgtgcttccagcaatgggcactgctcccacctctgcttggctgtgccagttgggggttttgtttgtggatgccctgcccactactctcttaatgctgacaacaggacttgtagtgctcctacgactttcctgctcttcagtcaaaagagtgccatcaaccgcatggtgattgatgaacaacagagccccgacatcatccttcccatccacagccttcggaatgtccgggccattgactatgacccactggacaagcaactctattggattgactcacgacaaaacatgatccgaaaggcacaagaagatggcagccagggctttactgtggttgtgagctcagttccgagtcagaacctggaaatacaaccctatgacctcagcattgatatttacagccgctacatctactggacttgtgaggctaccaatgtcattaatgtgacaagattagatgggagatcagttggagtggtgctgaaaggcgagcaggacagacctcgagccgttgtggtaaacccagagaaagggtatatgtattttaccaatcttcaggaaaggtctcctaaaattgaacgggctgctttggatgggacagaacgggaggtcctctttttcagtggcttaagtaaaccaattgctttagcccttgatagcaggctgggcaagctcttttgggctgattcagatctccggcgaattgaaagcagtgatctctcaggtgctaaccggatagtattagaagactccaatatcttgcagcctgtgggacttactgtgtttgaaaactggctctattggattgataaacagcagcaaatgattgaaaaaattgacatgacaggtcgagagggtagaaccaaagtccaagctcgaattgcccagcttagtgacattcatgcagtaaaggagctgaaccttcaagaatacagacagcacccttgtgctcaggataatggtggctgttcacatatttgtcttgtaaagggggatggtactacaaggtgttcttgccccatgcacctggttctacttcaagatgagctatcatgtggagagtcccagttccagtgtgccagtgggcagtgtattgatggtgccctccgatgcaatggagatgcaaactgccaggacaaatcagatgagaagaactgtgaagtgctttgtttaattgatcagttccgctgtgccaatggtcagtgcattggaaagcacaagaagtgtgatcataatgtggattgcagtgacaagtcagatgaactggattgttatccgactgaagaaccagcaccacaggccaccaatacagttggttctgttattggcgtaattgtcaccatttttgtgtctggaactgtatactttatctgccagaggatgttgtgtccacgtatgaagggagatggggaaactatgactaatgactatgtagttcatggaccagcttctgtgcctcttggttatgtgccacacccaagttctttgtcaggatctcttccaggaatgtctcgaggtaaatcaatgatcagctccctcagtatcatggggggaagcagtggacccccctatgaccgagcccatgttacaggagcatcatcaagtagttcttcaagcaccaaaggcacttacttccctgcaattttgaaccctccaccatccccagccacagagcgatcacattacactatggaatttggatattcttcaaacagtccttccactcataggtcatacagctacaggccatatagctaccggcactttgcaccccccaccacaccctgcagcacagatgtttgtgacagtgactatgctcctagtcggagaatgacctcagtggcaacagccaagggctataccagtgacttgaactatgattcagaacctgtgcccccacctcccacaccccgaagccaatacttgtcagcagaggagaactatgaaagctgcccaccttctccatacacagagaggagctattctcatcacctctacccaccgccaccctctccctgtacagactcctcctgaggaggggccctcctcctctgactgcctccaacg

SEQ ID NO: 149697 - DNA, 593 bp, Homo sapiens
  Payload ID: 9572
  Gene Symbol: LRP6
  Gene Name: low density lipoprotein receptor-related protein 6
  ENST ID: ENST00000540527
  CDS Start-End: 1-210
aactgtgaagtgctttgtttaattgatcagttccgctgtgccaatggtcagtgcattggaaagcacaagaagtgtgatcataatgtggattgcagtgacaagtcagatgaactggattgttattttgaaccctccaccatccccagccacagagcgatcacattacactatggaatttggatattcttcaaacagtccttccactcataggtcatacagctacaggccatatagctaccggcactttgcaccccccaccacaccctgcagcacagatgtttgtgacagtgactatgctcctagtcggagaatgacctcagtggcaacagccaagggctataccagtgacttgaactatgattcagaacctgtgcccccacctcccacaccccgaagccaatacttgtcagcagaggagaactatgaaagctgcccaccttctccatacacagagaggagctattctcatcacctctacccaccgccaccctctccctgtacagactcctcctgaggaggggccctcctcctctgactgcctccaacgtaaaaatgtaaatataaatttggttgagatctggagggggggaggg

SEQ ID NO: 149698 - DNA, 7812 bp, Homo sapiens
  Payload ID: 9572
  Gene Symbol: LRP6
  Gene Name: low density lipoprotein receptor-related protein 6
  ENST ID: ENST00000538239
  CDS Start-End: 1-4436
agttggatcaacccagagctattgccttagatccttcaagtgggttcatgtactggacagactggggagaagtgccaaagatagaacgtgctggaatggatggttcaagtcgcttcattataataaacagtgaaatttactggccaaatggactgactttggattatgaagaacaaaagctttattgggcagatgcaaaacttaatttcatccacaaatcaaatctggatggaacaaatcggcaggcagtggttaaaggttcccttccacatccttttgccttgacgttatttgaggacatattgtactggactgactggagcacacactccattttggcttgcaacaagtatactggtgagggtctgcgtgaaatccattctgacatcttctctcccatggatatacatgccttcagccaacagaggcagccaaatgccacaaatccatgtggaattgacaatgggggttgttcccatttgtgtttgatgtctccagtcaagcctttttatcagtgtgcttgccccactggggtcaaactcctggagaatggaaaaacctgcaaagatggtgccacagaattattgcttttagctcgaaggacagacttgagacgcatttctttggatacaccagattttacagacattgttctgcagttagaagacatccgtcatgccattgccatagattacgatcctgtggaaggctacatctactggactgatgatgaagtgagggccatacgccgttcatttatagatggatctggcagtcagtttgtggtcactgctcaaattgcccatcctgatggtattgctgtggactgggttgcacgaaatctttattggacagacactggcactgatcgaatagaagtgacaaggctcaatgggaccatgaggaagatcttgatttcagaggacttagaggaaccccgggctattgtgttagatcccatggttgggtacatgtattggactgactggggagaaattccgaaaattgagcgagcagctctggatggttctgaccgtgtagtattggttaacacttctcttggttggccaaatggtttagccttggattatgatgaaggcaaaatatactggggagatgccaaaacagacaagattgaggttatgaatactgatggcactgggagacgagtactagtggaagacaaaattcctcacatatttggatttactttgttgggtgactatgtttactggactgactggcagaggcgtagcattgaaagagttcataaacgaagtgcagagagggaagtgatcatagatcagctgcctgacctcatgggcctaaaggctacaaatgttcatcgagtgattggttccaacccctgtgctgaggaaaacgggggatgtagccatctctgcctctatagacctcagggccttcgctgtgcttgccctattggctttgaactcatcagtgacatgaagacctgcattgtcccagaggctttccttttgttttcacggagagcagatatcagacgaatttctctggaaacaaacaataataatgtggctattccactcactggtgtcaaagaagcttctgctttggattttgatgtgacagacaaccgaatttattggactgatatatcactcaagaccatcagcagagcctttatgaatggcagtgcactggaacatgtggtagaattcggcttagattatccagaaggcatggcagtagactggcttgggaagaacttgtactgggcagacacaggaacgaatcgaattgaggtgtcaaagttggatgggcagcaccgacaagttttggtgtggaaagacctagatagtcccagagctctcgcgttggaccctgccgaaggatttatgtattggactgaatggggtggaaaacctaagatagacagagctgcaatggatggaagtgaacgtactaccttagttccaaatgtggggcgggcaaacggcctaactattgattatgctaaaaggaggctttattggacagacctggacaccaacttaatagaatcttcaaatatgcttgggctcaaccgtgaagttatagcagatgacttgcctcatccttttggcttaactcagtaccaagattatatctactggacggactggagccgacgcagcattgagcgtgccaacaaaaccagtggccaaaaccgcaccatcattcagggccatttggattatgtgatggacatcctcgtctttcactcatctcgacagtcagggtggaatgaatgtgcttccagcaatgggcactgctcccacctctgcttggctgtgccagttgggggttttgtttgtggatgccctgcccactactctcttaatgctgacaacaggacttgtagtgctcctacgactttcctgctcttcagtcaaaagagtgccatcaaccgcatggtgattgatgaacaacagagccccgacatcatccttcccatccacagccttcggaatgtccgggccattgactatgacccactggacaagcaactctattggattgactcacgacaaaacatgatccgaaaggcacaagaagatggcagccagggctttactgtggttgtgagctcagttccgagtcagaacctggaaatacaaccctatgacctcagcattgatatttacagccgctacatctactggacttgtgaggctaccaatgtcattaatgtgacaagattagatgggagatcagttggagtggtgctgaaaggcgagcaggacagacctcgagccgttgtggtaaacccagagaaagggtatatgtattttaccaatcttcaggaaaggtctcctaaaattgaacgggctgctttggatgggacagaacgggaggtcctctttttcagtggcttaagtaaaccaattgctttagcccttgatagcaggctgggcaagctcttttgggctgattcagatctccggcgaattgaaagcagtgatctctcaggtgctaaccggatagtattagaagactccaatatcttgcagcctgtgggacttactgtgtttgaaaactggctctattggattgataaacagcagcaaatgattgaaaaaattgacatgacaggtcgagagggtagaaccaaagtccaagctcgaattgcccagcttagtgacattcatgcagtaaaggagctgaaccttcaagaatacagacagcacccttgtgctcaggataatggtggctgttcacatatttgtcttgtaaagggggatggtactacaaggtgttcttgccccatgcacctggttctacttcaagatgagctatcatgtggagaacctccaacatgttctcctcagcagtttacttgtttcacgggggaaattgactgtatccctgtggcttggcggtgcgatgggtttactgaatgtgaagaccacagtgatgaactcaattgtcctgtatgctcagagtcccagttccagtgtgccagtgggcagtgtattgatggtgccctccgatgcaatggagatgcaaactgccaggacaaatcagatgagaagaactgtgaagtgctttgtttaattgatcagttccgctgtgccaatggtcagtgcattggaaagcacaagaagtgtgatcataatgtggattgcagtgacaagtcagatgaactggattgttatccgactgaagaaccagcaccacaggccaccaatacagttggttctgttattggcgtaattgtcaccatttttgtgtctggaactgtatactttatctgccagaggatgttgtgtccacgtatgaagggagatggggaaactatgactaatgactatgtagttcatggaccagcttctgtgcctcttggttatgtgccacacccaagttctttgtcaggatctcttccaggaatgtctcgaggtaaatcaatgatcagctccctcagtatcatggggggaagcagtggacccccctatgaccgagcccatgttacaggagcatcatcaagtagttcttcaagcaccaaaggcacttacttccctgcaattttgaaccctccaccatccccagccacagagcgatcacattacactatggaatttggatattcttcaaacagtccttccactcataggtcatacagctacaggccatatagctaccggcactttgcaccccccaccacaccctgcagcacagatgtttgtgacagtgactatgctcctagtcggagaatgacctcagtggcaacagccaagggctataccagtgacttgaactatgattcagaacctgtgcccccacctcccacaccccgaagccaatacttgtcagcagaggagaactatgaaagctgcccaccttctccatacacagagaggagctattctcatcacctctacccaccgccaccctctccctgtacagactcctcctgaggaggggccctcctcctctgactgcctccaacgtaaaaatgtatgtttaccttgctgcctcctccagcaacttggcctctctgggtttcagggcccaagagaaaacagtggaagaaaggattcagaatttgggcaagggtgaagtaactgttcatgcaagttaaaaatacctaagtaaagtttttgaagataaaattgtggtttcagaataatgctgattgttggagactgtaagaatcaggtgcacttgattttgcatataagcaaatggtaaatctatcagaatcctaaaacagacaagcatgaactcttcccattgctggaactaagtgcccacagtgtcagacaaaatggacattgaacttggattctgtgatacacagggcacttgatgcttaaatgaagatggaaaggttagcaatacctgggtgtcagttagaatttgagaattctatatgtttacatatttaaatgtgcatcttgatctggtgggcttcccatgtggagacttgcactctaattaactaagaagaatattgccttgttggatctcagtccacgtgcttgcactgcgatggcaatggcctcttcttcaaaatactaatttgtgtgccaatttgtttaaaattatttgaaggcagttcagcctaatctcagtgttctctttctggggtagatgagatggattcttaatatttctgggagtactttttaatgagagaattgtcaaatttggaaagatttattgagccttaggttacatggacagttaagcttaagtaaactgtatattgattatcaaacacaagctgtaattggaaaagttgagaggaaaagcatgagatcacaaattagggggaaaaaagaaaagggatttttaaatttggtgtattaaattcattgtccaagggggaaaatgaataatgtttcattagattccttatatgcaaaagtatttattttgaacatgtgtcctaaaatatatgcactaactgatgtgattaaaattgtccaagaaataaacttgagcataacatactttgtgtgcaccacagtaagctattctgcattgaagtggtcttttataactaaggcctggactttgctccaacagagtcgtggtcttctgaatagtgacttaaggagttttgtttgcttaagtcagataatagcacattcacagggaaacaaagagagttggtggatagaattttctgactattaatttttcttccatgaaattttattatgcctttggcactttctgccactcttacagcatatcacaagatatctgtttagcagaagattatgtagttactttaattttaatataaaagtagcttgtgatacattaccaagagatctctgattctttagtaagtttgagaacacctattctacagagatgataggtacttagaaatgaagactttaaagtacattttaatctaatataggccagtaattgggggaaggggctttgagcagtacaattttaagatgattttgagggttgtatttctttatcatttaaaaatatcctaaagtcagtaatttatatgaaggaaactcattcattattgaaggtattaaaaatagccatcatctgtattaggtagcagttttggaggatcatctttttcttttgctataaagccctattaatgaagaatacttccagtagagttaatagctgtagcttacctagtgtgttaatgaagtgtgtttatttatgtgacttgataccagtagtcataatagagactgaagaggtatgcgttaagcacgcctacttctatgcagtaaacaggctgcagctgcctagattagattcttagaaatgtcatattttgaattgttttatttcttgtaggggaagctttgtcccacttcattcatttgcatgccataggaattacatattggttatcattacgtatctaacaagattcagaaacaaaaatcttggacttttcacatccgaaatatgtcagctcttaataaatgtgtggtgcttaagtctacatatggcatccatagttgatttagagtatggatatgagtgtgttgaccagttatcagtaggtggacaaatatttgggcatctacagatgagactatgcactaagtgtggactgagtcctaaagaagcttatagtcaggtgttgtttaaaacattatcagaattcttaaacccaaggaatttaattttatttggtatttcttaagcctaaaatgaaccaagagaaagatgattttagaaagtacttgtagtgaaagatgattttagaaagtacttgtagtgcatgtgtggcttctgacttttgggatggcaccattttataatagtttcaaaatttagcttttgaaattctcaacattttatggtagaagactttggacctcaagtataaaattatacgtttataatttttttaaaatttaaattataagtattgtgaattcacactctcaggctattgtctgacttgatctacgtctcataaagcctgtacctgagtggagtggaaggtggagtcttaggttaatcagttactgactctaccctcaccctctttcaattgaggtaaactttgctgtttttctttttcataaagcattctcaaattgttgagtttattgctgaaaaaaatctccatgactttacagatagaattacaaactaaatgatgtcttgtatttagaagcagagtacagacctaacgaactgttagattctccaccatcacttagggtttgcccagaagcaacaccagagaattacagacaacgcgcttttgctgaactgtccattttggtggttgtgtttttcagtcaaatataagcaggatgggcgatagagatatatttatatatagatacatattctatatatctaatgcctaaatatgggtattaaagggaaaatttttaaagtctgattaaatccaatatgacatgaaattaaatatatggattagtaaggaaaaatgttaaaaagtagagaggataccaagaagattaaactggactagccttatttgcaagtgaaggatctggtgctgctttcagatgtttatcttttatttttttcccttaagctttaatcttcgtcattgtcttaaagtcaactggtgtttcttgttcattgactttggtacgatggtgctttgcaaggatgtatttatgttataatggccaacatttggtcagcccttgtccacttattcacttccctccttttgtaaaataagtgctttaattataaactgtataaaaataccttgtataaaccccttttttgattattacaataaataagctgaattgtaacaaatgaaatttgatttttgtaataaaacagtggaaaagt

SEQ ID NO: 149699 - DNA, 10020 bp, Homo sapiens; identical to SEQ ID NO: 149694
  Payload ID: 9572
  Gene Symbol: LRP6
  Gene Name: low density lipoprotein receptor-related protein 6
  Uniprot ID: O75581
  ENST ID: ENST00000628182
  CDS Start-End: 78-4919

SEQ ID NO: 149700 - DNA, 562 bp, Homo sapiens; identical to SEQ ID NO: 149695
  Payload ID: 9572
  Gene Symbol: LRP6
  Gene Name: low density lipoprotein receptor-related protein 6
  ENST ID: ENST00000626182
  CDS Start-End: 337-562

SEQ ID NO: 149701 - DNA, 4774 bp, Homo sapiens; identical to SEQ ID NO: 149696
  Payload ID: 9572
  Gene Symbol: LRP6
  Gene Name: low density lipoprotein receptor-related protein 6
  ENST ID: ENST00000626698
  CDS Start-End: 35-4741

SEQ ID NO: 149702 - DNA, 593 bp, Homo sapiens; identical to SEQ ID NO: 149697
  Payload ID: 9572
  Gene Symbol: LRP6
  Gene Name: low density lipoprotein receptor-related protein 6
  ENST ID: ENST00000626957
  CDS Start-End: 1-210

SEQ ID NO: 149703 - DNA, 7812 bp, Homo sapiens; identical to SEQ ID NO: 149698
  Payload ID: 9572
  Gene Symbol: LRP6
  Gene Name: low density lipoprotein receptor-related protein 6
  ENST ID: ENST00000625211
  CDS Start-End: 1-4436

SEQ ID NO: 149704 - DNA, 7648 bp, Homo sapiens
  Payload ID: 9573
  Gene Symbol: LRP8
  Gene Name: low density lipoprotein receptor-related protein 8, apolipoprotein e receptor
  Uniprot ID: Q14114
  ENST ID: ENST00000306052
  CDS Start-End: 103-2994
gcagcggcaaccccggcgccgcggcaaggactcggagggctgagacgcggcggcggcggcgcggggagcgcggggcgcggcggccggagccccgggcccgccatgggcctccccgagccgggccctctccggcttctggcgctgctgctgctgctgctgctgctgctgctgctgcagctccagcatcttgcggcggcagcggctgatccgctgctcggcggccaagggccggccaaggattgcgaaaaggaccaattccagtgccggaacgagcgctgcatcccctctgtgtggagatgcgacgaggacgatgactgcttagaccacagcgacgaggacgactgccccaagaagacctgtgcagacagtgacttcacctgtgacaacggccactgcatccacgaacggtggaagtgtgacggcgaggaggagtgtcctgatggctccgatgagtccgaggccacttgcaccaagcaggtgtgtcctgcagagaagctgagctgtggacccaccagccacaagtgtgtacctgcctcgtggcgctgcgacggggagaaggactgcgagggtggagcggatgaggccggctgtgctaccttgtgcgccccgcacgagttccagtgcggcaaccgctcgtgcctggccgccgtgttcgtgtgcgacggcgacgacgactgtggtgacggcagcgatgagcgcggctgtgcagacccggcctgcgggccccgcgagttccgctgcggcggcgatggcggcggcgcctgcatcccggagcgctgggtctgcgaccgccagtttgactgcgaggaccgctcggacgaggcagccgagctctgcggccgtccgggccccggggccacgtccgcgcccgccgcctgcgccaccgcctcccagttcgcctgccgcagcggcgagtgcgtgcacctgggctggcgctgcgacggcgaccgcgactgcaaagacaaatcggacgaggccgactgcccactgggcacctgccgtggggacgagttccagtgtggggatgggacatgtgtccttgcaatcaagcactgcaaccaggagcaggactgtccagatgggagtgatgaagctggctgcctacaggggctgaacgagtgtctgcacaacaatggcggctgctcacacatctgcactgacctcaagattggctttgaatgcacgtgcccagcaggcttccagctcctggaccagaagacctgtggcgacattgatgagtgcaaggacccagatgcctgcagccagatctgtgtcaattacaagggctattttaagtgtgagtgctaccctggctacgagatggacctactgaccaagaactgcaaggctgctgctggcaagagcccatccctaatcttcaccaaccggcacgaggtgcggaggatcgacctggtgaagcggaactattcacgcctcatccccatgctcaagaatgtcgtggcactagatgtggaagttgccaccaatcgcatctactggtgtgacctctcctaccgtaagatctatagcgcctacatggacaaggccagtgacccgaaagagcaggaggtcctcattgacgagcagttgcactctccagagggcctggcagtggactgggtccacaagcacatctactggactgactcgggcaataagaccatctcagtggccacagttgatggtggccgccgacgcactctcttcagccgtaacctcagtgaaccccgggccatcgctgttgaccccctgcgagggttcatgtattggtctgactggggggaccaggccaagattgagaaatctgggctcaacggtgtggaccggcaaacactggtgtcagacaatattgaatggcccaacggaatcaccctggatctgctgagccagcgcttgtactgggtagactccaagctacaccaactgtccagcattgacttcagtggaggcaacagaaagacgctgatctcctccactgacttcctgagccacccttttgggatagctgtgtttgaggacaaggtgttctggacagacctggagaacgaggccattttcagtgcaaatcggctcaatggcctggaaatctccatcctggctgagaacctcaacaacccacatgacattgtcatcttccatgagctgaagcagccaagagctccagatgcctgtgagctgagtgtccagcctaatggaggctgtgaatacctgtgccttcctgctcctcagatctccagccactctcccaagtacacatgtgcctgtcctgacacaatgtggctgggtccagacatgaagaggtgctaccgagcacctcaatctacctcaactacgacgttagcttctaccatgacgaggacagtacctgccaccacaagagcccccgggaccaccgtccacagatccacctaccagaaccacagcacagagacaccaagcctgacagctgcagtcccaagctcagttagtgtccccagggctcccagcatcagcccgtctaccctaagccctgcaaccagcaaccactcccagcactatgcaaatgaagacagtaagatgggctcaacagtcactgccgctgttatcgggatcatcgtgcccatagtggtgatagccctcctgtgcatgagtggatacctgatctggagaaactggaagcggaagaacaccaaaagcatgaattttgacaacccagtctacaggaaaacaacagaagaagaagacgaagatgagctccatatagggagaactgctcagattggccatgtctatcctgcagcaatcagcagctttgatcgcccactgtgggcagagccctgtcttggggagaccagagaaccggaagacccagcccctgccctcaaggagctttttgtcttgccgggggaaccaaggtcacagctgcaccaactcccgaagaaccctctttccgagctgcctgtcgtcaaatccaagcgagtggcattaagccttgaagatgatggactaccctgaggatgggatcacccccttcgtgcctcatggaattcagtcccatgcactacactctggatggtgtatgactggatgaatgggtttctatatatgggtctgtgtgagtgtatgtgtgtgtgtgattttttttttaaatttatgttgcggaaaggtaaccacaaagttatgatgaactgcaaacatccaaaggatgtgagagtttttctatgtataatgttttatacactttttaactggttgcactacccatgaggaattcgtggaatggctactgctgactaacatgatgcacataaccaaatgggggccaatggcacagtaccttactcatcatttaaaaactatatttacagaagatgtttggttgctgggggggcttttttaggttttggggcatttgttttttgtaaataagatgattatgctttgtggctatccatcaacataagtaaaaaaaaaaaaaaaacacttcaactccctcccccatttagattatttattaacatattttaaaaatcagatgagttctataaataatttagagaagtgagagtatttatttttggcatgtttggcccaccacacagactctgtgtgtgtatgtgtgtgtttatatgtgtatgtgtgtgacagaaaaatctgtagagaagaggcacatctatggctactgttcaaatacataaagataaatttattttcacacagtccacaaggggtatatcttgtagttttcagaaaagcctttggaaatctggatcagaaaatagataccatggtttgtgcaattatgtagtaaaaaaggcaaatcttttcacctctggctattcctgagaccccaggaagtcaggaaaagcctttcagctcacccatggctgctgtgactcctaccagggctttcttggctttggcgaaggtcagtgtacagacattccatggtaccagagtgctcagaaactcaagataggatatgcctcaccctcagctactccttgttttaaagttcagctctttgagtaacttcttcaatttctttcaggacacttgggttgaattcagtaagtttcctctgaagcaccctgaagggtgccatccttacagagctaagtggagacgtttccagatcagcccaagtttactatagagactggcccaggcactgaatgtctaggacatgctgtggatgaagataaagatggtggaataggttttatcacatctcttatttctcttttccccttactctctaccatttcctttatgtggggaaacattttaaggtaataaataggttacttaccatcatatgttcatatagatgaaactaatttttggcttaagtcagaacaactggccaaaattgaagtcatatttgaggggggaaatggcatacgcaatattatattatattggatatttatgttcacacaggaatttggtttactgctttgtaaataaaaggaaaaactccgggtatatgtatagatgttcttcattatagacatcttctttgcttttcttggccttgggggaggaagggagaagtgctcttttctacttgtggggtctcccattggaaacataatcctatagtcccagaaggattcagtccccagtggctttcccatccaaagagaaagagtttgagtttcttaactctgctgttctgccacttactcccactagacaaccagggacaaggtgcaacatggaagtgtttgacttaagtaggagcagaggagctgcatctaatctcatcatacctggaacttgacacacttaagcaaatgccttcccatccctacctgccagatgcccccaactcaatgaagttggatgtctcaccagcttgataccctttgaattttcagtcagacattctggagttctagcatcctgtacctaggaccttcctctgtgtcactcttggcctcctaaactctaagaaaataactatattctggagcttgggcagtgtgttttgcataatccagcaatctcctcatgacatgcatgtgttgatagtcctgaaacattcattgagagggtaaatgcagttgacctagaatgaccaataccaaacagaattttaagaacaggtggccaactcctatggagcttactcacatattactattcttttaagaacggaaagtaaaattatttttgactgaagaaaaatgatgacagtgaaaaacatggaaatgtactcaaaacaagtgactttttctgtaaccttccaaagaaactgaattttccaaggaattaaatgataacagtggctaaggcatagtttctaaactttcagtaagatcctggcattcacagaaaaaaatgatgaatggggtctggacatacagcctgagatctcaaaatgacaatgaaattcacaactttttctcagagacattcatgtttcctgcatatgctacaactgcagtttgaaagaggcagcaatgggagcaaccctttacaagaaacaaattgtgatatattcatgtgttggacggcagtaaataagatgaaacctgaggagtcagatccaccttcccccattcatagaggcttttcagcctcattttgaggtacagttacatatcttttgccttttgcccccgtgcatagctatctacagccaatcacagatcacagagtcactggactatagagctggaaggaagctcagagacaatgccaagggggcagaaaatttatcagaagccagtcccagtgcgtttcctccatttccttctgcaggaagactattttgggctgcctgaacattgtatcaaacctgctacctatactatggtctacctttcctccagtggaattacaaaggcactaactgaaatgccttctagaaacagagaaaacgaaactgtacttatttactcttgatacacagattatttataaaacagattgaagtaacctgttaactggcaaaaagagaatgagatcggatttaaatgtatggcagtaagtcctattgatccctccagttatctcagtatgactgcagtatattcattcactaaaaccactcactagataccaactacacacctggcactgcagatgtaaaggtcagtcacacatgttctgactttacagagttcacagtagcagtggaggatgatatatgtggaaacaaaaaaggcattgattctattcagagcactgttagggctcaaaggagagaggggtctttccacctaagaaatgaggaatagggtcatcatagaagtgaccttaagtcttaaaaattaagaaggggattccaagctgcttcagacagagacacatcgagctaaaacacagaggtatgaaagagcacagggactttaggaattgcacagttcattctaacaggaacaaaaggctcaaggggggcaagaaatgaggctgtatggaaagagattcaatgtaagcactttataaaatagattaatttctgattcaatgaagcatttcttgatcattgtgtacaaggcactacatgcatcatggaaaattcattaggatgcattgccagcactttgcagaactgatattattcagcctcaagctttccagtggccaaagggaaatgctgactgcttttcatatatttgagtcaaagattttttatatggtcaatgaagactaatataagggcagtgggattttcacagatgcatgccatgttgtcgagagcctcttagattttctcaactgtgagaaagaaaaacgaaaatgttgaagacgttgagtctggagaggggatactaatcactgtccagttgggcactggtgggaatggggaaatggcacaggaatgcaagcctctccaccctaccccccgaactccagccatacactcatcgtttcacaaaatataaatgagttagcattaaatgtttcagagtaaataattccttttcccgaaatgcatgaagatagagtaacagacttctcacactgtatttttagggtatggagaatttagaaggttaaagaattactgcttcaatttttcagttaaaaaaaaatcaggaagctctgttcattcaggctatgcaccatgtgcacagtcaagaattagcagaaaccctctgcatttacaaacactttgtgctataaaaaagtaatttttaaaaagccacgtgtgtgtgtgtgtatatatatatatatatatatatttaaagccaaggttttgatacttttttacaaaaactacaagagaaaacaaatatacctgtccaaaccatatacttttaaaagagcatttttttttccatacaagctgttgttaatttgggggtaaagtgctgatttgcaaacttcatcaaattgttcccaagtggattctccttgtttgtctccccctaccaaccccaaagttaccatatttgatgtaagaatcaggcatgttagaatgttgtgtcacactaactgattctgctctttttgtcttgtcattcaagttccgttagcttctgtacgcggtgccctttgcagtctggtgtctcttccagaggcgagggggctgaggatggggtgctgcatctcactagctatactggcatcatcttggtaaactgaaaaccaaatgtggacatttgtaaaatcagtgcactgtttctagagagagattaaattcatttaaaaaaaa

SEQ ID NO: 149705 - DNA, 2382 bp, Homo sapiens
  Payload ID: 9573
  Gene Symbol: LRP8
  Gene Name: low density lipoprotein receptor-related protein 8, apolipoprotein e receptor
  Uniprot ID: Q14114
  ENST ID: ENST00000347547
  CDS Start-End: 1-2382
atgggcctccccgagccgggccctctccggcttctggcgctgctgctgctgctgctgctgctgctgctgctgcagctccagcatcttgcggcggcagcggctgatccgctgctcggcggccaagggccggccaaggattgcgaaaaggaccaattccagtgccggaacgagcgctgcatcccctctgtgtggagatgcgacgaggacgatgactgcttagaccacagcgacgaggacgactgccccaagaagacctgtgcagacagtgacttcacctgtgacaacggccactgcatccacgaacggtggaagtgtgacggcgaggaggagtgtcctgatggctccgatgagtccgaggccacttgcaccaagcaggtgtgtcctgcagagaagctgagctgtggacccaccagccacaagtgtgtacctgcctcgtggcgctgcgacggggagaaggactgcgagggtggagcggatgaggccggctgtgctacctggctgaacgagtgtctgcacaacaatggcggctgctcacacatctgcactgacctcaagattggctttgaatgcacgtgcccagcaggcttccagctcctggaccagaagacctgtggcgacattgatgagtgcaaggacccagatgcctgcagccagatctgtgtcaattacaagggctattttaagtgtgagtgctaccctggctacgagatggacctactgaccaagaactgcaaggctgctgctggcaagagcccatccctaatcttcaccaaccggcacgaggtgcggaggatcgacctggtgaagcggaactattcacgcctcatccccatgctcaagaatgtcgtggcactagatgtggaagttgccaccaatcgcatctactggtgtgacctctcctaccgtaagatctatagcgcctacatggacaaggccagtgacccgaaagagcaggaggtcctcattgacgagcagttgcactctccagagggcctggcagtggactgggtccacaagcacatctactggactgactcgggcaataagaccatctcagtggccacagttgatggtggccgccgacgcactctcttcagccgtaacctcagtgaaccccgggccatcgctgttgaccccctgcgagggttcatgtattggtctgactggggggaccaggccaagattgagaaatctgggctcaacggtgtggaccggcaaacactggtgtcagacaatattgaatggcccaacggaatcaccctggatctgctgagccagcgcttgtactgggtagactccaagctacaccaactgtccagcattgacttcagtggaggcaacagaaagacgctgatctcctccactgacttcctgagccacccttttgggatagctgtgtttgaggacaaggtgttctggacagacctggagaacgaggccattttcagtgcaaatcggctcaatggcctggaaatctccatcctggctgagaacctcaacaacccacatgacattgtcatcttccatgagctgaagcagccaagagctccagatgcctgtgagctgagtgtccagcctaatggaggctgtgaatacctgtgccttcctgctcctcagatctccagccactctcccaagtacacatgtgcctgtcctgacacaatgtggctgggtccagacatgaagaggtgctaccgagcacctcaatctacctcaactacgacgttagcttctaccatgacgaggacagtacctgccaccacaagagcccccgggaccaccgtccacagatccacctaccagaaccacagcacagagacaccaagcctgacagctgcagtcccaagctcagttagtgtccccagggctcccagcatcagcccgtctaccctaagccctgcaaccagcaaccactcccagcactatgcaaatgaagacagtaagatgggctcaacagtcactgccgctgttatcgggatcatcgtgcccatagtggtgatagccctcctgtgcatgagtggatacctgatctggagaaactggaagcggaagaacaccaaaagcatgaattttgacaacccagtctacaggaaaacaacagaagaagaagacgaagatgagctccatatagggagaactgctcagattggccatgtctatcctgcagcaatcagcagctttgatcgcccactgtgggcagagccctgtcttggggagaccagagaaccggaagacccagcccctgccctcaaggagctttttgtcttgccgggggaaccaaggtcacagctgcaccaactcccgaagaaccctctttccgagctgcctgtcgtcaaatccaagcgagtggcattaagccttgaagatgatggactaccctga

SEQ ID NO: 149706 - DNA, 2553 bp, Homo sapiens
  Payload ID: 9573
  Gene Symbol: LRP8
  Gene Name: low density lipoprotein receptor-related protein 8, apolipoprotein e receptor
  Uniprot ID: Q14114
  ENST ID: ENST00000354412
  CDS Start-End: 1-2103
atgggcctccccgagccgggccctctccggcttctggcgctgctgctgctgctgctgctgctgctgctgctgcagctccagcatcttgcggcggcagcggctgatccgctgctcggcggccaagggccggccaaggattgcgaaaaggaccaattccagtgccggaacgagcgctgcatcccctctgtgtggagatgcgacgaggacgatgactgcttagaccacagcgacgaggacgactgccccaagaagacctgtgcagacagtgacttcacctgtgacaacggccactgcatccacgaacggtggaagtgtgacggcgaggaggagtgtcctgatggctccgatgagtccgaggccacttgcaccaagcaggtgtgtcctgcagagaagctgagctgtggacccaccagccacaagtgtgtacctgcctcgtggcgctgcgacggggagaaggactgcgagggtggagcggatgaggccggctgtgctacctcactgggcacctgccgtggggacgagttccagtgtggggatgggacatgtgtccttgcaatcaagcactgcaaccaggagcaggactgtccagatgggagtgatgaagctggctgcctacaggggctgaacgagtgtctgcacaacaatggcggctgctcacacatctgcactgacctcaagattggctttgaatgcacgtgcccagcaggcttccagctcctggaccagaagacctgtggcgacattgatgagtgcaaggacccagatgcctgcagccagatctgtgtcaattacaagggctattttaagtgtgagtgctaccctggctacgagatggacctactgaccaagaactgcaaggctgctgctggcaagagcccatccctaatcttcaccaaccggcacgaggtgcggaggatcgacctggtgaagcggaactattcacgcctcatccccatgctcaagaatgtcgtggcactagatgtggaagttgccaccaatcgcatctactggtgtgacctctcctaccgtaagatctatagcgcctacatggacaaggccagtgacccgaaagagcaggaggtcctcattgacgagcagttgcactctccagagggcctggcagtggactgggtccacaagcacatctactggactgactcgggcaataagaccatctcagtggccacagttgatggtggccgccgacgcactctcttcagccgtaacctcagtgaaccccgggccatcgctgttgaccccctgcgagggttcatgtattggtctgactggggggaccaggccaagattgagaaatctgggctcaacggtgtggaccggcaaacactggtgtcagacaatattgaatggcccaacggaatcaccctggatctgctgagccagcgcttgtactgggtagactccaagctacaccaactgtccagcattgacttcagtggaggcaacagaaagacgctgatctcctccactgacttcctgagccacccttttgggatagctgtgtttgaggacaaggtgttctggacagacctggagaacgaggccattttcagtgcaaatcggctcaatggcctggaaatctccatcctggctgagaacctcaacaacccacatgacattgtcatcttccatgagctgaagcagccaagagctccagatgcctgtgagctgagtgtccagcctaatggaggctgtgaatacctgtgccttcctgctcctcagatctccagccactctcccaagtacacatgtgcctgtcctgacacaatgtggctgggtccagacatgaagaggtgctaccgagatgcaaatgaagacagtaagatgggctcaacagtcactgccgctgttatcgggatcatcgtgcccatagtggtgatagccctcctgtgcatgagtggatacctgatctggagaaactggaagcggaagaacaccaaaagcatgaattttgacaacccagtctacaggaaaacaacagaagaagaagacgaagatgagctccatatagggagaactgctcagattggccatgtctatcctgcacgagtggcattaagccttgaagatgatggactaccctgaggatgggatcacccccttcgtgcctcatggaattcagtcccatgcactacactctggatggtgtatgactggatgaatgggtttctatatatgggtctgtgtgagtgtatgtgtgtgtgtgattttttttttaaatttatgttgcggaaaggtaaccacaaagttatgatgaactgcaaacatccaaaggatgtgagagtttttctatgtataatgttttatacactttttaactggttgcactacccatgaggaattcgtggaatggctactgctgactaacatgatgcacataaccaaatgggggccaatggcacagtaccttactcatcatttaaaaactatatttacagaagatgtttggttgctgggggggcttttttaggttttggggcatttgttttttgtaaataagatgattatgctttgtggctatccatcaacataagt

SEQ ID NO: 149707 - DNA, 3322 bp, Homo sapiens
  Payload ID: 9573
  Gene Symbol: LRP8
  Gene Name: low density lipoprotein receptor-related protein 8, apolipoprotein e receptor
  Uniprot ID: Q14114
  ENST ID: ENST00000371454
  CDS Start-End: 143-2857
gccggggcgggcggcagcggcggcggcggcggcggcgggggcagcggcaaccccggcgccgcggcaaggactcggagggctgagacgcggcggcggcggcgcggggagcgcggggcgcggcggccggagccccgggcccgccatgggcctccccgagccgggccctctccggcttctggcgctgctgctgctgctgctgctgctgctgctgctgcagctccagcatcttgcggcggcagcggctgatccgctgctcggcggccaagggccggccaaggattgcgaaaaggaccaattccagtgccggaacgagcgctgcatcccctctgtgtggagatgcgacgaggacgatgactgcttagaccacagcgacgaggacgactgccccaagaagacctgtgcagacagtgacttcacctgtgacaacggccactgcatccacgaacggtggaagtgtgacggcgaggaggagtgtcctgatggctccgatgagtccgaggccacttgcaccaagcaggtgtgtcctgcagagaagctgagctgtggacccaccagccacaagtgtgtacctgcctcgtggcgctgcgacggggagaaggactgcgagggtggagcggatgaggccggctgtgctaccttgtgcgccccgcacgagttccagtgcggcaaccgctcgtgcctggccgccgtgttcgtgtgcgacggcgacgacgactgtggtgacggcagcgatgagcgcggctgtgcagacccggcctgcgggccccgcgagttccgctgcggcggcgatggcggcggcgcctgcatcccggagcgctgggtctgcgaccgccagtttgactgcgaggaccgctcggacgaggcagccgagctctgcggccgtccgggccccggggccacgtccgcgcccgccgcctgcgccaccgcctcccagttcgcctgccgcagcggcgagtgcgtgcacctgggctggcgctgcgacggcgaccgcgactgcaaagacaaatcggacgaggccgactgcccactgggcacctgccgtggggacgagttccagtgtggggatgggacatgtgtccttgcaatcaagcactgcaaccaggagcaggactgtccagatgggagtgatgaagctggctgcctacaggggctgaacgagtgtctgcacaacaatggcggctgctcacacatctgcactgacctcaagattggctttgaatgcacgtgcccagcaggcttccagctcctggaccagaagacctgtggcgacattgatgagtgcaaggacccagatgcctgcagccagatctgtgtcaattacaagggctattttaagtgtgagtgctaccctggctacgagatggacctactgaccaagaactgcaaggctgctgctggcaagagcccatccctaatcttcaccaaccggcacgaggtgcggaggatcgacctggtgaagcggaactattcacgcctcatccccatgctcaagaatgtcgtggcactagatgtggaagttgccaccaatcgcatctactggtgtgacctctcctaccgtaagatctatagcgcctacatggacaaggccagtgacccgaaagagcaggaggtcctcattgacgagcagttgcactctccagagggcctggcagtggactgggtccacaagcacatctactggactgactcgggcaataagaccatctcagtggccacagttgatggtggccgccgacgcactctcttcagccgtaacctcagtgaaccccgggccatcgctgttgaccccctgcgagggttcatgtattggtctgactggggggaccaggccaagattgagaaatctgggctcaacggtgtggaccggcaaacactggtgtcagacaatattgaatggcccaacggaatcaccctggatctgctgagccagcgcttgtactgggtagactccaagctacaccaactgtccagcattgacttcagtggaggcaacagaaagacgctgatctcctccactgacttcctgagccacccttttgggatagctgtgtttgaggacaaggtgttctggacagacctggagaacgaggccattttcagtgcaaatcggctcaatggcctggaaatctccatcctggctgagaacctcaacaacccacatgacattgtcatcttccatgagctgaagcagccaagagctccagatgcctgtgagctgagtgtccagcctaatggaggctgtgaatacctgtgccttcctgctcctcagatctccagccactctcccaagtacacatgtgcctgtcctgacacaatgtggctgggtccagacatgaagaggtgctaccgagcacctcaatctacctcaactacgacgttagcttctaccatgacgaggacagtacctgccaccacaagagcccccgggaccaccgtccacagatccacctaccagaaccacagcacagagacaccaagcctgacagctgcagtcccaagctcagttagtgtccccagggctcccagcatcagcccgtctaccctaagccctgcaaccagcaaccactcccagcactatgcaaatgaagacagtaagatgggctcaacagtcactgccgctgttatcgggatcatcgtgcccatagtggtgatagccctcctgtgcatgagtggatacctgatctggagaaactggaagcggaagaacaccaaaagcatgaattttgacaacccagtctacaggaaaacaacagaagaagaagacgaagatgagctccatatagggagaactgctcagattggccatgtctatcctgcacgagtggcattaagccttgaagatgatggactaccctgaggatgggatcacccccttcgtgcctcatggaattcagtcccatgcactacactctggatggtgtatgactggatgaatgggtttctatatatgggtctgtgtgagtgtatgtgtgtgtgtgattttttttttaaatttatgttgcggaaaggtaaccacaaagttatgatgaactgcaaacatccaaaggatgtgagagtttttctatgtataatgttttatacactttttaactggttgcactacccatgaggaattcgtggaatggctactgctgactaacatgatgcacataaccaaatgggggccaatggcacagtaccttactcatcatttaaaaactatatttacagaagatgtttggttgctgggggggcttttttaggttttggggcatttgttttttgtaaataagatgattatgctttgtggctatccatcaacataagtaaaaaaaaaaaaaaa

SEQ ID NO: 149708 - DNA, 660 bp, Homo sapiens
  Payload ID: 9573
  Gene Symbol: LRP8
  Gene Name: low density lipoprotein receptor-related protein 8, apolipoprotein e receptor
  ENST ID: ENST00000529670
  CDS Start-End: 1-365
tcccaagctcagttagtgtccccagggctcccagcatcagcccgtctaccctaagccctgcaaccagcaaccactcccagcactatgcaaatgaagacagtaagatgggctcaacagtcactgccgctgttatcgggatcatcgtgcccatagtggtgatagccctcctgtgcatgagtggatacctgatctggagaaactggaagcggaagaacaccaaaagcatgaattttgacaacccagtctacaggaaaacaacagaagaagaagacgaagatgagctccatatagggagaactgctcagattggccatgtctatcctgcacgagtggcattaagccttgaagatgatggactaccctgaggatgggatcacccccttcgtgcctcatggaattcagtcccatgcactacactctggatggtgacacttgggttgaattcagtaagtttcctctgaagcaccctgaagggtgccatccttacagagctaagtggagacgtttccagatcagcccaagtttactatagagactggcccaggcactgaatgtctaggacatgctgtggatgaagataaagatggtggaataggttttatcacatctcttatttctcttttccccttactctctaccatttcctttatgtggggaaac

SEQ ID NO: 149709 - DNA, 3231 bp, Homo sapiens
  Payload ID: 9573
  Gene Symbol: LRP8
  Gene Name: low density lipoprotein receptor-related protein 8, apolipoprotein e receptor
  ENST ID: ENST00000480045
  CDS Start-End: 159-1337
gaaatgcagccgaggagccggggcgggcggcagcggcggcggcggcggcggcgggggcagcggcaaccccggcgccgcggcaaggactcggagggctgagacgcggcggcggcggcgcggggagcgcggggcgcggcggccggagccccgggcccgccatgggcctccccgagccgggccctctccggcttctggcgctgctgctgctgctgctgctgctgctgctgctgcagctccagcatcttgcggcggcagcggctgatccgctgctcggcggccaagggccggccaaggattgcgaaaaggaccaattccagtgccggaacgagcgctgcatcccctctgtgtggagatgcgacgaggacgatgactgcttagaccacagcgacgaggacgactgccccaagaagacctgtgcagacagtgacttcacctgtgacaacggccactgcatccacgaacggtggaagtgtgacggcgaggaggagtgtcctgatggctccgatgagtccgaggccacttgcaccaagcaggtgtgtcctgcagagaagctgagctgtggacccaccagccacaagtgtgtacctgcctcgtggcgctgcgacggggagaaggactgcgagggtggagcggatgaggccggctgtgctaccttgtgcgccccgcacgagttccagtgcggcaaccgctcgtgcctggccgccgtgttcgtgtgcgacggcgacgacgactgtggtgacggcagcgatgagcgcggctgtgcagacccggcctgcgggccccgcgagttccgctgcggcggcgatggcggcggcgcctgcatcccggagcgctgggtctgcgaccgccagtttgactgcgaggaccgctcggacgaggcagccgagctctgcggccgtccgggccccggggccacgtccgcgcccgccgcctgcgccaccgcctcccagttcgcctgccgcagcggcgagtgcgtgcacctgggctggcgctgcgacggcgaccgcgactgcaaagacaaatcggacgaggccgactgcccactgggcacctgccgtggggacgagttccagtgtggggatgggacatgtgtccttgcaatcaagcactgcaaccaggagcaggactgtccagatgggagtgatgaagctggctgcctacaggagtcaccctgtgagggtccccgcagatttcagtgtaagagtggcaagcgcgtggacggcgggaaagtgtgtgatgtgcagagggactgccgggactggtcggatgagcttctgaaagtgtgggctgaacgagtgtctgcacaacaatggcggctgctcacacatctgcactgacctcaagattggctttgaatgcacgtgcccagcaggcttccagctcctggaccagaagacctgtggcgacattgatgagtgcaaggacccagatgcctgcagccagatctgtgtcaattacaagggctattttaagtgtgagtgctaccctggctacgagatggacctactgaccaagaactgcaaggctgctgctggcaagagcccatccctaatcttcaccaaccggcacgaggtgcggaggatcgacctggtgaagcggaactattcacgcctcatccccatgctcaagaatgtcgtggcactagatgtggaagttgccaccaatcgcatctactggtgtgacctctcctaccgtaagatctatagcgcctacatggacaaggccagtgacccgaaagagcaggaggtcctcattgacgagcagttgcactctccagagggcctggcagtggactgggtccacaagcacatctactggactgactcgggcaataagaccatctcagtggccacagttgatggtggccgccgacgcactctcttcagccgtaacctcagtgaaccccgggccatcgctgttgaccccctgcgagggttcatgtattggtctgactggggggaccaggccaagattgagaaatctgggctcaacggtgtggaccggcaaacactggtgtcagacaatattgaatggcccaacggaatcaccctggatctgctgagccagcgcttgtactgggtagactccaagctacaccaactgtccagcattgacttcagtggaggcaacagaaagacgctgatctcctccactgacttcctgagccacccttttgggatagctgtgtttgaggacaaggtgttctggacagacctggagaacgaggccattttcagtgcaaatcggctcaatggcctggaaatctccatcctggctgagaacctcaacaacccacatgacattgtcatcttccatgagctgaagcagccaagagctccagatgcctgtgagctgagtgtccagcctaatggaggctgtgaatacctgtgccttcctgctcctcagatctccagccactctcccaagtacacatgtgcctgtcctgacacaatgtggctgggtccagacatgaagaggtgctaccgagcacctcaatctacctcaactacgacgttagcttctaccatgacgaggacagtacctgccaccacaagagcccccgggaccaccgtccacagatccacctaccagaaccacagcacagagacaccaagcctgacagctgcagtcccaagctcagttagtgtccccagggctcccagcatcagcccgtctaccctaagccctgcaaccagcaaccactcccagcactatgcaaatgaagacagtaagatgggctcaacagtcactgccgctgttatcgggatcatcgtgcccatagtggtgatagccctcctgtgcatgagtggatacctgatctggagaaactggaagcggaagaacaccaaaagcatgaattttgacaacccagtctacaggaaaacaacagaagaagaagacgaagatgagctccatatagggagaactgctcagattggccatgtctatcctgcagcaatcagcagctttgatcgcccactgtgggcagagccctgtcttggggagaccagagaaccggaagacccagcccctgccctcaaggagctttttgtcttgccgggggaaccaaggtcacagctgcaccaactcccgaagaaccctctttccgagctgcctgtcgtcaaatccaagcgagtggcattaagccttgaagatgatggactaccctgaggatgggatcacccccttcgtgcctcatggaattcagtcccatgcactacactctggatg

SEQ ID NO: 149710 - DNA, 627 bp, Homo sapiens
  Payload ID: 9573
  Gene Symbol: LRP8
  Gene Name: low density lipoprotein receptor-related protein 8, apolipoprotein e receptor
  ENST ID: ENST00000481431
  CDS Start-End: 1-406
ggtgaagcggaactattcacgcctcatccccatgctcaagaatgtcgtggcactagatgtggaagttgccaccaatcgcatctactggtgtgacctctcctaccgtaagatctatagcgcctacatggacaaggccagtgacccgaaagagcaggaggtcctcattgacgagcagttgcactctccagagggcctggcagtggactgggtccacaagcacatctactggactgactcgggcaataagaccatctcagtggccacagttgatggtggccgccgacgcactctcttcagccgtaacctcagtgaaccccgggccatcgctgttgaccccctgcgaggatctgctgagccagcgcttgtactgggtagactccaagctacaccaactgtccagcattgacttcagtggaggcaacagaaagacgctgatctcctccactgacttcctgagccacccttttgggatagctgtgtttgaggacaaggtgttctggacagacctggagaacgaggccattttcagtgcaaatcggctcaatggcctggaaatctccatcctggctgagaacctcaacaacccacatgacattgtcatcttccatgagctgaagcagccaagag

SEQ ID NO: 149711 - DNA, 721 bp, Homo sapiens
  Payload ID: 9573
  Gene Symbol: LRP8
  Gene Name: low density lipoprotein receptor-related protein 8, apolipoprotein e receptor
  ENST ID: ENST00000475501
  CDS Start-End: 1-721
cagatgggagtgatgaagctggctgcctacaggttccgccaacattcctgggaaacaggaggaggcccagggggctgaacgagtgtctgcacaacaatggcggctgctcacacatctgcactgacctcaagattggctttgaatgcacgtgcccagcaggcttccagctcctggaccagaagacctgtggcgacattgatgagtgcaaggacccagatgcctgcagccagatctgtgtcaattacaagggctattttaagtgtgagtgctaccctggctacgagatggacctactgaccaagaactgcaaggctgctgctggcaagagcccatccctaatcttcaccaaccggcacgaggtgcggaggatcgacctggtgaagcggaactattcacgcctcatccccatgctcaagaatgtcgtggcactagatgtggaagttgccaccaatcgcatctactggtgtgacctctcctaccgtaagatctatagcgcctacatggacaaggccagtgacccgaaagagcaggaggtcctcattgacgagcagttgcactctccagagggcctggcagtggactgggtccacaagcacatctactggactgactcgggcaataagaccatctcagtggccacagttgatggtggccgccgacgcactctcttcagccgtaacctcagtgaaccccgggccatcgctgttgaccccctgcgagg

SEQ ID NO: 149712 - DNA, 2670 bp, Homo sapiens
  Payload ID: 9573
  Gene Symbol: LRP8
  Gene Name: low density lipoprotein receptor-related protein 8, apolipoprotein e receptor
  ENST ID: ENST00000465675
  CDS Start-End: 847-2220
agacccctgcgcgcggcggagagagagggggctgcctgccagggtgatgtgcctgcggctcccactgcgcctggcgcgcgggcgcggggactccctatgggctgtatctgagcagatctctgactatgggtcgcgtgtgcggggccggccaaggattgcgaaaaggaccaattccagtgccggaacgagcgctgcatcccctctgtgtggagatgcgacgaggacgatgactgcttagaccacagcgacgaggacgactgccccaagaagacctgtgcagacagtgacttcacctgtgacaacggccactgcatccacgaacggtggaagtgtgacggcgaggaggagtgtcctgatggctccgatgagtccgaggccacttgcaccaagcaggtgtgtcctgcagagaagctgagctgtggacccaccagccacaagtgtgtacctgcctcgtggcgctgcgacggggagaaggactgcgagggtggagcggatgaggccggctgtgctacctcactgggcacctgccgtggggacgagttccagtgtggggatgggacatgtgtccttgcaatcaagcactgcaaccaggagcaggactgtccagatgggagtgatgaagctggctgcctacaggggctgaacgagtgtctgcacaacaatggcggctgctcacacatctgcactgacctcaagattggctttgaatgcacgtgcccagcaggcttccagctcctggaccagaagacctgtggcgctggcaagagcccatccctaatcttcaccaaccggcacgaggtgcggaggatcgacctggtgaagcggaactattcacgcctcatccccatgctcaagaatgtcgtggcactagatgtggaagttgccaccaatcgcatctactggtgtgacctctcctaccgtaagatctatagcgcctacatggacaaggccagtgacccgaaagagcaggaggtcctcattgacgagcagttgcactctccagagggcctggcagtggactgggtccacaagcacatctactggactgactcgggcaataagaccatctcagtggccacagttgatggtggccgccgacgcactctcttcagccgtaacctcagtgaaccccgggccatcgctgttgaccccctgcgagggttcatgtattggtctgactggggggaccaggccaagattgagaaatctgggctcaacggtgtggaccggcaaacactggtgtcagacaatattgaatggcccaacggaatcaccctggatctgctgagccagcgcttgtactgggtagactccaagctacaccaactgtccagcattgacttcagtggaggcaacagaaagacgctgatctcctccactgacttcctgagccacccttttgggatagctgtgtttgaggacaaggtgttctggacagacctggagaacgaggccattttcagtgcaaatcggctcaatggcctggaaatctccatcctggctgagaacctcaacaacccacatgacattgtcatcttccatgagctgaagcagccaagagctccagatgcctgtgagctgagtgtccagcctaatggaggctgtgaatacctgtgccttcctgctcctcagatctccagccactctcccaagtacacatgtgcctgtcctgacacaatgtggctgggtccagacatgaagaggtgctaccgagcacctcaatctacctcaactacgacgttagcttctaccatgacgaggacagtacctgccaccacaagagcccccgggaccaccgtccacagatccacctaccagaaccacagcacagagacaccaagcctgacagctgcagtcccaagctcagttagtgtccccagggctcccagcatcagcccgtctaccctaagccctgcaaccagcaaccactcccagcactatgcaaatgaagacagtaagatgggctcaacagtcactgccgctgttatcgggatcatcgtgcccatagtggtgatagccctcctgtgcatgagtggatacctgatctggagaaactggaagcggaagaacaccaaaagcatgaattttgacaacccagtctacaggaaaacaacagaagaagaagacgaagatgagctccatatagggagaactgctcagattggccatgtctatcctgcacgagtggcattaagccttgaagatgatggactaccctgaggatgggatcacccccttcgtgcctcatggaattcagtcccatgcactacactctggatggtgtatgactggatgaatgggtttctatatatgggtctgtgtgagtgtatgtgtgtgtgtgattttttttttaaatttatgttgcggaaaggtaaccacaaagttatgatgaactgcaaacatccaaaggatgtgagagtttttctatgtataatgttttatacactttttaactggttgcactacccatgaggaattcgtggaatggctactgctgactaacatgatgcacataaccaaatgggggccaatggcacagtaccttactcatcatttaaaaactatatttacagaagatgtttggttgctgggggggcttttttaggttttggggcatttgttttttgtaaataagatgattatgctttgtggctatccatcaacataagt

SEQ ID NO: 149713 - DNA, 2550 bp, Homo sapiens
  Payload ID: 9573
  Gene Symbol: LRP8
  Gene Name: low density lipoprotein receptor-related protein 8, apolipoprotein e receptor
  ENST ID: ENST00000613948
  CDS Start-End: 1-2100
atgggcctccccgagccgggccctctccggcttctggcgctgctgctgctgctgctgctgctgctgctgctgcagctccagcatcttgcggcggcagcggctgatccgctgctcggcggccaagggccggccaaggattgcgaaaaggaccaattccagtgccggaacgagcgctgcatcccctctgtgtggagatgcgacgaggacgatgactgcttagaccacagcgacgaggacgactgccccaagaagacctgtgcagacagtgacttcacctgtgacaacggccactgcatccacgaacggtggaagtgtgacggcgaggaggagtgtcctgatggctccgatgagtccgaggccacttgcaccaagcaggtgtgtcctgcagagaagctgagctgtggacccaccagccacaagtgtgtacctgcctcgtggcgctgcgacggggagaaggactgcgagggtggagcggatgaggccggctgtgctacctcactgggcacctgccgtggggacgagttccagtgtggggatgggacatgtgtccttgcaatcaagcactgcaaccaggagcaggactgtccagatgggagtgatgaagctggctgcctacaggggctgaacgagtgtctgcacaacaatggcggctgctcacacatctgcactgacctcaagattggctttgaatgcacgtgcccagcaggcttccagctcctggaccagaagacctgtggcgacattgatgagtgcaaggacccagatgcctgcagccagatctgtgtcaattacaagggctattttaagtgtgagtgctaccctggctacgagatggacctactgaccaagaactgcaaggctgctgctggcaagagcccatccctaatcttcaccaaccggacgggtgcggaggatcgacctgtgaagcggaactattcacgcctcatccccatgctcaagaatgtcgtggcactagatgtggaagttgccaccaatcgcatctactggtgtgacctctcctaccgtaagatctatagcgcctacatggacaaggccagtgacccgaaagagcaggaggtcctcattgacgagcagttgcactctccagagggcctggcagtggactgggtccacaagcacatctactggactgactcgggcaataagaccatctcagtggccacagttgatggtggccgccgacgcactctcttcagccgtaacctcagtgaaccccgggccatcgctgttgaccccctgcgagggttcatgtattggtctgactggggggaccaggccaagattgagaaatctgggctcaacggtgtggaccggcaaacactggtgtcagacaatattgaatggcccaacggaatcaccctggatctgctgagccagcgcttgtactgggtagactccaagctacaccaactgtccagcattgacttcagtggaggcaacagaaagacgctgatctcctccactgacttcctgagccacccttttgggatagctgtgtttgaggacaaggtgttctggacagacctggagaacgaggccattttcagtgcaaatcggctcaatggcctggaaatctccatcctggctgagaacctcaacaacccacatgacattgtcatcttccatgagctgaagcagccaagagctccagatgcctgtgagctgagtgtccagcctaatggaggctgtgaatacctgtgccttcctgctcctcagatctccagccactctcccaagtacacatgtgcctgtcctgacacaatgtggctgggtccagacatgaagaggtgctaccgagatgcaaatgaagacagtaagatgggctcaacagtcactgccgctgttatcgggatcatcgtgcccatagtggtgatagccctcctgtgcatgagtggatacctgatctggagaaactggaagcggaagaacaccaaaagcatgaattttgacaacccagtctacaggaaaacaacagaagaagaagacgaagatgagctccatatagggagaactgctcagattggccatgtctatcctgcacgagtggcattaagccttgaagatgatggactaccctgaggatgggatcacccccttcgtgcctcatggaattcagtcccatgcactacactctggatggtgtatgactggatgaatgggtttctatatatgggtctgtgtgagtgtatgtgtgtgtgtgattttttttttaaatttatgttgcggaaaggtaaccacaaagttatgatgaactgcaaacatccaaaggatgtgagagtttttctatgtataatgttttatacactttttaactggttgcactacccatgaggaattcgtggaatggctactgctgactaacatgatgcacataaccaaatgggggccaatggcacagtaccttactcatcatttaaaaactatatttacagaagatgtttggttgctgggggggcttttttaggttttggggcatttgttttttgtaaataagatgattatgctttgtggctatccatcaacataagt

SEQ ID NO: 149714 - DNA, 1167 bp, Homo sapiens
  Payload ID: 9574
  Gene Symbol: LRPAP1
  Gene Name: low density lipoprotein receptor-related protein associated protein 1
  ENST ID: ENST00000515119
  CDS Start-End: 5-322
gaagatggcgccgcggagggtcaggtcgtttctgcgcgggctcccggcgctgctactgctgctgctcttcctcgggccctggcccgctgcgagccacggcggcaagtactcgcgggagaagaaccagcccaagccgtccccgaaacgcgagtccggagaggagttccgcatggagaagttgaaccagctgtgggagaaggcccagcgaaacctcccggtggccagcctcctccgaggtcagtttctcgctgtgtcctggtccgtcctgctcgtggctcacaggctcctccccttcgttcgcagctgcatcttcctcccgtgaggctggccgagctccacgctgatctgaagatacaggagagggacgaactcgcctggaagaaactaaagcttgacggcttggacgaagatggggagaaggaagcgagactcatacgcaacctcaatgtcatcttggccaagtatggtctggacggaaagaaggacgctcggcaggtgaccagcaactccctcagtggcacccaggaagacgggctggatgaccccaggctggaaaagctgtggcacaaggcgaagacctctgggaaattctccggcgaagaactggacaagctctggcgggagttcctgcatcacaaagagaaagttcacgagtacaacgtcctgctggagaccctgagcaggaccgaagaaatccacgagaacgtcattagcccctcggacctgagcgacatcaagggcagcgtcctgcacagcaggcacacggagctgaaggagaagctgcgcagcatcaaccagggcctggaccgcctgcgcagggtcagccaccagggctacagcactgaggctgagttcgaggagcccagggtgattgacctgtgggacctggcgcagtccgccaacctcacggacaaggagctggaggcgttccgggtaaggaaacacggccctctccttctagctctctcctgtggtgaagattctcttgcagtttccgggtaaggaaatgcagccctctcctccaagctctctctctcaagattctcgcagtttcttccttaaccactcggtgaacctgcttgcgttttccttctcatctgcgtgggaactcgtgtttcaggggcggggccaggctctggagggaggggctttggttcttttgtccgt

SEQ ID NO: 149715 - DNA, 7819 bp, Homo sapiens
  Payload ID: 9574
  Gene Symbol: LRPAP1
  Gene Name: low density lipoprotein receptor-related protein associated protein 1
  Uniprot ID: P30533
  ENST ID: ENST00000500728
  CDS Start-End: 148-1221
gctggagtccgccggcggcctcgccgctgccggccgctcacggaggaactacaattcccaggagaccgcgcggtgggtgggggcggggtagtgggcggggcatcggcaggctaggttttctccgcgcagcgccagtcgcagaggaagatggcgccgcggagggtcaggtcgtttctgcgcgggctcccggcgctgctactgctgctgctcttcctcgggccctggcccgctgcgagccacggcggcaagtactcgcgggagaagaaccagcccaagccgtccccgaaacgcgagtccggagaggagttccgcatggagaagttgaaccagctgtgggagaaggcccagcgactgcatcttcctcccgtgaggctggccgagctccacgctgatctgaagatacaggagagggacgaactcgcctggaagaaactaaagcttgacggcttggacgaagatggggagaaggaagcgagactcatacgcaacctcaatgtcatcttggccaagtatggtctggacggaaagaaggacgctcggcaggtgaccagcaactccctcagtggcacccaggaagacgggctggatgaccccaggctggaaaagctgtggcacaaggcgaagacctctgggaaattctccggcgaagaactggacaagctctggcgggagttcctgcatcacaaagagaaagttcacgagtacaacgtcctgctggagaccctgagcaggaccgaagaaatccacgagaacgtcattagcccctcggacctgagcgacatcaagggcagcgtcctgcacagcaggcacacggagctgaaggagaagctgcgcagcatcaaccagggcctggaccgcctgcgcagggtcagccaccagggctacagcactgaggctgagttcgaggagcccagggtgattgacctgtgggacctggcgcagtccgccaacctcacggacaaggagctggaggcgttccgggaggagctcaagcacttcgaagccaaaatcgagaagcacaaccactaccagaagcagctggagattgcgcacgagaagctgaggcacgcagagagcgtgggcgacggcgagcgtgtgagccgcagccgcgagaagcacgccctgctggaggggcggaccaaggagctgggctacacggtgaagaagcatctgcaggacctgtccggcaggatctccagagctcggcacaacgaactctgaaggcattggggagcccagcccggcagggaagaggccagcgtgaaggacctgggctcttggccgtggcatttccgtggacagcccgccgtcagggtggctggggctggcacgggtgtcgaggcaggaaggattgtttctggtgactgcagccgctgccgtcgcgacacagggcttggtggtggtagcatttgggtctgagatcggcccagctctgactgaaggggcttggcttccactcagcatcagcgtggcagtcaccaccccagtgaggacctcgatgtccagctgctgtcaggtctgatagtcctctgctaaaacaacacgatttacataaaaaatcttacacatctgccaccggaaataccatgcacagagtccttaaaaaatagagtgcagtatttaaaccacccgcttgttggctggtcactaagtgtcctggtggctggggccggagccagtgctcttgaagggatcgcgtcatagccagcttcccctctgggccctgtgggtctttgcagccaacctccttttcccgtgagacggcccggcctgatttaaagccaagagcgcttgagttgagtttgaggggaagatgtggagcgtgtggttctgtggacagtcagagactgtggcctgggggcagcgtctttcaactctcacctctgcagctcagggacctcgggagacctcaccaaacctgcagggcctccgtgtccctaagtgtgctgtgtaaatgccccatctcatgggggagagacagccacggaggccttcctctgaccatagctgatggactggcggttgctcaggtccggctccgagaatgttcctgtgtctgagcctggaagaggctcgggtctggctccaggcgtggttcccttcccgtgtctgagcctggaagaggctcgggtccggctccgagcgtggttcccttcccgtgtctgagcctggaagaggctcgggtccggctccgagcgtggttcccttcccgtgtctgagcctggaagaggctcgggtccggctccgagcgtggttcccttcccgtgtctgagcctggaagaggctcgggtccggctccgagcgtggttcccttcccgtgtctgagcctggaagaggctcgggtccggctctgggcgtggttcccttcccgtgtctgagcctggaagaggctcgggtccggctctgggcgtggttcccgtgtctgagcctggaagaggctcgggtccgggtccagctccgagcgtggttcccgtgtttgaacctggaagaggctccaccaggcgtattgtgttttgactgcagctggatcttggcttgactgttgagatctgccaaacatccgctaagctatcatttctgagaaaggtcaaggctagaggcagcatgtcgggagttggcgcatcagggttggaagggccccagggtacagcatgtgggtgcctgttcctttgtggacttgtgtgtgtgtggctggtggggcggggggtggattctggttcttttttttcccattatcctgagagccttaaggtactcagtgtgttggtgagactcagccctgtcatctagcagaagtgtgttccttttcattgctgtatagtattccattgcatgactgtcctgtgctctgattttaatgcactttattgtgggtggatatttgagttgcttcctttctggggtaataacactcacttggaaatagctgtggtgaacactcgtgtgggggtgggggtgggggccaactctaggagcacctaatggatcttacgaagcgtgttgtccaagtatagagatgattccaaagtggttggactgtgtttctttctcccagctgggtggaaggagaacactagtggattgctgagacttggtgctcggtatttttaattatggacagcctggctggcgttttgtggtgtctaattgcggagtagcgtgtcttactgtataatggcctcttttgtatgtgggagaccatggtgttgaggggaggcagttacacaaaaaacccagataccgagtgttagttccatgggtgtggctggtcatggtgcgcactcacgaaggatgtaggtgatgccctccactccgcagagccagtcccacaggggtacccattctgactcctaccaccgcagctccctacctcccgcctgccatgggttccacgtgcatggctctgggcagtctgtgtctttgcgtgcgtctgtgtatgtctgcgtgtatctgcttacattcgctcagcatctgagattcacccaggcttttgcgtggatcagcggcagactcctgattgccgcgtggcggcctgttgtgtgggtgtgtgccgcgtgtgtatccagtccctactcaggagtgtacgtttccagtgtgggttgcagtcaggatccatttctcccttaactttcagattatttgctgcataggcttttttctcctaatttggcgcctttgtcagaaatcaactgacctacctgtgtgggtctgtttctgtttgtccttacgctcttgccattgccacactttagacaaggtcttgctctgtccctcaggctggagtgcagtagcgtgatctcagctcactgcacccttgacctcccatactccagcaatcccctcgcctcagtctcctgagtagtagctgcgaccacaggcgtgtgtcaccacacccggctgattttattttttttatttttattttttttgtagagacggggttttactatgttgcccaggcaggtcttgatctgggctcaagtgatgctcctgtctcagcctcccaaactactgggattacaggttgtaggtgtgagccatggtgcccggccgccacactgtcttggctacagttgggtttataataaaccctgaatcgaggtgatgtgcattttccaactcttctttttaaagattcttgtggctgtttatgtccttggtgtttccatatatgttttacaatcagtgtctcaatttctaccaaaaaaacatgccttctggaatttcaatagcaattcccttgaacgcatttttgaataccttttctgaatgtcttgaatacatgttgggaagaatcggtgtcttaacagtctccagtgtccacgcgttgactgccgtgtgtgactccagtcggcgtctcaacagtctccagtgtccacgcgttgactgccgtgtgtgactccagtcggcgtctcagcagtctccagtgtccacgcgttgactgccgtgtgtgactccagtcggcgtctcagcagtctccagtgtccacgcgttgactgccgtgtgtgactccagtcggcgtctcagcagtctccggtgtccacgcgttgactgccgtgtgtgactccagtcggcgtctcaacagtctccggtgtccacgcgttgactgccgtgtgtgactccagtcggcgtctcaacagtctccggtgtccacgcgttgactgccgtgtgtgactccagtcggcgtctcaacagtctccggtgtccacgcgttgactgccgtgtgtgactccagtcggcgtctcaacagtctccggtgtccacgcgttgactgccgtgtgtgactccagtcggcgtctcaacagtctccggtgtccacgcgttgactgccgtgtgtgactccagtcggcgtctcaacagtctccggtgtccacgcgttgactgccgtgtgtgactccagtcggcgtctcaacagtctccggtgtccacgcgttgactgccgtgtgtgactccagtcggcgtctcaacagtctccggtgtccatgcgttgactgccatgtatgactccaggtattgagttcatcttcaacttctcccaacaatgaactggagttttctgtgcatgtgtctggcatgttttcctttagatctagtcctaggtgttcgatatgctattgaggactgtgtatttttatttcatttgtcacctgtgcgtggtgctttaatcctgtgccctaaactcccgccttggccatggcggtgtttctgtggactcgtggggtttccgtgtgcacacgcgtgtcctctgtctgacagtggctttgcttccccttgtcagtctgtgcctcggcttctcactgcactggtgaggtgagccggcgctcgctaatcttattcccagtctcggtgaacatgggctcagtctctcccggctcagtgttgggtttgcactggtgcacttacaggcagaagagcttcctcatttgctgagggcttttcctgaatccgtgttgaatgtggtcagctgcctttcctgcacctagtgagatgctcatgaggtcacttccttaccgcattactgtagtgaattacgctgactttcatatgccaagatgacctggcatttccaggtaagtccctgtggccatggtgcattggccttttctctgcatggccagatgagatttgctcataccgggctaaggacctcctgtgtaggaatgctcttgagggacactgggcttggatgttcattgtcttgtcatgtgatgtgtctgtcatggtttgatattgcattaagtgggcctcctgaaacaagttctgccatagtttgtataggattggcattatttgtttcatagagatgtgatgggtgaggccatctatgcctgccattttctttttgcttaggtttttcattaagaacttgatttttaaaaatagacatgaggcctggcatggtggctcacgcttgtaatcccagcactttgggaggccaacgtggatggatcacctgaggtcaggagtttgagaccaacctagtcaacatggtgaaaccccgtctccattaaaaatataaaaattagcagggtgtggtggtgcatgcctgtaatcccagctactctggaggctgaggcaggagaatcacttgaactcaggaggtggaggttgcagtgagctgagatcacaccactgcactccagcctgggcaacagagcgaggctctgtctcaaaaaaaaagacatgaggcttttggattttctgtttcttcctttgtcatttttttaaagataggtttgtcgcagaatttcatctaagttatcaaaacaatttacataaatcattcacagtatcctctgtgcagtgatgtccattctcattcctgctctgggccatttgtgttttcttttccccctgatcagactagctaagagtttatcatttttacagatattttccccaaagaaacctacttttgggtccattgattttttttttctattgttttctttttcattgacttttgctcttttcttatgaatttcctttcttctacctattttgtgttcaatttgctgtccttgttttaggttcttttgatagaggcttagatcattgatgaagaatatgaaagaatgggataatacagttaaaaacttggtctacttatgcccattagagaaaacattcttaagcacgcatggaatcttttaaaaatggacgaggtactaggacccaaagcaaatgtcagtaattcgcagatgataatgtataaatatatgatatgtaggtaaataatacaaatcacattctttggccagagtgcaattgaggaggaaatcagtaacaaaaagacaattaaatccatttgattcttttgttttcgttttgtagtaacttgcacttccctggtgccagaggcatgacacctttttgtctgctcttggccatttgggtggcgtctttgggaagggcctacttaattcttttgcctatttaaaaaactgggtcttggaaatcttgtctttttttttgagtcaggatctttctcgcacaggcttggagtgcagtggtgcgatcatagctcactgcaacctcaaactcctgggctcaagcgagcctcccacctcggtcttctgagtagctgggactacaggcatgcatcactatgctctgctaatttaaagaaaaggttttttttatagagactgggtctcgctgtgttgcccaggctggtctcggagtcctggtctcaagtgattcacctgcctccacctcgcggagtgccaggattacaggtggcgggagccgccacacccagcctggtcttagcgttattcccaggtctaggtgtgagtccttcctcagatatgtgttgtgaataatttccgatcctctggcttgctattttactttcttaatggttatcttttggaaagcaaaggtttccagtttgatgaaatctaatttttattttttatttttccgttctagtggtctttctattttctcatcaaattgagactttggggaaactacacagcagcaaaccaggatatatcctcttaaaaacagctcgagccggccgggtgcggtggctcatgcctggaatcccagcactttgggaggtggaggtgggcggatcacgtgaggtcaggagtttgagaccagcctggccaacatggtgaaaccccatctctactaaaaataaaaaattagccaggcatggtggcaggcacctgtaatcccagctacttgggaggctgaggcaggagaatggcttgaacctgggaggcagaggttgcagtgagccgagatcgcgccattgcactccggcctggggacaagagcaagacttcgcctcaaaaaaaaaaaaaaa

SEQ ID NO: 149716 - DNA, 9899 bp, Homo sapiens
  Payload ID: 9575
  Gene Symbol: LRBA
  Gene Name: LPS-responsive vesicle trafficking, beach and anchor containing
  Uniprot ID: P50851
  ENST ID: ENST00000357115
  CDS Start-End: 245-8836
agggaaacttggaggctgcgaccagggtttggcgttgttgtcagcctcggggagagagattggacaaatattctccaagaggaggagggcgacgccaaggactttccacatcaactgctttggggtatctccacaagttggaagagggaccctttcgttttgcattgcgtgtgttgtgctcattaccagtgcagcgactgccgtcccagggtgactctgagttgtcctttatcgtgagctagcaatggctagcgaagacaatcgtgtcccttccccgccaccaacaggtgatgacgggggaggtggagggagagaagaaacccctactgaagggggtgcattgtctctgaaaccagggctccccatcaggggcatcagaatgaaatttgccgtgttgaccggtttggttgaagttggagaagtatccaatagggatattgtagaaactgtctttaacctgttggtaggaggacagtttgatctggaaatgaatttcattatccaagaaggtgagagtattaactgcatggtggacctactggaaaaatgtgacattacgtgccaagcagaagtctggagcatgtttacagccattctgaagaaaagcatacggaatcttcaagtctgcactgaagtaggccttgttgaaaaagtgcttgggaaaattgaaaaagttgacaatatgatagcagatcttttggttgacatgttgggagtgctggctagctataatttgacagttcgcgagctaaagcttttcttcagtaaacttcaaggagataaaggacgatggcctccacatgctgggaagttgctgtctgtgttaaagcatatgcctcagaagtatggtcctgatgccttttttaactttccaggaaagagtgctgcagctattgcattacctcctatagccaaatggccataccagaatggttttacatttcatacatggcttagaatggatcctgtaaataacatcaatgtagataaggataaaccatatttgtattgtttcagaaccagcaaaggtcttggctattctgctcattttgttggaggctgtttgattgtaacatcaataaagtcaaaaggaaaaggctttcaacactgtgtgaaatttgatttcaagccacaaaagtggtatatggttaccatagtacacatctataaccgatggaagaatagtgaacttcgatgttatgtgaatggtgagctggcttcctatggagagataacatggtttgtcaacactagcgatacctttgacaaatgtttcctgggctcatcagaaacagcagatgctaatagagtattctgtggtcagatgactgcagtttaccttttcagtgaagctctaaatgcagctcagatatttgctatttatcagttgggcctgggatacaagggtacatttaaattcaaagcagaaagcgaccttttccttgctgagcatcacaaacttttattgtacgatgggaaactctctagtgccattgcattcacgtacaatccacgggctacagatgcccagctttgtcttgaatcatctcctaaggacaacccttcaatttttgttcattcaccacatgcactcatgctccaggatgtaaaggcagttttaacacattccatccaaagtgcaatgcattcaattggaggagtacaagtactatttccactttttgcacagttggattacaggcaatatttgtctgatgagattgatttgactatatgttcaaccttgctggcctttatcatggaattgttgaagaactcaattgctatgcaggaacagatgcttgcctgtaagggcttcttggtaataggatatagccttgaaaagtcttccaaatctcatgttagcagagcagtacttgaactttgccttgcattttcaaaatatctgagtaatctgcagaatgggatgcccctgctcaagcaattgtgtgatcacgttcttcttaatcctgccatatggattcataccccagccaaggttcaactgatgctctatacttatctgtccacggaattcattggtacagtcaacatatataacaccattcggagagttggaacagtgcttctcatcatgcacacgctgaagtactactactgggcagtgaatcctcaggatcgaagtggtatcaccccaaaaggattagatggaccgcgacctaatcaaaaagaaatgctttctctacgagcattcttgttgatgttcattaagcaattagtgatgaaggattctggagtaaaggaagatgaattacaggccattcttaattacctactgactatgcatgaggatgacaatctaatggatgtcctacagctgcttgttgcattaatgtcagaacaccctaactctatgattcctgcttttgaccaaaggaatgggttacgtgttatctacaaacttctggcatcgaaaagtgaaggaatcagggtacaagctcttaaggcaatgggttattttttaaaacatctggccccaaagaggaaagcagaagtcatgcttggacatggattgttttcattgctagctgaaaggctcatgcttcagacaaatttaatcacaatgaccacatataatgtgctgtttgagattcttatagaacagattggtactcaggtgatacataaacagcatccagatcctgattcttcagtgaagatacaaaaccctcagatactaaaagtaattgcgaccctacttcgaaattctccccagtgcccagagagcatggaggttcgcagagcctttctttctgacatgattaaactttttaataacagtagagaaaacaggaggagcttgctacaatgctctgtgtggcaagaatggatgctttctctctgctattttaatcctaagaattcagatgagcaaaagataacagaaatggtatacgccatattcagaatcctgctttaccatgcagtcaaatatgagtggggtggctggcgtgtatgggtagacactttatcaatcactcattcaaaggtcacttttgaaatacacaaagaaaaccttgccaatatatttagggaacagcaaggaaaagttgatgaagaaatagggctgtgttcttcaacttcagttcaagcagcctctggcattagaagggatattaatgtttcagtaggatcccagcaaccagatacgaaggattctcctgtctgtcctcatttcaccacaaatggtaatgaaaattcaagtatagagaagacaagttcactagaatctgcatctaatattgaactgcaaactactaatacatcttatgaagaaatgaaagctgagcaagaaaatcaggagttaccagatgaaggcactttggaagaaacactgacaaatgagacaaggaatgcagatgatttagaagtatcttctgacataatagaagctgtggctatttcctctaattcttttataacaactggcaaagattcaatgactgtcagtgaagtaactgcttctataagttctccttcagaagaggatgcctcagagatgccagaattcttggataaatctatagtagaggaagaggaagatgatgattatgtggaactgaaagtagaaggcagtcctactgaggaagctaatctacccacagagctccaagataacagtttgtctccagctgcatctgaagccggtgaaaaactggacatgtttggtaatgatgacaaattaatatttcaagaaggaaaacctgttactgaaaagcaaactgatactgaaactcaagattctaaagattctggaattcagactatgacagcatcagggtcttcagctatgtcaccagaaactactgtttcccaaatagctgtagaatcagaccttggtcagatgctggaggaagggaagaaagcaactaacctcactagagaaaccaaattaattaatgattgtcatggtagtgtctctgaggcttcttctgagcaaaagattgcgaagttggatgtttccaatgttgctacagatactgagaggctggagttgaaggccagtcccaacgtggaagcacctcaacctcatcgacatgtgcttgagatatcaaggcaacatgagcagccagggcaaggaatagcaccagatgcagttaatggacaaaggagggattccagatctactgtgtttcgtattcctgagttcaactggtctcagatgcatcaacgtttgctcactgatctattattttcaatagaaacagatatacagatgtggagaagccattcaacaaagacagttatggacttcgtgaatagcagtgataatgtcatctttgtacacaacacaattcatctcatctctcaagtgatggacaatatggtcatggcttgtgggggtatactgccattgctttcagctgctacatcggctacacatgaactggaaaatattgaacctactcaaggcctttcaatagaagcctctgtgacatttttgcagaggctaattagccttgtggatgtgcttatatttgcaagttctcttggctttactgaaattgaagctgaaaaaagtatgtcatctggaggaattttgcggcagtgtctccgactagtttgtgcagtcgcagtaaggaattgcttggagtgtcaacagcattcacaactgaaaactaggggagataaagccttgaaaccaatgcatagccttattcctttagggaaatctgcagcgaagagcccagtggacattgtgactggcggtatatctccagtaagagatcttgacaggcttctacaggacatggatattaatcggcttagggcagttgttttcagagacatagaggatagcaaacaagctcaatttttagccttggcagtagtatactttatctctgttcttatggtctccaagtacagagacattttggaaccccaaaatgaaaggcatagccagtcatgtacagaaactggcagtgaaaatgagaatgtatcactctctgaaatcacaccagcagcattcagcactttaactacggcatcagtggaagaatctgaaagcacatcatctgctcgaaggagggactcaggcattggggaagaaacagccactggtttaggaagccatgtggaagtaactcctcacacagcacctcctggtgtcagtgcaggcccagatgcaatcagcgaggtgctatctactctttctttagaagtcaataagtctccggaaaccaaaaatgatagaggaaatgacttggacactaaggctacaccgtcagtttcagtttcaaaaaacgtcaatgtgaaagacattctccgaagcttggttaacataccagcagatggagtcacagtggatcctgcccttctgccaccagcctgccttggagcccttggtgatctatctgtggaacaacccgtgcagttcagatcttttgacagaagtgtcattgttgcagcaaaaaagtcagcagtctcaccttccacctttaatacaagcatacctaccaatgctgtcagtgtggtttcctcagtagattcagcccaagcctcagatatgggaggagaatcaccaggcagtagatcatctaatgcaaaattgccctcagttccaacagttgattcagtttcacaagatccggtttcaaatatgagtattacagagaggcttgaacacgctttggaaaaggcagctcctctccttcgtgagatttttgtggattttgcaccttttctttctcggacacttttgggtagccatggacaagaactgcttatagaaggaacaagtctggtttgcatgaagtcgagtagttcagttgtggaattggttatgctactgtgttctcaggagtggcaaaattctattcagaagaatgcaggccttgcttttatcgaacttgtcaatgaaggaaggttgcttagccagacaatgaaggatcatctagtaagagtagcaaatgaagctgaatttatcctgagcaggcagagagcagaagatattcacagacatgcggaatttgagtcactgtgtgcccagtattctgcagacaaacgagaagatgagaagatgtgtgatcatttgataagagcagcaaaatatcgtgaccacgtgacagcaactcaactaatccagaaaattatcaacattctcacagacaagcatggagcctggggaaattctgcagtgagtcgtcctcttgagttctggcgccttgactactgggaagatgacttgcggcgccggcgacgatttgtgcgtaaccctctaggatcgacacatcctgaagcgacactaaaaacagccgtggaacatgtgtgcatttttaaattgagagagaacagcaaagccacagatgaagatatccttgctaaaggaaaacagtccatcaggagtcaggctttaggaaatcagaactcagaaaacgagatcctcctggaaggcgatgatgatactctgtcatccgtggatgagaaagatttagagaatcttgccggtcctgttagcctgagcacaccagctcagcttgtggccccctctgttgtagtaaagggcactctttctgtcacctcctccgaactctattttgaggtggatgaagaggatcctaacttcaaaaaaatcgaccccaagatcttggcatatacagaagggctgcatggaaaatggctgttcacagagatacgatcaatcttttctcgtcgttatcttttgcaaaatacagccctggagatctttatggcaaacagagttgctgtgatgttcaacttcccagaccctgcaacagtaaagaaagtggttaactatctacctcgtgttggcgttggaacaagttttggattgcctcaaaccagacgtatttcattagctagtccacgtcagctttttaaggcttctaatatgacccagcgatggcaacacagagagatatctaattttgagtacttgatgtttctcaacacgatagcaggacggagttataatgacttaaatcagtatccagtgtttccttgggtcatcactaattatgaatcagaagaactggatcttaccttgcccaccaacttcagagatttgtccaagccaataggagctctgaacccaaaaagagcagcattcttcgctgagcgttatgaatcatgggaagatgatcaagttccaaagtttcactatggtactcattactcaactgcaagttttgttcttgcatggctgctaagaatagaaccctttacaacttatttcctaaatttgcaaggaggcaaatttgatcatgcagatcgaactttttcatcaatttccagagcttggcgaaacagtcagcgtgatacctctgatattaaggagttgatccctgaattttattatctccctgagatgtttgtcaacttcaataattataatcttggagtgatggatgatgggacagtagtgtctgatgtcgaacttcctccttgggccaaaacctcagaagaatttgttcacataaacagattggccctggagagtgaatttgtttcctgccagcttcaccaatggattgatctcatttttggctataaacagcaaggaccagaagctgtccgagccctcaatgtgttctattacttgacctatgaaggagctgtcaatctgaattcaataactgatcctgtgttgagagaggctgttgaagctcaaatccgaagttttggacagactccttctcaactactcatagagccccatcctcccagaggttctgccatgcaagtgagtccattgatgttcacagacaaagcccagcaggatgttatcatggtcctcaagtttccctccaactcccctgttactcacgtggcagccaacacccagcctggtttggcaactcccgctgtgatcacagtcactgctaacaggttatttgcggtgaacaaatggcacaaccttcctgctcatcaaggtgctgtacaagaccagccataccagctgccagtggaaatcgatcctctcatagccagcaatacaggaatgcacaggaggcaaatcactgaccttttagaccaaagtattcaagtgcattcccagtgctttgtcatcacttcagacaaccgctatattctcgtctgtggcttctgggataaaagtttcagagtctattctacagacacaggaagattgatccaagtggtgtttggccattgggatgtcgtcacttgccttgctcgttctgagtcatatattgggggaaattgctacattctctcagggtcacgtgatgcaactcttttgctgtggtattggaatggaaaatgcagtgggattggagataacccaggcagtgagactgctgctcctcgggccattttgaccggccatgactatgaggtcacatgtgctgcggtgtgtgcggagctaggcctggtgttgagtggttcacaagaaggaccatgtctcatacattccatgaatggagacttgttgaggaccttggagggtcctgaaaactgcctgaaaccaaaactcattcaggcttcaagagagggtcattgtgtcatattctatgaaaacggcctcttctgtacattcagtgtgaatggaaaactccaggccacgatggaaacagatgataacataagagccatccagctgagccgagatgggcagtacctgctcacaggaggagacagaggagtggtcgtggtccggcaggtgtcggacctcaagcagctctttgcctatccaggatgtgacgctggaatccgggccatggcgctgtcttacgaccagaggtgcatcatttctggcatggcttcaggaagcattgtgctattttacaacgactttaaccggtggcatcatgaataccaaacccgctactgatggtgacagctgtacatcaactctgcccctaggatgagcagaagtacctggagcatcattctcttctaccacatctgaatgtaacttaaatttgctcaaagaagcaaaatattttttaaagttattaataattgctatttttgtagtctttgcttgacttttttgggggggattagcaaagcagaaaactggctgctgggttctgtagttttaaaaaatctatatttttagtcataatgagaagtctattttcaccaattatggaaacatacagtggagcaagtaaaccacttattccagctataatattatgaagaacatttcccatgcatctacaagcttgagaaataggattttcacagtggggaagtgggttacaatattggaataggaaaatttgatgctgtaatttgggtcctgtatttttccaaacaactgtgcttcttcagcactaatatttctgggatttaaatagtaatgtttaaattatggtaaatgtaatttaaaacatctcaattaagtctgtctatcaatattgttcttcaagcatgttttagacctagaaaagtatggtttgggggaggctattttattgtgtggttagcacaaggaatctaatttatagcaagtgtgaaatagttaccattttttcctgatctgtcatcttcatagcacaacaaaacgaaatgatggaaatgctcttgagctcacaacatttgtttttcttttaaagtaaatgcaagtaccaaagctcactactgcggtttgcctgtgcctggacaatgaggcggagccactgttgttttgttggggcacccccttccctccccgggtttgcaaatagaggctaccgggtgctgtattcagcaacacctgttttactatttgttattaaactatcatctccaccttccttttgattagcaatttgtactaagaaacgaaacaatgttatttggtggtgtataattctacttttctagtagattactgtgtggaattctgtgaaaaatatttgagaaaaggcctgtattgcataaataaattctttgtatgttgtgaa

SEQ ID NO: 149717 - DNA, 10032 bp, Homo sapiens
  Payload ID: 9575
  Gene Symbol: LRBA
  Gene Name: LPS-responsive vesicle trafficking, beach and anchor containing
  Uniprot ID: P50851
  ENST ID: ENST00000510413
  CDS Start-End: 286-8841
atctccgccgccacctcggtctcgctgctcctgggcggggggtgaggacgagtccggagtatctggggtttggcgttgttgtcagcctcggggagagagattggacaaatattctccaagaggaggagggcgacgccaaggactttccacatcaactgctttggggtatctccacaagttggaagagggaccctttcgttttgcattgcgtgtgttgtgctcattaccagtgcagcgactgccgtcccagggtgactctgagttgtcctttatcgtgagctagcaatggctagcgaagacaatcgtgtcccttccccgccaccaacaggtgatgacgggggaggtggagggagagaagaaacccctactgaagggggtgcattgtctctgaaaccagggctccccatcaggggcatcagaatgaaatttgccgtgttgaccggtttggttgaagttggagaagtatccaatagggatattgtagaaactgtctttaacctgttggtaggaggacagtttgatctggaaatgaatttcattatccaagaaggtgagagtattaactgcatggtggacctactggaaaaatgtgacattacgtgccaagcagaagtctggagcatgtttacagccattctgaagaaaagcatacggaatcttcaagtctgcactgaagtaggccttgttgaaaaagtgcttgggaaaattgaaaaagttgacaatatgatagcagatcttttggttgacatgttgggagtgctggctagctataatttgacagttcgcgagctaaagcttttcttcagtaaacttcaaggagataaaggacgatggcctccacatgctgggaagttgctgtctgtgttaaagcatatgcctcagaagtatggtcctgatgccttttttaactttccaggaaagagtgctgcagctattgcattacctcctatagccaaatggccataccagaatggttttacatttcatacatggcttagaatggatcctgtaaataacatcaatgtagataaggataaaccatatttgtattgtttcagaaccagcaaaggtcttggctattctgctcattttgttggaggctgtttgattgtaacatcaataaagtcaaaaggaaaaggctttcaacactgtgtgaaatttgatttcaagccacaaaagtggtatatggttaccatagtacacatctataaccgatggaagaatagtgaacttcgatgttatgtgaatggtgagctggcttcctatggagagataacatggtttgtcaacactagcgatacctttgacaaatgtttcctgggctcatcagaaacagcagatgctaatagagtattctgtggtcagatgactgcagtttaccttttcagtgaagctctaaatgcagctcagatatttgctatttatcagttgggcctgggatacaagggtacatttaaattcaaagcagaaagcgaccttttccttgctgagcatcacaaacttttattgtacgatgggaaactctctagtgccattgcattcacgtacaatccacgggctacagatgcccagctttgtcttgaatcatctcctaaggacaacccttcaatttttgttcattcaccacatgcactcatgctccaggatgtaaaggcagttttaacacattccatccaaagtgcaatgcattcaattggaggagtacaagtactatttccactttttgcacagttggattacaggcaatatttgtctgatgagattgatttgactatatgttcaaccttgctggcctttatcatggaattgttgaagaactcaattgctatgcaggaacagatgcttgcctgtaagggcttcttggtaataggatatagccttgaaaagtcttccaaatctcatgttagcagagcagtacttgaactttgccttgcattttcaaaatatctgagtaatctgcagaatgggatgcccctgctcaagcaattgtgtgatcacgttcttcttaatcctgccatatggattcataccccagccaaggttcaactgatgctctatacttatctgtccacggaattcattggtacagtcaacatatataacaccattcggagagttggaacagtgcttctcatcatgcacacgctgaagtactactactgggcagtgaatcctcaggatcgaagtggtatcaccccaaaaggattagatggaccgcgacctaatcaaaaagaaatgctttctctacgagcattcttgttgatgttcattaagcaattagtgatgaaggattctggagtaaaggaagatgaattacaggccattcttaattacctactgactatgcatgaggatgacaatctaatggatgtcctacagctgcttgttgcattaatgtcagaacaccctaactctatgattcctgcttttgaccaaaggaatgggttacgtgttatctacaaacttctggcatcgaaaagtgaaggaatcagggtacaagctcttaaggcaatgggttattttttaaaacatctggccccaaagaggaaagcagaagtcatgcttggacatggattgttttcattgctagctgaaaggctcatgcttcagacaaatttaatcacaatgaccacatataatgtgctgtttgagattcttatagaacagattggtactcaggtgatacataaacagcatccagatcctgattcttcagtgaagatacaaaaccctcagatactaaaagtaattgcgaccctacttcgaaattctccccagtgcccagagagcatggaggttcgcagagcctttctttctgacatgattaaactttttaataacagtagagaaaacaggaggagcttgctacaatgctctgtgtggcaagaatggatgctttctctctgctattttaatcctaagaattcagatgagcaaaagataacagaaatggtatacgccatattcagaatcctgctttaccatgcagtcaaatatgagtggggtggctggcgtgtatgggtagacactttatcaatcactcattcaaaggtcacttttgaaatacacaaagaaaaccttgccaatatatttagggaacagcaaggaaaagttgatgaagaaatagggctgtgttcttcaacttcagttcaagcagcctctggcattagaagggatattaatgtttcagtaggatcccagcaaccagatacgaaggattctcctgtctgtcctcatttcaccacaaatggtaatgaaaattcaagtatagagaagacaagttcactagaatctgcatctaatattgaactgcaaactactaatacatcttatgaagaaatgaaagctgagcaagaaaatcaggagttaccagatgaaggcactttggaagaaacactgacaaatgagacaaggaatgcagatgatttagaagtatcttctgacataatagaagctgtggctatttcctctaattcttttataacaactggcaaagattcaatgactgtcagtgaagtaactgcttctataagttctccttcagaagaggatgcctcagagatgccagaattcttggataaatctatagtagaggaagaggaagatgatgattatgtggaactgaaagtagaaggcagtcctactgaggaagctaatctacccacagagctccaagataacagtttgtctccagctgcatctgaagccggtgaaaaactggacatgtttggtaatgatgacaaattaatatttcaagaaggaaaacctgttactgaaaagcaaactgatactgaaactcaagattctaaagattctggaattcagactatgacagcatcagggtcttcagctatgtcaccagaaactactgtttcccaaatagctgtagaatcagaccttggtcagatgctggaggaagggaagaaagcaactaacctcactagagaaaccaaattaattaatgattgtcatggtagtgtctctgaggcttcttctgagcaaaagattgcgaagttggatgtttccaatgttgctacagatactgagaggctggagttgaaggccagtcccaacgtggaagcacctcaacctcatcgacatgtgcttgagatatcaaggcaacatgagcagccagggcaaggaatagcaccagatgcagttaatggacaaaggagggattccagatctactgtgtttcgtattcctgagttcaactggtctcagatgcatcaacgtttgctcactgatctattattttcaatagaaacagatatacagatgtggagaagccattcaacaaagacagttatggacttcgtgaatagcagtgataatgtcatctttgtacacaacacaattcatctcatctctcaagtgatggacaatatggtcatggcttgtgggggtatactgccattgctttcagctgctacatcggctacacatgaactggaaaatattgaacctactcaaggcctttcaatagaagcctctgtgacatttttgcagaggctaattagccttgtggatgtgcttatatttgcaagttctcttggctttactgaaattgaagctgaaaaaagtatgtcatctggaggaattttgcggcagtgtctccgactagtttgtgcagtcgcagtaaggaattgcttggagtgtcaacagcattcacaactgaaaactaggggagataaagccttgaaaccaatgcatagccttattcctttagggaaatctgcagcgaagagcccagtggacattgtgactggcggtatatctccagtaagagatcttgacaggcttctacaggacatggatattaatcggcttagggcagttgttttcagagacatagaggatagcaaacaagctcaatttttagccttggcagtagtatactttatctctgttcttatggtctccaagtacagagacattttggaaccccaaaatgaaaggcatagccagtcatgtacagaaactggcagtgaaaatgagaatgtatcactctctgaaatcacaccagcagcattcagcactttaactacggcatcagtggaagaatctgaaagcacatcatctgctcgaaggagggactcaggcattggggaagaaacagccactggtttaggaagccatgtggaagtaactcctcacacagcacctcctggtgtcagtgcaggcccagatgcaatcagcgaggtgctatctactctttctttagaagtcaataagtctccggaaaccaaaaatgatagaggaaatgacttggacactaaggctacaccgtcagtttcagtttcaaaaaacgtcaatgtgaaagacattctccgaagcttggttaacataccagcagatggagtcacagtggatcctgcccttctgccaccagcctgccttggagcccttggtgatctatctgtggaacaacccgtgcagttcagatcttttgacagaagtgtcattgttgcagcaaaaaagtcagcagtctcaccttccacctttaatacaagcatacctaccaatgctgtcagtgtggtttcctcagtagattcagcccaagcctcagatatgggaggagaatcaccaggcagtagatcatctaatgcaaaattgccctcagttccaacagttgattcagtttcacaagatccggtttcaaatatgagtattacagagaggcttgaacacgctttggaaaaggcagctcctctccttcgtgagatttttgtggattttgcaccttttctttctcggacacttttgggtagccatggacaagaactgcttatagaaggaacaagtctggtttgcatgaagtcgagtagttcagttgtggaattggttatgctactgtgttctcaggagtggcaaaattctattcagaagaatgcaggccttgcttttatcgaacttgtcaatgaaggaaggttgcttagccagacaatgaaggatcatctagtaagagtagcaaatgaagctgaatttatcctgagcaggcagagagcagaagatattcacagacatgcggaatttgagtcactgtgtgcccagtattctgcagacaaacgagaagatgagaagatgtgtgatcatttgataagagcagcaaaatatcgtgaccacgtgacagcaactcaactaatccagaaaattatcaacattctcacagacaagcatggagcctggggaaattctgcagtgagtcgtcctcttgagttctggcgccttgactactgggaagatgacttgcggcgccggcgacgatttgtgcgtaaccctctaggatcgacacatcctgaagcgacactaaaaacagccgtggaacatgccacagatgaagatatccttgctaaaggaaaacagtccatcaggagtcaggctttaggaaatcagaactcagaaaacgagatcctcctggaaggcgatgatgatactctgtcatccgtggatgagaaagatttagagaatcttgccggtcctgttagcctgagcacaccagctcagcttgtggccccctctgttgtagtaaagggcactctttctgtcacctcctccgaactctattttgaggtggatgaagaggatcctaacttcaaaaaaatcgaccccaagatcttggcatatacagaagggctgcatggaaaatggctgttcacagagatacgatcaatcttttctcgtcgttatcttttgcaaaatacagccctggagatctttatggcaaacagagttgctgtgatgttcaacttcccagaccctgcaacagtaaagaaagtggttaactatctacctcgtgttggcgttggaacaagttttggattgcctcaaaccagacgtatttcattagctagtccacgtcagctttttaaggcttctaatatgacccagcgatggcaacacagagagatatctaattttgagtacttgatgtttctcaacacgatagcaggacggagttataatgacttaaatcagtatccagtgtttccttgggtcatcactaattatgaatcagaagaactggatcttaccttgcccaccaacttcagagatttgtccaagccaataggagctctgaacccaaaaagagcagcattcttcgctgagcgttatgaatcatgggaagatgatcaagttccaaagtttcactatggtactcattactcaactgcaagttttgttcttgcatggctgctaagaatagaaccctttacaacttatttcctaaatttgcaaggaggcaaatttgatcatgcagatcgaactttttcatcaatttccagagcttggcgaaacagtcagcgtgatacctctgatattaaggagttgatccctgaattttattatctccctgagatgtttgtcaacttcaataattataatcttggagtgatggatgatgggacagtagtgtctgatgtcgaacttcctccttgggccaaaacctcagaagaatttgttcacataaacagattggccctggagagtgaatttgtttcctgccagcttcaccaatggattgatctcatttttggctataaacagcaaggaccagaagctgtccgagccctcaatgtgttctattacttgacctatgaaggagctgtcaatctgaattcaataactgatcctgtgttgagagaggctgttgaagctcaaatccgaagttttggacagactccttctcaactactcatagagccccatcctcccagaggttctgccatgcaagtgagtccattgatgttcacagacaaagcccagcaggatgttatcatggtcctcaagtttccctccaactcccctgttactcacgtggcagccaacacccagcctggtttggcaactcccgctgtgatcacagtcactgctaacaggttatttgcggtgaacaaatggcacaaccttcctgctcatcaaggtgctgtacaagaccagccataccagctgccagtggaaatcgatcctctcatagccagcaatacaggaatgcacaggaggcaaatcactgaccttttagaccaaagtattcaagtgcattcccagtgctttgtcatcacttcagacaaccgctatattctcgtctgtggcttctgggataaaagtttcagagtctattctacagacacaggaagattgatccaagtggtgtttggccattgggatgtcgtcacttgccttgctcgttctgagtcatatattgggggaaattgctacattctctcagggtcacgtgatgcaactcttttgctgtggtattggaatggaaaatgcagtgggattggagataacccaggtgagactgctgctcctcgggccattttgaccggccatgactatgaggtcacatgtgctgcggtgtgtgcggagctaggcctggtgttgagtggttcacaagaaggaccatgtctcatacattccatgaatggagacttgttgaggaccttggagggtcctgaaaactgcctgaaaccaaaactcattcaggcttcaagagagggtcattgtgtcatattctatgaaaacggcctcttctgtacattcagtgtgaatggaaaactccaggccacgatggaaacagatgataacataagagccatccagctgagccgagatgggcagtacctgctcacaggaggagacagaggagtggtcgtggtccggcaggtgtcggacctcaagcagctctttgcctatccaggatgtgacgctggaatccgggccatggcgctgtcttacgaccagaggtgcatcatttctggcatggcttcaggaagcattgtgctattttacaacgactttaaccggtggcatcatgaataccaaacccgctactgatggtgacagctgtacatcaactctgcccctaggatgagcagaagtacctggagcatcattctcttctaccacatctgaatgtaacttaaatttgctcaaagaagcaaaatattttttaaagttattaataattgctatttttgtagtctttgcttgacttttttgggggggattagcaaagcagaaaactggctgctgggttctgtagttttaaaaaatctatatttttagtcataatgagaagtctattttcaccaattatggaaacatacagtggagcaagtaaaccacttattccagctataatattatgaagaacatttcccatgcatctacaagcttgagaaataggattttcacagtggggaagtgggttacaatattggaataggaaaatttgatgctgtaatttgggtcctgtatttttccaaacaactgtgcttcttcagcactaatatttctgggatttaaatagtaatgtttaaattatggtaaatgtaatttaaaacatctcaattaagtctgtctatcaatattgttcttcaagcatgttttagacctagaaaagtatggtttgggggaggctattttattgtgtggttagcacaaggaatctaatttatagcaagtgtgaaatagttaccattttttcctgatctgtcatcttcatagcacaacaaaacgaaatgatggaaatgctcttgagctcacaacatttgtttttcttttaaagtaaatgcaagtaccaaagctcactactgcggtttgcctgtgcctggacaatgaggcggagccactgttgttttgttggggcacccccttccctccccgggtttgcaaatagaggctaccgggtgctgtattcagcaacacctgttttactatttgttattaaactatcatctccaccttccttttgattagcaatttgtactaagaaacgaaacaatgttatttggtggtgtataattctacttttctagtagattactgtgtggaattctgtgaaaaatatttgagaaaaggcctgtattgcataaataaattctttgtatgttgtgaactttgatctctatttctcttgcaacagacttcaagtggtccctctttttttcctacacactcagctcttctctaaaagcaaggatttggaatgaacaattcagtttgacagaaaaagctgaataaaat

SEQ ID NO: 149718 - DNA, 8826 bp, Homo sapiens
  Payload ID: 9575
  Gene Symbol: LRBA
  Gene Name: LPS-responsive vesicle trafficking, beach and anchor containing
  ENST ID: ENST00000507224
  CDS Start-End: 296-8023
cctgccctggatctccgccgccacctcggtctcgctgctcctgggcggggggtgaggacgagtccggagtatctggggtttggcgttgttgtcagcctcggggagagagattggacaaatattctccaagaggaggagggcgacgccaaggactttccacatcaactgctttggggtatctccacaagttggaagagggaccctttcgttttgcattgcgtgtgttgtgctcattaccagtgcagcgactgccgtcccagggtgactctgagttgtcctttatcgtgagctagcaatggctagcgaagacaatcgtgtcccttccccgccaccaacaggtgatgacgggggaggtggagggagagaagaaacccctactgaagggggtgcattgtctctgaaaccagggctccccatcaggggcatcagaatgaaatttgccgtgttgaccggtttggttgaagttggagaagtatccaatagggatattgtagaaactgtctttaacctgttggtaggaggacagtttgatctggaaatgaatttcattatccaagaaggtgagagtattaactgcatggtggacctactggaaaaatgtgacattacgtgccaagcagaagtctggagcatgtttacagccattctgaagaaaagcatacggaatcttcaagtctgcactgaagtaggccttgttgaaaaagtgcttgggaaaattgaaaaagttgacaatatgatagcagatcttttggttgacatgttgggagtgctggctagctataatttgacagttcgcgagctaaagcttttcttcagtaaacttcaaggagataaaggacgatggcctccacatgctgggaagttgctgtctgtgttaaagcatatgcctcagaagtatggtcctgatgccttttttaactttccaggaaagagtgctgcagctattgcattacctcctatagccaaatggccataccagaatggttttacatttcatacatggcttagaatggatcctgtaaataacatcaatgtagataaggataaaccatatttgtattgtttcagaaccagcaaaggtcttggctattctgctcattttgttggaggctgtttgattgtaacatcaataaagtcaaaaggaaaaggctttcaacactgtgtgaaatttgatttcaagccacaaaagtggtatatggttaccatagtacacatctataaccgatggaagaatagtgaacttcgatgttatgtgaatggtgagctggcttcctatggagagataacatggtttgtcaacactagcgatacctttgacaaatgtttcctgggctcatcagaaacagcagatgctaatagagtattctgtggtcagatgactgcagtttaccttttcagtgaagctctaaatgcagctcagatatttgctatttatcagttgggcctgggatacaagggtacatttaaattcaaagcagaaagcgaccttttccttgctgagcatcacaaacttttattgtacgatgggaaactctctagtgccattgcattcacgtacaatccacgggctacagatgcccagctttgtcttgaatcatctcctaaggacaacccttcaatttttgttcattcaccacatgcactcatgctccaggatgtaaaggcagttttaacacattccatccaaagtgcaatgcattcaattggaggagtacaagtactatttccactttttgcacagttggattacaggcaatatttgtctgatgagattgatttgactatatgttcaaccttgctggcctttatcatggaattgttgaagaactcaattgctatgcaggaacagatgcttgcctgtaagggcttcttggtaataggatatagccttgaaaagtcttccaaatctcatgttagcagagcagtacttgaactttgccttgcattttcaaaatatctgagtaatctgcagaatgggatgcccctgctcaagcaattgtgtgatcacgttcttcttaatcctgccatatggattcataccccagccaaggttcaactgatgctctatacttatctgtccacggaattcattggtacagtcaacatatataacaccattcggagagttggaacagtgcttctcatcatgcacacgctgaagtactactactgggcagtgaatcctcaggatcgaagtggtatcaccccaaaaggattagatggaccgcgacctaatcaaaaagaaatgctttctctacgagcattcttgttgatgttcattaagcaattagtgatgaaggattctggagtaaaggaagatgaattacaggccattcttaattacctactgactatgcatgaggatgacaatctaatggatgtcctacagctgcttgttgcattaatgtcagaacaccctaactctatgattcctgcttttgaccaaaggaatgggttacgtgttatctacaaacttctggcatcgaaaagtgaaggaatcagggtacaagctcttaaggcaatgggttattttttaaaacatctggccccaaagaggaaagcagaagtcatgcttggacatggattgttttcattgctagctgaaaggctcatgcttcagacaaatttaatcacaatgaccacatataatgtgctgtttgagattcttatagaacagattggtactcaggtgatacataaacagcatccagatcctgattcttcagtgaagatacaaaaccctcagatactaaaagtaattgcgaccctacttcgaaattctccccagtgcccagagagcatggaggttcgcagagcctttctttctgacatgattaaactttttaataacagtagagaaaacaggaggagcttgctacaatgctctgtgtggcaagaatggatgctttctctctgctattttaatcctaagaattcagatgagcaaaagataacagaaatggtatacgccatattcagaatcctgctttaccatgcagtcaaatatgagtggggtggctggcgtgtatgggtagacactttatcaatcactcattcaaaggtcacttttgaaatacacaaagaaaaccttgccaatatatttagggaacagcaaggaaaagttgatgaagaaatagggctgtgttcttcaacttcagttcaagcagcctctggcattagaagggatattaatgtttcagtaggatcccagcaaccagatacgaaggattctcctgtctgtcctcatttcaccacaaatggtaatgaaaattcaagtatagagaagacaagttcactagaatctgcatctaatattgaactgcaaactactaatacatcttatgaagaaatgaaagctgagcaagaaaatcaggagttaccagatgaaggcactttggaagaaacactgacaaatgagacaaggaatgcagatgatttagaagtatcttctgacataatagaagctgtggctatttcctctaattcttttataacaactggcaaagattcaatgactgtcagtgaagtaactgcttctataagttctccttcagaagaggatgcctcagagatgccagaattcttggataaatctatagtagaggaagaggaagatgatgattatgtggaactgaaagtagaaggcagtcctactgaggaagctaatctacccacagagctccaagataacagtttgtctccagctgcatctgaagccggtgaaaaactggacatgtttggtaatgatgacaaattaatatttcaagaaggaaaacctgttactgaaaagcaaactgatactgaaactcaagattctaaagattctggaattcagactatgacagcatcagggtcttcagctatgtcaccagaaactactgtttcccaaatagctgtagaatcagaccttggtcagatgctggaggaagggaagaaagcaactaacctcactagagaaaccaaattaattaatgattgtcatggtagtgtctctgaggcttcttctgagcaaaagattgcgaagttggatgtttccaatgttgctacagatactgagaggctggagttgaaggccagtcccaacgtggaagcacctcaacctcatcgacatgtgcttgagatatcaaggcaacatgagcagccagggcaaggaatagcaccagatgcagttaatggacaaaggagggattccagatctactgtgtttcgtattcctgagttcaactggtctcagatgcatcaacgtttgctcactgatctattattttcaatagaaacagatatacagatgtggagaagccattcaacaaagacagttatggacttcgtgaatagcagtgataatgtcatctttgtacacaacacaattcatctcatctctcaagtgatggacaatatggtcatggcttgtgggggtatactgccattgctttcagctgctacatcggctacacatgaactggaaaatattgaacctactcaaggcctttcaatagaagcctctgtgacatttttgcagaggctaattagccttgtggatgtgcttatatttgcaagttctcttggctttactgaaattgaagctgaaaaaagtatgtcatctggaggaattttgcggcagtgtctccgactagtttgtgcagtcgcagtaaggaattgcttggagtgtcaacagcattcacaactgaaaactaggggagataaagccttgaaaccaatgcatagccttattcctttagggaaatctgcagcgaagagcccagtggacattgtgactggcggtatatctccagtaagagatcttgacaggcttctacaggacatggatattaatcggcttagggcagttgttttcagagacatagaggatagcaaacaagctcaatttttagccttggcagtagtatactttatctctgttcttatggtctccaagtacagagacattttggaaccccaaaatgaaaggcatagccagtcatgtacagaaactggcagtgaaaatgagaatgtatcactctctgaaatcacaccagcagcattcagcactttaactacggcatcagtggaagaatctgaaagcacatcatctgctcgaaggagggactcaggcattggggaagaaacagccactggtttaggaagccatgtggaagtaactcctcacacagcacctcctggtgtcagtgcaggcccagatgcaatcagcgaggtgctatctactctttctttagaagtcaataagtctccggaaaccaaaaatgatagaggaaatgacttggacactaaggctacaccgtcagtttcagtttcaaaaaacgtcaatgtgaaagacattctccgaagcttggttaacataccagcagatggagtcacagtggatcctgcccttctgccaccagcctgccttggagcccttggtgatctatctgtggaacaacccgtgcagttcagatcttttgacagaagtgtcattgttgcagcaaaaaagtcagcagtctcaccttccacctttaatacaagcatacctaccaatgctgtcagtgtggtttcctcagtagattcagcccaagcctcagatatgggaggagaatcaccaggcagtagatcatctaatgcaaaattgccctcagttccaacagttgattcagtttcacaagatccggtttcaaatatgagtattacagagaggcttgaacacgctttggaaaaggcagctcctctccttcgtgagatttttgtggattttgcaccttttctttctcggacacttttgggtagccatggacaagaactgcttatagaaggaacaagtctggtttgcatgaagtcgagtagttcagttgtggaattggttatgctactgtgttctcaggagtggcaaaattctattcagaagaatgcaggccttgcttttatcgaacttgtcaatgaaggaaggttgcttagccagacaatgaaggatcatctagtaagagtagcaaatgaagctgaatttatcctgagcaggcagagagcagaagatattcacagacatgcggaatttgagtcactgtgtgcccagtattctgcagacaaacgagaagatgagaagatgtgtgatcatttgataagagcagcaaaatatcgtgaccacgtgacagcaactcaactaatccagaaaattatcaacattctcacagacaagcatggagcctggggaaattctgcagtgagtcgtcctcttgagttctggcgccttgactactgggaagatgacttgcggcgccggcgacgatttgtgcgtaaccctctaggatcgacacatcctgaagcgacactaaaaacagccgtggaacatgccacagatgaagatatccttgctaaaggaaaacagtccatcaggagtcaggctttaggaaatcagaactcagaaaacgagatcctcctggaaggcgatgatgatactctgtcatccgtggatgagaaagatttagagaatcttgccggtcctgttagcctgagcacaccagctcagcttgtggccccctctgttgtagtaaagggcactctttctgtcacctcctccgaactctattttgaggtggatgaagaggatcctaacttcaaaaaaatcgaccccaagatcttggcatatacagaagggctgcatggaaaatggctgttcacagagatacgatcaatcttttctcgtcgttatcttttgcaaaatacagccctggagatctttatggcaaacagagttgctgtgatgttcaacttcccagaccctgcaacagtaaagaaagtggttaactatctacctcgtgttggcgttggaacaagttttggattgcctcaaaccagacgtatttcattagctagtccacgtcagctttttaaggcttctaatatgacccagcgatggcaacacagagagatatctaattttgagtacttgatgtttctcaacacgatagcaggacggagttataatgacttaaatcagtatccagtgtttccttgggtcatcactaattatgaatcagaagaactggatcttaccttgcccaccaacttcagagatttgtccaagccaataggagctctgaacccaaaaagagcagcattcttcgctgagcgttatgaatcatgggaagatgatcaagttccaaagtttcactatggtactcattactcaactgcaagttttgttcttgcatggctgctaagaatagaaccctttacaacttatttcctaaatttgcaaggaggcaaatttgatcatgcagatcgaactttttcatcaatttccagagcttggcgaaacagtcagcgtgatacctctgatattaaggagttgatccctgaattttattatctccctgagatgtttgtcaacttcaataattataatcttggagtgatggatgatgggacagtagtgtctgatgtcgaacttcctccttgggccaaaacctcagaagaatttgttcacataaacagattggccctggagagtgaatttgtttcctgccagcttcaccaatggattgatctcatttttggctataaacagcaaggaccagaagctgtccgagccctcaatgtgttctattacttgacctatgaaggagctgtcaatctgaattcaataactgatcctgtgttgagagaggctgttgaagctcaaatccgaagttttggacagactccttctcaactactcatagagccccatcctcccagaggttctgccatgcaagtgagtccattgatgttcacagacaaagcccagcaggatgttatcatggtcctcaagtttccctccaactcccctgttactcacgtggcagccaacacccagcctggtttggcaactcccgctgtgatcacagtcactgctaacaggttatttgcggtgaacaaatggcacaaccttcctgctcatcaaggtgctgtacaagaccagccataccagctgccagtggaaatcgatcctctcataggtctgtcacttccttctctctttgcgattcattaagctctgtatggtggccctgaagtgtagattacagttgtttttcacttgctggttgctgggaatggaattttcctgataaaccatttgcatgcaaattggaatgcaatgagctgtggctatgctggtatttcatcaactccccctcgttggtttgcctaatttgaacaggcctaggacgcgtgtcactgaaaattaatatggatgctgtaataatgtgtgattgagaatgcgcatgaagtactgtcaggataatattggatcttttcatcactcagacttgttgatgagcaggagcaaggcacgttatgatgaattggtgcaccggtaatgtgatggagctcctttgctaggaaaattttcataataacagtggggttcttagcagcactgcgttatgaaaaataaaactgtagtgccagggtttcatcattaaaggagatcaatcctttcttcctagaccttctgttcagtctgaggggattaatgtgcaattgcagagcagtttcaaagttgaaatatattgcccagccaatggtagtgttaagatatttgtattcattttcctagggtcctacagcccaataaattgccattggaggttaaatttgttcaggggagaaaaaaatagggaggcgaccagaaagagccattgggatgaaatgagcatctgcagcagatgacttagaatatttaattgctgttaggctttttgagtagattagtcgaaatctctagtttagcatttttcatccttacgtgtggggatttcaaatgtggcatcactaagaatgttaagcctcgat

SEQ ID NO: 149719 - DNA, 814 bp, Homo sapiens
  Payload ID: 9575
  Gene Symbol: LRBA
  Gene Name: LPS-responsive vesicle trafficking, beach and anchor containing
  ENST ID: ENST00000502839
  CDS Start-End: 1-405
ggctttactgaaattgaagctgaaaaaagtatgtcatctggaggaattttgcggcagtgtctccgactagtttgtgcagtcgcagtaaggaattgcttggagtgtcaacagcattcacaactgaaaactaggggagataaagccttgaaaccaatgcatagccttattcctttagggaaatctgcagcgaagagcccagtggacattgtgactggcggtatatctccagtaagagatcttgacaggcttctacaggacatggatattaatcggcttagggcagttgttttcagagacataactaagaagtcattacatatgaacctgcaaaatatcatagattttgtcagatcacggatcacaaatatgtcaaagaattgcatcaagtggatatgttcaaattgagcctatcttctatttttctgaaactgattatatccaaaatttttgacattaagtattaacaattagtctcatttttaccattagtttctatttacaggcatgcctcattttactgtgctttgctattgcatgttgccgattactggattttttacaaattgatggtttttggcaactctgtgttgaactagtctatccatgccatttatccaacagcatgtactttatgtctttatgtcatatattggtaattcttacaatatttcaaaccttttcattattattatttatctgtcatgctgatctgtcatcagtgatctttggtattactattgtaattgtcttggggcaccacaaaccacacccatttaagacagtgaacttaataaatgtctgactgtgctacaaa

SEQ ID NO: 149720 - DNA, 633 bp, Homo sapiens
  Payload ID: 9575
  Gene Symbol: LRBA
  Gene Name: LPS-responsive vesicle trafficking, beach and anchor containing
  ENST ID: ENST00000508606
  CDS Start-End: 1-443
gctacattctctcagggtcacgtgatgcaactcttttgctgtggtattggaatggaaaatgcagtgggattggagataacccaggcagtgagactgctgctcctcgggccattttgaccggccatgactatgaggtcacatgtgctgcggtgtgtgcggagctaggcctggtgttgagtggttcacaagaaggaccatgtctcatacattccatgaatggagacttgttgaggaccttggagggtcctgaaaactgcctgaaaccaaaactcattcaggcttcaagagagggtcattgtgtcatattctatgaaaacggcctcttctgtacattcagtgtgaatggaaaactccaggccacgatggaaacagatgataacataagagtgcatcatttctggcatggcttcaggaagcattgtgctattttacaacgactttaaccggtggcatcatgaataccaaacccgctactgatggtgacagctgtacatcaactctgcccctaggatgagcagaagtacctggagcatcattctcttctaccacatctgaatgtaacttaaatttgctcaaagaagcaaaatattttttaaagttattaataattgctatttttgtagtctttgcttg

SEQ ID NO: 149721 - DNA, 5578 bp, Homo sapiens
  Payload ID: 9575
  Gene Symbol: LRBA
  Gene Name: LPS-responsive vesicle trafficking, beach and anchor containing
  ENST ID: ENST00000509835
  CDS Start-End: 1-4517
gtgataatgtcatctttgtacacaacacaattcatctcatctctcaagtgatggacaatatggtcatggcttgtgggggtatactgccattgctttcagctgctacatcggctacacatgaactggaaaatattgaacctactcaaggcctttcaatagaagcctctgtgacatttttgcagaggctaattagccttgtggatgtgcttatatttgcaagttctcttggctttactgaaattgaagctgaaaaaagtatgtcatctggaggaattttgcggcagtgtctccgactagtttgtgcagtcgcagtaaggaattgcttggagtgtcaacagcattcacaactgaaaactaggggagataaagccttgaaaccaatgcatagccttattcctttagggaaatctgcagcgaagagcccagtggacattgtgactggcggtatatctccagtaagagatcttgacaggcttctacaggacatggatattaatcggcttagggcagttgttttcagagacatagaggatagcaaacaagctcaatttttagccttggcagtagtatactttatctctgttcttatggtctccaagtacagagacattttggaaccccaaaatgaaaggcatagccagtcatgtacagaaactggcagtgaaaatgagaatgtatcactctctgaaatcacaccagcagcattcagcactttaactacggcatcagtggaagaatctgaaagcacatcatctgctcgaaggagggactcaggcattggggaagaaacagccactggtttaggaagccatgtggaagtaactcctcacacagcacctcctggtgtcagtgcaggcccagatgcaatcagcgaggtgctatctactctttctttagaagtcaataagtctccggaaaccaaaaatgatagaggaaatgacttggacactaaggctacaccgtcagtttcagtttcaaaaaacgtcaatgtgaaagacattctccgaagcttggttaacataccagcagatggagtcacagtggatcctgcccttctgccaccagcctgccttggagcccttggtgatctatctgtggaacaacccgtgcagttcagatcttttgacagaagtgtcattgttgcagcaaaaaagtcagcagtctcaccttccacctttaatacaagcatacctaccaatgctgtcagtgtggtttcctcagtagattcagcccaagcctcagatatgggaggagaatcaccaggcagtagatcatctaatgcaaaattgccctcagttccaacagttgattcagtttcacaagatccggtttcaaatatgagtattacagagaggcttgaacacgctttggaaaaggcagctcctctccttcgtgagatttttgtggattttgcaccttttctttctcggacacttttgggtagccatggacaagaactgcttatagaaggaacaagtctggtttgcatgaagtcgagtagttcagttgtggaattggttatgctactgtgttctcaggagtggcaaaattctattcagaagaatgcaggccttgcttttatcgaacttgtcaatgaaggaaggttgcttagccagacaatgaaggatcatctagtaagagtagcaaatgaagctgaatttatcctgagcaggcagagagcagaagatattcacagacatgcggaatttgagtcactgtgtgcccagtattctgcagacaaacgagaagatgagaagatgtgtgatcatttgataagagcagcaaaatatcgtgaccacgtgacagcaactcaactaatccagaaaattatcaacattctcacagacaagcatggagcctggggaaattctgcagtgagtcgtcctcttgagttctggcgccttgactactgggaagatgacttgcggcgccggcgacgatttgtgcgtaaccctctaggatcgacacatcctgaagcgacactaaaaacagccgtggaacatgccacagatgaagatatccttgctaaaggaaaacagtccatcaggagtcaggctttaggaaatcagaactcagaaaacgagatcctcctggaaggcgatgatgatactctgtcatccgtggatgagaaagatttagagaatcttgccggtcctgttagcctgagcacaccagctcagcttgtggccccctctgttgtagtaaagggcactctttctgtcacctcctccgaactctattttgaggtggatgaagaggatcctaacttcaaaaaaatcgaccccaagatcttggcatatacagaagggctgcatggaaaatggctgttcacagagatacgatcaatcttttctcgtcgttatcttttgcaaaatacagccctggagatctttatggcaaacagagttgctgtgatgttcaacttcccagaccctgcaacagtaaagaaagtggttaactatctacctcgtgttggcgttggaacaagttttggattgcctcaaaccagacgtatttcattagctagtccacgtcagctttttaaggcttctaatatgacccagcgatggcaacacagagagatatctaattttgagtacttgatgtttctcaacacgatagcaggacggagttataatgacttaaatcagtatccagtgtttccttgggtcatcactaattatgaatcagaagaactggatcttaccttgcccaccaacttcagagatttgtccaagccaataggagctctgaacccaaaaagagcagcattcttcgctgagcgttatgaatcatgggaagatgatcaagttccaaagtttcactatggtactcattactcaactgcaagttttgttcttgcatggctgctaagaatagaaccctttacaacttatttcctaaatttgcaaggaggcaaatttgatcatgcagatcgaactttttcatcaatttccagagcttggcgaaacagtcagcgtgatacctctgatattaaggagttgatccctgaattttattatctccctgagatgtttgtcaacttcaataattataatcttggagtgatggatgatgggacagtagtgtctgatgtcgaacttcctccttgggccaaaacctcagaagaatttgttcacataaacagattggccctggagagtgaatttgtttcctgccagcttcaccaatggattgatctcatttttggctataaacagcaaggaccagaagctgtccgagccctcaatgtgttctattacttgacctatgaaggagctgtcaatctgaattcaataactgatcctgtgttgagagaggctgttgaagctcaaatccgaagttttggacagactccttctcaactactcatagagccccatcctcccagaggttctgccatgcaagtgagtccattgatgttcacagacaaagcccagcaggatgttatcatggtcctcaagtttccctccaactcccctgttactcacgtggcagccaacacccagcctggtttggcaactcccgctgtgatcacagtcactgctaacaggttatttgcggtgaacaaatggcacaaccttcctgctcatcaaggtgctgtacaagaccagccataccagctgccagtggaaatcgatcctctcatagccagcaatacaggaatgcacaggaggcaaatcactgaccttttagaccaaagtattcaagtgcattcccagtgctttgtcatcacttcagacaaccgctatattctcgtctgtggcttctgggataaaagtttcagagtctattctacagacacaggaagattgatccaagtggtgtttggccattgggatgtcgtcacttgccttgctcgttctgagtcatatattgggggaaattgctacattctctcagggtcacgtgatgcaactcttttgctgtggtattggaatggaaaatgcagtgggattggagataacccaggcagtgagactgctgctcctcgggccattttgaccggccatgactatgaggtcacatgtgctgcggtgtgtgcggagctaggcctggtgttgagtggttcacaagaaggaccatgtctcatacattccatgaatggagacttgttgaggaccttggagggtcctgaaaactgcctgaaaccaaaactcattcaggcttcaagagagggtcattgtgtcatattctatgaaaacggcctcttctgtacattcagtgtgaatggaaaactccaggccacgatggaaacagatgataacataagagccatccagctgagccgagatgggcagtacctgctcacaggaggagacagaggagtggtcgtggtccggcaggtgtcggacctcaagcagctctttgcctatccaggatgtgacgctggaatccgggccatggcgctgtcttacgaccagaggtgcatcatttctggcatggcttcaggaagcattgtgctattttacaacgactttaaccggtggcatcatgaataccaaacccgctactgatggtgacagctgtacatcaactctgcccctaggatgagcagaagtacctggagcatcattctcttctaccacatctgaatgtaacttaaatttgctcaaagaagcaaaatattttttaaagttattaataattgctatttttgtagtctttgcttgacttttttgggggggattagcaaagcagaaaactggctgctgggttctgtagttttaaaaaatctatatttttagtcataatgagaagtctattttcaccaattatggaaacatacagtggagcaagtaaaccacttattccagctataatattatgaagaacatttcccatgcatctacaagcttgagaaataggattttcacagtggggaagtgggttacaatattggaataggaaaatttgatgctgtaatttgggtcctgtatttttccaaacaactgtgcttcttcagcactaatatttctgggatttaaatagtaatgtttaaattatggtaaatgtaatttaaaacatctcaattaagtctgtctatcaatattgttcttcaagcatgttttagacctagaaaagtatggtttgggggaggctattttattgtgtggttagcacaaggaatctaatttatagcaagtgtgaaatagttaccattttttcctgatctgtcatcttcatagcacaacaaaacgaaatgatggaaatgctcttgagctcacaacatttgtttttcttttaaagtaaatgcaagtaccaaagctcactactgcggtttgcctgtgcctggacaatgaggcggagccactgttgttttgttggggcacccccttccctccccgggtttgcaaatagaggctaccgggtgctgtattcagcaacacctgttttactatttgttattaaactatcatctccaccttccttttgattagcaatttgtactaagaaacgaaacaatgttatttggtggtgtataattctacttttctagtagattactgtgtggaattctgtgaaaaatatttgagaaaaggcctgtattgcataaataaattctttgtatgttgtg

SEQ ID NO: 149722 - DNA, 5283 bp, Homo sapiens; identical to SEQ ID NO: 148404
  Payload ID: 9576
  Gene Symbol:
  Gene Name: LRIG1
  ENST ID: ENST00000633161
  CDS Start-End: 605-3817

SEQ ID NO: 149723 - DNA, 5273 bp, Homo sapiens; identical to SEQ ID NO: 148403
  Payload ID: 9576
  Gene Symbol:
  Gene Name: LRIG1
  ENST ID: ENST00000631853
  CDS Start-End: 526-3807

SEQ ID NO: 149724 - DNA, 5157 bp, Homo sapiens
  Payload ID: 9577
  Gene Symbol: LRP2BP
  Gene Name: LRP2 binding protein
  Uniprot ID: Q9P2M1
  ENST ID: ENST00000328559
  CDS Start-End: 813-1856
gcatcatggaatgatataaaaatgcagctttccaatcacactaagggtctctctatttcttctcttgaccaccaatcaggaacctttgctggaagcttgtttctgattggtgaaagtaagccataacagtggaatgccaaggagtaaatacaaaagtgtagcaacaactgagtttgctgtctcactaccctcagcctaggccaacctggactccttcaccccaaatgaggtgaccgctacattttatatgaagacactgatttaccattcaactgtgatccatcttataacatggcaatccaatacagacaggaagataaaactcaacaacagctaaaataaagtgtattcccaggtaaaatagacaagtgctttaatttgaaatggattcgtccgatgagtgtcagttacaagggcagagaaggtaccagtgcagaagagctctgactgtgggcagtgtcaccaggtcccactaagtggcaacacttgtgctgggtgacttgacccatcttgatgtataaacccatagccagacaggacgtgcaaacaggtctcatggtgaatgcgatgctgtggaaaatgacatggagaatggctgtctctcagctagggaggagggtcttggtgtcctagtaaagaatgttcacgtcctggagttggtggttggtgttctatctaggcgatgagagaaggatgcttttcctaatgagcacctggtgggaatagagtctctctttgcacttcgctggaggaagaaatttctaccacttattttttcttcttgcttatagaatacacattgcagaaaaaggatgaagttgaccagtgaaaagttgcccaagaaccccttttatgcctctgtatctcagtatgctgctaaaaaccaaaaatttttccagtggaaaaaggaaaagactgattacacccatgctaatttggtggataaggcattgcagctcttgaaggaaagaatactgaaaggagacactctggcatatttcctacgaggtcaactatattttgaagagggatggtatgaagaagcattagaacagtttgaagaaatcaaggagaaagaccatcaagcaacttaccagctaggagtgatgtactatgatgggctggggaccactctagacgctgagaaaggggtggactatatgaagaaaattcttgattctccatgtcccaaagcaagacacttaaaatttgcagctgcttacaacctcggaagagcttattatgaaggaaaaggtgttaaacgatcaaatgaggaagctgaaagactgtggcttatcgcagcagacaatggaaatcccaaagctagtgtgaaggctcaaagtatgctcgggctgtattactcaaccaaggagcccaaggagttagaaaaggcattttactggcattccgaagcatgtggcaatgggaatctggagtcccagggtgcacttgggctcatgtacttgtatggacaaggcatccggcaggatacggaagctgccctgcagtgcttaagagaagcagcagaacgcggaaacgtctatgctcaagggaatctcgtggagtattactataagatgaaattttttacaaagtgtgttgcattttccaaaaggatcgctgactatgatgaggttcacgacatccccatgatcgcccaggtcacagactgtctcccggagttcatcggcagaggcatggcaatggcatccttctaccacgcaaggtgtcttcagcttggcttgggcatcaccagggatgaaacaaccgctaaacactattattctaaagcttgtcgtctgaatcccgcattggcagatgaacttcactccttacttattcgtcaaagaatttagaccacaatgtatttcaacaaagatcatcaatgctaacacctcacaatgtgtgtatttttacagtagctatgtttggttattttgcacatcacaaattacactatcctgggtattttacaggtgacatgttacttcgttcttgaattcgtacgctgttaagttttgcaacttgaaacctagacacaaggtcaaattgctggaagagtcctcagaggtccacctcttaccctacagactggccgagaccatatcaagtattaaaaccattctatacagcaagtatcgtttatcctttcttaaacaccgagtctccaaaaatacttagtttagctttagtttagtaagttcagaagtagaaacaaacttatttaaaaccatcatttgaaagtttaattctttaaatttgtctcttagttttgtgaattttgaataataatgtttaaattttgtttcagtcatttaaaatttaaattttcagtcatttaaaattttaaaaatttaaaatttcacaaaactaagggtaaaagacatttaaagaattaaacttaaataagtgtgtgcagcatttctacttctgaagttattaaagctaaaactgcactaagccttttgagacatcctttattcttaaaaagctcataaataattggcttattacatataaacttcaaaaaagtgggttataagacattgctttagaatcttgcccctccaaatcttccctcaaagatcttaatgagtaaaacaactgctacatacatatgcagaatgtgtaataaaacaaaaagcaattgctatatgaaaatattcgtaagaaaagtaaagcaaattgtttctttgtgcttcagctcattttccatatttttaaaaccctgtggtaaaagcctcaatgaaatcatttacaagaactacaattaaatattgttaaaattagcaaaaggctttccgtatatagatgacatctatgaaggcaaaaggtgacagtaaaaacagtaagatccatatgcataagattgtacaaggctattcatttgtgaaacaaatatacatatcgaagacaggtctcagagataccttaactattcctttttttataaacatattaaaggatgtggctttattttataaatcacaaccatcccaacagtggatttaaacaagatttctttttagtaatgggaaaatgcaattaatatggaggtgatagtcactaagaactgttgaatggcagaaaagtatttgctctcgttttatgttctggcttgtctgtattgcctgaacttcattttgtctttgtgtaagggaagaaatttcaacagactcgggtttgagatatcctcaaatggtcatgtatttctgtctcaaatctcttaataccacccatgtaacattccttcaaccacttgaagatccaaattcccaactagtattctcttctccacacttaatccagttcctaaagattattattattattattattattatttttttttttttgagacggagtctcctgacctaatcttagcccggcgcagtggctcacgtctgtaatcccagcactttgggaggctgaggcgggcagatcatgaggtcaggagtttgagaccaggctggccaacgtggtgaaaccccgtctctactaaaaatacaaaaattagccgggcgtgatggcggacgcctgtagtcccagctactcgggaggctgagacagaagaactgcttgaaaccaggaggcagaggttgcagtgagctgagatcgcgcaaattgcactccagcctcggtgacaagagcgagactccatctcaaaaaaaaataaaaagaatcttaaaataggaacataataaaagatcggccctaagtaaagagcactttttaaactgccattaaagatgggtttcagaaatcataaactttgacgtgtgccatacatggtaacatgctatgcttatatgtcttctataaatccaatgcagaatttaaaatttcagtttactctagttaccataaagctaatgctctggcacaagcgagtccctgcaaactaccactgctgaggacagtagtaaaccccttgacctgagactgcggtgagtctgtaactcgagtgcattgagacttccagatcattactcttacacacacacacacacacacacatacacacacacacactccttctctaagattccttgtagctgatatctcatggaaaaatgacattttatcataaataaatatagagacaaaataatagtgatctttctcattcgcaatgtaaacttaacagctacagtttaaatgatagcatagaattatgcctaaaatagacatttcccataattgtattgtgataagttcttcaggcttgacaacttcacattgcctctcttccttgaatgtattttatctggtcttttctatatagtcttttgaaggataatttttatcaatagccaactttgggtatttttttaagtgtcaaatatcatcatggtttgaaaaaaggataaaaaagctataactaaaaaaatcttaaggataacatttggtttactaatttttaatcatttatctttcagaacttgtttcttatcaagaagttagcaggtatgatatgtatatcatacgtatataaactggcataggttacatcctagggcatgaggggagtatctttcagggattcaaatggaatttttacctgttacttgtttaattgttttgttttcaatattcttggggattagacaggggaaggtattttattactgcataatagatggtgaaacccaggaaaattaagtacttgtgcatggccccactatcaataacacaaagtctgtactctggatctcccctaatgtccctgtggtctaaacggcttgataatacaaccgagcccctgaagtagctgccctcctctttccgctcccccatctcggccctgcccatactccaagggtcagctcccatctctcctccctaatgcctcacttcaagcactaatttggctctttctgctcactaaaaatcatatattttacagatttattttgtttctggagaaggcagcaaacttttacttccctgcagaagtagttaagtacatagtgttttctctaaaaaggcatttgataaatatttgaacagcctgtagagtttcaacctctttgagatataagtatcttaaatatcatagagcactgtgattcatttttatattttattgctttgaatgctcaaactatgggaaatctttggtaaaaataaagacaataaaatcttcacaataacttt

SEQ ID NO: 149725 - DNA, 685 bp, Homo sapiens
  Payload ID: 9577
  Gene Symbol: LRP2BP
  Gene Name: LRP2 binding protein
  ENST ID: ENST00000511404
  CDS Start-End: 226-685
aaaagtgtagcaacaactgagtttgctgtctcactaccctcagcctaggccaacctggactccttcaccccaaatgaggtgaccgctacattttatatgaagacactgatttaccattcaactgtgatccatcttataacatggcaatccaatacagacaggaagataaaactcaacaacagctaaaataaagtgtattcccagaatacacattgcagaaaaaggatgaagttgaccagtgaaaagttgcccaagaaccccttttatgcctctgtatctcagtatgctgctaaaaaccaaaaatttttccagtggaaaaaggaaaagactgattacacccatgctaatttggtggataaggcattgcagctcttgaaggaaagaatactgaaaggagacactctggcatatttcctacgaggtcaactatattttgaagagggatggtatgaagaagcattagaacagtttgaagaaatcaaggagaaagaccatcaagcaacttaccagctaggagtgatgtactatgatgggctggggaccactctagacgctgagaaaggggtggactatatgaagaaaattcttgattctccatgtcccaaagcaagacacttaaaatttgcagctgcttacaacctcggaagagcttattatgaaggaaaaggtgttaaacgatcaaatg

SEQ ID NO: 149726 - DNA, 3055 bp, Homo sapiens
  Payload ID: 9577
  Gene Symbol: LRP2BP
  Gene Name: LRP2 binding protein
  ENST ID: ENST00000510776
  CDS Start-End: 1973-2938
gcaatttattgtctaaaatagcatcatggaatgatataaaaatgcagctttccaatcacactaagggtctctctatttcttctcttgaccaccaatcaggaacctttgctggaagcttgtttctgattggtgaaagtaagccataacagtggaatgccaaggagtaaatacaaaagtgtagcaacaactgagtttgctgtctcactaccctcagcctaggccaacctggactccttcaccccaaatgaggtgaccgctacattttatatgaagacactgatttaccattcaactgtgatccatcttataacatggcaatccaatacagacaggaagataaaactcaacaacagctaaaataaagtgtattcccaggtaaaatagacaagtgctttaatttgaaatggattcgtccgatgagtgtcagttacaagggcagagaaggtaccagtgcagaagagctctgactgtgggcagtgtcaccaggtcccactaagtggcaacacttgtgctgggtgacttgacccatcttgatgtataaacccatagccagacaggacgtgcaaacaggtctcatggtgaatgcgatgctgtggaaaatgacatggagaatggctgtctctcagctagggaggagggtcttggtgtcctagtaaagaatgttcacgtcctggagttggtggttggtgttctatctaggcgatgagagaaggatgcttttcctaatgagcacctggtgggaatagagtctctctttgcacttcgctggaggaagaaatttctaccacttattttttcttcttgcttatagaatacacattgcagaaaaaggatgaagttgaccagtgaaaagttgcccaagaaccccttttatgcctctgtatctcagtatgctgctaaaaaccaaaaatttttccagtggaaaaaggaaaagactggtacaaatcctgatatttaagcttcccttggaaaacactttaacagttcattttgcatgctagagcaaacgagacaagaaataatgtgttttattgatttcaaggaagtggttaatcattagtccttttgagttttcccgcaagaatctgtgaaattgctcatttatctggtagcaaatcgtcagtgaggtctcacagatagttaggtcttgattttactctcaggacttaaggacatgcttctagaaaacagaaagcagatgtcacgtttgttaaagagaacaatgccaggcttgacttgcaattattatttaaataccttatcttccctaaagtcttaaaaatgttatattagggatgggttgctcatttggttagaggaactctcattaaggctcaaattaagaatttaactcacctctccagagagctttgcccattgaagacaaaccaatgcatagacttatacccagccctgcactgttagggctctacttggccatgagcagggttagtgtgaaaccaatcaacaagtattgtttgttgttgttgttgttgttttgagatggagtttcgctcttgttgcccaggcttgagtgcagtgatgcaatcttggctcaccgcagcctccgcctcctggggtcaagctattctcctgcctgagtctcccgagtagctgggattataggcatgcaccaccacgccctgctaattttgcatttttagtagagacggggtttctccatgttggtcaggctagtcttgaactcccaaactcaggtgatccacccgcctcggcctcccagagtgctgagatttacaggcgtgagccaccgcgcccggccagtattgctttattacacaaggcacagtgttagggcctgtgaccatgacgttttttcaggtaatatttcttccttgagctaaggaggccagttgtaggaatgagcactagaaagcaagaatgtcaacagtgttagatggattttatatgattcattacttcaagagagaaaattcatattgtgtggttgatggaattccttacctttttaaaatcagattacacccatgctaatttggtggataaggcattgcagctcttgaaggaaagaatactgaaaggagacactctggcatatttcctacgaggtcaactatattttgaagagggatggtatgaagaagcattagaacagtttgaagaaatcaaggagaaagaccatcaagcaacttaccagctaggagtgatgtactatgatgggctggggaccactctagacgctgagaaaggggtggactatatgaagaaaattcttgattctccatgtcccaaagcaagacacttaaaatttgcagctgcttacaacctcggaagagcttattatgaaggaaaaggtgttaaacgatcaaatgaggaagctgaaagactgtggcttatcgcagcagacaatggaaatcccaaagctagtgtgaaggctcaaagtatgctcgggctgtattactcaaccaaggagcccaaggagttagaaaaggcattttactggcattccgaagcatgtggcaatgggaatctggagtcccagggtgcacttgggctcatgtacttgtatggacaaggcatccggcaggatacggaagctgccctgcagtgcttaagagaagcagcagaacgcggaaacgtctatgctcaagggaatctcgtggagtattactataagatgaaattttttacaaagtgtgttgcattttccaaaaggatcgctgactatgatgaggttcacgacatccccatgatcgcccaggtcacagactgtctcccggagttcatcggcagaggcatggcaatggcatccttctaccacgcaaggtgtcttcagcttggcttgggcatcaccagggatgaaacaaccgctaaacactattattctaaagcttgtcgtctgaatcccgcattggcagatgaacttcactccttacttattcgtcaaagaatttagaccacaatgtatttcaacaaagatcatcaatgctaacacctcacaatgtgtgtatttttacagtagctatgtttggttattttgcacatcacaaattacactatcctgggtatttta

SEQ ID NO: 149727 - DNA, 2302 bp, Homo sapiens
  Payload ID: 9577
  Gene Symbol: LRP2BP
  Gene Name: LRP2 binding protein
  Uniprot ID: Q9P2M1
  ENST ID: ENST00000505916
  CDS Start-End: 1143-2186
aaggatctgcttagaaaccaaagctccagccgagtgtttcttttcccctacatttttagtgattcccttctgttgatgcctttgaaagctcggagaaataaatacgtttattgttatgctgttagaaaacaagttcatgcttgtcctctaaagataagtggtcttttcattctactttttgttttgtagtaagagccataaaatttgcaatcgcaagtttatgttgttatacttagttacccaaggggtagttttaagcatttttattcatatgaatatttgaatataaatgtgtgttcaaatatatagaatcgttcttatattccacatttttaatatttaaactattcacaatatcttttaatgatgtttaaagaacggcagtgtagagatactgttgtcagatttgtgaggtgagcacacgttgatattgccagtttcgcttttgtttatcaattcaataagcactgctttttaaaacacgtgttgaagcttcaggtttgcacagaagttcattttcaggaattcctaactaataaagggtatcagacacgttcttacagttttgaacataaatactgcagttagcatatgtagtgggatatttgtgtggtgaaagtgcctccatatttcatatcttttctttgaaacaagattctgttcagtatgcattaagtggtagttattttttaacttcctgttacatacgtaaatttcataaggaaaggaaatttggggagtcgttacagcttttctccctttaatcacagcgtacctgtccattgctcacattgttttcagaaaaaaaagttgtatctcagctggatatctgacttgactttagtaatgggcctagaaactataaactgaacaaagcttataatgcacaaaaacaggataagtacatttgggggacaatatcttactggcaagtaactggagtttcaccaggcgtgtagcaggtgggatcaattttctaaaacggaagatgatctaagatgcatattttataggcgttctcctaagcagtgctaattctacatgttttaattgctggtagatgcgtttccagaacgaggatgccatttacagcgagtgttaaaaaaaacgttggatgatgaaatacacattgcagaaaaaggatgaagttgaccagtgaaaagttgcccaagaaccccttttatgcctctgtatctcagtatgctgctaaaaaccaaaaatttttccagtggaaaaaggaaaagactgattacacccatgctaatttggtggataaggcattgcagctcttgaaggaaagaatactgaaaggagacactctggcatatttcctacgaggtcaactatattttgaagagggatggtatgaagaagcattagaacagtttgaagaaatcaaggagaaagaccatcaagcaacttaccagctaggagtgatgtactatgatgggctggggaccactctagacgctgagaaaggggtggactatatgaagaaaattcttgattctccatgtcccaaagcaagacacttaaaatttgcagctgcttacaacctcggaagagcttattatgaaggaaaaggtgttaaacgatcaaatgaggaagctgaaagactgtggcttatcgcagcagacaatggaaatcccaaagctagtgtgaaggctcaaagtatgctcgggctgtattactcaaccaaggagcccaaggagttagaaaaggcattttactggcattccgaagcatgtggcaatgggaatctggagtcccagggtgcacttgggctcatgtacttgtatggacaaggcatccggcaggatacggaagctgccctgcagtgcttaagagaagcagcagaacgcggaaacgtctatgctcaagggaatctcgtggagtattactataagatgaaattttttacaaagtgtgttgcattttccaaaaggatcgctgactatgatgaggttcacgacatccccatgatcgcccaggtcacagactgtctcccggagttcatcggcagaggcatggcaatggcatccttctaccacgcaaggtgtcttcagcttggcttgggcatcaccagggatgaaacaaccgctaaacactattattctaaagcttgtcgtctgaatcccgcattggcagatgaacttcactccttacttattcgtcaaagaatttagaccacaatgtatttcaacaaagatcatcaatgctaacacctcacaatgtgtgtatttttacagtagctatgtttggttattttgcacatcacaaattacactatcctgggtatttt

SEQ ID NO: 149728 - DNA, 2585 bp, Homo sapiens
  Payload ID: 9578
  Gene Symbol: LRRN4CL
  Gene Name: LRRN4 C-terminal like
  Uniprot ID: Q8ND94
  ENST ID: ENST00000317449
  CDS Start-End: 479-1195
ggatttttaccaaaacagcattttgcggctcaggcccgtgctgttcgcagctgttttcctctaatatcagccaggtggccgccttctatgttcccctccccatcccgttgtatgacttcagccttcggattctaagctcctggctgctttccacattccactccccttccagaacccaggcatcctgggctccagctgaaaccattgcatgtggctttccccatccctggccccgtgactcagtccctctgaagggagcagccctcttttttggcaatcaccagggaggtggggggaggaggaggggagctaggtggtgacatcacagtcgaaggttataaaagcttccagccaaacggcattgaagttgaagatacaacctgacagcacagcctgagatcttggggatccctcagcctaacacccacagacgtcagctggtggattcccgctgcatcaaggcctacccactgtctccatgctgggctctccctgccttctgtggctcctggccgtgaccttcttggttcccagagctcagcccttggcccctcaagactttgaagaagaggaggcagatgagactgagacggcgtggccgcctttgccggctgtcccctgcgactacgaccactgccgacacctgcaggtgccctgcaaggagctacagagggtcgggccggcggcctgcctgtgcccaggactctccagccccgcccagccgcccgacccgccgcgcatgggagaagtgcgcattgcggccgaagagggccgcgcagtggtccactggtgtgcccccttctccccggtcctccactactggctgctgctttgggacggcagcgaggctgcgcagaaggggcccccgctgaacgctacggtccgcagagccgaactgaaggggctgaagccagggggcatttatgtcgtttgcgtagtggccgctaacgaggccggggcaagccgcgtgccccaggctggaggagagggcctcgagggggccgacatccctgccttcgggccttgcagccgccttgcggtgccgcccaacccccgcactctggtccacgcggccgtcggggtgggcacggccctggccctgctaagctgtgccgccctggtgtggcacttctgcctgcgcgatcgctggggctgcccgcgccgagccgccgcccgagccgcaggggcgctctgaaaggggcctgggggcatctcgggcacagacagccccacctggggcgctcagcctggcccccgggaaagaggaaaacccgctgcctccagggagggctggacggcgagctgggagccagccccaggctccagggccacggcggagtcatggttctcaggactgagcgcttgtttaggtccggtacttggcgctttgtttcctggctgaggtctgggaaggaatagaaaggggcccccaatttttttttaagcggccagataataaataatgtaacctttgcggtttaagaggataaaatggaggatattattatgtgggtatttatatgacctttgtaaccatttaaaaatgtaaaaacgacctgacttagtaatgcgaacctatagtagcagctactccagaggctgaaatgggaggatctcttgagcccaggagttggagtccagtccagccagggcaacacagccagacgcccttgttttttattttgttttgttttggttttttgttttttgaggagtttccctctgtcacacaagctggagggcaatggcgccatctcagctcactgcaacgtccacctcctgggttcaagcgattctcctgcctcagcatcctaattagttgggattacaggcgcccaccaccatgcccggctaatttttgtgtttttttagtagagacggggtttcaccatgttgtcaggctggtctcaaactcctgacctcaggtactccacccgccttggtctctcaaagtgctgggattacaggcataagccactgtgcccaggcagacccccttctttaaagatgtaaaacccggccgggcgcggtggctcacgcctgtaatcccagcactttgggaggctgaggcgggcagatcacgaagtcaggagatcgagaccatcctggctaacacggtgaaaccccgtctctactaaaaatacaaaaattagccgggcatggtggtgggtacctgtagtcccagctactccggaggctgaggcaggagaatggcgtgaacccgggaggcggatcttgcagtgagcggagattgcaccactgcactccagcctgggtgacagagcaagactccctctcaaaagaaaaagaaaaaagatgtaaaaaccattcttagtttgtgggccttacaaatcaggccactggcccattgcttgtagttagttgatccatgtcatgcaccctaaaaatggctctgtcactgtgagtggcttcagtaggattttgagaataagtttatattcttgctaggtaaaacaaaacaaaaacgacagtaataccaaggaatctccccccccttttaccctccatttgtgtttattgcatatccactataacaacattaaaggacctttaaaaggaagtaa

SEQ ID NO: 149729 - DNA, 2548 bp, Homo sapiens
  Payload ID: 9579
  Gene Symbol: LSM14B
  Gene Name: LSM family member 14B
  Uniprot ID: Q9BX40
  ENST ID: ENST00000279068
  CDS Start-End: 161-1318
ccgcgcaggcccctcgggcggtggcgaggaggcgcccaggcggaggcggcggcgggcggaggagcgcaggagcgggcggccaggccaccgcgcggcggcggagcgggccgcggcccggcgctccttccccaccgcggcccgacgcaccccggccgccgccatgagcggctcctcaggcaccccgtatctgggcagcaagatcagcctcatctccaaggcgcagatccgctacgagggcattctctacaccatcgacaccgacaactccaccgtggcgctcgccaaagtgaggtcctttggcactgaagaccgtcccacagataggcctgcgccccccagagaggagatttatgagtacatcattttccgaggaagtgacatcaaggatatcactgtgtgtgaacctccgaaagctcagcacacactcccgcaggatcccgccattgttcagtcttccctgggttctgcctccgcctcgcccttccagccgcacgtgccttacagccctttccgagggatggcgccctacggcccgctggcggccagctccctgctcagccagcagtatgccgcctccctgggtctaggagctggttttccatccatcccagtcggcaagagccccatggtggagcaggctgtgcagactggttctgctgacaacctgaatgctaaaaagctgttacctggcaagggcaccacagggacgcagctcaacggtcgtcaggcccagccgagcagcaagacggccagcgatgtagtccagccggcagctgtgcaagctcaagggcaggtgaatgacgagaacagaagacctcagaggaggcgatcaggaaacaggcgaacaaggaatcgctccagagggcaaaaccgtccaactaacgttaaggaaaacacaatcaaatttgagggtgactttgatttcgagagtgcaaatgcccagttcaaccgagaggagcttgacaaagaatttaagaagaaactgaattttaaagatgacaaggctgagaagggggaagagaaggacctggctgtggtgacccagagtgccgaagcgcccgctgaggaagaccttctggggcccaactgctactatgacaaatccaagtcgttcttcgacaacatctcttctgaactcaagaccagctccaggcggacgacgtgggccgaagagaggaagctcaacacagagacctttggggtgtcagggaggtttcttcgtggccgcagttctcggggcggattccgaggaggcaggggcaatgggaccacccgtcgcaaccccacttcccacagggccgggactggcagggtgtgagggtgcagccaaaggctcctactgaagtggcgcataactgacgctgtgtgtgtcaggacgcgaggaaaacgctgcacttacagggagaggtggtcactttgtttacggagtttggaagagacccatactgctacttgtgttttggacttaactgaacttggacatggtctgagttagaaccacttgttttggggaagtattcatgggtaacctctttgaggtctctttatctgtgtttcctttttagttgcgcatagcctaattctaaggttttggtattttgcaaaaaggtttctatagtgaaagctgaatccttactttgtgacttttttttttttttttaatgacaagctttgacttttaaaagtggaaccaaatctgttggcagaggtggcagccaagtacatctctgtaacccagctggcccctggtgctgttggcctggcaccccactgccaagggtggggtctcaggagtcaggcagggccagcacagggtggcgtggggggcaggggtgggtgggtggagggcacggaaggggttttcccatggatcatgttgtataagtgaaccagaccaccctgatggcatccacagtgatgtcaaggttggggctggccaggggtgggtggactagaagcatttgggagtagtggccaggggccctggacgctagccacggagctgctgcacagagcctggtgtccacaagcttccaggttggggttggagcctgggatgagccccggcagcgccttggcccttctgtggtccctgccagcctctgacctgggccggtcagtcattgctggactctggccacacactggcgttctcatccacttggaaacaagccagtcttttctgcaaggtcagttgaccaagagcatatttcccctctgttgtacatcgttgttttgtgtttgtgttgtaacagtgggtggagggagggtggggtctacatttgttgcatgagtcgatgggtcagaactttagtatacgcatgcgtcctctgagtgacagggcattttgtcgaaaataagcaccttggtaactaaacccctctaatagctataaaggctttagttctgtattgattaagttactgtaaaagcttgggtttatttttgtaggacttaatggctaagaattagaacatagcaagggggctcctctgttggagtaatgtaaattgtaattataaataaacatgcaaacctttaaaatttt

SEQ ID NO: 149730 - DNA, 811 bp, Homo sapiens
  Payload ID: 9579
  Gene Symbol: LSM14B
  Gene Name: LSM family member 14B
  ENST ID: ENST00000279069
  CDS Start-End: 141-811
gtggcgaggaggcgcccaggcggaggcggcggcgggcggaggagcgcaggagcgggcggccaggccaccgcgcggcggcggagcgggccgcggcccggcgctccttccccaccgcggcccgacgcaccccggccgccgccatgagcggctcctcaggcaccccgtatctgggcagcaagatcagcctcatctccaaggcgcagatccgctacgagggcattctctacaccatcgacaccgacaactccaccgtggcgctcgccaaagtgaggtcctttggcactgaagaccgtcccacagataggcctgcgccccccagagaggagatttatgagtacatcattttccgaggaagtgacatcaaggatatcactgtgtgtgaacctccgaaagctcagcacacactcccgcaggatcccgccattgttcagtcttccctgggttctgcctccgcctcgcccttccagccgcacgtgccttacagccctttccgagggatggcgccctacggcccgctggcggccagctccctgctcagccagcagtatgccgcctccctgggtctaggagctggttttccatccatcccagtcggcaagagccccatggtggagcaggctgtgcagactggttctgctgacaacctgaatgctaaaaagctgttacctggcaagggcaccacagggacgcagctcaacggtcgtcaggcccagccgagcagcaagacggccagcggaaacaggcgaacaaggaatcgctccagagggcaaaaccgtccaactaacgttaaggaaaacacaatcaaatttga

SEQ ID NO: 149731 - DNA, 1239 bp, Homo sapiens
  Payload ID: 9579
  Gene Symbol: LSM14B
  Gene Name: LSM family member 14B
  ENST ID: ENST00000361670
  CDS Start-End: 494-1239
ggagcagggcggctcccgtcagcgggcctcctccccgccagcctggggggatccctgcgggggagcctcgaggtcgggtggcggggccagtgtcccggcgtctcccgaaggctgggggtggggtcacaacacgcgaatcctgcaagcctttctggaacttattagacagctggggccttgatcctgaacaaataccgcgtcctaatgcggcctcctgccaaggcagaagcatccgttggcagccagatgccccggtttaaacgtgaggtcctttggcactgaagaccgtcccacagataggcctgcgccccccagagaggagatttatgagtacatcattttccgaggaagtgacatcaaggatatcactgtgtgtgaacctccgaaagctcagcacacactcccgcaggatcccgccattgttcagtcttccctgggttctgcctccgcctcgcccttccagccgcacgtgccttacagccctttccgagggatggcgccctacggcccgctggcggccagctccctgctcagccagcagtatgccgcctccctgggtctagagaagttggtaagccctccagcctcagccgctgcttccagccctagctcttctccatctccacagcccgtttcagagcttgacttgtcctcagagccacagcagctcactgccaagggagctggttttccatccatcccagtcggcaagagccccatggtggagcaggctgtgcagactggttctgctgacaacctgaatgctaaaaagctgttacctggcaagggcaccacagggacgcagctcaacggtcgtcaggcccagccgagcagcaagacggccagcgatgtagtccagccggcagctgtgcaagctcaagggcaggtgaatgacgagaacagaagacctcagaggaggcgatcaggaaacaggcgaacaaggaatcgctccagagggcaaaaccgtccaactaacgttaaggaaaacacaatcaaatttgagggtgactttgatttcgagagtgcaaatgcccagttcaaccgagaggagcttgacaaagaatttaagaagaaactgaattttaaagatgacaaggctgagaagggggaagagaaggacctggctgtggtgacccagagtgccgaagcgcccgctgaggaagaccttctggggcccaactgctactatgacaaatccaagtcgttcttcgacaacatctcttctgaactcaagaccag

SEQ ID NO: 149732 - DNA, 1079 bp, Homo sapiens
  Payload ID: 9579
  Gene Symbol: LSM14B
  Gene Name: LSM family member 14B
  ENST ID: ENST00000370915
  CDS Start-End: 207-872
cctctcagagccccagtcgcgcgccccttcttggttcgctcggtgcccgcgcaggcccctcgggcggtggcgaggaggcgcccaggcggaggcggcggcgggcggaggagcgcaggagcgggcggccaggccaccgcgcggcggcggagcgggccgcggcccggcgctccttccccaccgcggcccgacgcaccccggccgccgccatgagcggctcctcaggcaccccgtatctgggcagcaagatcagcctcatctccaaggcgcagatccgctacgagggcattctctacaccatcgacaccgacaactccaccgtggcgctcgccaaagtgaggtcctttggcactgaagaccgtcccacagataggcctgcgccccccagagaggagatttatgagtacatcattttccgaggaagtgacatcaaggatatcactgtgtgtgaacctccgaaagctcagcacacactcccgcaggatcccgccattgttcagtcttccctgggttctgcctccgcctcgcccttccagccgcacgtgccttacagccctttccgagggatggcgccctacggcccgctggcggccagctccctgctcagccagcagtatgccgcctccctgggtctagagaagttggtaagccctccagcctcagccgctgcttccagccctagctcttctccatctccacagcccgtttcagagcttgacttgtcctcagagccacagcagctcactgccaagggtaacagcagtttgggagaactgcatgctgtcttgcaaaccattctgagagcgaggggtaaagcagcagacagaatgacagtagctgtagcagatcatttgccaagcccatgcagccgctgagctgcttgttttgcttcagcatgtagtcctgattgatgaactctcagtgttaaagaagggattacgaagaatcagcggagtagtttgttctctctccctgggtccaggttctctgttgacctgtaccatgactaccacatacgggaaacttcactgttcacagaaagtcatttccctggggtttttgctgggtcctaaatgtgttcc

SEQ ID NO: 149733 - DNA, 1073 bp, Homo sapiens
  Payload ID: 9579
  Gene Symbol: LSM14B
  Gene Name: LSM family member 14B
  ENST ID: ENST00000400318
  CDS Start-End: 186-1073
cgccccttcttggttcgctcggtgcccgcgcaggcccctcgggcggtggcgaggaggcgcccaggcggaggcggcggcgggcggaggagcgcaggagcgggcggccaggccaccgcgcggcggcggagcgggccgcggcccggcgctccttccccaccgcggcccgacgcaccccggccgccgccatgagcggctcctcaggcaccccgtatctgggcagcaagatcagcctcatctccaaggcgcagatccgctacgagggcattctctacaccatcgacaccgacaactccaccgtggcgctcgccaaagtgaggtcctttggcactgaagaccgtcccacagataggcctgcgccccccagagaggagatttatgagtacatcattttccgaggaagtgacatcaaggatatcactgtgtgtgaacctccgaaagctcagcacacactcccgcaggatcccgccattgttcagctgaacaagcgccctgatgaaggcgtgcggggtgatgggatggccttcgccgttctcacccgatgtctcgttgttcagtcttccctgggttctgcctccgcctcgcccttccagccgcacgtgccttacagccctttccgagggatggcgccctacggcccgctggcggccagctccctgctcagccagcagtatgccgcctccctgggtctaggagctggttttccatccatcccagtcggcaagagccccatggtggagcaggctgtgcagactggttctgctgacaacctgaatgctaaaaagctgttacctggcaagggcaccacagggacgcagctcaacggtcgtcaggcccagccgagcagcaagacggccagcgatgtagtccagccggcagctgtgcaagctcaagggcaggtgaatgacgagaacagaagacctcagaggaggcgatcaggaaacaggcgaacaaggaatcgctccagagggcaaaaccgtccaactaacgttaaggaaaacacaatcaaatttgagggtgactttgatttcgagagtgcaaatgcccagttcaaccgagaggagcttgacaaagaa

SEQ ID NO: 149734 - DNA, 1147 bp, Homo sapiens
  Payload ID: 9580
  Gene Symbol: LSM1
  Gene Name: LSM1 homolog, mRNA degradation associated
  Uniprot ID: O15116
  ENST ID: ENST00000311351
  CDS Start-End: 397-798
ccgaaagctgagggacggaggtcagtgactctggggtctcgggaacccggagacgaaggaagacaccgtgttccttaagagggagtatacgtttcctcgccatttatccaatggagtttcctcttacctacttaacaggaacagggaaagggtgtcccccaacggtacggctgccccgcctcttcctgggggcccacacgtgttacaggaagtgggtaagggtaatatggaggagcttccggcagcccccggcggctgaaagccggggcagaagtgctggtctcggtcgggattccgggcttggtcccaccgaggcggcgactgcggtaggagggaagaggttttggacgcgctggcctcccgccgctgtgcattgcagcattatttcagttcaaaatgaactatatgcctggcaccgccagcctcatcgaggacattgacaaaaagcacttggttctgcttcgagatggaaggacacttataggctttttaagaagcattgatcaatttgcaaacttagtgctacatcagactgtggagcgtattcatgtgggcaaaaaatacggtgatattcctcgagggatttttgtggtcagaggagaaaatgtggtcctactaggagaaatagacttggaaaaggagagtgacacacccctccagcaagtatccattgaagaaattctagaagaacaaagggtggaacagcagaccaagctggaagcagagaagttgaaagtgcaggccctgaaggaccgaggtctttccattcctcgagcagatactcttgatgagtactaatcttttgcccagaggctgttggctcttgaagagtaggggctgtcactgagtgaaagtgacatcctggccacctcacgcatttgatcacagactgtagagttttgaaaagtcacttttatttttaattattttacatatgcaacatgaagaaatcgtgtaggtgggttttttttttaataacaaaatcactgtttaaagaaacagtggcatagactccttcacacatcactgtggcaccagcaactacttctttatattgttcttcatatcccaaattagagtttacagggacagtcttcatttacttgtaaataaaatatgaatctcaaaagtgtcatgttatttccaa

SEQ ID NO: 149735 - DNA, 700 bp, Homo sapiens
  Payload ID: 9580
  Gene Symbol: LSM1
  Gene Name: LSM1 homolog, mRNA degradation associated
  ENST ID: ENST00000523511
  CDS Start-End: 169-303
ggaggagcttccggcagcccccggcggctgaaagccggggcagaagtgctggtctcggtcgggattccgggcttggtcccaccgaggcggcgactgcggtaggagggaagaggttttggacgcgctggcctcccgccgctgtgcattgcagcattatttcagttcaaaatgaactatatgcctggcaccgccagcctcatcgaggacattgacaaaaagcacttggttctgcttcgagatggaaggacacttataggctttttaagaagcattgatcaatttggaacttcatgttcatgctaacatttattggatatctgcgaaatcactggatttgagcatgaggaagaaaccaaacttagtgctacatcagactgtggagcgtattcatgtgggcaaaaaatacggtgatattcctcgagggatttttgtggtcagaggagaaaatgtggtcctactaggagaaatagacttggaaaaggagagtgacacacccctccagcaagtatccattgaagaaattctagaagaacaaagggtggaacagcagaccaagctggaagcagagaagttgaaagtgcaggccctgaaggaccgaggtctttccattcctcgagcagatactcttgatgagtactaatcttttgcccagaggctgttggctcttgaagagtaggggctgtcactgagtgaaagtgac

SEQ ID NO: 149736 - DNA, 975 bp, Homo sapiens
  Payload ID: 9580
  Gene Symbol: LSM1
  Gene Name: LSM1 homolog, mRNA degradation associated
  ENST ID: ENST00000520755
  CDS Start-End: 355-489
gaacccggagacgaaggaagacaccgtgttccttaagagggagtatacgtttcctcgccatttatccaatggagtttcctcttacctacttaacaggaacagggaaagggtgtcccccaacggtacggctgccccgcctcttcctgggggcccacacgtgttacaggaagtgggtaagggtaatatggaggagcttccggcagcccccggcggctgaaagccggggcagaagtgctggtctcggtcgggattccgggcttggtcccaccgaggcggcgactgcggtaggagggaagaggttttggacgcgctggcctcccgccgctgtgcattgcagcattatttcagttcaaaatgaactatatgcctggcaccgccagcctcatcgaggacattgacaaaaagcacttggttctgcttcgagatggaaggacacttataggctttttaagaagcattgatcaatttggacttggaaaaggagagtgacacacccctccagcaagtatccattgaagaaattctagaagaacaaagggtggaacagcagaccaagctggaagcagagaagttgaaagtgcaggccctgaaggaccgaggtctttccattcctcgagcagatactcttgatgagtactaatcttttgcccagaggctgttggctcttgaagagtaggggctgtcactgagtgaaagtgacatcctggccacctcacgcatttgatcacagactgtagagttttgaaaagtcacttttatttttaattattttacatatgcaacatgaagaaatcgtgtaggtgggttttttttttaataacaaaatcactgtttaaagaaacagtggcatagactccttcacacatcactgtggcaccagcaactacttctttatattgttcttcatatcccaaattagagtttacagggacagtcttcatttacttgtaaataaaatatgaatctcaaaagtgt

SEQ ID NO: 149737 - DNA, 850 bp, Homo sapiens
  Payload ID: 9581
  Gene Symbol: LSM10
  Gene Name: LSM10, U7 small nuclear RNA associated
  Uniprot ID: Q969L4
  ENST ID: ENST00000315732
  CDS Start-End: 151-522
ggacagagcggcccggtcgccggcatggtttctccgtcctgctgcagccggcgggaggcagccagtccaggcgcccgctagcttcggcggcgacccagacggggaaagcggaaggaatgtcgcgtgcaagcaggcagctggtgtggaagaatggcggtgagccattcagtgaaggagcggaccatctctgagaacagcctgatcatcctactgcagggcctccagggccgggtaaccactgtggacctgcgggatgagagcgtggcccacggacgcatagacaatgtcgatgctttcatgaacatccgcctggccaaagtcacctacacggaccgttgggggcatcaggtcaagctggatgacctctttgtgacaggccgcaatgtccgctacgtccacatcccagatgacgtgaacatcacctcgaccattgagcagcagctgcagattatccatcgggtgcgaaactttggtggcaagggccaaggccggtgggaatttcccccaaaaaactgtaagtgaggccctcagcaagccctggccccaactcggagtcctccagtgatctccggagctagttccctgccctcacaccctgtctggtacccgagaagaaagcagggccaggccagaagctggtgtccaacagacaccacctgtcaaagctgcctttcacagggttccacctcccagactcactctgggacccagaatcctatatgtggccttggggtaggtgacaatccccctttttgatgatctgaatctctgacttattgattatggaacctgtcaagtagttttcaactctcccagtgaggataattaaacatgctcagcctgagccacc

SEQ ID NO: 149738 - DNA, 6584 bp, Homo sapiens
  Payload ID: 9582
  Gene Symbol: LSM11
  Gene Name: LSM11, U7 small nuclear RNA associated
  Uniprot ID: P83369
  ENST ID: ENST00000286307
  CDS Start-End: 57-1139
cctctggcggcttcgttccttcttcccatcggcctcggcttgcgggcctttcaaacatggaggagcgggagcggggggcgaggtcggctggcgccgggagccccgcgcgcccgcccagcccgcggctggatgtcagctctgacagcttcgacccgctgctggccctgtacgcgccccgcctgcctcccattccctaccccaatgccccctgcttcaacaacgtggcggagtacgagagcttcctcaggaccggagtccggggcggcgggcgcgggcgcgggcgggctcggggcgcggccgcgggctctggggttcccgccgcacccgggccctcgggcaggactcgtcgccgcccggacgcgcccgccccggaccccgagcgcatccagcgcctccgccgtctcatggtggccaaagaggaaggggacggggccgcaggagcgggccggaggggtccgggtcggagcaggaaggcgccacgcaacgtgctcacgcgaatgcccttgcacgaaggcagccctctgggtgaactccatcgctgtatccgtgagggggtgaaggtgaatgttcacatccgcactttcaagggacttcggggcgtctgtacaggcttccttgttgcattcgacaagttctggaatatggcacttactgatgtggatgagacctaccgaaaacctgtcctaggcaaagcatatgaacgggattcttcactgactctcactaggctatttgatcggctgaaacttcaagattcctccaagaaggaagcagattctaagtctgcagttgaagattccactctgtctagatactcacagacatccacttggaagttggcttcagtgtggggaagagcagacactggccggggctcacacaagcgttcccgctctgtcccttcttccctgcaggcctctgcaagggaggagtccaggtcagagctgtcagggaggactacacggacagacggctccagtgtgggaggtaccttttccagggctaccaccctttccagaggccagtcccgtaagaaaaagcgaaagcccaaagtggattaccagcaggtattcactcgacacataaatcagattttcattcgaggcgagaatgtcctgctggttcatcttgcacagtgaccagctcagcctgagctttggtttttagaaataaagtgcatgaattgctgctatgctgtatcctagtatcccagtgaaactctgagttggaatgattccctctggtcctgcatatgcagaggacggagcaggctcagccccctggaagatgagctcaaggggaggacaggccttgggagggcaggcgtttgcattaatatcaaggcaaaaagcattcatagatacatgcatctgatttggtattgtgatttacttcagaccctgaaaccaaatatctgatcttccattagacttaggggtcatgatatgagtggaatttacattttagatactataggggaaagaaaagtctcaaaaagaagtattgcatgtctaaaagctagtgccctgagtactcatgaattcgattccaagagtagtggtgtaaattgccttggagccctgcatccacgtcttgtaactaacttttgaattttgcctgacatgattctctcttgatgaagaaatgacatatattatctttgaatatctacaaggaaagttaccaacttatgtaggggtgaaatttggataggcggtatgctcaaagcagccagcaatgagtgctctgttttgatccttcttcttattatggaaaggagtacaggacctcttcagtcttccccttaccagaggtagcctctgcaaatggcataccagatgggactctaagatgcttgtgtggtggcttcttgtccttctctttgacttctgtggcatggtgctagtgcatgtaccctgtggtattgcccctctgtccgtagtgtgaactgtcctgtgagctttatgtcaggagactgtgaccttcatgtccagcttcaaagagttgtgcatgaactcggtaatacacatcacacggctgagagtcccctttccaggcagggccagcatgtgtagaatatctttcagaatatggtttcaccatgaaacaggggtggtagatttattcccttgtgtcaggccaaagaagttcttacaaagtacagtgggtagtgtctaaagcgacactttactcacagcctggcttgagtcaacaggaacaccatagcacccacaaatacttctacttgaatcatattctgtgctttttcaatcactagtgcagaataggctgcatttgacacagactgttaggcaatattgatttttttgttttgtttttatttggttttatctgagataacttatgttcaaggtgagaataagaaatagccaactagttaaaatgtatgaaaagaaaactttcccctgctgtatttgttgtgtaacataaataagccttctgagaagcagggtgaataaagtttagggagctgggacacctggtcctgctagctggaccactggctcatcatgcaatgaaaaggtgagcagacttaacccctccgtgcctcagctttttccccacagacacctacctcacaggggcattgagaaaaaaaaaatgaaggcattttacagtctctaaacatctttaagtgccatgagtaatttttcctgactctgtttcatagctttgtaagaattctgtgtctttataagacacagaagcaaggcaggtgctacataaaaaagtaatctcagccaggcacggtggctcacgcctgtaatcccagcactttgggaggctgaggcgggtggatcacaaggtcaggagatcaagaccatcctggctaacacggtgaaaccctgtctctactaaaaatacaaaaattagccgggcgtggtggcgggcgcctgtagtcccagctacgtgggtggctgaggcaggagaatggggtgaacccgggaggcggagcttgcagtgagccaagattgcaccactgtactccagcctgggcgacagagcaagactctgtctcaaaaaaaggaaaaaaaaaaaaagtaatcttagggttcatagttatgatcctgttgtaactatcttcggaaggcagcagtatcttctggaacttccatattccattccttcctcctaagggacaatggaagttctcagaagagtatcttcagtaagaggagagtaactttttttttgctgctcccgctatatcccaggcctcacccttttctgatcattatcagaaagaatcccctgaacttttcaaggggtttatatggtagcaccaaatggagaatgagcatctaaaaatgacacatcccgaaagggcaatctgtggaagtttgttgtttgtttgtttttatttttaaatgcattgtaaagtgtactctagagccagatcaggtgcactaaagtttatagaggttccagtttacaaactcaagtgaacagtaatctttggaagctgccagtctaaattctaaatagtgtatctgaaatctcagttcccaaaatagttgtcaggtttaatcatcaggcaacactgcgtatacctgtgtggctatcctcatctgcctgccctctcatccctcggctagaatgatgtactctactttcccaataaggtagaaatttggaatccaacggaatataatcagttttcattcattccagtgcctagttaaatctaacctgacttaaacatatgcctgtttttatgtttacctataattttcatatagccgtataaggattgatttaccattttttgcccaacatgacaattctggctatgaaaattatgtttaaactgtgtatgatctattttatgtgctctatgttcccatttgtttgtttggtctggacagtggttctggaatgaattctatctagtaaattagtaaatgtgctgttttgtataaagcatgataattactttttaacagaagttcatttttaaagattactcccttttctttctctcttttttttgagacaatttctctcttgttgcctaggcagtgcagtggcgcgatctcagctccctgcaacttctgcctcccaggttcaagcgattctcctgccttagcctcctgagtagctgggtcagccaccatggctgactcattttttgtatttttagtagagaaggggttttaccgtgttagccaggctggtcttgaactcctgaccttgggtgatccacctgcctcagcctcccaaagtgctgggattacaggcgtgagctatcccgcccggtccccttttctttattatcgaagatattgtttaaaagaaagaaaaagtaggtcccaataatatatgtgctattcaaaaaatgtgatcatttaggacattatcacaagttgctatggaaataactgaagacttcctcaggagaaggaaagaaaatgaggaacataatgatagagtcggggaactcccactagctcacctgaggggggctcgatgcagctgaaatactgaatactgaaatactagaaaccaacaaaactggtttctagaattctccagggatttgggcttgggaaacttggtaagaatagtttttatttttgaacattcaactttggttcttcaaagtaatctttaaacatgggaatatgttttcaagacaatttataggacatacttatgtagttggtgaggtcttctcaaaagtatctacctttgttagataataacaagtgattaagaaaggggagatatggttttatactcataacaatttcctgtgccattctctgtacacagaggtgattcatttactctcccattagtagaacttgcactttgggctgtctgttctagtatttgggaagtgtttatgcttccttccagggaccatcttatgatcagaggcaggatgtctgtgagatggttagctagagttagcagtgtccggggagagtggctttagaccagtcagtaccttgctctttgtgcatggtgcatgtcaagtcaggaagccaagaaaccgttggcattaaaatctagatgcatagagatccttgctatgagttgtggataggagtggctccatctatccttgtggtgaaagagtccaggagctcctttagagattgtcaagtcctgagcgatgagctgcccttaatcctcagaagccttacaaaaattgagatgtaccatttctaccctttgagaaaaaagaaatagaaacttacttgatgcagaatggatatttatatttctgcttgcaccatttccatagcagctgacaaaggcaaaatcatgaaatagaatcatttctataaattgcttctttaagttttctctaaattttgcctctaggaaaaaattaaaactattcaatgacagctagctgtcactggtgctaccccaaagctttccaatcttttatgtattttttgtgaatgaaactgttgctgtaggaaagtcaaggttcatgtaagagtatcgtggtgtaaatataatggtttcacagctgtttgaatttttcttttcctgtgccagatatagaatgcagtcaaccctttttcagtaacttatgttcaccagtctgtgcttttcttctcccagaaggcttttcttagtggttgtaaatgcaagaatcctgagccctgtgttgcaaaggtgggtggtctgtcagcactttctggcaaattgagttgatggatttaagataagcctttggggttcctgtcagttttctgggccctgaggaagggttgggcctcctttactctcagtattttgagtgtttttcaaatgtttgtacgttatcttgcactgctctaataaaaatgaaagctctctgacaagaaatagttctggatggtttgaagatctgcggggaaaaataagtgtgcacctgagaccttcagttagtcttttatttatttagaataaaaaatagtttgataacctaccagagttagtgcttctttaaaaacactccttggaaagatggggactgtcccttaggaaagccataaaagtgattcccaatactttgcaattgcttttgatttttagtcctttggaacaaatgtgtgatgttatgtctgatgttgtgtttttagagctgtgaaaagtctgaaaaatttcaaggggtattatttaaatgatgattatctggctgaattatgtgtgagctagaatctagggtagctgtccacttctttttctgttgtcctgacagtaaagcaaatagtaagccatgtcttgaaagtgatttgcttgtttcatactgacatctaaagacatcagccttctctttggcaaccctggggatactcctctgcaccataacttattaatgtttttttagacaaggctaaacctgaatgactctacgtatctatagtttcactgctcatataccagctgctacaagaaaaaccatgacttgtaagtttgtctttactcctaattgctaaattaactgaaacccttcctgtctagggagaattgctgctagtaaggtcagtttgcaatgttcagctttagatatgtgtcgtaatgggagtctgaaaactgtaataaactgtattcatatcctg

SEQ ID NO: 149739 - DNA, 2308 bp, Homo sapiens
  Payload ID: 9583
  Gene Symbol: LSM12
  Gene Name: LSM12 homolog
  Uniprot ID: Q3MHD2
  ENST ID: ENST00000293406
  CDS Start-End: 149-736
aggatcccgccccaaccagcgccaggccacgccccggcgtgtgacgcaagcacgctccgtgcgcgccgtcgcgtcgcggcgctcactgggggcccggctttcgcccgctgctgccgccgccgccgccggccgcggctgcactcccaagatggcggctcctccgggcgagtacttcagcgttgggagccaggtgtcgtgccggacgtgccaggagcagcggctgcagggcgaggtggtagcctttgactaccaatccaaaatgctggctttaaaatgtccctcttccagtggaaagcccaaccatgcagacatcttgctcataaacttacagtatgtttcagaagtggaaataattaatgaccgaacagaaacccctcctcccctagcttcactcaatgttagtaagcttgccagcaaagcacggacagagaaggaggagaagctgagccaggcctatgcaatcagtgctggtgtctctctagagggccagcagctcttccagaccattcacaagaccattaaagactgtaaatggcaagaaaaaaacatcgtagtcatggaagaagttgttattacacccccatatcaagtggaaaactgtaaaggcaaagaggggagtgcactgagccatgtacgcaaaatagttgaaaaacattttagagacgtggaaagccaaaagatactgcaacgttcacaagcccagcaaccacagaaggaggctgccctgtcatcctgagtccgtacacatggaggactcttccagcatccagccaaggaggcgctggtggtggcttcagcggaggcaggccgggggagggaagggatcctatatgtcctgttggctcttaacaaagggtcagcatttccaaatcttagacttgaacaaacaaaacacccaacaaaaaagaacaagagaataatttaaaagttgaatcattacttgactaacagacttcggtccaccatgtccttttcacagccctcttctggaacagtcaccttgttaattttatttttgaaaattattttcccactctgccctttacttctgactttcctttcctagtttgttcctgccattctgtttttataagtggctacacttgccttctgaatgattgaaagaaacttttacatcttttcttccaaaataaaagtaacaagctgactgtgattcttaaattgagaccagagcagcaaacgtctcactttaaatttttgttttcttttcctttttttttcttttttctttttttttttttttttgcacagggcatggcttgaattagttttatttttcttaactttaaatatatatatgaaaatatatattaaaatgttctctaaatattttctgcttcttgcaggtctctttttactagatcatggctgttcttcccacctcatccctctgaaaataaaaatgtattgccctccccaccatccatcatagccaggccactaacttgacttggtgcaagagattcttgctgcgaactttgtagagccagtgtgcagatagaatttggctttgagggttcctgatggctttttagtctttaactgtgtgtgtaccagtctcacatttggcccaaacctcaggattctccctctgcctgtcttacttcatggtactagaagaccttcctcgccactctctccacatgagagagtcagctgccctttctcctgtgcctctgcaggaagaactctcttgcatggcacatctcagctcctcattgagggatagttttctttgataagaaacctggagtccatttactctgacctctctttaaatctatatccagagccactagcccaggaaaaacttgggtgacccgtaatttctcttctcctgctgtccttttgctcttacgccccaccccaactccccttaaattttacaggcttatgacagtttgtatgtgctcagccaatgagcagaaaacctggaaagaatttctggactttagcccaccagtttgtctggttgactaacctgctgagagctaaaattggcacccattgccccgtgccttcaggcagtctcctggggcagagtatgccaccatccgaatatcaggcactgagtgggatgtgggtgatgctcacatgactggctagagctttgggggtggggtgggggttaactactatttttttggccatgatctctttccccttccttttttttttaattaaataaatggatcaaattaaataattcaagccctgccttcaaaatgaaattttttttttagtattatttagcaaaaacaataaaacccaaatttttttaaccatc

SEQ ID NO: 149740 - DNA, 942 bp, Homo sapiens
  Payload ID: 9583
  Gene Symbol: LSM12
  Gene Name: LSM12 homolog
  ENST ID: ENST00000585388
  CDS Start-End: 73-765
cggcgctcactgggggcccggctttcgcccgctgctgccgccgccgccgccggccgcggctgcactcccaagatggcggctcctccgggcgagtacttcagcgttgggagccaggtgtcgtgccggacgtgccaggagcagcggctgcagggcgaggtggtagcctttgactaccaatccaaaatgctggctttaaaatgtccctcttccagtggaaagcccaaccatgcagacatcttgctcataaacttacagtatgtttcagaagtggaaataattaatgaccgaacagaaacccctcctcccctagcttcactcaatgttagtaagcttgccagcaaagcacggacagagaaggaggagaagctgagccaggcctatgcaatcagtgctggtgtctctctagagggccagcagctcttccagaccattcacaagaccattaaagactgtaaatggcaagaaaaaaacatcgtagtcatggaagaagttgttattacacccccatatcaagtggaaaactgtaaaggcaaagaggggagtgcactgagccatgtacgcaaaataagacagagtctcgctctgtcgcccacgctggagtgcagtggcgcgatctcagctcactgcaacctccgcctcccgggttcaagcgattctcctgcctcagcctcccgagtacctgggactacaggcgtatgccaccacacccggctagagatggggtttcaccatgttggccaggctggtctcgaactcctgacctgaagtgatctgcccaccttggcctcccaaagtgctgggattgcaggttgaaaaacattttagagacgtggaaagccaaaagatactgcaacgttcacaagcccagcaaccacagaaggaggctgccctgtcatcctgagtccgtacacatggaggactcttccagcatccagccaagga

SEQ ID NO: 149741 - DNA, 2484 bp, Homo sapiens
  Payload ID: 9583
  Gene Symbol: LSM12
  Gene Name: LSM12 homolog
  Uniprot ID: Q3MHD2
  ENST ID: ENST00000591247
  CDS Start-End: 324-911
agcagtaaatagcaccgtccttggaaataggcagactgtttttgctagttgtggaaccgtggacaagtttagtctaaaacttagtttatgtaaaaggaggacattgattcctacctcaaagggctgttagatgctcaagaagtgacaatacaaatgcctatgaagaaacaggatcaggatcccgccccaaccagcgccaggccacgccccggcgtgtgacgcaagcacgctccgtgcgcgccgtcgcgtcgcggcgctcactgggggcccggctttcgcccgctgctgccgccgccgccgccggccgcggctgcactcccaagatggcggctcctccgggcgagtacttcagcgttgggagccaggtgtcgtgccggacgtgccaggagcagcggctgcagggcgaggtggtagcctttgactaccaatccaaaatgctggctttaaaatgtccctcttccagtggaaagcccaaccatgcagacatcttgctcataaacttacagtatgtttcagaagtggaaataattaatgaccgaacagaaacccctcctcccctagcttcactcaatgttagtaagcttgccagcaaagcacggacagagaaggaggagaagctgagccaggcctatgcaatcagtgctggtgtctctctagagggccagcagctcttccagaccattcacaagaccattaaagactgtaaatggcaagaaaaaaacatcgtagtcatggaagaagttgttattacacccccatatcaagtggaaaactgtaaaggcaaagaggggagtgcactgagccatgtacgcaaaatagttgaaaaacattttagagacgtggaaagccaaaagatactgcaacgttcacaagcccagcaaccacagaaggaggctgccctgtcatcctgagtccgtacacatggaggactcttccagcatccagccaaggaggcgctggtggtggcttcagcggaggcaggccgggggagggaagggatcctatatgtcctgttggctcttaacaaagggtcagcatttccaaatcttagacttgaacaaacaaaacacccaacaaaaaagaacaagagaataatttaaaagttgaatcattacttgactaacagacttcggtccaccatgtccttttcacagccctcttctggaacagtcaccttgttaattttatttttgaaaattattttcccactctgccctttacttctgactttcctttcctagtttgttcctgccattctgtttttataagtggctacacttgccttctgaatgattgaaagaaacttttacatcttttcttccaaaataaaagtaacaagctgactgtgattcttaaattgagaccagagcagcaaacgtctcactttaaatttttgttttcttttcctttttttttcttttttctttttttttttttttttgcacagggcatggcttgaattagttttatttttcttaactttaaatatatatatgaaaatatatattaaaatgttctctaaatattttctgcttcttgcaggtctctttttactagatcatggctgttcttcccacctcatccctctgaaaataaaaatgtattgccctccccaccatccatcatagccaggccactaacttgacttggtgcaagagattcttgctgcgaactttgtagagccagtgtgcagatagaatttggctttgagggttcctgatggctttttagtctttaactgtgtgtgtaccagtctcacatttggcccaaacctcaggattctccctctgcctgtcttacttcatggtactagaagaccttcctcgccactctctccacatgagagagtcagctgccctttctcctgtgcctctgcaggaagaactctcttgcatggcacatctcagctcctcattgagggatagttttctttgataagaaacctggagtccatttactctgacctctctttaaatctatatccagagccactagcccaggaaaaacttgggtgacccgtaatttctcttctcctgctgtccttttgctcttacgccccaccccaactccccttaaattttacaggcttatgacagtttgtatgtgctcagccaatgagcagaaaacctggaaagaatttctggactttagcccaccagtttgtctggttgactaacctgctgagagctaaaattggcacccattgccccgtgccttcaggcagtctcctggggcagagtatgccaccatccgaatatcaggcactgagtgggatgtgggtgatgctcacatgactggctagagctttgggggtggggtgggggttaactactatttttttggccatgatctctttccccttccttttttttttaattaaataaatggatcaaattaaataattcaagccctgccttcaaaatgaaattttttttttagtattatttagcaaaaacaataaaacccaaatttttttaaccatca

SEQ ID NO: 149742 - DNA, 3424 bp, Homo sapiens
  Payload ID: 9584
  Gene Symbol: LSM14A
  Gene Name: LSM14A mRNA processing body assembly factor
  Uniprot ID: Q8ND56
  ENST ID: ENST00000433627
  CDS Start-End: 76-1467
cgggcgtgcggagcgggcgacagtggcgtgggatctgcctctctgcgagcagctgggagcggcggcggcggcgccatgagcgggggcaccccttacatcggcagcaagatcagcctcatctccaaggcggagatccgctacgagggcatcctctacaccatcgacaccgaaaactccaccgtagcccttgccaaagttcgatcctttggtacagaagacagaccgacagatcgtccaataccacctcgagatgaagtctttgaatacattatattccgtgggagtgacattaaagaccttactgtttgtgagccaccaaaaccacagtgttctttgcctcaagacccagctattgttcagtcctcactaggctcatcgacttcttcattccagtccatgggttcttatggacctttcggcaggatgcccacatacagtcagttcagtccgagttccttagttgggcagcagtttggtgctgttggtgttgctggaagctctttgacatcctttggaacagaaacatcaaacagtggtaccttaccccaaagtagtgcggttggttctgcctttacacaggatacaagatctctaaaaacacagttatctcaaggtcgctcaagccctcagttagaccctttgagaaaaagcccaaccatggaacaagcagtgcagaccgcctcagcccacttacctgctccagcagctgttgggagaaggagtcctgtatcaaccaggcctttgccatctgccagccaaaaggcaggagagaatcaggagcacaggcgagctgaagtacacaaagtttcaaggccagaaaatgagcaactcagaaatgataacaagagacaagtagctccaggtgctccttcagctccaaggagagggcgtgggggtcatcggggtggcaggggaagatttggtattcggcgagatgggccaatgaaatttgagaaagactttgactttgaaagtgcaaatgcacaattcaacaaggaagagattgacagagagtttcataataaacttaaattaaaagaagataaacttgagaaacaggagaagcctgtaaatggtgaagataaaggagactcaggagttgatacccaaaacagtgaaggaaatgccgatgaagaagatccacttggacctaattgctattatgacaaaactaaatccttctttgataatatttcttgtgatgacaatagagaacggagaccaacctgggctgaagaaagaagattaaatgctgaaacatttggaatcccacttcgtccaaaccgtggccgtgggggatacagaggcagaggaggtcttggtttccgtggtggcagagggcgtggtggtggcagaggtggtaccttcactgcccctcgaggatttcgcggtggattcagaggaggtcgtgggggccgggagtttgcggattttgaatataggaaaaccacagcttttggaccctaaaaggtctggattgatcgtactgctttctgaaagaaagacaacaaagttgctgcatagtctacaaacaagtctctgaaaataggtgaatttctagctcttcatggtcctgaacattgatttcagtctttgcaaagaatgaagaagtgaattcgctgtacatttgtcaccagcactgggtttttgttttttgtttgtttttccgcttaatttcaaagataaaatgcagttacttttgggggtggaaggctcatcttaaaacatgagcattaaatatatttggaatagcagaaggttaagtaatttcttatgtatagttaaactaaagcagtacttcagtgggacttaacaagtattttttcatcactgaaaggttttttttttttatcactaaattgtatttggcaattgcaagttgcctgcagatagggccgtgatactgtgttttgagccacagaaggttgtgtgtgtgtgtgtgtgtgtgtgtgtgtgtgtgtgtgtatgtgtgtgtctttttcctcctttcttttggggaatcctgtaatatgaggtagcttatttcgtcaattaattagggtgctggatggtagagaattttgtcagtcaactatgtacacacagtaaatactgtttcttaggcaaaggtaacttttttatatagttgtaaaattccattatattccattgccaaagaaacattaagaactttgtatagctgtataaaaagcaactaattttttaaagaataaacattttaaagtcagcaaacatactgtgtccttgcagaagttgatgtgctgagcagcagccttatgggtgggtctttttttcttagttttccaggcttaacatttttgattttgttttttaatgtttggaacataaatgaagatttgatacattatttcattatctaaaaaggattaattattcatgctcattgtaagaacttcattttgtagcaaatggcatatcacaggatctgtccagataatcgatattttcagtatacaaatgtaaataatcacagatgagaatgtacttagctgtattttcaaataagtaatcttccccccttttgtaggactttaaaactaggcatcaatgaacctgtttttcctattatgcctggaatttagtcatgataccttgactcattccatcatatttcaagaggattcagagtgctagaaattattttggtagcctgtaacacacggcaacactggtccttgggcctatgatgacccacagatgactcagtatagagttcattgctaattataaattactagtgaatctttttgatattttaagctctagtgggaaaaatctggccacttttgtgtttttatgaaggccatggaataaaaggatccaaagatttaaatatttttatctaatattttgattgttttcttaactttctccttaaaacattcagtagtgataaagatatagaaactgcactgtaggagaattggaatatttaaggctggttgacattttttattttcattttatatcttttgtatagctctacaaggcagtgttttgtaatttggtttcattatgaagatccagtacttggcagccatagtttagacaatattgttcagtgctgtttgcttgcatgttaacaacaaaaccttttagaggacccacaaatcatgatattgaacacagttccgaggcattcagagcatcagagcaagtaccatggcaatacatgtgtagactgttggagatgtcccgggccaatttcaagaaagaaaactgtaaatactagttctacttgctctgaaattatgagtttatgcgttttcccagccctccgaatcactgactggggcgttttgtgccccagcaataactggcagcatggcatacctgcagtaccccttacaatattaaagcaaagtttttattctaaaacagaataaaactgttcaataaaaaa

SEQ ID NO: 149743 - DNA, 3596 bp, Homo sapiens
  Payload ID: 9584
  Gene Symbol: LSM14A
  Gene Name: LSM14A mRNA processing body assembly factor
  Uniprot ID: Q8ND56
  ENST ID: ENST00000544216
  CDS Start-End: 78-1469
agcgggcgtgcggagcgggcgacagtggcgtgggatctgcctctctgcgagcagctgggagcggcggcggcggcgccatgagcgggggcaccccttacatcggcagcaagatcagcctcatctccaaggcggagatccgctacgagggcatcctctacaccatcgacaccgaaaactccaccgtagcccttgccaaagttcgatcctttggtacagaagacagaccgacagatcgtccaataccacctcgagatgaagtctttgaatacattatattccgtgggagtgacattaaagaccttactgtttgtgagccaccaaaaccacagtgttctttgcctcaagacccagctattgttcagtcctcactaggctcatcgacttcttcattccagtccatgggttcttatggacctttcggcaggatgcccacatacagtcagttcagtccgagttccttagttgggcagcagtttggtgctgttggtgttgctggaagctctttgacatcctttggaacagaaacatcaaacagtggtaccttaccccaaagtagtgcggttggttctgcctttacacaggatacaagatctctaaaaacacagttatctcaaggtcgctcaagccctcagttagaccctttgagaaaaagcccaaccatggaacaagcagtgcagaccgcctcagcccacttacctgctccagcagctgttgggagaaggagtcctgtatcaaccaggcctttgccatctgccagccaaaaggcaggagagaatcaggagcacaggcgagctgaagtacacaaagtttcaaggccagaaaatgagcaactcagaaatgataacaagagacaagtagctccaggtgctccttcagctccaaggagagggcgtgggggtcatcggggtggcaggggaagatttggtattcggcgagatgggccaatgaaatttgagaaagactttgactttgaaagtgcaaatgcacaattcaacaaggaagagattgacagagagtttcataataaacttaaattaaaagaagataaacttgagaaacaggagaagcctgtaaatggtgaagataaaggagactcaggagttgatacccaaaacagtgaaggaaatgccgatgaagaagatccacttggacctaattgctattatgacaaaactaaatccttctttgataatatttcttgtgatgacaatagagaacggagaccaacctgggctgaagaaagaagattaaatgctgaaacatttggaatcccacttcgtccaaaccgtggccgtgggggatacagaggcagaggaggtcttggtttccgtggtggcagagggcgtggtggtggcagaggtggtaccttcactgcccctcgaggatttcgcggtggattcagaggaggtcgtgggggccgggagtttgcggattttgaatataggaaagacaacaaagttgctgcatagtctacaaacaagtctctgaaaataggtgaatttctagctcttcatggtcctgaacattgatttcagtctttgcaaagaatgaagaagtgaattcgctgtacatttgtcaccagcactgggtttttgttttttgtttgtttttccgcttaatttcaaagataaaatgcagttacttttgggggtggaaggctcatcttaaaacatgagcattaaatatatttggaatagcagaaggttaagtaatttcttatgtatagttaaactaaagcagtacttcagtgggacttaacaagtattttttcatcactgaaaggttttttttttttatcactaaattgtatttggcaattgcaagttgcctgcagatagggccgtgatactgtgttttgagccacagaaggttgtgtgtgtgtgtgtgtgtgtgtgtgtgtgtgtgtgtgtatgtgtgtgtctttttcctcctttcttttggggaatcctgtaatatgaggtagcttatttcgtcaattaattagggtgctggatggtagagaattttgtcagtcaactatgtacacacagtaaatactgtttcttaggcaaaggtaacttttttatatagttgtaaaattccattatattccattgccaaagaaacattaagaactttgtatagctgtataaaaagcaactaattttttaaagaataaacattttaaagtcagcaaacatactgtgtccttgcagaagttgatgtgctgagcagcagccttatgggtgggtctttttttcttagttttccaggcttaacatttttgattttgttttttaatgtttggaacataaatgaagatttgatacattatttcattatctaaaaaggattaattattcatgctcattgtaagaacttcattttgtagcaaatggcatatcacaggatctgtccagataatcgatattttcagtatacaaatgtaaataatcacagatgagaatgtacttagctgtattttcaaataagtaatcttccccccttttgtaggactttaaaactaggcatcaatgaacctgtttttcctattatgcctggaatttagtcatgataccttgactcattccatcatatttcaagaggattcagagtgctagaaattattttggtagcctgtaacacacggcaacactggtccttgggcctatgatgacccacagatgactcagtatagagttcattgctaattataaattactagtgaatctttttgatattttaagctctagtgggaaaaatctggccacttttgtgtttttatgaaggccatggaataaaaggatccaaagatttaaatatttttatctaatattttgattgttttcttaactttctccttaaaacattcagtagtgataaagatatagaaactgcactgtaggagaattggaatatttaaggctggttgacattttttattttcattttatatcttttgtatagctctacaaggcagtgttttgtaatttggtttcattatgaagatccagtacttggcagccatagtttagacaatattgttcagtgctgtttgcttgcatgttaacaacaaaaccttttagaggacccacaaatcatgatattgaacacagttccgaggcattcagagcatcagagcaagtaccatggcaatacatgtgtagactgttggagatgtcccgggccaatttcaagaaagaaaactgtaaatactagttctacttgctctgaaattatgagtttatgcgttttcccagccctccgaatcactgactggggcgttttgtgccccagcaataactggcagcatggcatacctgcagtaccccttacaatattaaagcaaagtttttattctaaaacagaataaaactgttcaataaaaaatgctcgtcaaagttctttctctttaaatagtaacattctgtttcagtaggaacataatgaaaggaatcttttaaatggaagagcggaattataatgtttgtattccctgtaataactataaatcagttactttatttctaagattgagttattgttgcagatgtttagggaaagctaaaagccccttccttcccctcctgtgtgtaaataaaatacttctgagatca

SEQ ID NO: 149744 - DNA, 2152 bp, Homo sapiens
  Payload ID: 9584
  Gene Symbol: LSM14A
  Gene Name: LSM14A mRNA processing body assembly factor
  Uniprot ID: Q8ND56
  ENST ID: ENST00000540746
  CDS Start-End: 119-1387
atgttgggtctgaagcggctgctgtaggcgccgacggagcgagcgggcgtgcggagcgggcgacagtggcgtgggatctgcctctctgcgagcagctgggagcggcggcggcggcgccatgagcgggggcaccccttacatcggcagcaagatcagcctcatctccaaggcggagatccgctacgagggcatcctctacaccatcgacaccgaaaactccaccgtagcccttgccaaagttcgatcctttggtacagaagacagaccgacagatcgtccaataccacctcgagatgaagtctttgaatacattatattccgtgggagtgacattaaagaccttactgtttgtgagccaccaaaaccacagtgttctttgcctcaagacccagctattgttcagtcctcactaggctcatcgacttcttcattccagtccatgggttcttatggacctttcggcaggatgcccacatacagtcagttcagtccgagttccttagttgggcagcagtttggtgctgttggtgttggtcgctcaagccctcagttagaccctttgagaaaaagcccaaccatggaacaagcagtgcagaccgcctcagcccacttacctgctccagcagctgttgggagaaggagtcctgtatcaaccaggcctttgccatctgccagccaaaaggcaggagagaatcaggagcacaggcgagctgaagtacacaaagtttcaaggccagaaaatgagcaactcagaaatgataacaagagacaagtagctccaggtgctccttcagctccaaggagagggcgtgggggtcatcggggtggcaggggaagatttggtattcggcgagatgggccaatgaaatttgagaaagactttgactttgaaagtgcaaatgcacaattcaacaaggaagagattgacagagagtttcataataaacttaaattaaaagaagataaacttgagaaacaggagaagcctgtaaatggtgaagataaaggagactcaggagttgatacccaaaacagtgaaggaaatgccgatgaagaagatccacttggacctaattgctattatgacaaaactaaatccttctttgataatatttcttgtgatgacaatagagaacggagaccaacctgggctgaagaaagaagattaaatgctgaaacatttggaatcccacttcgtccaaaccgtggccgtgggggatacagaggcagaggaggtcttggtttccgtggtggcagagggcgtggtggtggcagaggtggtaccttcactgcccctcgaggatttcgcggtggattcagaggaggtcgtgggggccgggagtttgcggattttgaatataggaaaaccacagcttttggaccctaaaaggtctggattgatcgtactgctttctgaaagaaagacaacaaagttgctgcatagtctacaaacaagtctctgaaaataggtgaatttctagctcttcatggtcctgaacattgatttcagtctttgcaaagaatgaagaagtgaattcgctgtacatttgtcaccagcactgggtttttgttttttgtttgtttttccgcttaatttcaaagataaaatgcagttacttttgggggtggaaggctcatcttaaaacatgagcattaaatatatttggaatagcagaaggttaagtaatttcttatgtatagttaaactaaagcagtacttcagtgggacttaacaagtattttttcatcactgaaaggttttttttttttatcactaaattgtatttggcaattgcaagttgcctgcagatagggccgtgatactgtgttttgagccacagaaggttgtgtgtgtgtgtgtgtgtgtgtgtgtgtgtgtgtgtgtatgtgtgtgtctttttcctcctttcttttggggaatcctgtaatatgaggtagcttatttcgtcaattaattagggtgctggatggtagagaattttgtcagtcaactatgtacacacagtaaatactgtttcttaggcaaaggtaacttttttatatagttgtaaaattccattatattccattgccaaagaaacattaagaactttgtatagctgtataaaaagcaactaattttttaaagaataaacattttaaagtcagcaaa

SEQ ID NO: 149745 - DNA, 2266 bp, Homo sapiens
  Payload ID: 9584
  Gene Symbol: LSM14A
  Gene Name: LSM14A mRNA processing body assembly factor
  Uniprot ID: Q8ND56
  ENST ID: ENST00000570462
  CDS Start-End: 106-1497
agcggctgctgtaggcgccgacggagcgagcgggcgtgcggagcgggcgacagtggcgtgggatctgcctctctgcgagcagctgggagcggcggcggcggcgccatgagcgggggcaccccttacatcggcagcaagatcagcctcatctccaaggcggagatccgctacgagggcatcctctacaccatcgacaccgaaaactccaccgtagcccttgccaaagttcgatcctttggtacagaagacagaccgacagatcgtccaataccacctcgagatgaagtctttgaatacattatattccgtgggagtgacattaaagaccttactgtttgtgagccaccaaaaccacagtgttctttgcctcaagacccagctattgttcagtcctcactaggctcatcgacttcttcattccagtccatgggttcttatggacctttcggcaggatgcccacatacagtcagttcagtccgagttccttagttgggcagcagtttggtgctgttggtgttgctggaagctctttgacatcctttggaacagaaacatcaaacagtggtaccttaccccaaagtagtgcggttggttctgcctttacacaggatacaagatctctaaaaacacagttatctcaaggtcgctcaagccctcagttagaccctttgagaaaaagcccaaccatggaacaagcagtgcagaccgcctcagcccacttacctgctccagcagctgttgggagaaggagtcctgtatcaaccaggcctttgccatctgccagccaaaaggcaggagagaatcaggagcacaggcgagctgaagtacacaaagtttcaaggccagaaaatgagcaactcagaaatgataacaagagacaagtagctccaggtgctccttcagctccaaggagagggcgtgggggtcatcggggtggcaggggaagatttggtattcggcgagatgggccaatgaaatttgagaaagactttgactttgaaagtgcaaatgcacaattcaacaaggaagagattgacagagagtttcataataaacttaaattaaaagaagataaacttgagaaacaggagaagcctgtaaatggtgaagataaaggagactcaggagttgatacccaaaacagtgaaggaaatgccgatgaagaagatccacttggacctaattgctattatgacaaaactaaatccttctttgataatatttcttgtgatgacaatagagaacggagaccaacctgggctgaagaaagaagattaaatgctgaaacatttggaatcccacttcgtccaaaccgtggccgtgggggatacagaggcagaggaggtcttggtttccgtggtggcagagggcgtggtggtggcagaggtggtaccttcactgcccctcgaggatttcgcggtggattcagaggaggtcgtgggggccgggagtttgcggattttgaatataggaaaaccacagcttttggaccctaaaaggtctggattgatcgtactgctttctgaaagaaagacaacaaagttgctgcatagtctacaaacaagtctctgaaaataggtgaatttctagctcttcatggtcctgaacattgatttcagtctttgcaaagaatgaagaagtgaattcgctgtacatttgtcaccagcactgggtttttgttttttgtttgtttttccgcttaatttcaaagataaaatgcagttacttttgggggtggaaggctcatcttaaaacatgagcattaaatatatttggaatagcagaaggttaagtaatttcttatgtatagttaaactaaagcagtacttcagtgggacttaacaagtattttttcatcactgaaaggttttttttttttatcactaaattgtatttggcaattgcaagttgcctgcagatagggccgtgatactgtgttttgagccacagaaggttgtgtgtgtgtgtgtgtgtgtgtgtgtgtgtgtgtgtgtgtgtatgtgtgtgtctttttcctcctttcttttggggaatcctgtaatatgaggtagcttatttcgtcaattaattagggtgctggatggtagagaattttgtcagtcaactatgtacacacagtaaatactgtttcttaggcaaaggtaacttttttatatagttgtaaaattccattatattccattgccaaagaaacattaagaactttgtatagctgtataaaaagcaactaattttttaaagaataaacattttaaagtcagcaaa

SEQ ID NO: 149746 - DNA, 690 bp, Homo sapiens
  Payload ID: 9584
  Gene Symbol: LSM14A
  Gene Name: LSM14A mRNA processing body assembly factor
  ENST ID: ENST00000575388
  CDS Start-End: 1-243
acctgggctgaagaaagaagattaaatgctgaaacatttggaatcccacttcgtccaaaccgtggccgtgggggatacagaggcagaggaggtcttggtttccgtggtggcagagggcgtggtggtggcagaggtggtaccttcactgcccctcgaggatttcgcggtggattcagaggaggtcgtgggggccgggagtttgcggattttgaatataggaaagacaacaaagttgctgcatagtctacaaacaagtctctgaaaatagctctacaaggcagtgttttgtaatttggtttcattatgaagatccagtacttggcagccatagtttagacaatattgttcagtgctgtttgcttgcatgttaacaacaaaaccttttagaggacccacaaatcatgatattgaacacagttccgaggcattcagagcatcagagcaagtaccatggcaatacatgtgtagactgttggagatgtcccgggccaatttcaagaaagaaaactgtaaatactagttctacttgctctgaaattatgagtttatgcgttttcccagccctccgaatcactgactggggcgttttgtgccccagcaataactggcagcatggcatacctgcagtaccccttacaatattaaagcaaagtttttattctaaaacagaataaaactgttcaataaaaa

SEQ ID NO: 149747 - DNA, 1032 bp, Homo sapiens
  Payload ID: 9584
  Gene Symbol: LSM14A
  Gene Name: LSM14A mRNA processing body assembly factor
  ENST ID: ENST00000575697
  CDS Start-End: 1-1032
ccttacatcggcagcaagatcagcctcatctccaaggcggagatccgctacgagggcatcctctacaccatcgacaccgaaaactccaccgtagcccttgccaaagttcgatcctttggtacagaagacagaccgacagatcgtccaataccacctcgagatgaagtctttgaatacattatattccgtgggagtgacattaaagaccttactgtttgtgagccaccaaaaccacagtgttctttgcctcaagacccagctattgttcagtcctcactaggctcatcgacttcttcattccagtccatgggttcttatggacctttcggcaggatgcccacatacagtcagttcagtccgagttccttagttgggcagcagtttggtgctgttggtgttgctggaagctctttgacatcctttggaacagaaacatcaaacagtggtaccttaccccaaagtagtgcggttggttctgcctttacacaggatacaagatctctaaaaacacagttatctcaagctgaagtacacaaagtttcaaggccagaaaatgagcaactcagaaatgataacaagagacaagtagctccaggtgctccttcagctccaaggagagggcgtgggggtcatcggggtggcaggggaagatttggtattcggcgagatgggccaatgaaatttgagaaagactttgactttgaaagtgcaaatgcacaattcaacaaggaagagattgacagagagtttcataataaacttaaattaaaagaagataaacttgagaaacaggagaagcctgtaaatggtgaagataaaggagactcaggagttgatacccaaaacagtgaaggaaatgccgatgaagaagatccacttggacctaattgctattatgacaaaactaaatccttctttgataatatttcttgtgatgacaatagagaacggagaccaacctgggctgaagaaagaagattaaatgctgaaacatttggaatcccacttcgtccaaaccgtggccgtggggga

SEQ ID NO: 149748 - DNA, 3519 bp, Homo sapiens
  Payload ID: 9584
  Gene Symbol: LSM14A
  Gene Name: LSM14A mRNA processing body assembly factor
  Uniprot ID: Q8ND56
  ENST ID: ENST00000575811
  CDS Start-End: 197-1588
gccgccgccgccgccgccgccgcgccgcggcttgagggcgggaggctgggggagggtagcggagccggcgccgccgccatgttgggtctgaagcggctgctgtaggcgccgacggagcgagcgggcgtgcggagcgggcgacagtggcgtgggatctgcctctctgcgagcagctgggagcggcggcggcggcgccatgagcgggggcaccccttacatcggcagcaagatcagcctcatctccaaggcggagatccgctacgagggcatcctctacaccatcgacaccgaaaactccaccgtagcccttgccaaagttcgatcctttggtacagaagacagaccgacagatcgtccaataccacctcgagatgaagtctttgaatacattatattccgtgggagtgacattaaagaccttactgtttgtgagccaccaaaaccacagtgttctttgcctcaagacccagctattgttcagtcctcactaggctcatcgacttcttcattccagtccatgggttcttatggacctttcggcaggatgcccacatacagtcagttcagtccgagttccttagttgggcagcagtttggtgctgttggtgttgctggaagctctttgacatcctttggaacagaaacatcaaacagtggtaccttaccccaaagtagtgcggttggttctgcctttacacaggatacaagatctctaaaaacacagttatctcaaggtcgctcaagccctcagttagaccctttgagaaaaagcccaaccatggaacaagcagtgcagaccgcctcagcccacttacctgctccagcagctgttgggagaaggagtcctgtatcaaccaggcctttgccatctgccagccaaaaggcaggagagaatcaggagcacaggcgagctgaagtacacaaagtttcaaggccagaaaatgagcaactcagaaatgataacaagagacaagtagctccaggtgctccttcagctccaaggagagggcgtgggggtcatcggggtggcaggggaagatttggtattcggcgagatgggccaatgaaatttgagaaagactttgactttgaaagtgcaaatgcacaattcaacaaggaagagattgacagagagtttcataataaacttaaattaaaagaagataaacttgagaaacaggagaagcctgtaaatggtgaagataaaggagactcaggagttgatacccaaaacagtgaaggaaatgccgatgaagaagatccacttggacctaattgctattatgacaaaactaaatccttctttgataatatttcttgtgatgacaatagagaacggagaccaacctgggctgaagaaagaagattaaatgctgaaacatttggaatcccacttcgtccaaaccgtggccgtgggggatacagaggcagaggaggtcttggtttccgtggtggcagagggcgtggtggtggcagaggtggtaccttcactgcccctcgaggatttcgcggtggattcagaggaggtcgtgggggccgggagtttgcggattttgaatataggaaagacaacaaagttgctgcatagtctacaaacaagtctctgaaaataggtgaatttctagctcttcatggtcctgaacattgatttcagtctttgcaaagaatgaagaagtgaattcgctgtacatttgtcaccagcactgggtttttgttttttgtttgtttttccgcttaatttcaaagataaaatgcagttacttttgggggtggaaggctcatcttaaaacatgagcattaaatatatttggaatagcagaaggttaagtaatttcttatgtatagttaaactaaagcagtacttcagtgggacttaacaagtattttttcatcactgaaaggttttttttttttatcactaaattgtatttggcaattgcaagttgcctgcagatagggccgtgatactgtgttttgagccacagaaggttgtgtgtgtgtgtgtgtgtgtgtgtgtgtgtgtgtgtgtgtgtatgtgtgtgtctttttcctcctttcttttggggaatcctgtaatatgaggtagcttatttcgtcaattaattagggtgctggatggtagagaattttgtcagtcaactatgtacacacagtaaatactgtttcttaggcaaaggtaacttttttatatagttgtaaaattccattatattccattgccaaagaaacattaagaactttgtatagctgtataaaaagcaactaattttttaaagaataaacattttaaagtcagcaaacatactgtgtccttgcagaagttgatgtgctgagcagcagccttatgggtgggtctttttttcttagttttccaggcttaacatttttgattttgttttttaatgtttggaacataaatgaagatttgatacattatttcattatctaaaaaggattaattattcatgctcattgtaagaacttcattttgtagcaaatggcatatcacaggatctgtccagataatcgatattttcagtatacaaatgtaaataatcacagatgagaatgtacttagctgtattttcaaataagtaatcttccccccttttgtaggactttaaaactaggcatcaatgaacctgtttttcctattatgcctggaatttagtcatgataccttgactcattccatcatatttcaagaggattcagagtgctagaaattattttggtagcctgtaacacacggcaacactggtccttgggcctatgatgacccacagatgactcagtatagagttcattgctaattataaattactagtgaatctttttgatattttaagctctagtgggaaaaatctggccacttttgtgtttttatgaaggccatggaataaaaggatccaaagatttaaatatttttatctaatattttgattgttttcttaactttctccttaaaacattcagtagtgataaagatatagaaactgcactgtaggagaattggaatatttaaggctggttgacattttttattttcattttatatcttttgtatagctctacaaggcagtgttttgtaatttggtttcattatgaagatccagtacttggcagccatagtttagacaatattgttcagtgctgtttgcttgcatgttaacaacaaaaccttttagaggacccacaaatcatgatattgaacacagttccgaggcattcagagcatcagagcaagtaccatggcaatacatgtgtagactgttggagatgtcccgggccaatttcaagaaagaaaactgtaaatactagttctacttgctctgaaattatgagtttatgcgttttcccagccctccgaatcactgactggggcgttttgtgccccagcaataactggcagcatggcatacctgcagtaccccttacaatattaaagcaaagtttttattctaaaacagaataaaactgttcaataaaaaatgctcgtcaaagttctttctctttaaa

SEQ ID NO: 149749 - DNA, 559 bp, Homo sapiens
  Payload ID: 9584
  Gene Symbol: LSM14A
  Gene Name: LSM14A mRNA processing body assembly factor
  ENST ID: ENST00000575110
  CDS Start-End: 140-448
agcggagccggcgccgccgccatgttgggtctgaagcggctgctgtaggcgccgacggagcgagcgggcgtgcggagcgggcgacagtggcgtgggatctgcctctctgcgagcagctgggagcggcggcggcggcgccatgagcgggggcaccccttacatcggcagcaagatcagcctcatctccaaggcggagatccgctacgagggcatcctctacaccatcgacaccgaaaactccaccgtagcccttgccaaagttcgatcctttggtacagaagacagaccgacagatcgtccaataccacctcgagatgaagtctttgaatacattatattccgtgggagtgacattaaagaccttactgtttgtgagccaccaaaaccacagtgttctttgcctcaagacccagctattgttcagagtcgttggagtacagtggcgtgaactcggctcactacaacctccgcctcccaggttcaagtgattcttctgcctcagcctcctgagtagctgggattacagtcctcactaggctcatcgacttcttcattccag

SEQ ID NO: 149750 - DNA, 944 bp, Homo sapiens
  Payload ID: 9584
  Gene Symbol: LSM14A
  Gene Name: LSM14A mRNA processing body assembly factor
  ENST ID: ENST00000586157
  CDS Start-End: 1-944
ccttacatcggcagcaagatcagcctcatctccaaggcggagatccgctacgagggcatcctctacaccatcgacaccgaaaactccaccgtagcccttgccaaagttcgatcctttggtacagaagacagaccgacagatcgtccaataccacctcgagatgaagtctttgaatacattatattccgtgggagtgacattaaagaccttactgtttgtgagccaccaaaaccacagtgttctttgcctcaagacccagctattgttcagtcctcactaggctcatcgacttcttcattccagtccatgggttcttatggacctttcggcaggatgcccacatacagtcagttcagtccgagttccttagttgggcagcagtttggtgctgttggtgttgctggaagctctttgacatcctttggaacagaaacatcaaacagtggtaccttaccccaaagtagtgcggttggttctgcctttacacaggatacaagatctctaaaaacacagttatctcaagctgaagtacacaaagtttcaaggccagaaaatgagcaactcagaaatgataacaagagacaagtagctccaggtgctccttcagctccaaggagagggcgtgggggtcatcggggtggcaggggaagatttggtattcggcgagatgggccaatgaaatttgagaaagactttgactttgaaagtgcaaatgcacaattcaacaaggaagagattgacagagagtttcataataaacttaaattaaaagaagataaacttgagaaacaggagaagcctgtaaatggtgaagataaaggagactcaggagttgatacccaaaacagtgaaggaaatgccgatgaagaagatccacttggacctaattgctattatgacaaaactaaatccttctttgataatatttcttgtgatgacaatag

SEQ ID NO: 149751 - DNA, 559 bp, Homo sapiens; identical to SEQ ID NO: 149749
  Payload ID: 9584
  Gene Symbol: LSM14A
  Gene Name: LSM14A mRNA processing body assembly factor
  ENST ID: ENST00000589878
  CDS Start-End: 140-448

SEQ ID NO: 149752 - DNA, 445 bp, Homo sapiens
  Payload ID: 9584
  Gene Symbol: LSM14A
  Gene Name: LSM14A mRNA processing body assembly factor
  ENST ID: ENST00000585887
  CDS Start-End: 1-445
aagataaacttgagaaacaggagaagcctgtaaatggtgaagataaaggagactcaggagttgatacccaaaacagtgaaggaaatgccgatgaagaagatccacttggacctaattgctattatgacaaaactaaatccttctttgataatatttcttgtgatgacaatagagaacggagaccaacctgggctgaagaaagaagattaaatgctgaaacatttggaatcccacttcgtccaaaccgtggccgtgggggatacagaggcagaggaggtcttggtttccgtggtggcagagggcgtggtggtggcagaggtggtaccttcactgcccctcgaggatttcgcggtggattcagaggaggtcgtgggggccgggagtttgcggattttgaatatagggtaagtgttactgttaataaattctttggggttgacatgca

SEQ ID NO: 149753 - DNA, 434 bp, Homo sapiens
  Payload ID: 9584
  Gene Symbol: LSM14A
  Gene Name: LSM14A mRNA processing body assembly factor
  ENST ID: ENST00000624888
  CDS Start-End: 1-434
gagaaacaggagaagcctgtaaatggtgaagataaaggagactcaggagttgatacccaaaacagtgaaggaaatgccgatgaagaagatccacttggacctaattgctattatgacaaaactaaatccttctttgataatatttcttgtgatgacaatagagaacggagaccaacctgggctgaagaaagaagattaaatgctgaaacatttggaatcccacttcgtccaaaccgtggccgtgggggatacagaggcagaggaggtcttggtttccgtggtggcagagggcgtggtggtggcagaggtggtaccttcactgcccctcgaggatttcgcggtggattcagaggaggtcgtgggggccgggagtttgcggattttgaatatagggtaagtgttactgttaataaattctttggggttgacatgca

SEQ ID NO: 149754 - DNA, 876 bp, Homo sapiens
  Payload ID: 9585
  Gene Symbol: LSM2
  Gene Name: LSM2 homolog, U6 small nuclear RNA and mRNA degradation associated
  Uniprot ID: Q9Y333
  ENST ID: ENST00000375661
  CDS Start-End: 228-515
ccctttcccggcttcctcctcccctctactctacccagcttgcgctccccagccgcaagtcggccgcgctttgcccgtcagcgcttggagctttctgcgtcgcttcccgctgcgcctgcgcggtcccgcctcgccccacgcgcgggctcgcgcttcggtttccccagacctgctcgcagcaccctgctgtcttcccggtccggcccgctgcccgcggcgccagcaccatgctcttctattcttttttcaagtcccttgtgggcaaggatgtggtcgtggaactaaagaatgacctgagcatctgtggaaccctccattctgtggatcagtatctcaacatcaaactaactgacatcagtgtcacagaccctgagaaataccctcacatgttatcagtgaagaactgcttcattcggggctcagtggtccgatacgtgcagctgccagcagatgaggtcgacacacagttgctacaggatgcggcaaggaaggaagccctgcagcagaaacagtgatggctcctcctcctcttcccctccctctttcattggtgacccataaccccaagtcccagcccagaacccctaacccccaatacttgaaggggttttgtttttttactaatgatggttttgtgggttttttttaagggatgagtggatgagaggagtaatagggaacagctatcctctcttgagaaggggaggataagtaggctgggaaacttcaaagccttcccagtccccagcacctgcctttctcactacttctctggagatggtaggagagtttcctaggtctttccagggcagcatgtgattcatttggggatggaaggaatctgtcccgcatcgggaataaaatttatgatgcaaa

SEQ ID NO: 149755 - DNA, 876 bp, Homo sapiens; identical to SEQ ID NO: 149754
  Payload ID: 9585
  Gene Symbol: LSM2
  Gene Name: LSM2 homolog, U6 small nuclear RNA and mRNA degradation associated
  Uniprot ID: Q9Y333
  ENST ID: ENST00000383391
  CDS Start-End: 228-515

SEQ ID NO: 149756 - DNA, 876 bp, Homo sapiens; identical to SEQ ID NO: 149754
  Payload ID: 9585
  Gene Symbol: LSM2
  Gene Name: LSM2 homolog, U6 small nuclear RNA and mRNA degradation associated
  Uniprot ID: Q9Y333
  ENST ID: ENST00000424975
  CDS Start-End: 228-515

SEQ ID NO: 149757 - DNA, 876 bp, Homo sapiens; identical to SEQ ID NO: 149754
  Payload ID: 9585
  Gene Symbol: LSM2
  Gene Name: LSM2 homolog, U6 small nuclear RNA and mRNA degradation associated
  Uniprot ID: Q9Y333
  ENST ID: ENST00000434125
  CDS Start-End: 228-515

SEQ ID NO: 149758 - DNA, 876 bp, Homo sapiens; identical to SEQ ID NO: 149754
  Payload ID: 9585
  Gene Symbol: LSM2
  Gene Name: LSM2 homolog, U6 small nuclear RNA and mRNA degradation associated
  Uniprot ID: Q9Y333
  ENST ID: ENST00000432122
  CDS Start-End: 228-515

SEQ ID NO: 149759 - DNA, 876 bp, Homo sapiens; identical to SEQ ID NO: 149754
  Payload ID: 9585
  Gene Symbol: LSM2
  Gene Name: LSM2 homolog, U6 small nuclear RNA and mRNA degradation associated
  Uniprot ID: Q9Y333
  ENST ID: ENST00000455705
  CDS Start-End: 228-515

SEQ ID NO: 149760 - DNA, 3815 bp, Homo sapiens
  Payload ID: 9586
  Gene Symbol: LSM3
  Gene Name: LSM3 homolog, U6 small nuclear RNA and mRNA degradation associated
  Uniprot ID: P62310
  ENST ID: ENST00000306024
  CDS Start-End: 504-812
gcgcagcaacctccaccaggcctccgcgtctggactcccgccctgcctctgggcctcctccgcccaccggcggcgtctcccgcgaagcccgctgggcctcgctctcaccctcctcctcctcctcacgccgggccttgctcttggccttggatttctggctgcgcagttcgcgtccccgcggctccccgccggccgcgcgtttccgagccatgttgcttgtctgggcaaattccacttcgcgagtgacgcacccggccgcgatgcgctagaacgccggccccgccccgaggcggtgcgcttggccacgccccttcgttggaggcctagtcacgcccctaaaggaagctccaccccatacccgtggccactaaaaaactgcgggaagcaggaaagagcacaacaggtttctctctatttccggtgtattgtatcctcacgtttccggagattgacgttgctcttgtgttctcgcgagaggcgggaaagggcgcagggtttgaaacatggcggacgacgtagaccagcaacaaactaccaacactgtagaggagcccctggatcttatcaggctcagcctagatgagcgaatttatgtgaaaatgagaaatgaccgagagcttcgaggcagattacatgcttatgatcaacatttaaatatgatcttgggagatgtggaagaaactgtgactactatagaaattgatgaagaaacatatgaagagatatataaatcaacgaaacggaatattccaatgctctttgtccggggagatggcgttgtcctggttgcccctccactgagagttggctgaaacaaagaatttgtcctgtatggaaaacgggagactttgtacagtggcctctctaaaagtacaaaacattcataagagaaacctgcatacattttgatattaagaaataattccggggattcttccactcctgaaatgagttgatttgcagataactcacaacttcttaagctaaatggtattttcatttttctcaagctctccaataaatatgaccaccaagatgcagaactctttcaggacttcttttgctccattattctcacagatacttactgatttttcttttctttaaattggtgtttccttgtagatttttttaagtgcggtcttctgtcttgtgaattatttaaagtaagcatgtcttaccttcacttagcacacatttgcagtgcacctactgtgtttgaggcaccaggtttgagtgctgggaaccagagttttatcaaaatgctttctgggccagacatggtggctcatgcctgtaatcccagcactttgggaggccaaggtgggtggatcacctgaggtcaggcgtttgagaccagcctggccaacatggtgaaaccctttctctactgaaaatataaaaattagccaggcgtggtggcgcatacttgtaatcccagctactcaggaggctgaggcagtagacgcttgaacccaggaggcagaggttgcagtgagccaagatcacaccattgcacttcaacctggtcaacagagcgagactccgtgtcaaaaaaaaaaaaaaaaaagttttctgccctcaagtcttctggggaggcagatgtttaaaccaacaattgcaggcagtaagattagtgctgatagaatcatgcacatgcaggatgccataggagcatggggaagagcacccaaatatgggagaaaggggcagagggacattgtaaacatcaaccctgcagtagaagacagagcaaagcatgatttctcttttctctggcctgatttaattctaaggtcagacgttcagcttgatcataacctgtttataattatgactcagaccatttttccactcttggatcattggccattaatgatgaggggtctcaaacaacatgtctcagtgacacagtaaagcagaaattggctgaaagcaaagctgtttttatttctagcttcagtcagcacataatgcttaaaacctaaagaggaaagtaaaagcgtgttacaatctctcaaactttatcaagacagggcttagaacctgacatcctccgctatggtcattccattttgaaatgtagaaaatccaacttgtggatggtttgtctgtaaatgagctgaatgtgtgtgcgtgttcattatcaagcacgatatgctcacaaatgcacagtactttaagccttgtgcaagaaagatgctttcagtaaacatatttaaaaggttttattttccttactaatggtacatgcccctgcaagttcatggagaagagaaaaacaagtgtgggtgagctgatggaggcttcatcttaggtgaggaggcaggagagacaccctcccttcacttgtgccatccccacgctttgtccttaagctgtagtggtcccaggagataacctgtttacagcagcccattcagtattgaaaaatgaactccctcctgcagaatgttagaagaaacaacctcaaagacctcaggccgcctgtggtcattagtatgtggcagcaagattgaacctgcctgcctcctacctgtgtgagcctgtggtgtgggtgtggtaccaaggccctggctctgggcagtctgttggctcctggtgttcactaaggcgtggggtgacaggccatctggcctcgctctgccagtctgcagttctccccagcactgcattcatttttagtggtttctgatagtcacactgaattcctggacactttcttctcttcattcttagttatctttctcctttttctcctggaactgatagtttacactaaaacttttggctgtgaggacttgattatacacatttctaaaacccatgaaccttaatatctgacactgttactctcatatgcacacacaactaaaacataccaacctacttcatttcctagctgctaagatacaaggggagggacaataaaaggttaactgcagaatagccacctatgtgtcaggaaatggagggaggggaggcaatgtgtgagtccttttggagctgggactcaatccacaacagagacagctcaagcagggccctgccatggtccacactgaggtttcctctgcagtggtgctgtccactgaggggttatggtgtgagggcccctgggagccacgccttggacttctgagtctgcagagcactcggctccagccagctggatggcaggtggtcagtggagctggtgactggtggtttctgcaatgaggtgtcagattagcctaagggaagcctcttcagcaagtatcatgcctggatcccggtcttggttgttttatgagaggccgatatgaattgccattgcctcccacaaagaaaaatggacaaaatatgggaccacatctttgagatgaaatgtgcccaaaatgaaaagtaacttgagtatcccaagttaaacttaatcattagctgcaaatggacgattttcaaatttcaaatagtgatttttgaagatttgcccaaactagagtactatccctcttcacactaagaggcagaaagtggtttcacacacccttttatttaatcagctaaagtgggtgcggtgacacacacctgtaaactcaaccactaaggagactgaggcgggaggattacttgagcccaggagttcgagatcagcctgagcaacataacaagaccctgtctcaaataatacttagctattacccatattgcttttagcctgctgccaggaggggagaaatgttattgtttgaacagatgtcagatgtgagtaatgctcagctgtgttcaatgtagaaaattaataaaagttccaggagtcatcctggctagatcaa

SEQ ID NO: 149761 - DNA, 1113 bp, Homo sapiens
  Payload ID: 9587
  Gene Symbol: LSM4
  Gene Name: LSM4 homolog, U6 small nuclear RNA and mRNA degradation associated
  ENST ID: ENST00000600289
  CDS Start-End: 41-250
gcggcggaagtggccggcgagcccggtccccgccggcaccatgcttcccttgtcactgctgaagacggctcagaatcaccccatgttggtggagctgaaaaatggggagacgtacaatggacacctggtgagctgcgacaactggatgaacattaacctgcgagaagtcatctgcacgtccagggtgaagaaccccaaccagagagagccccatcccaggctggagggagccccagtcagccactcctgagccaggcccacgggcagaggataggagccagtcttccttgacggggacaagttctggcggatgcccgagtgctacatccgcggcagcaccatcaagtacctgcgcatccccgacgagatcatcgacatggtcaaggaggaggtggtggccaagggccgcggccgcggaggcctgcagcagcagaagcagcagaaaggccgcggcatgggcggcgctggccgaggtgtgtttggtggccggggccgaggtgggatcccgggcacaggcagaggccagccagagaagaagcctggcagacaggcgggcaaacagtgagcgcccacccagaccggctgctgcgccccctcctgccagggtggcgattccgctccacagtctcggacggatctgctcagaaaggaagaggcaggcgccagggggaacccccttcgtgttttgtgaccctcccttttaggtgaagcccctttttcttgctaaaaccggcaattctccggttagaaatgttacttggtgttttttggttttgtgaaacggccgtcccaaaactggctggattcctagaagagtctgtgttgaaggcatctttcaagccctcgctctggttctcagggcagcattttccaggcgggtttgttttgcatttcttggagcctctccgagcagcaaccagacgggagatttttattttaagctgttcatgctgggactgacagcctgcagggtttccttgggcgcggccccaaaattgccttcaaaacaaacccgggacggttgaaagccttcgaaccgtgcaggggatgcctcgggccctggcccttcgcttcctctcttgtgttatggaaataaaaacaaataaaactaca

SEQ ID NO: 149762 - DNA, 1908 bp, Homo sapiens
  Payload ID: 9587
  Gene Symbol: LSM4
  Gene Name: LSM4 homolog, U6 small nuclear RNA and mRNA degradation associated
  Uniprot ID: Q9Y4Z0
  ENST ID: ENST00000593829
  CDS Start-End: 255-674
attacaagccgcggcactttacggctctcgtcctcgttcctccggcgggaacacggcccgccccgccctttcgcccagcgggccccgccctactccgcgtggattggttgaccgcccttcgagcccggtgctgactggcttgcgtctctgccactttctttcagcttagtggcgcgcggcgcggcgacgaccgccgggagcgtgtgcagcggcggcggcggaagtggccggcgagcccggtccccgccggcaccatgcttcccttgtcactgctgaagacggctcagaatcaccccatgttggtggagctgaaaaatggggagacgtacaatggacacctggtgagctgcgacaactggatgaacattaacctgcgagaagtcatctgcacgtccagggacggggacaagttctggcggatgcccgagtgctacatccgcggcagcaccatcaagtacctgcgcatccccgacgagatcatcgacatggtcaaggaggaggtggtggccaagggccgcggccgcggaggcctgcagcagcagaagcagcagaaaggccgcggcatgggcggcgctggccgaggtgtgtttggtggccggggccgaggtgggatcccgggcacaggcagaggccagccagagaagaagcctggcagacaggcgggcaaacagtgagcgcccacccagaccggctgctgcgccccctcctgccagggtggcgattccgctccacagtctcggacggatctgctcagaaaggaagaggcaggcgccagggggaacccccttcgtgttttgtgaccctcccttttaggtgaagcccctttttcttgctaaaaccggcaattctccggttagaaatgttacttggtgttttttggttttgtgaaacggccgtcccaaaactggctggattcctagaagagtctgtgttgaaggcatctttcaagccctcgctctggttctcagggcagcattttccaggcgggtttgttttgcatttcttggagcctctccgagcagcaaccagacgggagatttttattttaagctgttcatgctgggactgacagcctgcagggtttccttgggcgcggccccaaaattgccttcaaaacaaacccgggacggttgaaagccttcgaaccgtgcaggggatgcctcgggccctggcccttcgcttcctctcttgtgttatggaaataaaaacaaataaaactacacactgcacatccactgttccttttgagcttctgggtgcacctagcgggtctcctgccctctgtccatcgctggactctcaggaaatccccgttcccgtaagggaagcttccttttgagagttctcaccaggtgtcagcggcacagtgaggcactgatgtccttttacaaaaggcaagaccagcatctggacagtgggggctcttgagagtccccggcgccccccacaccaggttgtcctataaccctctcccctctgtggagacgttaatgccaaggggtgtgtggggagggaagtcccaggcaggggccacgcatggtccccatcaccccctcctgggtggcctggactccatcatctatcctcatctgtccacactggcgttcacacagagaagacaggacaggaatcccctcggaagatgctcatggaagattctcacgaggctcctgccccctttctgagccaggccgggtttgccactcctcgggcgcgcacctgagacactgagtcagcgctttcgagaaaggctccgggtagcatctgtggaccgtgaagaaaccagagggaagccctgagccaggcagcggcccgtccccctgcatagccttctcttcagggtcctcgttcggagacctattttgagaggtgattggaataaaaggtcccgtccgtgaggaactcttt

SEQ ID NO: 149763 - DNA, 986 bp, Homo sapiens
  Payload ID: 9587
  Gene Symbol: LSM4
  Gene Name: LSM4 homolog, U6 small nuclear RNA and mRNA degradation associated
  ENST ID: ENST00000252816
  CDS Start-End: 52-429
gtgcagcggcggcggcggaagtggccggcgagcccggtccccgccggcaccatgttggtggagctgaaaaatggggagacgtacaatggacacctggtgagctgcgacaactggatgaacattaacctgcgagaagtcatctgcacgtccagggacggggacaagttctggcggatgcccgagtgctacatccgcggcagcaccatcaagtacctgcgcatccccgacgagatcatcgacatggtcaaggaggaggtggtggccaagggccgcggccgcggaggcctgcagcagcagaagcagcagaaaggccgcggcatgggcggcgctggccgaggtgtgtttggtggccggggccgaggtgggatcccgggcacaggcagaggccagccagagaagaagcctggcagacaggcgggcaaacagtgagcgcccacccagaccggctgctgcgccccctcctgccagggtggcgattccgctccacagtctcggacggatctgctcagaaaggaagaggcaggcgccagggggaacccccttcgtgttttgtgaccctcccttttaggtgaagcccctttttcttgctaaaaccggcaattctccggttagaaatgttacttggtgttttttggttttgtgaaacggccgtcccaaaactggctggattcctagaagagtctgtgttgaaggcatctttcaagccctcgctctggttctcagggcagcattttccaggcgggtttgttttgcatttcttggagcctctccgagcagcaaccagacgggagatttttattttaagctgttcatgctgggactgacagcctgcagggtttccttgggcgcggccccaaaattgccttcaaaacaaacccgggacggttgaaagccttcgaaccgtgcaggggatgcctcgggccctggcccttcgcttcctctcttgtgttatggaaataaaaacaaataaaactacacactgcaca

SEQ ID NO: 149764 - DNA, 446 bp, Homo sapiens
  Payload ID: 9587
  Gene Symbol: LSM4
  Gene Name: LSM4 homolog, U6 small nuclear RNA and mRNA degradation associated
  ENST ID: ENST00000597776
  CDS Start-End: 120-446
aatctgagaggcaggtgtgtgttccagggctgggcagagtgaggaaatggcatttccagtggggggtgattgacacgcactcctgtgccccctcaaccgcaccgcaccatctatgagtcatgggtgggactcaagaccagagctcccaggcgctggtcaaacagacaaatcatgtggctttatttgcctttcagcttcccttgtcactgctgaagacggctcagaatcaccccatgttggtggagctgaaaaatggggagacgtacaatggacacctggtgagctgcgacaactggatgaacattaacctgcgagaagtcatctgcacgtccagggacggggacaagttctggcggatgcccgagtgctacatccgcggcagcaccatcaagtacctgcgcatccccgacgagatcatcgacatggtcaaggaggaggtggtggcc

SEQ ID NO: 149765 - DNA, 807 bp, Homo sapiens
  Payload ID: 9587
  Gene Symbol: LSM4
  Gene Name: LSM4 homolog, U6 small nuclear RNA and mRNA degradation associated
  ENST ID: ENST00000594828
  CDS Start-End: 93-807
agcttagtggcgcgcggcgcggcgacgaccgccgggagcgtgtgcagcggcggcggcggaagtggccggcgagcccggtccccgccggcaccatgcttcccttgtcactgctgaagacggctcagaatcaccccatgttggtggagctgaaaaatggggagacgtacaatggacacctggtgagctgcgacaactggatgaacattaacctgcgagaagtcatctgcacgtccagggacggggacaagttctggcggatgcccgagtgctacatccgcggcagcaccatcaagtacctgcgcatccccgacgagatcatcgacatggtcaaggaggaggtggtggccaagggccgcggccgcggaggcctgcagcagcagaagcagcagaaaggccgcggcatgggcggcgctggccgaggtgggtctcccctctccagtggacgtacctggggcgggaagacagccacacgtggcatccctccttcttggggttgcccttgcagcgctgcctcggagcctcccaaccctcccgggcccccctcctggtccttggccatgagccgaggcccaggcagaggagccccgagacctgggactcagccctcctctcactgcgcctcctggcggtcctcagggcacatcaagtcacctccccaagcctcagtttcccctctgagagggtatggtggtgcccatctgtccaggccgctggcaactccacttggaacctggcgtggctctatccagagccaaggtcgcccgcccccaccggagatgatgaattggcataaaattccatttgtta

SEQ ID NO: 149766 - DNA, 1295 bp, Homo sapiens
  Payload ID: 9588
  Gene Symbol: LSM5
  Gene Name: LSM5 homolog, U6 small nuclear RNA and mRNA degradation associated
  ENST ID: ENST00000223084
  CDS Start-End: 499-714
cttaaatcctcactaaagaaaaattttaaaaaatgctagttgcagattttcaatccactggactttaaaaagaaacaatagattccttaatgagtagttgtaacgaaaattgtaacagttaattgatggcaggaaatacgaattgatttatactggtttgaagattctggcttgagaggaaatgcaactttacgggggaagaagactcaaacgttacaggaacaatttattcacaaggcaaaatatcttcaacgtctctccaaaacttcaagggcattatgggtatctgccgagatggtaaaatgtccagtgggcaggaaatatttcaccggatctcacttgccggggaaaaaagccagtgaacgcgacccacgcagctgactagatcgtgcgctcggcctcagattggtcgagcctgtttgggctgcggaaaaagcggaagcgcgcttttcaaagtcgtcccaccatcaatgaaggcaggccacttccggcgtagccatggcggctaacgctactaccaacccgtcgcagctgctgcccttaggtaatcgccgtcctttggggagcaggaacagggagctgacattcaggattgggggccgaggggctgttccgaggcaggccctggccgagtgtggggaaatgtataagaccaaatgcggttcgactctgagctccaagtcttcgcgacagcaggccgcacctgctctttaacgtggtcgggctcctccaggcaaggactttgacttctcaaaccagaccttcactggaaaaggtccacatttagtgaacgcgtcgtcggcctactttgttgtgagcccgcctctgcagtgttatagagcttgtggacaaatgtataggatcaagaattcacatcgtgatgaagagtgataaggaaattgttggtactcttctaggatttgatgactttgtcaatatggtactggaagatgtcactgagtttgaaatcacaccagaaggaagaaggattactaaattagatcagattttgctaaatggaaataatataacaatgctggttcctggaggagaaggacctgaagtgtgaatgagtttccttgacttacactagattttgttttggcttataatgacaagaaaatggaattttttttcccactttctaatgtttaaatcccataaagctaagtttcccgttaaagggaagtgctttgaagatgtgtacccatttttgtaagttaatcatgattatcctggaaaaagaagaaaagagcttcttctttgcagatgaaaataaaggtgtttttggttaa

SEQ ID NO: 149767 - DNA, 504 bp, Homo sapiens
  Payload ID: 9588
  Gene Symbol: LSM5
  Gene Name: LSM5 homolog, U6 small nuclear RNA and mRNA degradation associated
  ENST ID: ENST00000409987
  CDS Start-End: 16-210
acttccggcgtagccatggcggctaacgctactaccaacccgtcgcagctgctgcccttagagcttgtggacaaatgtataggatcaagaattcacatcgtgatgaagagtgataaggaaattgttggtactcttctaggatttgatgactttgtcagtatccttttaaaagtgaaatcacaccagaaggaagaaggattactaaattagatcagattttgctaaatggaaataatataacaatgctggttcctggaggagaaggacctgaagtgtgaatgagtttccttgacttacactagattttgttttggcttataatgacaagaaaatggaattttttttcccactttctaatgtttaaatcccataaagctaagtttcccgttaaagggaagtgctttgaagatgtgtacccatttttgtaagttaatcatgattatcctggaaaaagaagaaaagagcttcttctttgcagatgaaaataaaggtgtttttggttaa

SEQ ID NO: 149768 - DNA, 740 bp, Homo sapiens
  Payload ID: 9588
  Gene Symbol: LSM5
  Gene Name: LSM5 homolog, U6 small nuclear RNA and mRNA degradation associated
  Uniprot ID: Q9Y4Y9
  ENST ID: ENST00000409909
  CDS Start-End: 96-284
acgtgacccgggcggctgggcttgcagagcctgtggtgtccgcgggacctggagagcttgtggacaaatgtataggatcaagaattcacatcgtgatgaagagtgataaggaaattgttggtactcttctaggatttgatgactttgtcaatatggtactggaagatgtcactgagtttgaaatcacaccagaaggaagaaggattactaaattagatcagattttgctaaatggaaataatataacaatgctggttcctggaggagaaggacctgaagtgtgaatgagtttccttgacttacactagattttgttttggcttataatgacaagaaaatggaattttttttcccactttctaatgtttaaatcccataaagctaagtttcccgttaaagggaagtgctttgaagatgtgtacccatttttgtaagttaatcatgattatcctggaaaaagaagaaaagagcttcttctttgcagatgaaaataaaggtgtttttggttaactgtcattttgtttattctactgcagtagccagtggaacaaagtttgtagttattttgccacttacttttctgtcattatatgcttatttgttttgtcatttacgtgaccatttgattctcaaacaaaagttgttccaaacaaaatgatgaactttgatttgaacaggtgcatttaaacaaccggaaatgatcacttagaaaattcaattaaaatgctgttgttttgtaa

SEQ ID NO: 149769 - DNA, 687 bp, Homo sapiens
  Payload ID: 9588
  Gene Symbol: LSM5
  Gene Name: LSM5 homolog, U6 small nuclear RNA and mRNA degradation associated
  Uniprot ID: Q9Y4Y9
  ENST ID: ENST00000410044
  CDS Start-End: 273-461
cggctaacgctactaccaacccgtcgcagctgctgcccttaggtaatcgccgtcctttggggagcaggaacagggagctgacattcaggattgggggccgaggggctgttccgaggcaggccctggccgagtgtggggaaatgtataagaccaaatgcggttcgactctgagctccaagtcttcgcgacagcaggccgcacctgctctttaacgtggtcgggctcctccagagcttgtggacaaatgtataggatcaagaattcacatcgtgatgaagagtgataaggaaattgttggtactcttctaggatttgatgactttgtcaatatggtactggaagatgtcactgagtttgaaatcacaccagaaggaagaaggattactaaattagatcagattttgctaaatggaaataatataacaatgctggttcctggaggagaaggacctgaagtgtgaatgagtttccttgacttacactagattttgttttggcttataatgacaagaaaatggaattttttttcccactttctaatgtttaaatcccataaagctaagtttcccgttaaagggaagtgctttgaagatgtgtacccatttttgtaagttaatcatgattatcctggaaaaagaagaaaagagcttcttctttgcagatgaaaataaaggtgtttttggttaa

SEQ ID NO: 149770 - DNA, 538 bp, Homo sapiens
  Payload ID: 9588
  Gene Symbol: LSM5
  Gene Name: LSM5 homolog, U6 small nuclear RNA and mRNA degradation associated
  Uniprot ID: Q9Y4Y9
  ENST ID: ENST00000409292
  CDS Start-End: 118-306
tcactggaaaaggtccacatttagtgaacgcgtcgtcggcctactttgttgtgagcccgcctctgcagtgttatagagcttgtggacaaatgtataggatcaagaattcacatcgtgatgaagagtgataaggaaattgttggtactcttctaggatttgatgactttgtcaatatggtactggaagatgtcactgagtttgaaatcacaccagaaggaagaaggattactaaattagatcagattttgctaaatggaaataatataacaatgctggttcctggaggagaaggacctgaagtgtgaatgagtttccttgacttacactagattttgttttggcttataatgacaagaaaatggaattttttttcccactttctaatgtttaaatcccataaagctaagtttcccgttaaagggaagtgctttgaagatgtgtacccatttttgtaagttaatcatgattatcctggaaaaagaagaaaagagcttcttctttgcagatgaaaataaaggtgtttttggttaactgtca

SEQ ID NO: 149771 - DNA, 649 bp, Homo sapiens
  Payload ID: 9588
  Gene Symbol: LSM5
  Gene Name: LSM5 homolog, U6 small nuclear RNA and mRNA degradation associated
  Uniprot ID: Q9Y4Y9
  ENST ID: ENST00000409782
  CDS Start-End: 240-428
acttccggcgtagccatggcggctaacgctactaccaacccgtcgcagctgctgcccttagttggtgaagagtgattgaactagtggtcgtggccgtgattgaaaagttttcattccttcatgccacagactcttttggaaggctcattatgtgccagatgctgtgcttgaactgagatttgtattataagacctaaaagcttgtggacaaatgtataggatcaagaattcacatcgtgatgaagagtgataaggaaattgttggtactcttctaggatttgatgactttgtcaatatggtactggaagatgtcactgagtttgaaatcacaccagaaggaagaaggattactaaattagatcagattttgctaaatggaaataatataacaatgctggttcctggaggagaaggacctgaagtgtgaatgagtttccttgacttacactagattttgttttggcttataatgacaagaaaatggaattttttttcccactttctaatgtttaaatcccataaagctaagtttcccgttaaagggaagtgctttgaagatgtgtacccatttttgtaagttaatcatgattatcctggaaaaagaagaaaagagcttcttctttgcagatgaaaataaaggtgtttttg

SEQ ID NO: 149772 - DNA, 687 bp, Homo sapiens
  Payload ID: 9588
  Gene Symbol: LSM5
  Gene Name: LSM5 homolog, U6 small nuclear RNA and mRNA degradation associated
  Uniprot ID: Q9Y4Y9
  ENST ID: ENST00000409952
  CDS Start-End: 301-489
ggtgtccgcgggacctggaggtgcggcgtggcacacctgctttttcctccctggattcaatctcaaagcacttccttctcttttgccttctctttttcctcaaagttttcccacttccctcttctcttctgttttccttgctttttcacatcttttcggttcactctccgagtgtccgattccttcacctccttgcctttgcctctgtggcccccgtccttattcttaaatatgtagtaacatggagcatactggtgagagcttgtggacaaatgtataggatcaagaattcacatcgtgatgaagagtgataaggaaattgttggtactcttctaggatttgatgactttgtcaatatggtactggaagatgtcactgagtttgaaatcacaccagaaggaagaaggattactaaattagatcagattttgctaaatggaaataatataacaatgctggttcctggaggagaaggacctgaagtgtgaatgagtttccttgacttacactagattttgttttggcttataatgacaagaaaatggaattttttttcccactttctaatgtttaaatcccataaagctaagtttcccgttaaagggaagtgctttgaagatgtgtacccatttttgtaagttaatcatgattatcctggaaaaagaagaaaagagcttcttctttgc

SEQ ID NO: 149773 - DNA, 2258 bp, Homo sapiens
  Payload ID: 9588
  Gene Symbol: LSM5
  Gene Name: LSM5 homolog, U6 small nuclear RNA and mRNA degradation associated
  Uniprot ID: Q9Y4Y9
  ENST ID: ENST00000450169
  CDS Start-End: 54-329
gcttttcaaagtcgtcccaccatcaatgaaggcaggccacttccggcgtagccatggcggctaacgctactaccaacccgtcgcagctgctgcccttagagcttgtggacaaatgtataggatcaagaattcacatcgtgatgaagagtgataaggaaattgttggtactcttctaggatttgatgactttgtcaatatggtactggaagatgtcactgagtttgaaatcacaccagaaggaagaaggattactaaattagatcagattttgctaaatggaaataatataacaatgctggttcctggaggagaaggacctgaagtgtgaatgagtttccttgacttacactagattttgttttggcttataatgacaagaaaatggaattttttttcccactttctaatgtttaaatcccataaagctaagtttcccgttaaagggaagtgctttgaagatgtgtacccatttttgtaagttaatcatgattatcctggaaaaagaagaaaagagcttcttctttgcagatgaaaataaaggtgtttttggttaactgtcattttgtttattctactgcagtagccagtggaacaaagtttgtagttattttgccacttacttttctgtcattatatgcttatttgttttgtcatttacgtgaccatttgattctcaaacaaaagttgttccaaacaaaatgatgaactttgatttgaacaggtgcatttaaacaaccggaaatgatcacttagaaaattcaattaaaatgctgttgttttgtaatgaggatttttcttctgatttcaaattccatgaactcctattgaaaacaaacaatgtacaggtaatatatgcacattgtagaaatgcaggaattatctattggaattaccctaaagatagaaattttatctatttgcttataaaattgattcagaaggttattaccttaatgtagttattactgaattgccaggaaatgagtggagacagagctttaagataaaggatactaaaagcagctaagaactccaggactcaggtcaaatcaaggaactgataataagatcattgaactgtataaattaagtcaaagaactcctattaaaaacaaacaggtaatatatgcacatcgtagaattgtaggtaagcaaaaaggagaaggttgatcatgctttgctgtatgtcttcgtagactttctcagtccactctcagtacacgttttattttacttgctcatcctgattatactgtttttaccctccacttaagtcattttttgaatttaaatggtgaatatctttctgtgtcaaatatttcaacattaatatgtacatagtattaaatggatttactataaattatttagcctattcttactggccacagtagtctaactagatctttatacatttgtatttttctagaataaactcaaaaatgtgtaagatcaaagggtatatattgtgttgccaagaaaaagtttgtgccaatgtatatttttgccaggagtctttcatagtaccatttatatccttcccagcattagctgtgttctaccttctctcctctttgccatttttacaagaaaaccgggcatgtctaaagttttcttttcctttttttttttttttttttttttttggagagtctcactggaatgcagtggcatgatcttggctccctgcaacctccagtcaggctggtgtgccttgtcgcgatatcaacgcgacctccgcctcccaggttcaagtgattgtcctgcctcaccctcctgagtagctgggattacaggtgggcgccaccactcccatctaatttttatatttttagagagatggggttttaccttgttggccaggctggtcttgaactcctgacctctagtgatccacctgcctcagcctcccaaagtgccggtattaaaggcatgagccaccaggcctggcctaaaattttcttgattaattttgatctcatttgtattttgtaaatgacttatctgttgaggcttttgccattgagatgtttgtctttttcttactaatttgtaagaattcttgatgggtttctgttagtcatgtattttgctaataatttccctagtttgtagtttgccacttagtgctatttttgacataaatgatgtattttaatgtagttgcatgttgacctagtccattatggtttttgtatttggtccacgtggattggaaaacctttgctttgattatacttttctttgggcactttat

SEQ ID NO: 149774 - DNA, 768 bp, Homo sapiens
  Payload ID: 9589
  Gene Symbol: LSM6
  Gene Name: LSM6 homolog, U6 small nuclear RNA and mRNA degradation associated
  Uniprot ID: P62312
  ENST ID: ENST00000296581
  CDS Start-End: 138-380
gaagagcactgattggctgaggcagaaaagtgcccctgcctcggcgctttcggttttggctgggatcatccgcggcggccgggctcgtggggcgcctggagtgagggttctggttcccgccggcgaggattgttaaaatgagtcttcggaagcaaacccctagtgacttcttaaagcaaatcatcggacgaccagttgtggtaaaattaaattctggagtggattatcgaggggtcctggcttgcctggatggctacatgaatatagccctggagcagacagaagaatatgtaaatggacaactgaagaataagtatggggatgcatttatccgaggaaacaatgtgttgtacatcagtacacagaagagacggatgtgaagacaccaagagagcaacgcttttcatagttggatatatttttttatgaattttttctaatttttgcttcttttgtgatacaatttgtcctctttttataatagttggtgatttttcactgacatgtgagtaagataaatgtatacaattgtggatttaattgtgaaatgttctttcacttgtaagtttcagtcattttcttttacctcgttgtcagtgtacagaatgctaaaataattaaaaaaagacaaaatatacctcttcctacaagattatttaacttaagtttcgagaagtgtcatttcatttgacttgcttttcttatccagctaaaatgatgcatatattttatatattgtatggacatataattaaaacattttggagg

SEQ ID NO: 149775 - DNA, 549 bp, Homo sapiens
  Payload ID: 9589
  Gene Symbol: LSM6
  Gene Name: LSM6 homolog, U6 small nuclear RNA and mRNA degradation associated
  Uniprot ID: P62312
  ENST ID: ENST00000504181
  CDS Start-End: 75-317
gatcatccgcggcggccgggctcgtggggcgcctggagtgagggttctggttcccgccggcgaggattgttaaaatgagtcttcggaagcaaacccctagtgacttcttaaagcaaatcatcggacgaccagttgtggtaaaattaaattctggagtggattatcgaggggtcctggcttgcctggatggctacatgaatatagccctggagcagacagaagaatatgtaaatggacaactgaagaataagtatggggatgcatttatccgaggaaacaatgtgttgtacatcagtacacagaagagacggatgtgaagacaccaagagagcaacgcttttcatagttggatatatttttttatgaattttttctaatttttgcttcttttgtgatacaatttgtcctctttttataatagttggtgatttttcactgacataatccttgcgtgaatatgttctacaaaggcatccagtttcagtctgaagctacaaaaaggggccacaggatcagaagttcagccactgattgagtcacctaaataaa

SEQ ID NO: 149776 - DNA, 1352 bp, Homo sapiens
  Payload ID: 9589
  Gene Symbol: LSM6
  Gene Name: LSM6 homolog, U6 small nuclear RNA and mRNA degradation associated
  Uniprot ID: P62312
  ENST ID: ENST00000502781
  CDS Start-End: 720-962
cgctttcggttttggctgggatcatccgcggcggccgggctcgtggggcgcctggagtgagggttctggttcccgccggcgaggtgagccgcaccgctgcgcgggccgacgacggggccgggcgcagccccaggttcggtgccccagtgttcagtcgcgctgtggagcggcggctgcagcggccctaggccgggcgaggcagccccggaaagggcctgcggtgaacaggctggggctccgggaagggaccgctgggtggcgggtccccgcgaaatgccgcgtccaagctctccgcgcatggaatggctgggagaggtctgatggtgggcgccgggaccgccctcagcgaggcgcctagactgcgcggagaggagcggcaccgtcccggctcctaccgagttggcgtccgagatcaattcaggttgttgaagttccccagggagccccgacgctaatcccaagattcggcgggaaagcggatcccgaacccaggcctaggcttcgcctgtcttccaggagggcttcagggaattgcgaaccctctcctacatcggggtggctgcgcctgaccacaggaattaaaggctggactcgcctgtcttaccaagttgtcaggtcgaggaacccgattgtatggtcttaagtcctatcgcccaaggttttctgtgcgtatgcgtgtccgcacacctgcatagcaggcatttttaaggattgttaaaatgagtcttcggaagcaaacccctagtgacttcttaaagcaaatcatcggacgaccagttgtggtaaaattaaattctggagtggattatcgaggggtcctggcttgcctggatggctacatgaatatagccctggagcagacagaagaatatgtaaatggacaactgaagaataagtatggggatgcatttatccgaggaaacaatgtgttgtacatcagtacacagaagagacggatgtgaagacaccaagagagcaacgcttttcatagttggatatatttttttatgaattttttctaatttttgcttcttttgtgatacaatttgtcctctttttataatagttggtgatttttcactgacatgtgagtaagataaatgtatacaattgtggatttaattgtgaaatgttctttcacttgtaagtttcagtcattttcttttacctcgttgtcagtgtacagaatgctaaaataattaaaaaaagacaaaatatacctcttcctacaagattatttaacttaagtttcgagaagtgtcatttcatttgacttgcttttcttatccagctaaaatgatgcatatattttatatattgtatggacatataattaaaacattttggaggaa

SEQ ID NO: 149777 - DNA, 545 bp, Homo sapiens
  Payload ID: 9589
  Gene Symbol: LSM6
  Gene Name: LSM6 homolog, U6 small nuclear RNA and mRNA degradation associated
  Uniprot ID: P62312
  ENST ID: ENST00000515311
  CDS Start-End: 120-362
gaggcagaaaagtgcccctgcctcggcgctttcggttttggctgggatcatccgcggcggccgggctcgtggggcgcctggagtgagggttctggttcccgccggcgaggattgttaaaatgagtcttcggaagcaaacccctagtgacttcttaaagcaaatcatcggacgaccagttgtggtaaaattaaattctggagtggattatcgaggggtcctggcttgcctggatggctacatgaatatagccctggagcagacagaagaatatgtaaatggacaactgaagaataagtatggggatgcatttatccgaggaaacaatgtgttgtacatcagtacacagaagagacggatgtgaagacaccaagagagcaacgcttttcatagttggatatatttttttatgaattttttctaatttttgcttcttttgtgatacaatttgtcctctttttataatagttggtgatttttcactgacatagtctcactcccatcgcccagacttgagtgtagtgatgtgatcactgctcactgcagt

SEQ ID NO: 149778 - DNA, 529 bp, Homo sapiens
  Payload ID: 9590
  Gene Symbol: LSM7
  Gene Name: LSM7 homolog, U6 small nuclear RNA and mRNA degradation associated
  Uniprot ID: Q9UK45
  ENST ID: ENST00000252622
  CDS Start-End: 55-366
gggaggtcaaagggcgcggggcggtgcctgcgaagagccacacggcgcgacaagatggcggataaggagaagaagaaaaaggagagcatcttggacttgtccaagtacatcgacaagacgatccgggtaaagttccagggaggccgcgaagccagtggaatcctgaagggcttcgacccactcctcaaccttgtgctggacggcaccattgagtacatgcgagaccctgacgaccagtacaagctcacggaggacacccggcagctgggcctcgtggtgtgccggggcacgtccgtggtgctaatctgcccgcaggacggcatggaggccatccccaaccccttcatccagcagcaggacgcctagcctggccgggggcgcggggggtgcagggcaggcccgagcagctcggtttcccgcggacttggctgctgctcccaccgcagtaccgcctcctggaacggaagcattttcctttttgtataggttgaatttttgttttcttaataaaattgcaaacctcaatgtg

SEQ ID NO: 149779 - DNA, 621 bp, Homo sapiens
  Payload ID: 9590
  Gene Symbol: LSM7
  Gene Name: LSM7 homolog, U6 small nuclear RNA and mRNA degradation associated
  ENST ID: ENST00000585395
  CDS Start-End: 1-183
gataaggagaagaagaaaaaggagagcatcttggacttgtccaagtacatcgacaagacgatccgggtaaagttccagggaggccgcgaagagtcacaggccctagcccacactccagaggaggggcaccttggctccatgttagagacctacctacctcagtgctcacatctctccccgtgaggagggcgggctcactggtcaggctggtgccaaggacctgaacatctgcatctgaccccatcttatagtggaatcctgaagggcttcgacccactcctcaaccttgtgctggacggcaccattgagtacatgcgagaccctgacgaccagtacaagctcacggaggacacccggcagctgggcctcgtggtgtgccggggcacgtccgtggtgctaatctgcccgcaggacggcatggaggccatccccaaccccttcatccagcagcaggacgcctagcctggccgggggcgcggggggtgcagggcaggcccgagcagctcggtttcccgcggacttggctgctgctcccaccgcagtaccgcctcctggaacggaagcattttcctttttgtataggttgaatttttgttttcttaataaaattgcaaacctcaa

SEQ ID NO: 149780 - DNA, 512 bp, Homo sapiens
  Payload ID: 9590
  Gene Symbol: LSM7
  Gene Name: LSM7 homolog, U6 small nuclear RNA and mRNA degradation associated
  ENST ID: ENST00000585409
  CDS Start-End: 46-153
aagggcgcggggcggtgcctgcgaagagccacacggcgcgacaagatggcggataaggagaagaagaaaaaggagagcatcttggacttgtccaagtacatcgacaagacgatccgggtaaagttccagggaggccgcgaagtggaatcctgaagggcttcgacccactcctcaaccttgtgctggacggcaccattgagtacatgcgagaccctgacgaccagtacaagctcacggaggacacccggcagctgggcctcgtggtgtgccggggcacgtccgtggtgctaatctgcccgcaggacggcatggaggccatccccaaccccttcatccagcagcaggacgcctagcctggccgggggcgcggggggtgcagggcaggcccgagcagctcggtttcccgcggacttggctgctgctcccaccgcagtaccgcctcctggaacggaagcattttcctttttgtataggttgaatttttgttttcttaataaaattgcaaacctcaa

SEQ ID NO: 149781 - DNA, 575 bp, Homo sapiens
  Payload ID: 9590
  Gene Symbol: LSM7
  Gene Name: LSM7 homolog, U6 small nuclear RNA and mRNA degradation associated
  ENST ID: ENST00000587502
  CDS Start-End: 266-415
gagccacacggcgcgacaagatggcggtgagcgcgcggcggaatctggagccggggggcgtggagctcgggccgcgctccaggtctcatgcgctctgctttccccgcaggataaggagaagaagaaaaaggagagcatcttggacttgtccaagtacatcgacaagacgatccgggtaaagttccagggaggccgcgaagccagtggaatcctgaagggcttcgacccactcctcaaccttgtgctggacggcaccattgagtacatgcgagaccctgacgaccagtacaagctcacggaggacacccggcagctgggcctcgtggtgtgccggggcacgtccgtggtgctaatctgcccgcaggacggcatggaggccatccccaaccccttcatccagcagcaggacgcctagcctggccgggggcgcggggggtgcagggcaggcccgagcagctcggtttcccgcggacttggctgctgctcccaccgcagtaccgcctcctggaacggaagcattttcctttttgtataggttgaatttttgttttcttaataaaattgcaaacctcaat

SEQ ID NO: 149782 - DNA, 1305 bp, Homo sapiens
  Payload ID: 9591
  Gene Symbol: LSM8
  Gene Name: LSM8 homolog, U6 small nuclear RNA associated
  Uniprot ID: O95777
  ENST ID: ENST00000249299
  CDS Start-End: 193-483
gtcaccgctgtgcggcttctgtttggttggccagttcgtcccaatttccgactcacagggctgcggagcagcaactctcacgatatttgctgcgacccgcaggcgctatccgctgccgggttctggcgcgccctttcagttctgcttgctgtcggcaccgctgcgttacccggaaccgccgggccgaacagcatgacgtccgctttggagaactacatcaaccgaactgttgccgttattacatcagatgggagaatgattgtgggaacactgaaaggttttgaccagaccattaatttgattttggatgaaagccatgaacgagtattcagctcttcacagggggtagaacaagtggtactaggattatacattgtaagaggtgacaacgttgcagtcattggagaaatcgatgaagaaacagattctgcgcttgatttggggaatattcgagcagaacctttaaattctgtagcacactgaggaaaaactacatacttggacatctgtaaatctttgtacagaaactgattattctgaggatgatatatggagtttttatgagtgtgtcactggattttgactccttattgattcattgtaatatgtaaattaaaatatttctacattttattgaaaaaaaaacctttttttttgcctaaatataagtttggtagcttggtttcttttttttattaaatagtgtgaaaatataatgggcattttgaaaacttttagaaaaaagtagtactttttgatactttagtatttatggaaactagtggaaaagagaaattagtgtgctatataaatcaggcattcaagtaacagtaatacaggatatatgtgttttctttccctgatgtttaggaaaatcacaggagggtaaatctttgctggagttatctgaatcattggcatttatccgattccactggtggtagtttgctagtgcttctaaaagttgctccctagcactgagaggtgtgggtaggtaaaaatgtgtttgcttgagaaaagcaaaaatgctaacaaggttttgatagattggcccaaaattctaacttgaatattaagaatgactaggaatggtagaattgacagagatgattagtaaagtctcttgatgcccaattggttaggtatgaaagtaatatgaacacattaatgttgaattttacagacagtatatttgaaaaaaattgattccatgtagtcttcaatttttaatttttaagaattggagaatttctaatgttaaagttagtttataaatgtgagtaaataaactctaagtttgtattg

SEQ ID NO: 149783 - DNA, 4030 bp, Homo sapiens
  Payload ID: 9591
  Gene Symbol: LSM8
  Gene Name: LSM8 homolog, U6 small nuclear RNA associated
  ENST ID: ENST00000424702
  CDS Start-End: 81-284
ctgccgggttctggcgcgccctttcagttctgcttgctgtcggcaccgctgcgttacccggaaccgccgggccgaacagcatgacgtccgctttggagaactacatcaaccgaactgttgccgttattacatcagatgggagaatgattgtgggaacactgaaaggttttgaccagaccattaatttgattttggatgaaagccatgaacgagtattcagctcttcacagggggtagaacaagtggtactaggattatacattgtaagaggtgacaacgtgtaagtaaaatatatctgttaaaattataaatgatactgccttactttatggagaagaggctttccccaaaataccctactgtattgtccatacatagttaatagaatcttgcattcatttctttcgtaaatataccttttcttatgtttgtgtaaaataaggcatatgtatacattttatgtcagcacttctttaggtttcaaccaaagctgtctctctacaaattaaacttttacctgagatttgcccatttttctactagttaagtagcctgggtagagtccagaaagggctctgccttatattaaatacttcattagagagacttcttaaaacgttctttcaaatacccagaattttagaggaacatatttctagagtccaaggccaaagtttgaaaaatgttttgaaatctctgatttgaacaatattaattcatgctcaataacataggtgtatttataaataagtacttactcgttattcattttcttttaattttttagtatcattgacacacttaagatgtccctgtggcctcagtttacttgggacagacagatataaaagttcaagagtaattggccaggcatggtgcctgtaatcccagcactttgggagtctgaggcaagtggatcaggtcaggagttcaagaccggcctcgccaacatggcaaaacactgtctctactaaaaatacaaaaattagccaggcttggtggcgtgcgcctgtagttccagctacttgggaggctgaggtgggagaatcacttgaacccaggaggtagaggttgcagtgagccgagatcaccctactgcactccagcctgggtgacagattgagacaccaattcaaaaaaaaaaaggccgggcacagtggttcaagcatgtaatcccagcactttgggaggtggaggcgggtggatcacttgaggtcaggagttcgagaccaacttggccaatgtggtgaaaccgcgtctttactaaaaatataaaaattagccaggcgtggtggcgcaagcctgtaatcccagctactcgggaggctgagtcaggagaattcgcctgggaggtggaagttgcagtgagccgagatcgcagcactgcattccagcctgggcaacaagagcaaaactccgtgtcaaaaaataaaaaagaaaagtggctaatgtggttcacgtgccgtggctcatgcctataatctcagcactttgagaggccaaggtgggtggatcacctgagcccaggagttcaagaccagcctggccagcatagtgaaaccccgtctctccttaaaatagaaaaattagcctggtgtggtggtgcatgcctgtaatcccagctacttgggaggctgaggcagaagaatttcttgaacctggtagatggaggttgcagtgagccaaggttgcgcctttgcactccagcctgggcaaaaagagtgaaactccatcttgaaaaaaaaaagaaaagtggctgatgtgacagaggaactgaattttaaattttatttaattgtaattaattttaatagttacatgtggccagtattagtatagttatagaggctagaagaatgccaaatcagttttctagtgagtactacactgaatcaaaatatagttggaaagaagcaaaagatacattagcaattttaagctagaacatttaacaaattctaggggactaactgtcccctggaataacttaaaaagtgcaggaataatttactcatttaagttgtttatgttagcatcacctttagatgaataaataatttgatctgtaatcaaaaatcaagagtttataaaatattttagagatgacttttaggtggagttacaaggtgagctgtaagtaatgagagagagacagagcagatagggcccaggtctctggatcagaacaacactgtttatattggagctgtgcatagtaattgattttaaggtttctcctacttaaaacaatttttttttcttgaacttcagtgaaaaaagtcttgtgctagagccagcttctactggcccatgaaagcatattgttatattttaaggaattttacaagctggttaattgatgtcttgttagtagcttgaaattggccgtggtgggagtgtttgcacaatggatattagtaaatgcagcaaatcagtctcccgctttttttccagagagctggtttttaaaaatgtatcagcatttccctgcttaccatagggattttaaatgatactgaatattatcatttaaaatttaagaatatttaagagtggaattgaggcctttagtttgagaaaacttaattcattctgccagagtttcatatttttcatttattagatgatttaagactttatatactttaaagcaaaatttggcaaatcccttattactagtattcgtctttagaatttggccgggcacagtggctcacacctgtagtcccagcactttgggaggctgaggctggcgaattaccagaggtcagaggttcgagacctgcctagccaacgtggtgaaaccctgtctctactaaaaatacaaaaattagccgggtgtggtggcatgcgcctgtaatcccagctactcgggaggctgaagcatgagaatcgcttgaacctggtaagtagaggttggagtgagtcaagatcgtgccactgcactccagcctgtgcaacaagagcgaaactctatctcaaaaaaaaaaaaaaagaatttactctcattaaaaccaaacaaatgtaaacccaaccaatactttttaaaaataatatttcatagacatcttgtggtctgagtgataacattgaatatttccagttagagggctatgggttggttatctagcgtggtattaatgaatttaaagttatagatactatgttagtgttgaacaagaaaaaattttctagcttttaacctgagccaatcacgtcaaaaatgatttgttagataccaaagtacttgttcctactattatttttgtatatgaagaactggctttggatttaactgaaaacttaggaaaacaatctaatcgctgttgtctatatcattgatttaattcatcaaagttactcaaatgattgatatttttacttgctaattattttaggagtgattttgtgaaatttatttttaatacagtcctagaattgaattgaaatatggtttggaagtttgagggttttttactgtgtctatccttgtgtgtctgtttcctttaaagattcatgatacaatcactgtgtacaatgtgtcctttaatattggttcctgtaataatgtgccttcaaattatttcttgagttttgtgacttaaatatgcagttcactgactcacgccaatgttgtttgctttttaccttaattctttttactgtgctctctcagttttattttttggaagaatggtactcagtgctttgatttgattagtaagatttttgaaacacatgtaatttatttcagaaatgtgattgttttaactctgacttttttagtgcagtcattggagaaatcgatgaagaaacagattctgcgcttgatttggggaatattcgagcagaacctttaaattctgtagcacactgaggaaaaactacatacttggacatctgtaaatctttgtacagaaactgattattctgaggatgatatatggagtttttatgagtgtgtcactggattttgactccttattgattcattgtaatatgtaaattaaaatatttctacattttattg

SEQ ID NO: 149784 - DNA, 1920 bp, Homo sapiens
  Payload ID: 9591
  Gene Symbol: LSM8
  Gene Name: LSM8 homolog, U6 small nuclear RNA associated
  ENST ID: ENST00000422760
  CDS Start-End: 1531-1758
ggcgcgccctttcagttctgcttgctgtcggcaccgctgcgttacccggaaccgccgggccgaacagcatgacgtccgctttggagaactacatcaaccgtatcctcaagctggccgccgcgggcgtgagccggggtcgcggagaggccgcggtcggggatcggtgggaggttgggaggcctggcctcggcgggatcctgggggcgggcgaggagatgagggccccggaacgacccagagttcgccggcggcgcctcgagccttcccgctgctgcgggcccaggggtcctttccattttgcctgcaaaacccaaataaaaacccagtgtgattattccgaacttttctgtcttaaaaaaaatgtacgctcttgattcttacttactatttccctatggcataagtgttaaagtttgtgaataagatgaacagtcgtcctggcggcgacaacagttttgcaaatctttgtacttgttttattcacataatttgctcgttcgaggatagcaaaaagtttaacgatggttcacagactgtttctgtccctttaccacttgaagtcccaacttgttggtagaatgaaaaaaaatggttgctgttgtaatggattatagtgaggagcaagtaacaaccccatgggaagtcttaaaatagactttacaagtgttaccgttttaaagtcttaggacaaaaacactacgttaagctcaggtacaaactgggtgacaaaaattaaataccgaatgcttttaatgatgcgttattggtaccctgtgacactgcttatatagtttctttacttttgaattacagaagcctgtcctggaagacagttttttaacatgctggaaaatcgtccaacatcgattaatttagtactcatccacttttcattttagaaataaacaggcctaagaaacgaaatatcctgcctgaaataatagattggtaaccttcctagtagaaaagtgtcaaaaatccaggatattttgagataagatacaccgatcacatacagaaagaggttttctttttctattttttcccttttttaatcatgtaattatcacaaagacaaaaacagaagctttttttaagtttttttttttttttctttttttgagtcgagggtctcactctgttgcccaggctggagtgcagtggcttgatcatggctcaatgcaaccttgaactcctgagcccaagcaatcctcctgcctctgcctctgcctcctgagtagctgggactataggtcaccaggccagggtaatagagatgggggtatcgctgtgttgcccaagctggtctcacctcaagtgatcctcctgccttggcgtctaagaaacttttaacgtttttatgtagtgaacttagtggctgtgttgaatacttatacctagttgtcatatttattctaaaaattcaaatcattcccttgccagagtctgttttcaatttgcattccctaagaaacactttctttgattcagttatcaggaactgttgccgttattacatcagatgggagaatgattgtgggaacactgaaaggttttgaccagaccattaatttgattttggatgaaagccatgaacgagtattcagctcttcacagggggtagaacaagtggtactaggattatacattgtaagaggtgacaacgttgcagtcattggagaaatcgatgaagaaacagattctgcgcttgatttggggaatattcgagcagaacctttaaattctgtagcacactgaggaaaaactacatacttggacatctgtaaatctttgtacagaaactgattattctgaggatgatatatggagtttttatgagtgtgtcactggattttgactccttattgattcattgtaatatgtaaattaaaatatttctacattttattgaaaaaaaaa

SEQ ID NO: 149785 - DNA, 290 bp, Homo sapiens
  Payload ID: 9591
  Gene Symbol: LSM8
  Gene Name: LSM8 homolog, U6 small nuclear RNA associated
  ENST ID: ENST00000411938
  CDS Start-End: 58-290
tcagttctgcttgctgtcggcaccgctgcgttacccggaaccgccgggccgaacagcatgacgtccgctttggagaactacatcaaccgtatcctcaagctggccgccgcgggcttatcaggaactgttgccgttattacatcagatgggagaatgattgtgggaacactgaaaggttttgaccagaccattaatttgattttggatgaaagccatgaacgagtattcagctcttcacagggggtagaacaagtggtactaggattatacattgtaagaggtgacaacgt

SEQ ID NO: 149786 - DNA, 1847 bp, Homo sapiens
  Payload ID: 9592
  Gene Symbol: LTV1
  Gene Name: LTV1 ribosome biogenesis factor
  Uniprot ID: Q96GA3
  ENST ID: ENST00000367576
  CDS Start-End: 135-1562
ttatcgccgggtcctggggctgcacgtgtggtgaggcctacagaagcggccttcagctggaccttggtctccccgccggacttcgagggtgtcatcgccgcccctgttgggggtgagcgccgcgcggctgcagcatgcctcacaggaagaaaaagccctttatagagaagaagaaagctgtgtcttttcacttggtccaccggagccaacgagatcctttagcagcagatgagagtgcaccccagagggttctattgcccacacaaaaaatagacaatgaagaaaggcgagcagaacagaggaagtatggagtgttctttgatgacgactatgactacctgcagcacctgaaggaaccatctgggccttcagagcttattccctcaagtaccttcagtgcacacaacaggagagaggagaaagaagaaacgctagtaattccaagcactggaattaagttgccttcatcagtgtttgcttcagagtttgaggaagatgttggattgttaaataaagcagctccagtttcaggacctcgactggattttgatcctgacattgttgcagctcttgatgatgattttgactttgatgatccagataatctgcttgaggatgactttattcttcaggccaataaggcaacaggagaggaagagggaatggatatacagaaatctgagaatgaagatgacagcgagtgggaagatgtggatgatgagaagggagatagcaatgatgactatgactctgcaggcctattgtcagatgaagactgtatgtctgtgcccggaaaaactcacagagctatagcagatcacttgttctggagtgaggaaacaaagagtcgcttcacggagtattcgatgacttcctcagtcatgaggagaaatgaacagctgaccctacatgatgagaggtttgagaagttttatgagcaatatgatgatgatgaaattggagctctggataatgcagaattggaaggttctattcaagtggacagcaatcgcttacaggaagttttgaatgactactataaagagaaggcagagaattgtgtaaaattgaatacccttgaacccttggaggatcaagacctgccaatgaatgagcttgatgagtctgaggaggaagaaatgattactgtagtccttgaagaagccaaagagaagtgggattgtgaatctatttgtagtacatactcaaatttatataaccatccacagcttatcaagtatcaaccaaagcccaaacaaattcgaatatcttctaaaacaggaatacctctcaatgtcttaccaaagaaaggactcacagcaaagcaaactgaaagaatacagatgattaatggcagtgatcttcctaaagtatcaactcagccacgttctaaaaatgaaagcaaagaagataaaagagcaagaaagcaagctataaaagaagagcgcaaggaacgaagagtggagaagaaagctaacaaattagcatttaaactggagaaaagaaggcaagaaaaagagctgctgaacttgaagaagaatgttgagggtctaaagctatagacagtggagcatacagggcaaggcactttattaggggctcctcatctttggttattgactagaaacttcagaaagacaaaactgtttgccatttttactggcagataagaggaaaatacaatatttgtattatttttatactagtaagtgtcccctgccaaccatcttgtaaatattgtaatactttaatttttaatattataagcttacatttgctctgaagtaaatgacttcatgaatgtgaaatgtttgataaattaaaggaaaatatcttcataacgtgaa

SEQ ID NO: 149787 - DNA, 1456 bp, Homo sapiens
  Payload ID: 9593
  Gene Symbol: LUC7L
  Gene Name: LUC7-like
  Uniprot ID: Q9NQ29
  ENST ID: ENST00000293872
  CDS Start-End: 112-1227
gaaagagccgagtgggctcgaggccgacgcgaccatcgtttgtcgacgccgctgccaccgcctgcctgagagaagtcgtcgcggccgaccccgtcgcctccgccggctaccatgtccgcccaggcgcagatgcgggccctgctggaccagctcatgggcacggctcgggacggagacgaaaccagacagagggtcaagtttacagatgaccgtgtctgcaagagtcaccttctggactgctgcccccatgacatcctggctgggacgcgcatggatttaggagaatgtaccaaaatccacgacttggccctccgagcagattatgagattgcaagtaaagaaagagacctgttttttgaattagatgcaatggatcacttggagtcctttattgctgaatgtgatcggagaactgagctcgccaagaagcggctggcagaaacacaggaggaaatcagtgcggaagtttctgcaaaggcagaaaaagtacatgagttaaatgaagaaataggaaaactccttgctaaagccgaacagctaggggctgaaggtaatgtggatgaatcccagaagattcttatggaagtggaaaaagttcgtgcgaagaaaaaagaagctgaggaagaatacagaaattccatgcctgcatccagttttcagcagcaaaagctgcgtgtctgcgaggtctgttcagcctaccttggtctccatgacaatgaccgtcgcctggcagaccacttcggtggcaagttacacttggggttcattcagatccgagagaagcttgatcagttgaggaaaactgtcgctgaaaagcaggagaagagaaatcaggatcgcttgaggaggagagaggagagggaacgggaggagcgtctgagcaggaggtcgggatcaagaaccagagatcgcaggaggtcacgctcccgggatcggcgtcggaggcggtcaagatctacctcccgagagcgacggaaattgtcccggtcccggtcccgagatagacatcggcgccaccgcagccgttcccggagccacagccggggacatcgtcgggcttcccgggaccgaagtgcgaaatacaagttctccagagagcgggcatccagagaggagtcctgggagagcgggcggagcgagcgagggcccccggactggaggcttgagagctccaacgggaagatggcttcacggaggtcagaagagaaggaggccggcgagatctgaacccgtctcccgggtgctgtaaatagtctgataaacgttcacacagtctaaaattaccctttatatttgctgaatacaactcatcttttgtagtttaaaatttctattgttttggagctagctgtgagtttctagaagtgtacagagttgctcctgtgttcccgggtcatgttgagtaggaataaataaatctgatgctgcctcctgaggctgcggggggtttctgctg

SEQ ID NO: 149788 - DNA, 2097 bp, Homo sapiens
  Payload ID: 9593
  Gene Symbol: LUC7L
  Gene Name: LUC7-like
  Uniprot ID: Q9NQ29
  ENST ID: ENST00000337351
  CDS Start-End: 125-1102
tcccccgcggcgggaaagagccgagtgggctcgaggccgacgcgaccatcgtttgtcgacgccgctgccaccgcctgcctgagagaagtcgtcgcggccgaccccgtcgcctccgccggctaccatgtccgcccaggcgcagatgcgggccctgctggaccagctcatgggcacggctcgggacggagacgaaaccagacagagggtcaagtttacagatgaccgtgtctgcaagagtcaccttctggactgctgcccccatgacatcctggctgggacgcgcatggatttaggagaatgtaccaaaatccacgacttggccctccgagcagattatgagattgcaagtaaagaaagagacctgttttttgaattagatgcaatggatcacttggagtcctttattgctgaatgtgatcggagaactgagctcgccaagaagcggctggcagaaacacaggaggaaatcagtgcggaagtttctgcaaaggcagaaaaagtacatgagttaaatgaagaaataggaaaactccttgctaaagccgaacagctaggggctgaaggtaatgtggatgaatcccagaagattcttatggaagtggaaaaagttcgtgcgaagaaaaaagaagctgaggaagaatacagaaattccatgcctgcatccagttttcagcagcaaaagctgcgtgtctgcgaggtctgttcagcctaccttggtctccatgacaatgaccgtcgcctggcagaccacttcggtggcaagttacacttggggttcattcagatccgagagaagcttgatcagttgaggaaaactgtcgctgaaaagcaggagaagagaaatcaggatcgcttgaggaggagagaggagagggaacgggaggagcgtctgagcaggaggtcgggatcaagaaccagagatcgcaggaggtcacgctcccgggatcggcgtcggaggcggtcaagatctacctcccgagagcgacggaaattgtcccggtcccggtcccgagatagacatcggcgccaccgcagccgttcccggagccacagccggggacatcgtcgggcttcccgggaccgaagtgcgaaatacaagtaactactctgactccttcggtagctgcaaccaggagtgagcccttctctgtgttcccagggtctgctgagggccgtgtctggtggggatggggctgggctcaccctcaggagtagggctggggagtcgtgaacgggactcaggtgtgggaagaggcgagagggctgtggaggagctcgcacggcgccaggtgatgggctgcacaggcactgtcccctgcctgcgtcctggggcctgtgcactgttgcgtccatgctcagagtggctgagacttgtgtcctgaccaggccctgcttacctctgttttggtttttgtttttgatatttttttttccattgtgtttttacgtagtgtcatgttctgtgcatatagtgttgtattctcctttgcactgtttatgttacagtgaaggctctccttattaaaaatcttcgcaaaggtcactttttaatggctatctaacactccatatgtggtgggcaagtctggttggcctccggggggtttccaggtataggggatgtagggccttgcctggcctggtctgcgggtccatcgtcagtgcctgagcggccagcagaaggggggcagcagcctccactgagcctctggttcccatttcccaggttctccagagagcgggcatccagagaggagtcctgggagagcgggcggagcgagcgagggcccccggactggaggcttgagagctccaacgggaagatggcttcacggaggtcagaagagaaggaggccggcgagatctgaacccgtctcccgggtgctgtaaatagtctgataaacgttcacacagtctaaaattaccctttatatttgctgaatacaactcatcttttgtagtttaaaatttctattgttttggagctagctgtgagtttctagaagtgtacagagttgctcctgtgttcccgggtcatgttgagtaggaataaataaatctgatgctgcctcctgaggctgcggggggtttctgctg

SEQ ID NO: 149789 - DNA, 1335 bp, Homo sapiens
  Payload ID: 9593
  Gene Symbol: LUC7L
  Gene Name: LUC7-like
  ENST ID: ENST00000397780
  CDS Start-End: 449-1267
gtggttcatggacctctgattagcttgggttttgcagtctcattgccacatgtatatgtggagccaatggccttttggtgctcagctgtttacgtctgactccttgacttctttggtacagtgatggagtcagatctcattaagtgtgattctccatgatataactagcctcaaaaaaatgtgtattccactccagttgtaaatatctttagatcagcttttcattgcatttgatggggagaacacagaaatgatagtctgcaaatcatccaggtgaattgttatactagttattttttggtggttaatgtgataatattgtcttatttaaaaccacaaatgaatttcaggagacgaaaccagacagagggtcaagtttacagatgaccgtgtctgcaagagtcaccttctggactgctgcccccatgacatcctggctgggacgcgcatggatttaggagaatgtaccaaaatccacgacttggccctccgagcagattatgagattgcaagtaaagaaagagacctgttttttgaattagatgcaatggatcacttggagtcctttattgctgaatgtgatcggagaactgagctcgccaagaagcggctggcagaaacacaggaggaaatcagtgcggaagtttctgcaaaggcagaaaaagtacatgagttaaatgaagaaataggaaaactccttgctaaagccgaacagctaggggctgaaggtaatgtggatgaatcccagaagattcttatggaagtggaaaaagttcgtgcgaagaaaaaagaagctgaggaagaatacagaaattccatgcctgcatccagttttcagcagcaaaagctgcgtgtctgcgaggtctgttcagcctaccttggtctccatgacaatgaccgtcgcctggcagaccacttcggtggcaagttacacttggggttcattcagatccgagagaagcttgatcagttgaggaaaactgtcgctgaaaagcaggagaagagaaatcaggatcgcttgaggaggagagaggagagggaacgggaggagcgtctgagcaggaggtcgggatcaagaaccagagatcgcaggaggtcacgctcccgggatcggcgtcggaggcggtcaagatctacctcccgagagcgacggaaattgtcccggtcccggtcccgagatagacatcggcgccaccgcagccgttcccggagccacagccggggacatcgtcgggcttcccgggaccgaagtgcgaaatacaagtaactactctgactccttcggtagctgcaaccaggagtgagcccttctctgtgttcccagggtctgctgag

SEQ ID NO: 149790 - DNA, 1504 bp, Homo sapiens
  Payload ID: 9593
  Gene Symbol: LUC7L
  Gene Name: LUC7-like
  Uniprot ID: Q9NQ29
  ENST ID: ENST00000397783
  CDS Start-End: 125-1102
tcccccgcggcgggaaagagccgagtgggctcgaggccgacgcgaccatcgtttgtcgacgccgctgccaccgcctgcctgagagaagtcgtcgcggccgaccccgtcgcctccgccggctaccatgtccgcccaggcgcagatgcgggccctgctggaccagctcatgggcacggctcgggacggagacgaaaccagacagagggtcaagtttacagatgaccgtgtctgcaagagtcaccttctggactgctgcccccatgacatcctggctgggacgcgcatggatttaggagaatgtaccaaaatccacgacttggccctccgagcagattatgagattgcaagtaaagaaagagacctgttttttgaattagatgcaatggatcacttggagtcctttattgctgaatgtgatcggagaactgagctcgccaagaagcggctggcagaaacacaggaggaaatcagtgcggaagtttctgcaaaggcagaaaaagtacatgagttaaatgaagaaataggaaaactccttgctaaagccgaacagctaggggctgaaggtaatgtggatgaatcccagaagattcttatggaagtggaaaaagttcgtgcgaagaaaaaagaagctgaggaagaatacagaaattccatgcctgcatccagttttcagcagcaaaagctgcgtgtctgcgaggtctgttcagcctaccttggtctccatgacaatgaccgtcgcctggcagaccacttcggtggcaagttacacttggggttcattcagatccgagagaagcttgatcagttgaggaaaactgtcgctgaaaagcaggagaagagaaatcaggatcgcttgaggaggagagaggagagggaacgggaggagcgtctgagcaggaggtcgggatcaagaaccagagatcgcaggaggtcacgctcccgggatcggcgtcggaggcggtcaagatctacctcccgagagcgacggaaattgtcccggtcccggtcccgagatagacatcggcgccaccgcagccgttcccggagccacagccggggacatcgtcgggcttcccgggaccgaagtgcgaaatacaagtaactactctgactccttcggtagctgcaaccaggagttctccagagagcgggcatccagagaggagtcctgggagagcgggcggagcgagcgagggcccccggactggaggcttgagagctccaacgggaagatggcttcacggaggtcagaagagaaggaggccggcgagatctgaacccgtctcccgggtgctgtaaatagtctgataaacgttcacacagtctaaaattaccctttatatttgctgaatacaactcatcttttgtagtttaaaatttctattgttttggagctagctgtgagtttctagaagtgtacagagttgctcctgtgttcccgggtcatgttgagtaggaataaataaatctgatgctgcctcctgaggctgcggggggtttctgc

SEQ ID NO: 149791 - DNA, 2737 bp, Homo sapiens
  Payload ID: 9593
  Gene Symbol: LUC7L
  Gene Name: LUC7-like
  ENST ID: ENST00000426094
  CDS Start-End: 101-229
gtgggctcgaggccgacgcgaccatcgtttgtcgacgccgctgccaccgcctgcctgagagaagtcgtcgcggccgaccccgtcgcctccgccggctaccatgtccgcccaggcgcagatgcgggccctgctggaccagctcatgggcacggctcgggacggtgagtcagagcggccaaccaggcgagggtctggggtgggagtgaggcgaggccgccgggcggcctgaggcgggggccgcgatcgtctgcgcctgcgcctgcgcggggcatcgctcctcctcccccgcgctccgaccgcaggcgccgggcctttgtctaagccggtgcgtctctgaggcggccgtgggtccaggtcgggctcctctctcggagtctgcgccatggatggggcttcagcctccttcctatgtaccgtcctgctacttcctccccggcgggcgccgcggctccgtgcccctccgcgaactgtggagtcggcggagggctggaatcagcgtgggctccaggtcgctggcagccgggtggcagaactcttccgaggctccttgggaagaagctacacccgagggagccggatgggcctcgaaaacctggcccgctctggttctgtaccattgcaaggggaaccgtaaactgagcttttctaacgtgggtttctgccaagtacttttccagctgcccccttccccccagcacacaggagagcctctgtgtagccagcgcttgacagtcgttaggtaggttgtactgtgtagggaggagctcaagatcatgatggttgtcacaggagaaagcggttgcatctttgcaaaactatatacctgctgtggtttgtgttttcttttctgctgagtaatgaagttgtaagttcacactggcacattctcagggctgtgcagattatttgcactttatttcataggtgaataagtgctttttagctttctttgtatattgagttgcttttgaattgcttcccatatttttatttcatacaaactgaacaattgtggcccctctattttatttataaaggttcagtgtatctttgcctgcctacatcaatctgcaagggagttgcagaaagcctcatgttcatcgagccgtgagtcacaaccaatttctaagctgttataacaaaaaagtgtttgctttttttcacaagtaactttaaaagtgtagtttagaaagaaaacattttcaataaaaagacactacattaatcctggatgcttgcaaatcctaaaatatattcctcctctagcgttgcacagctctgtgttgtatacacagactagctttaaaatttgtcacataccactttacctttacttttatgtatcattcccccgacttccttactgcaggtgtgggcaagaaaacttttcctttaacacttttcaacagcgggcataaaattctgcagctgaggtcttgaagaatgcagatgggagacgaaaccagacagagggtcaagtttacagatgaccgtgtctgcaagagtcaccttctggactgctgcccccatgacatcctggctgggacgcgcatggatttaggagaatgtaccaaaatccacgacttggccctccgagcagattatgagattgcaagtaaagaaagagacctgttttttgaattagatgcaatggatcacttggagtcctttattgctgaatgtgatcggagaactgagctcgccaagaagcggctggcagaaacacaggaggaaatcagtgcggaagtttctgcaaaggcagaaaaagtacatgagttaaatgaagaaataggaaaactccttgctaaagccgaacagctaggggctgaaggtaatgtggatgaatcccagaagattcttatggaagtggaaaaagttcgtgcgaagaaaaaagaagctgaggaagaatacagaaattccatgcctgcatccagttttcagcagcaaaagctgcgtgtctgcgaggtctgttcagcctaccttggtctccatgacaatgaccgtcgcctggcagaccacttcggtggcaagttacacttggggttcattcagatccgagagaagcttgatcagttgaggaaaactgtcgctgaaaagcaggagaagagaaatcaggatcgcttgaggaggagagaggagagggaacgggaggagcgtctgagcaggaggtcgggatcaagaaccagagatcgcaggaggtcacgctcccgggatcggcgtcggaggcggtcaagatctacctcccgagagcgacggaaattgtcccggtcccggtcccgagatagacatcggcgccaccgcagccgttcccggagccacagccggggacatcgtcgggcttcccgggaccgaagtgcgaaatacaagttctccagagagcgggcatccagagaggagtcctgggagagcgggcggagcgagcgagggcccccggactggaggcttgagagctccaacgggaagatggcttcacggaggtcagaagagaaggaggccggcgagatctgaacccgtctcccgggtgctgtaaatagtctgataaacgttcacacagtctaaaattaccctttatatttgctgaatacaactcatcttttgtagtttaaaatttctattgttttggagctagctgtgagtttctagaagtgtacagagttgctcctgtgttcccgggtcatgttgagtaggaataaataaatctgatgctgcctcctgaggctgcggggggtttctgctg

SEQ ID NO: 149792 - DNA, 989 bp, Homo sapiens
  Payload ID: 9593
  Gene Symbol: LUC7L
  Gene Name: LUC7-like
  ENST ID: ENST00000418978
  CDS Start-End: 36-203
cgtcgcggccgaccccgtcgcctccgccggctaccatgtccgcccaggcgcagatgcgggccctgctggaccagctcatgggcacggctcgggacggttcagtgtatctttgcctgcctacatcaatctgcaagggagttgcagaaagcctcatgttcatcgagccgagacgaaaccagacagagggtcaagtttacagatgaccgtgtctgcaagagtcaccttctggactgctgcccccatgacatcctggctgggacgcgcatggatttaggagaatgtaccaaaatccacgacttggccctccgagcagattatgagattgcaagtaaagaaagagacctgttttttgaattagatgtgaaaggggggaccctaccctcagaacatgagggaataatatttacgtggctcacaaagaccagcaatggatcacttggagtcctttattgctgaatgtgatcggagaactgagctcgccaagaagcggctggcagaaacacaggaggaaatcagtgcggaagtttctgcaaaggcagaaaaagtacatgagttaaatgaagaaataggaaaactccttgctaaagccgaacagctaggggctgaaggtaatgtggatgaatcccagaagattcttatggaagtggaaaaagttcgtgcgaagaaaaaagaagctgaggaagaatacagaaattccatgcctgcatccagttttcagcagcaaaagctgcgtgtctgcgaggtctgttcagcctaccttggtctccatgacaatgaccgtcgcctggcagaccacttcggtggcaagttacacttggggttcattcagatccgagagaagcttgatcagttgaggaaaactgtcgctgaaaagcaggagaagagaaatcaggatcgcttgaggaggagagaggagagggaacgggaggagcgtctgagcaggaggtcgggatcaagaaccagagatcgcaggaggtcacgctcccggg

SEQ ID NO: 149793 - DNA, 695 bp, Homo sapiens
  Payload ID: 9593
  Gene Symbol: LUC7L
  Gene Name: LUC7-like
  ENST ID: ENST00000430864
  CDS Start-End: 148-695
gcgaccatcgtttgtcgacgccgctgccaccgcctgcctgagagaagtcgtcgcggccgaccccgtcgcctccgccggctaccatgtccgcccaggcgcagatgcgggccctgctggaccagctcatgggcacggctcgggacggcaatggatcacttggagtcctttattgctgaatgtgatcggagaactgagctcgccaagaagcggctggcagaaacacaggaggaaatcagtgcggaagtttctgcaaaggcagaaaaagtacatgagttaaatgaagaaataggaaaactccttgctaaagccgaacagctaggggctgaaggtaatgtggatgaatcccagaagattcttatggaagtggaaaaagttcgtgcgaagaaaaaagaagctgaggaagaatacagaaattccatgcctgcatccagttttcagcagcaaaagctgcgtgtctgcgaggtctgttcagcctaccttggtctccatgacaatgaccgtcgcctggcagaccacttcggtggcaagttacacttggggttcattcagatccgagagaagcttgatcagttgaggaaaactgtcgctgaaaagcaggagaagagaaatcaggatcgcttgaggaggagagaggagagggaacgggaggagcgtctgagcaggaggtcgggatcaagaaccagagatcgcaggag

SEQ ID NO: 149794 - DNA, 423 bp, Homo sapiens
  Payload ID: 9593
  Gene Symbol: LUC7L
  Gene Name: LUC7-like
  ENST ID: ENST00000442701
  CDS Start-End: 1-181
tcgcaggaggtcacgctcccgggatcggcgtcggaggcggtcaagatctacctcccgagagcgacggaaattgtcccggtcccggtcccgagatagacatcggcgccaccgcagccgttcccggagccacagccggggacatcgtcgggcttcccgggaccgaagtgcgaaatacaagtaactactctgactccttcggttctccagagagcgggcatccagagaggagtcctgggagagcgggcggagcgagcgagggcccccggactggaggcttgagagctccaacgggaagatggcttcacggaggtcagaagagaaggaggccggcgagatctgaacccgtctcccgggtgctgtaaatagtctgataaacgttcacacagtctaaaattaccctttatatttgctgaatacaactca

SEQ ID NO: 149795 - DNA, 498 bp, Homo sapiens
  Payload ID: 9593
  Gene Symbol: LUC7L
  Gene Name: LUC7-like
  ENST ID: ENST00000428363
  CDS Start-End: 403-498
gccagcgcttgacagtcgttaggtaggttgtactgtgtagggaggagctcaagatcatgatggttgtcacaggagaaagcggttgcatctttgcaaaactatatacctgctgtggtttgtgttttcttttctgctgagtaatgaagttgtaagttcacactggcacattctcagggctgtgcagattatttgcactttatttcataggtgaataagtgctttttagctttctttgttcagtgtatctttgcctgcctacatcaatctgcaagggagttgcagaaagcctcatgttcatcgagccgagacgaaaccagacagagggtcaagtttacagatgaccgtgtctgcaagagtcaccttctggactgctgcccccatgacatcctggctgggacgcgcatggatttaggagaatgtaccaaaatccacgacttggccctccgagcagattatgagattgcaagtaaagaaagagacctgttttttgaattagat

SEQ ID NO: 149796 - DNA, 721 bp, Homo sapiens
  Payload ID: 9593
  Gene Symbol: LUC7L
  Gene Name: LUC7-like
  ENST ID: ENST00000429378
  CDS Start-End: 1-513
ctaggggctgaaggtaatgtggatgaatcccagaagattcttatggaagtggaaaaagttcgtgcgaagaaaaaagaagctgagaaaactgtcgctgaaaagcaggagaagagaaatcaggatcgcttgaggaggagagaggagagggaacgggaggagcgtctgagcaggaggtcgggatcaagaaccagagatcgcaggaggtcacgctcccgggatcggcgtcggaggcggtcaagatctacctcccgagagcgacggaaattgtcccggtcccggtcccgagatagacatcggcgccaccgcagccgttcccggagccacagccggggacatcgtcgggcttcccgggaccgaagtgcgaaatacaagttctccagagagcgggcatccagagaggagtcctgggagagcgggcggagcgagcgagggcccccggactggaggcttgagagctccaacgggaagatggcttcacggaggtcagaagagaaggaggccggcgagatctgaacccgtctcccgggtgctgtaaatagtctgataaacgttcacacagtctaaaattaccctttatatttgctgaatacaactcatcttttgtagtttaaaatttctattgttttggagctagctgtgagtttctagaagtgtacagagttgctcctgtgttcccgggtcatgttgagtaggaataaataaatctgatgctgcctcctga

SEQ ID NO: 149797 - DNA, 833 bp, Homo sapiens
  Payload ID: 9593
  Gene Symbol: LUC7L
  Gene Name: LUC7-like
  ENST ID: ENST00000443357
  CDS Start-End: 582-833
tttgcagtctcattgccacatgtatatgtggagccaatggccttttggtgctcagctgtttacgtctgactccttgacttctttggtacagtgatggagtcagatctcattaagtgtgattctccatgatataactagcctcaaaaaaatgtgtattccactccagttgtaaatatctttagatcagcttttcattgcatttgatggggagaacacagaaatgatagtctgcaaatcatccaggtgaattgttatactagttattttttggtggttaatgtgataatattgtcttatttaaaaccacaaatgaatttcaggagacgaaaccagacagagggtcaagtttacagatgaccgtgtctgcaagagtcaccttctggactgctgcccccatgacatcctggctgggacgcgcatggatttaggagaatgtaccaaaatccacgacttggccctccgagcagattatgagattgcaagtaaagaaagagacctgttttttgaattagatgtgaaaggggggaccctaccctcagaacatgagggaataatatttacgtggctcacaaagaccagcaatggatcacttggagtcctttattgctgaatgtgatcggagaactgagctcgccaagaagcggctggcagaaacacaggaggaaatcagtgcggaagtttctgcaaaggcagaaaaagtacatgagttaaatgaagaaataggaaaactccttgctaaagccgaacagctaggggctgaaggtaatgtggatgaatcccagaagattcttatggaagtggaaaaagttcgtgcgaagaaaaaagaagctgag

SEQ ID NO: 149798 - DNA, 1211 bp, Homo sapiens
  Payload ID: 9593
  Gene Symbol: LUC7L
  Gene Name: LUC7-like
  ENST ID: ENST00000419516
  CDS Start-End: 96-263
ctcgaggccgacgcgaccatcgtttgtcgacgccgctgccaccgcctgcctgagagaagtcgtcgcggccgaccccgtcgcctccgccggctaccatgtccgcccaggcgcagatgcgggccctgctggaccagctcatgggcacggctcgggacggttcagtgtatctttgcctgcctacatcaatctgcaagggagttgcagaaagcctcatgttcatcgagccgagacgaaaccagacagagggtcaagtttacagatgaccgtgtctgcaagagtcaccttctggactgctgcccccatgacatcctggctgggacgcgcatggatttaggagaatgtaccaaaatccacgacttggccctccgagcagattatgagattgcaagtaaagaaagagacctgttttttgaattagatgcaatggatcacttggagtcctttattgctgaatgtgatcggagaactgagctcgccaagaagcggctggcagaaacacaggaggaaatcagtgcggaagtttctgcaaaggcagaaaaagtacatgagttaaatgaagaaataggaaaactccttgctaaagccgaacagctaggggctgaaggtaatgtggatgaatcccagaagattcttatggaagtggaaaaagttcgtgcgaagaaaaaagaagctgaggaagaatacagaaattccatgcctgcatccagttttcagcagcaaaagctgcgtgtctgcgaggtctgttcagcctaccttggtctccatgacaatgaccgtcgcctggcagaccacttcggtggcaagttacacttggggttcattcagatccgagagaagcttgatcagttgaggaaaactgtcgctgaaaagcaggagaagagaaatcaggatcgcttgaggaggagagaggagagggaacgggaggagcgtctgagcaggaggtcgggatcaagaaccagagatcgcaggaggtcacgctcccgggatcggcgtcggaggcggtcaagatctacctcccgagagcgacggaaattgtcccggtcccggtcccgagatagacatcggcgccaccgcagccgttcccggagccacagccggggacatcgtcgggcttcccgggaccgaagtgcgaaatacaagtaactactctgactccttcggtagctgcaaccaggagtgagcccttctctgtgttcccagggtctgctgag

SEQ ID NO: 149799 - DNA, 1520 bp, Homo sapiens
  Payload ID: 9593
  Gene Symbol: LUC7L
  Gene Name: LUC7-like
  ENST ID: ENST00000629543
  CDS Start-End: 112-279
gaaagagccgagtgggctcgaggccgacgcgaccatcgtttgtcgacgccgctgccaccgcctgcctgagagaagtcgtcgcggccgaccccgtcgcctccgccggctaccatgtccgcccaggcgcagatgcgggccctgctggaccagctcatgggcacggctcgggacggttcagtgtatctttgcctgcctacatcaatctgcaagggagttgcagaaagcctcatgttcatcgagccgagacgaaaccagacagagggtcaagtttacagatgaccgtgtctgcaagagtcaccttctggactgctgcccccatgacatcctggctgggacgcgcatggatttaggagaatgtaccaaaatccacgacttggccctccgagcagattatgagattgcaagtaaagaaagagacctgttttttgaattagatgcaatggatcacttggagtcctttattgctgaatgtgatcggagaactgagctcgccaagaagcggctggcagaaacacaggaggaaatcagtgcggaagtttctgcaaaggcagaaaaagtacatgagttaaatgaagaaataggaaaactccttgctaaagccgaacagctaggggctgaaggtaatgtggatgaatcccagaagattcttatggaagtggaaaaagttcgtgcgaagaaaaaagaagctgaggaagaatacagaaattccatgcctgcatccagttttcagcagcaaaagctgcgtgtctgcgaggtctgttcagcctaccttggtctccatgacaatgaccgtcgcctggcagaccacttcggtggcaagttacacttggggttcattcagatccgagagaagcttgatcagttgaggaaaactgtcgctgaaaagcaggagaagagaaatcaggatcgcttgaggaggagagaggagagggaacgggaggagcgtctgagcaggaggtcgggatcaagaaccagagatcgcaggaggtcacgctcccgggatcggcgtcggaggcggtcaagatctacctcccgagagcgacggaaattgtcccggtcccggtcccgagatagacatcggcgccaccgcagccgttcccggagccacagccggggacatcgtcgggcttcccgggaccgaagtgcgaaatacaagttctccagagagcgggcatccagagaggagtcctgggagagcgggcggagcgagcgagggcccccggactggaggcttgagagctccaacgggaagatggcttcacggaggtcagaagagaaggaggccggcgagatctgaacccgtctcccgggtgctgtaaatagtctgataaacgttcacacagtctaaaattaccctttatatttgctgaatacaactcatcttttgtagtttaaaatttctattgttttggagctagctgtgagtttctagaagtgtacagagttgctcctgtgttcccgggtcatgttgagtaggaataaataaatctgatgctgcctcctgaggctgcggggggttt

SEQ ID NO: 149800 - DNA, 2287 bp, Homo sapiens
  Payload ID: 9594
  Gene Symbol: LUC7L2
  Gene Name: LUC7-like 2 pre-mRNA splicing factor
  ENST ID: ENST00000263545
  CDS Start-End: 1-1170
atggtcatccactcacagcttaaaaaaatacagggagcatcggagagaatgggagatacaactcgtcaacgaatcaaattcagtgatgacagagtatgcaagagtcaccttctcaactgttgtcctcatgatgtcctttctggaactagaatggatcttggagaatgtctgaaagtccatgacctggctttaagagcggattatgaaattgcatccaaagaacaagattttttctttgaacttgatgccatggatcatctgcagtcattcattgcagattgtgatcgtagaacagaagtggccaagaaaagattagcagaaactcaagaagagattagtgctgaagtagcagcaaaggcagaacgtgttcatgagttaaatgaagaaattggtaaattgttagccaaggtggaacaactaggagctgaagggaatgtggaggaatcccagaaagtaatggatgaagtagagaaagcacgggcaaagaaaagagaagcagaggaagtttatcggaattctatgccagcttccagttttcagcagcagaaacttcgagtctgtgaagtctgctctgcctatttaggacttcatgataatgacagacgactggctgatcattttgggggtaaactgcacctgggatttattgaaataagagagaagcttgaagaattaaagagagtcgtagctgagaagcaggagaaaagaaaccaggaacggctgaaacgaagagaagagagagagagagaagaaagggagaagctgaggaggtcccgatcacacagcaagaatccaaaaagatccaggtccagagagcatcgcagacatcgatctcgctccatgtcacgtgaacgcaagaggagaactcgatccaaatctcgggagaaacgccatcgccacaggtcccgctccagcagccgtagccgcagccgtagccaccagagaagtcggcacagttctagagataggagcagagaacgatccaagaggagatcctcaaaagaaagattcagagaccaagacttagcatcatgtgacagagacaggagttcaagagacagatcacctcgtgacagagatcggaaagataagaagcggtcctatgagagtgctaatggcagatcagaagacaggaggagctctgaagagcgcgaagcaggggagatctaactagctgtgtacatttcttcagtccttaagcttcctacggagttacgtactattgtttagttcacagctgttcagggtgacagtgagcagatccagacaccagatccagctaggctagatgtacagtatctaacttgatctgaactgaacctgttttccttgatgatgcctaaaactacatccatagtttctggtgaacctgtaatacagttctgaaagtacagttttatataataagatgctgatctctttattctttcaagtaagagtgctagtgaacaaattgtgttacttgccttgggattttttgaacgtttgtaaaatgctgtcttcctagtccaaacagctgcagctttgggcatttttctttttaattattcttcctctgactttgtatcccttaatacctacactctccaattgtaagagaaagggggcagggaagcaatatagcttccattctaaggctgtattcccgttatgaattactagctgattacagttcagagcattgatcctggaatgtgtgctggagaaatttaaaatactggggttttttgtttaatggtgcctatttagagttggaagttgaacagctgttgcattacatacttttgcttttttattgaaattttgaaatcaaacgtcttgatttttctgttctgttgaattgctatgttcaggatgttctagggggtgggggcagggactcttttcgtaataagcacttgttttattttgtgtgtgtggagtataaaggctacacccttattgtaaaaaaataataataataaaatgaaagaaacaatcaccaccaccattattaaactgtaacttgtctagtaaattgtcactagaactatttgctgtgggcatttcctctattctgttacgtcattaacagtgccttactgtgcaaggcaccaaaggacataaatacgtacttgcaaagattccagatgagctgttcatgtgggccccttgctgactatattccagccacttcagggttgtttgtaatgaccgttatagagaagggctcgacctgcagaagaaactggggtgtttttattctcattcaacaaacccaaataaaaacagtatatgtaaccaacat

SEQ ID NO: 149801 - DNA, 2645 bp, Homo sapiens
  Payload ID: 9594
  Gene Symbol: LUC7L2
  Gene Name: LUC7-like 2 pre-mRNA splicing factor
  Uniprot ID: Q9Y383
  ENST ID: ENST00000354926
  CDS Start-End: 355-1533
gacggtggcggcgagcggcgtcagagcttgagggggggttgacggcttctggcgggtggcggtgttgaaggcgagagcttgcttggcccgtgtcgcttctgtcccaagaaccggacggagagtgagggcacgagggtcgctgtcgggggctgtcgtcttccacgtacacgtcgtcgtgaggagcgcagtccggactcttcccgcaacccctccggctccctttccgcacgcctcgaggcggcggcggccaccgagacagcagcgcaccttcccccatcccttccccttatcccccagcccaaaagggcccggtctgcgccccacccccgcccgtccgcccgctacgccgccgccatgtcggcgcaggcccagatgcgcgcgatgctggaccagttgatgggcacctcccgggacggagatacaactcgtcaacgaatcaaattcagtgatgacagagtatgcaagagtcaccttctcaactgttgtcctcatgatgtcctttctggaactagaatggatcttggagaatgtctgaaagtccatgacctggctttaagagcggattatgaaattgcatccaaagaacaagattttttctttgaacttgatgccatggatcatctgcagtcattcattgcagattgtgatcgtagaacagaagtggccaagaaaagattagcagaaactcaagaagagattagtgctgaagtagcagcaaaggcagaacgtgttcatgagttaaatgaagaaattggtaaattgttagccaaggtggaacaactaggagctgaagggaatgtggaggaatcccagaaagtaatggatgaagtagagaaagcacgggcaaagaaaagagaagcagaggaagtttatcggaattctatgccagcttccagttttcagcagcagaaacttcgagtctgtgaagtctgctctgcctatttaggacttcatgataatgacagacgactggctgatcattttgggggtaaactgcacctgggatttattgaaataagagagaagcttgaagaattaaagagagtcgtagctgagaagcaggagaaaagaaaccaggaacggctgaaacgaagagaagagagagagagagaagaaagggagaagctgaggaggtcccgatcacacagcaagaatccaaaaagatccaggtccagagagcatcgcagacatcgatctcgctccatgtcacgtgaacgcaagaggagaactcgatccaaatctcgggagaaacgccatcgccacaggtcccgctccagcagccgtagccgcagccgtagccaccagagaagtcggcacagttctagagataggagcagagaacgatccaagaggagatcctcaaaagaaagattcagagaccaagacttagcatcatgtgacagagacaggagttcaagagacagatcacctcgtgacagagatcggaaagataagaagcggtcctatgagagtgctaatggcagatcagaagacaggaggagctctgaagagcgcgaagcaggggagatctaactagctgtgtacatttcttcagtccttaagcttcctacggagttacgtactattgtttagttcacagctgttcagggtgacagtgagcagatccagacaccagatccagctaggctagatgtacagtatctaacttgatctgaactgaacctgttttccttgatgatgcctaaaactacatccatagtttctggtgaacctgtaatacagttctgaaagtacagttttatataataagatgctgatctctttattctttcaagtaagagtgctagtgaacaaattgtgttacttgccttgggattttttgaacgtttgtaaaatgctgtcttcctagtccaaacagctgcagctttgggcatttttctttttaattattcttcctctgactttgtatcccttaatacctacactctccaattgtaagagaaagggggcagggaagcaatatagcttccattctaaggctgtattcccgttatgaattactagctgattacagttcagagcattgatcctggaatgtgtgctggagaaatttaaaatactggggttttttgtttaatggtgcctatttagagttggaagttgaacagctgttgcattacatacttttgcttttttattgaaattttgaaatcaaacgtcttgatttttctgttctgttgaattgctatgttcaggatgttctagggggtgggggcagggactcttttcgtaataagcacttgttttattttgtgtgtgtggagtataaaggctacacccttattgtaaaaaaataataataataaaatgaaagaaacaatcaccaccaccattattaaactgtaacttgtctagtaaattgtcactagaactatttgctgtgggcatttcctctattctgttacgtcattaacagtgccttactgtgcaaggcaccaaaggacataaatacgtacttgcaaagattccagatgagctgttcatgtgggccccttgctgactatattccagccacttcagggttgtttgtaatgaccgttatagagaagggctcgacctgcagaagaaactggggtgtttttattctcattcaacaaacccaaataaaaacagtatatgtaacc

SEQ ID NO: 149802 - DNA, 2411 bp, Homo sapiens
  Payload ID: 9594
  Gene Symbol: LUC7L2
  Gene Name: LUC7-like 2 pre-mRNA splicing factor
  ENST ID: ENST00000456182
  CDS Start-End: 351-602
gtggcggcgagcggcgtcagagcttgagggggggttgacggcttctggcgggtggcggtgttgaaggcgagagcttgcttggcccgtgtcgcttctgtcccaagaaccggacggagagtgagggcacgagggtcgctgtcgggggctgtcgtcttccacgtacacgtcgtcgtgaggagcgcagtccggactcttcccgcaacccctccggctccctttccgcacgcctcgaggcggcggcggccaccgagacagcagcgcaccttcccccatcccttccccttatcccccagcccaaaagggcccggtctgcgccccacccccgcccgtccgcccgctacgccgccgccatgtcggcgcaggcccagatgcgcgcgatgctggaccagttgatgggcacctcccgggacggttcaatgtatctatgcctgcctacctcaatctgcaagggagtgtcagaaaggccccgcattcgccaagccgagatacaactcgtcaacgaatcaaattcagtgatgacagagtatgcaagagtcaccttctcaactgttgtcctcatgatgtcctttctggaactagaatggatcttggagaatgtctgaaagtccatgacctggctttaagagcggattatgaaattgcatccaaagaacaagattttttctttgaacttgatgccatggatcatctgcagtcattcattgcagattgtgatcgtagaacagaagtggccaagaaaagattagcagaaactcaagaagagattagtgctgaagtagcagcaaaggcagaacgtgttcatgagttaaatgaagaaattggtaaattgttagccaaggtggaacaactaggagctgaagggaatgtggaggaatcccagaaagtaatggatgaagtagagaaagcacgggcaaagaaaagagaagcagaggaagtttatcggaattctatgccagcttccagttttcagcagcagaaacttcgagtctgtgaagtctgctctgcctatttaggacttcatgataatgacagacgactggctgatcattttgggggtaaactgcacctgggatttattgaaataagagagaagcttgaagaattaaagagagtcgtagctgagaagcaggagaaaagaaaccaggaacggctgaaacgaagagaagagagagagagagaagaaagggagaagctgaggaggtcccgatcacacagcaagaatccaaaaagatccaggtccagagagcatcgcagacatcgatctcgctccatgtcacgtgaacgcaagaggagaactcgatccaaatctcgggagaaacgccatcgccacaggtcccgctccagcagccgtagccgcagccgtagccaccagagaagtcggcacagttctagagataggagcagagaacgatccaagaggagatcctcaaaagaaagattcagagaccaagacttagcatcatgtgacagagacaggagttcaagagacagatcacctcgtgacagagatcggaaagataagaagcggtcctatgagagtgctaatggcagatcagaagacaggaggagctctgaagagcgcgaagcaggggagatctaactagctgtgtacatttcttcagtccttaagcttcctacggagttacgtactattgtttagttcacagctgttcagggtgacagtgagcagatccagacaccagatccagctaggctagatgtacagtatctaacttgatctgaactgaacctgttttccttgatgatgcctaaaactacatccatagtttctggtgaacctgtaatacagttctgaaagtacagttttatataataagatgctgatctctttattctttcaagtaagagtgctagtgaacaaattgtgttacttgccttgggattttttgaacgtttgtaaaatgctgtcttcctagtccaaacagctgcagctttgggcatttttctttttaattattcttcctctgactttgtatcccttaatacctacactctccaattgtaagagaaagggggcagggaagcaatatagcttccattctaaggctgtattcccgttatgaattactagctgattacagttcagagcattgatcctggaatgtgtgctggagaaatttaaaatactggggttttttgtttaatggtgcctatttagagttggaagttgaacagctgttgcattacatacttttgcttttttattgaaattttgaaatcaaacgtcttgatttttctgttctgttgaattgctatgttcaggatgttctagggggtgggggcagggactcttttcgtaataagcacttgttttattttgtgtgtgtggagtataaaggctacacccttattgtaaaaaaataataataataaaatgaaagaaacaatca

SEQ ID NO: 149803 - DNA, 1525 bp, Homo sapiens
  Payload ID: 9594
  Gene Symbol: LUC7L2
  Gene Name: LUC7-like 2 pre-mRNA splicing factor
  ENST ID: ENST00000541170
  CDS Start-End: 185-1354
caatttgcccagcgcgctgtgctccgcgacggcgcatgcccgcttttgcgcaggcgcggggactacggcgcaggcgcggagactattgcgcaggcaagcgcgtacgcagaagcgtgcgcgcgcccgttcaacgtccggagcatcggtgcagtttcgaggccttcacagttgttgatcacatagcatggtcatccactcacagcttaaaaaaatacagggagcatcggagagaatgggagatacaactcgtcaacgaatcaaattcagtgatgacagagtatgcaagagtcaccttctcaactgttgtcctcatgatgtcctttctggaactagaatggatcttggagaatgtctgaaagtccatgacctggctttaagagcggattatgaaattgcatccaaagaacaagattttttctttgaacttgatgccatggatcatctgcagtcattcattgcagattgtgatcgtagaacagaagtggccaagaaaagattagcagaaactcaagaagagattagtgctgaagtagcagcaaaggcagaacgtgttcatgagttaaatgaagaaattggtaaattgttagccaaggtggaacaactaggagctgaagggaatgtggaggaatcccagaaagtaatggatgaagtagagaaagcacgggcaaagaaaagagaagcagaggaagtttatcggaattctatgccagcttccagttttcagcagcagaaacttcgagtctgtgaagtctgctctgcctatttaggacttcatgataatgacagacgactggctgatcattttgggggtaaactgcacctgggatttattgaaataagagagaagcttgaagaattaaagagagtcgtagctgagaagcaggagaaaagaaaccaggaacggctgaaacgaagagaagagagagagagagaagaaagggagaagctgaggaggtcccgatcacacagcaagaatccaaaaagatccaggtccagagagcatcgcagacatcgatctcgctccatgtcacgtgaacgcaagaggagaactcgatccaaatctcgggagaaacgccatcgccacaggtcccgctccagcagccgtagccgcagccgtagccaccagagaagtcggcacagttctagagataggagcagagaacgatccaagaggagatcctcaaaagaaagattcagagaccaagacttagcatcatgtgacagagacaggagttcaagagacagatcacctcgtgacagagatcggaaagataagaagcggtcctatgagagtgctaatggcagatcagaagacaggaggagctctgaagagcgcgaagcaggggagatctaactagctgtgtacatttcttcagtccttaagcttcctacggagttacgtactattgtttagttcacagctgttcagggtgacagtgagcagatccagacaccagatccagctaggctagatgtacagtatctaacttgatctgaactgaacctgttttccttgatgatgcct

SEQ ID NO: 149804 - DNA, 551 bp, Homo sapiens
  Payload ID: 9594
  Gene Symbol: LUC7L2
  Gene Name: LUC7-like 2 pre-mRNA splicing factor
  ENST ID: ENST00000608368
  CDS Start-End: 224-388
agacgccaaggaggctgaccgcagtccggtcgacgatgggcatggtctctacttactttccgcccaggctaacctctagcgcattttgctaatttgggtctgaatcgccatcaccgcgggcagcgcagccttagccgccagccctacagccgggagggaatgtaatcccaaaagggcccggtctgcgccccacccccgcccgtccgcccgctacgccgccgccatgtcggcgcaggcccagatgcgcgcgatgctggaccagttgatgggcacctcccgggacggttcaatgtatctatgcctgcctacctcaatctgcaagggagtgtcagaaaggccccgcattcgccaagcccaaaagggagacacttcagctggaacaaaatagtggaagaaatggcgtctggggttcagtggggattcgcagtgtgagatacaactcgtcaacgaatcaaattcagtgatgacagagtatgcaagagtcaccttctcaactgttgtcctcatgatgtcctttctggaactagaatggatcttggagaatgtctgaa

SEQ ID NO: 149805 - DNA, 2783 bp, Homo sapiens
  Payload ID: 9594
  Gene Symbol: LUC7L2
  Gene Name: LUC7-like 2 pre-mRNA splicing factor
  ENST ID: ENST00000619796
  CDS Start-End: 491-1666
agttggtggagcccccgcgggaaacgactgagcgcgaggagcgtgcgcgctcccgtcgtggcgacggtggcggcgagcggcgtcagagcttgagggggggttgacggcttctggcgggtggcggtgttgaaggcgagagcttgcttggcccgtgtcgcttctgtcccaagaaccggacggagagtgagggcacgagggtcgctgtcgggggctgtcgtcttccacgtacacgtcgtcgtgaggagcgcagtccggactcttcccgcaacccctccggctccctttccgcacgcctcgaggcggcggcggccaccgagacagcagcgcaccttcccccatcccttccccttatcccccagcccaaaagggcccggtctgcgccccacccccgcccgtccgcccgctacgccgccgccatgtcggcgcaggcccagatgcgcgcgatgctggaccagttgatgggcacctcccgggacggttcaatgtatctatgcctgcctacctcaatctgcaagggagtgtcagaaaggccccgcattcgccaagccgagatacaactcgtcaacgaatcaaattcagtgatgacagagtatgcaagagtcaccttctcaactgttgtcctcatgatgtcctttctggaactagaatggatcttggagaatgtctgaaagtccatgacctggctttaagagcggattatgaaattgcatccaaagaacaagattttttctttgaacttgatgccatggatcatctgcagtcattcattgcagattgtgatcgtagaacagaagtggccaagaaaagattagcagaaactcaagaagagattagtgctgaagtagcagcaaaggcagaacgtgttcatgagttaaatgaagaaattggtaaattgttagccaaggtggaacaactaggagctgaagggaatgtggaggaatcccagaaagtaatggatgaagtagagaaagcacgggcaaagaaaagagaagcagaggaagtttatcggaattctatgccagcttccagttttcagcagcagaaacttcgagtctgtgaagtctgctctgcctatttaggacttcatgataatgacagacgactggctgatcattttgggggtaaactgcacctgggatttattgaaataagagagaagcttgaagaattaaagagagtcgtagctgagaagcaggagaaaagaaaccaggaacggctgaaacgaagagaagagagagagagagaagaaagggagaagctgaggaggtcccgatcacacagcaagaatccaaaaagatccaggtccagagagcatcgcagacatcgatctcgctccatgtcacgtgaacgcaagaggagaactcgatccaaatctcgggagaaacgccatcgccacaggtcccgctccagcagccgtagccgcagccgtagccaccagagaagtcggcacagttctagagataggagcagagaacgatccaagaggagatcctcaaaagaaagattcagagaccaagacttagcatcatgtgacagagacaggagttcaagagacagatcacctcgtgacagagatcggaaagataagaagcggtcctatgagagtgctaatggcagatcagaagacaggaggagctctgaagagcgcgaagcaggggagatctaactagctgtgtacatttcttcagtccttaagcttcctacggagttacgtactattgtttagttcacagctgttcagggtgacagtgagcagatccagacaccagatccagctaggctagatgtacagtatctaacttgatctgaactgaacctgttttccttgatgatgcctaaaactacatccatagtttctggtgaacctgtaatacagttctgaaagtacagttttatataataagatgctgatctctttattctttcaagtaagagtgctagtgaacaaattgtgttacttgccttgggattttttgaacgtttgtaaaatgctgtcttcctagtccaaacagctgcagctttgggcatttttctttttaattattcttcctctgactttgtatcccttaatacctacactctccaattgtaagagaaagggggcagggaagcaatatagcttccattctaaggctgtattcccgttatgaattactagctgattacagttcagagcattgatcctggaatgtgtgctggagaaatttaaaatactggggttttttgtttaatggtgcctatttagagttggaagttgaacagctgttgcattacatacttttgcttttttattgaaattttgaaatcaaacgtcttgatttttctgttctgttgaattgctatgttcaggatgttctagggggtgggggcagggactcttttcgtaataagcacttgttttattttgtgtgtgtggagtataaaggctacacccttattgtaaaaaaataataataataaaatgaaagaaacaatcaccaccaccattattaaactgtaacttgtctagtaaattgtcactagaactatttgctgtgggcatttcctctattctgttacgtcattaacagtgccttactgtgcaaggcaccaaaggacataaatacgtacttgcaaagattccagatgagctgttcatgtgggccccttgctgactatattccagccacttcagggttgtttgtaatgaccgttatagagaagggctcgacctgcagaagaaactggggtgtttttattctcattcaacaaacccaaataaaaacagtatatgtaaccaacat

SEQ ID NO: 149806 - DNA, 1972 bp, Homo sapiens
  Payload ID: 9595
  Gene Symbol: LUC7L3
  Gene Name: LUC7-like 3 pre-mRNA splicing factor
  Uniprot ID: O95232
  ENST ID: ENST00000240304
  CDS Start-End: 131-1429
gtcttgtcggctcctgtgtgtaggagggatttcggcctgagagcgggccgaggagattggcgacggtgtcgcccgtgttttcgttggcgggtgcctgggctggtgggaacagccgcccgaaggaagcaccatgatttcggccgcgcagttgttggatgagttaatgggccgggaccgaaacctagccccggacgagaagcgcagcaacgtgcggtgggaccacgagagcgtttgtaaatattatctctgtggtttttgtcctgcggaattgttcacaaatacacgttctgatcttggtccgtgtgaaaaaattcatgatgaaaatctacgaaaacagtatgagaagagctctcgtttcatgaaagttggctatgagagagattttttgcgatacttacagagcttacttgcagaagtagaacgtaggatcagacgaggccatgctcgtttggcattatctcaaaaccagcagtcttctggggccgctggcccaacaggcaaaaatgaagaaaaaattcaggttctaacagacaaaattgatgtacttctgcaacagattgaagaattagggtctgaaggaaaagtagaagaagcccaggggatgatgaaattagttgagcaattaaaagaagagagagaactgctaaggtccacaacgtcgacaattgaaagctttgctgcacaagaaaaacaaatggaagtttgtgaagtatgtggagcctttttaatagtaggagatgcccagtcccgggtagatgaccatttgatgggaaaacaacacatgggctatgccaaaattaaagctactgtagaagaattaaaagaaaagttaaggaaaagaaccgaagaacctgatcgtgatgagcgtctaaaaaaggagaagcaagaaagagaagaaagagaaaaagaacgggagagagaaagggaagaaagagaaaggaaaagacgaagggaagaggaagaaagagaaaaagaaagggctcgtgacagagaaagaagaaagagaagtcgttcacgaagtagacactcaagccgaacatcagacagaagatgcagcaggtctcgggaccacaaaaggtcacgaagtagagaaagaaggcggagcagaagtagagatcgacgaagaagcagaagccatgatcgatcagaaagaaaacacagatctcgaagtcgggatcgaagaagatcaaaaagccgggatcgaaagtcatataagcacaggagcaaaagtcgggacagagaacaagatagaaaatccaaggagaaagaaaagaggggatctgatgataaaaaaagtagtgtgaagtccggtagtcgagaaaagcagagtgaagacacaaacactgaatcgaaggaaagtgatactaagaatgaggtcaatgggaccagtgaagacattaaatctgaaggtgacactcagtccaattaaaactgatctgataagacctcagatcagacagaggactactgttcgaagatttttggaagaatactgagaacggcataaagtgaagatcgacatttaaaaaatgaggtgaaagaaagctatagtggcatagaaaaagtataaagctcagttagtttttttattattattattattaaaagttaattcaggactgatgtgacctaccagatttcagaacatgtgttaatagtatatatgccactgaaaacttaggtcctgtatcatacttttttctttaagactttttaagaaatattacttaaacatgtggcttgctcagtgtttaattgcaagttttcaatcttggactttgaaaacaggattaaacgttagtattcgtgtgaatcagactaagtgggatttcatttttacaactctgctctacttagcctttggatttagaagtaaaaataaagtatctctgactttctgttacaaagttgattgtctctgtcattgaaaagttttagtattaatctttttctaataaagttattgactctg

SEQ ID NO: 149807 - DNA, 2284 bp, Homo sapiens
  Payload ID: 9595
  Gene Symbol: LUC7L3
  Gene Name: LUC7-like 3 pre-mRNA splicing factor
  ENST ID: ENST00000393227
  CDS Start-End: 135-1604
ttttgtcttgtcggctcctgtgtgtaggagggatttcggcctgagagcgggccgaggagattggcgacggtgtcgcccgtgttttcgttggcgggtgcctgggctggtgggaacagccgcccgaaggaagcaccatgatttcggccgcgcagttgttggatgagttaatgggccgggaccgaaacctagccccggacgagaagcgcagcaacgtgcggtgggaccacgagagcgtttgtaaatattatctctgtggtttttgtcctgcggaattgttcacaaatacacgttctgatcttggtccgtgtgaaaaaattcatgatgaaaatctacgaaaacagtatgagaagagctctcgtttcatgaaagttggctatgagagagattttttgcgatacttacagagcttacttgcagaagtagaacgtaggatcagacgaggccatgctcgtttggcattatctcaaaaccagcagtcttctggggccgctggcccaacaggcaaaaatgaagaaaaaattcaggttctaacagacaaaattgatgtacttctgcaacagattgaagaattagggtctgaaggaaaagtagaagaagcccaggggatgatgaaattagttgagcaattaaaagaagagagagaactgctaaggtccacaacgtcgacaattgaaagctttgctgcacaagaaaaacaaatggaagtttgtgaagtatgtggagcctttttaatagtaggagatgcccagtcccgggtagatgaccatttgatgggaaaacaacacatgggctatgccaaaattaaagctactgtagaagaattaaaagaaaagttaaggaaaagaaccgaagaacctgatcgtgatgagcgtctaaaaaaggagaagcaagaaagagaagaaagagaaaaagaacgggagagagaaagggaagaaagagaaaggaaaagacgaagggaagaggaagaaagagaaaaagaaagggctcgtgacagagaaagaagaaagagaagtcgttcacgaagtagacactcaagccgaacatcagacagaagatgcagcaggtctcgggaccacaaaaggtcacgaagtagagaaagaaggcggagcagaagtagagatcgacgaagaagcagaagccatgatcgatcagaaagaaaacacagatctcgaagtcgggatcgaagaagatcaaaaagccgggatcgaaagtcatataagcacaggagcaaaagtcgggacagagaacaagatagaaaatccaaggagaaagaaaagaggggatctgatgataaaaaaagtagtgtgaagtccggtagtcgagaaaagcagagtgaagacacaaacactgaatcgaaggaaagtgatactaagaatgaggtcaatgggaccagtgaagacattaaatctgaagtgcagcgtaagtatgcacagatgaagatggaactaagccgagtaagaagacatacaaaagcctcttctgaaggaaaagacagtgtagtcctgcaaaacattttgaggtacattgttttgtctcagctattttgtagcagactcgtgcccccattagtgtgcctctttggaaattatcgcccacatttgtaatatagtcgccattgaaaagttaattatcctttttttagggattttgatgtcatttcttttttttttttaataaaaaggttgaactgtttttttttttctttttggtattaagtccatcttgtgttggtacattggcagagacatatgctttaaaaacttaaatatttcggaggcacatgttggactactttgttttaattaaactgctagtatttctttgtcaaggatgtttctagttttttgctttattgccttgcattctaatgcagtttgttctgtaactcgagagccagtagcattggattgatggaagtgtagggtttatgaattattgcagctgactaccatacctcacacagcgttggtgttgtgagcggcccatgaaaagccaaattaaaaatcaaggattcagtcaaactaagcaggtactcatgccaggtactcctttctctacccacatccatgtttgaatgctattgcctgtgatctttacgcttaactgttgtgtatcttttttgttctttacaagaagtgcagaggggttttttgtgtattgcgtgaaaacttataaaacaaatgttaacagaatggaattttttttcaactgtatgtagggctgcagtggtggccagaattagatatctttaaagaattttaaatacaataaacacttcatatta

SEQ ID NO: 149808 - DNA, 658 bp, Homo sapiens
  Payload ID: 9595
  Gene Symbol: LUC7L3
  Gene Name: LUC7-like 3 pre-mRNA splicing factor
  ENST ID: ENST00000505619
  CDS Start-End: 105-658
ggatttcggcctgagagcgggccgaggagattggcgacggtgtcgcccgtgttttcgttggcgggtgcctgggctggtgggaacagccgcccgaaggaagcaccatgatttcggccgcgcagttgttggatgagttaatgggccgggaccgaaacctagccccggacgagaagcgcagcaacgtgcggtgggaccacgagagctcgacagggttttgccatattggccaggctggtcttgaactcctgacctcaagtgatcggtccgcctcagtctcccaaagtgctgaggttacaggcgtgagccactgcgcccggctggcatttcctaccttactccatagtaaaatagtttgtaaatattatctctgtggtttttgtcctgcggaattgttcacaaatacacgttctgatcttggtccgtgtgaaaaaattcatgatgaaaatctacgaaaacagtatgagaagagctctcgtttcatgaaagttggctatgagagagattttttgcgatacttacagagcttacttgcagaagtagaacgtaggatcagacgaggccatgctcgtttggcattatctcaaaaccagcagtcttctggggccgctggcccaacaggcaaaaatgaagaaaaaattcaggttctaacagacaaaat

SEQ ID NO: 149809 - DNA, 1597 bp, Homo sapiens
  Payload ID: 9595
  Gene Symbol: LUC7L3
  Gene Name: LUC7-like 3 pre-mRNA splicing factor
  ENST ID: ENST00000508482
  CDS Start-End: 105-269
ggatttcggcctgagagcgggccgaggagattggcgacggtgtcgcccgtgttttcgttggcgggtgcctgggctggtgggaacagccgcccgaaggaagcaccatgatttcggccgcgcagttgttggatgagttaatgggccgggaccgaaacctagccccggacgagaagcgcagcaacgtgcggtgggaccacgagagcgtccgtgtgaaaaaattcatgatgaaaatctacgaaaacagtatgagaagagctctcgtttcatgaaagttggctatgagagagattttttgcgatacttacagagcttacttgcagaagtagaacgtaggatcagacgaggccatgctcgtttggcattatctcaaaaccagcagtcttctggggccgctggcccaacaggcaaaaatgaagaaaaaattcaggttctaacagacaaaattgatgtacttctgcaacagattgaagaattagggtctgaaggaaaagtagaagaagcccaggggatgatgaaattagttgagcaattaaaagaagagagagaactgctaaggtccacaacgtcgacaattgaaagctttgctgcacaagaaaaacaaatggaagtttgtgaagtatgtggagcctttttaatagtaggagatgcccagtcccgggtagatgaccatttgatgggaaaacaacacatgggctatgccaaaattaaagctactgtagaagaattaaaagaaaagttaaggaaaagaaccgaagaacctgatcgtgatgagcgtctaaaaaaggagaagcaagaaagagaagaaagagaaaaagaacgggagagagaaagggaagaaagagaaaggaaaagacgaagggaagaggaagaaagagaaaaagaaagggctcgtgacagagaaagaagaaagagaagtcgttcacgaagtagacactcaagccgaacatcagacagaagatgcagcaggtctcgggaccacaaaaggtcacgaagtagagaaagaaggcggagcagaagtagagatcgacgaagaagcagaagccatgatcgatcagaaagaaaacacagatctcgaagtcgggatcgaagaagatcaaaaagccgggatcgaaagtcatataagcacaggagcaaaagtcgggacagagaacaagatagaaaatccaaggagaaagaaaagaggggatctgatgataaaaaaagtagtgtgaagtccggtagtcgagaaaagcagagtgaagacacaaacactgaatcgaaggaaagtgatactaagaatgaggtcaatgggaccagtgaagacattaaatctgaagggctttttgttactgtttgacagtgcagcgtaagtatgcacagatgaagatggaactaagccgagtaagaagacatacaaaagcctcttctgaaggaaaagacagtgtagtcctgcaaaacattttgaggtacattgttttgtctcagctattttgtagcagactcgtgcccccattagtgtgcctctttggaaattatcgcccacatttgtaatatagtcgccattgaaaagttaattatcctttttttagggattttgatgtcatttcttttttttttt

SEQ ID NO: 149810 - DNA, 510 bp, Homo sapiens
  Payload ID: 9595
  Gene Symbol: LUC7L3
  Gene Name: LUC7-like 3 pre-mRNA splicing factor
  ENST ID: ENST00000507200
  CDS Start-End: 1-120
cgcagcaacgtgcggtgggaccacgagagcgtttgtaaatattatctctgtggtttttgtcctgcggaattgttcacaaatacacgttctgatcttgaagaaaagaggattcttctctagagaaagtgaacagttcctgagaagtgatctctgcaggtccgtgtgaaaaaattcatgatgaaaatctacgaaaacagtatgagaagagctctcgtttcatgaaagttggctatgagagagattttttgcgatacttacagagcttacttgcagaagtagaacgtaggatcagacgaggccatgctcgtttggcattatctcaaaaccagcagtcttctggggccgctggcccaacaggcaaaaatgaagaaaaaattcaggttctaacagacaaaattgatgtacttctgcaacagattgaagaattagggtctgaaggaaaagtagaagaagcccaggggatgatgaaattagttgagcaattaaaagaagagagagaactgctaaggt

SEQ ID NO: 149811 - DNA, 840 bp, Homo sapiens
  Payload ID: 9595
  Gene Symbol: LUC7L3
  Gene Name: LUC7-like 3 pre-mRNA splicing factor
  ENST ID: ENST00000504563
  CDS Start-End: 135-374
ttttgtcttgtcggctcctgtgtgtaggagggatttcggcctgagagcgggccgaggagattggcgacggtgtcgcccgtgttttcgttggcgggtgcctgggctggtgggaacagccgcccgaaggaagcaccatgatttcggccgcgcagttgttggatgagttaatgggccgggaccgaaacctagccccggacgagaagcgcagcaacgtgcggtgggaccacgagagcgtttgtaaatattatctctgtggtttttgtcctgcggaattgttcacaaatacacgttctgatcttgatgtatttggaagaggagataacattagagatgtcagcaaatttttggaagatgacaagtggatggaggagtagcagcaaacgcaacagagcagagcaacctgtaccctaaaagcctgcagaaggggatactaaacagaagcgagtgtttgatcagcagaaccctggacaggctcaggatttggaggcaccaggtccgtgtgaaaaaattcatgatgaaaatctacgaaaacagtatgagaagagctctcgtttcatgaaagttggctatgagagagattttttgcgatacttacagagcttacttgcagaagtagaacgtaggatcagacgaggccatgctcgtttggcattatctcaaaaccagcagtcttctggggccgctggcccaacaggcaaaaatgaagaaaaaattcaggttctaacagacaaaattgatgtacttctgcaacagattgaagaattagggtctgaaggaaaagtagaagaagcccaggggatgatgaaattagttgagcaattaaaagaagagagagaactg

SEQ ID NO: 149812 - DNA, 1112 bp, Homo sapiens
  Payload ID: 9595
  Gene Symbol: LUC7L3
  Gene Name: LUC7-like 3 pre-mRNA splicing factor
  ENST ID: ENST00000508045
  CDS Start-End: 164-403
atgctgggaaggcgtccgcgcggcggccattttgtcttgtcggctcctgtgtgtaggagggatttcggcctgagagcgggccgaggagattggcgacggtgtcgcccgtgttttcgttggcgggtgcctgggctggtgggaacagccgcccgaaggaagcaccatgatttcggccgcgcagttgttggatgagttaatgggccgggaccgaaacctagccccggacgagaagcgcagcaacgtgcggtgggaccacgagagcgtttgtaaatattatctctgtggtttttgtcctgcggaattgttcacaaatacacgttctgatcttgatgtatttggaagaggagataacattagagatgtcagcaaatttttggaagatgacaagtggatggaggagtagcagcaaacgcaacagagcagagcaacctgtaccctaaaagcctgcagaaggggatactaaacagaagcgagtgtttgatcagcagaaccctggacaggctcaggatttggaggcaccaggcagaagaaaagaggattcttctctagagaaagtgaacagttcctgagaagtgatctctgcaggtccgtgtgaaaaaattcatgatgaaaatctacgaaaacagtatgagaagagctctcgtttcatgaaagttggctatgagagagattttttgcgatacttacagagcttacttgcagaagtagaacgtaggatcagacgaggccatgctcgtttggcattatctcaaaaccagcagtcttctggggccgctggcccaacaggcaaaaatgaagaaaaaattcaggttctaacagacaaaattgatgtacttctgcaacagattgaagaattagggtctgaaggaaaagtagaagaagcccaggggatgatgaaattagttgagcaattaaaagaagagagagaactgctaaggtccacaacgtcgacaattgaaagctttgctgcacaagaaaaacaaatggaagtttgtgaagtatgtggagcctttttaatagtaggagatgcccagtcccgggtagatgaccatttgatgggaaaacaacacatgggctatgccaaaattaaagctactgtagaagaattaaaa

SEQ ID NO: 149813 - DNA, 7040 bp, Homo sapiens
  Payload ID: 9595
  Gene Symbol: LUC7L3
  Gene Name: LUC7-like 3 pre-mRNA splicing factor
  Uniprot ID: O95232
  ENST ID: ENST00000505658
  CDS Start-End: 190-1488
ctgggcgtgtcccacgggcgcacggcatgctgggaaggcgtccgcgcggcggccattttgtcttgtcggctcctgtgtgtaggagggatttcggcctgagagcgggccgaggagattggcgacggtgtcgcccgtgttttcgttggcgggtgcctgggctggtgggaacagccgcccgaaggaagcaccatgatttcggccgcgcagttgttggatgagttaatgggccgggaccgaaacctagccccggacgagaagcgcagcaacgtgcggtgggaccacgagagcgtttgtaaatattatctctgtggtttttgtcctgcggaattgttcacaaatacacgttctgatcttggtccgtgtgaaaaaattcatgatgaaaatctacgaaaacagtatgagaagagctctcgtttcatgaaagttggctatgagagagattttttgcgatacttacagagcttacttgcagaagtagaacgtaggatcagacgaggccatgctcgtttggcattatctcaaaaccagcagtcttctggggccgctggcccaacaggcaaaaatgaagaaaaaattcaggttctaacagacaaaattgatgtacttctgcaacagattgaagaattagggtctgaaggaaaagtagaagaagcccaggggatgatgaaattagttgagcaattaaaagaagagagagaactgctaaggtccacaacgtcgacaattgaaagctttgctgcacaagaaaaacaaatggaagtttgtgaagtatgtggagcctttttaatagtaggagatgcccagtcccgggtagatgaccatttgatgggaaaacaacacatgggctatgccaaaattaaagctactgtagaagaattaaaagaaaagttaaggaaaagaaccgaagaacctgatcgtgatgagcgtctaaaaaaggagaagcaagaaagagaagaaagagaaaaagaacgggagagagaaagggaagaaagagaaaggaaaagacgaagggaagaggaagaaagagaaaaagaaagggctcgtgacagagaaagaagaaagagaagtcgttcacgaagtagacactcaagccgaacatcagacagaagatgcagcaggtctcgggaccacaaaaggtcacgaagtagagaaagaaggcggagcagaagtagagatcgacgaagaagcagaagccatgatcgatcagaaagaaaacacagatctcgaagtcgggatcgaagaagatcaaaaagccgggatcgaaagtcatataagcacaggagcaaaagtcgggacagagaacaagatagaaaatccaaggagaaagaaaagaggggatctgatgataaaaaaagtagtgtgaagtccggtagtcgagaaaagcagagtgaagacacaaacactgaatcgaaggaaagtgatactaagaatgaggtcaatgggaccagtgaagacattaaatctgaaggtgacactcagtccaattaaaactgatctgataagacctcagatcagacagaggtaagtgtattgtttctcactttgattagggctttttgttactgtttgacagtgcagcgtaagtatgcacagatgaagatggaactaagccgagtaagaagacatacaaaagcctcttctgaaggaaaagacagtgtagtcctgcaaaacattttgaggtacattgttttgtctcagctattttgtagcagactcgtgcccccattagtgtgcctctttggaaattatcgcccacatttgtaatatagtcgccattgaaaagttaattatcctttttttagggattttgatgtcatttcttttttttttttaataaaaaggttgaactgtttttttttttctttttggtattaagtccatcttgtgttggtacattggcagagacatatgctttaaaaacttaaatatttcggaggcacatgttggactactttgttttaattaaactgctagtatttctttgtcaaggatgtttctagttttttgctttattgccttgcattctaatgcagtttgttctgtaactcgagagccagtagcattggattgatggaagtgtagggtttatgaattattgcagctgactaccatacctcacacagcgttggtgttgtgagcggcccatgaaaagccaaattaaaaatcaaggattcagtcaaactaagcaggtactcatgccaggtactcctttctctacccacatccatgtttgaatgctattgcctgtgatctttacgcttaactgttgtgtatcttttttgttctttacaagaagtgcagaggggttttttgtgtattgcgtgaaaacttataaaacaaatgttaacagaatggaattttttttcaactgtatgtagggctgcagtggtggccagaattagatatctttaaagaattttaaatacaataaacacttcatattattcgccttgttacactcaatgcaattctcaagtctataagaggtatgtgcttaatatttcctactgtgtaggagaatttgcagtcagccataggtatgtaggaatagtcactcactggctgatacatttaaagcagcagtgtgaatagcaaggacagacaccttcaatttgtgaaatcaaagaactgatgcactatatagaacgaatttgggtttttaaagaaatattaaaagttaggtactgtaagtgttcttaaaacctgtaaacttcattctgtgggctagtggtgtgggacaaaatattcctaatgaaaggaagtaccaattagttgatttgttggtggcattccccttttgggaaagcaatgtaaggttatgtctgtgtatgtcattcacacttaggcaagcatacacaggcacatggctttaagaaccacactgatgccttgataattaaaaagaatacaagcattccatgtacacatgttaattagcagttagtgactgggccaacactttctcataaaaattggccttttacatgttgtctaattatcatttttccccaaattttgcgttgtaggactactgttcgaagatttttggaagaatactgagaacggcataaagtgaagatcgacatttaaaaaatgaggtgaaagaaagctatagtggcatagaaaaagtataaagctcagttagtttttttattattattattattaaaagttaattcaggactgatgtgacctaccagatttcagaacatgtgttaatagtatatatgccactgaaaacttaggtcctgtatcatacttttttctttaagactttttaagaaatattacttaaacatgtggcttgctcagtgtttaattgcaagttttcaatcttggactttgaaaacaggattaaacgttagtattcgtgtgaatcagactaagtgggatttcatttttacaactctgctctacttagcctttggatttagaagtaaaaataaagtatctctgactttctgttacaaagttgattgtctctgtcattgaaaagttttagtattaatctttttctaataaagttattgactctgaactagtcccctgttttaaatacaagagttacactattactagaggtgttggtgtacagttttatctgatttgttctgtttaagactaatttttatagactttctaatgttttaaataatggtgcttcaattttaggtggttatgaataaatttgaattttgcttttaatagcaaagatgtgcagtgaactagaatatatttttacatccctgagagattcatttagtagaaaattccaagtatcctgacaagcactctttagctggctagctatgggatgatgtagaaaagcattcaagagctagtttttgttaagtcctgtatcaagattaacccagctgtgtcagtttataaatgtatttgtgtatagggtgtgtagtatatatggcaagggttttttccccccacttaagtgattatttttgtgtcacatctaggaaaaccggcagcatgtttctatctatagccagcttcttcgactgtataaaagtattctctccagctacgtatatacacacatacatatatatcatagcaattccttgtggtttataacttgcaaatactgctatcagtttataggtaaagaaacagtgtgttaaatgacttatccagggagggtcctgtggcttcatgtttatggagttgctaggtctctgcctcatggtccagtgcctgttaagccactgtgttcattctaataggcataatgaattgttaaagaatttactaaaatctcttccaccaaactttgaaaaataatgaagccgcccccactttagaggctctgtatgaaaaaatgctgtggagacagagccctcctggctccctagctgatcctggagatgcagcaatagatgaatgggttatctctgaatttgtaagagataattcacatgaggattaagataaaatgggaagtaaaatctaacaaacacaaagatagctcccaggcactgctttgtgtagtttgacagcattgtggttgtagcagcaaaggacttaaagtgatagtttttaaaccatattctgtccctaagtaataaaaaatctaggaagttactaaaataccagatttgttctgctctgcctcatctagaatcaacgtctaactaacttaaatgaagtataataaatgagttcatatgaaaaggcttcctctatggacacttagatatattgtaactattgaagttacctgggatgtgggggtggtgggaggaggacctgcctccccaggacatctatgactaaggcctggctttagttatggagagagacgtagaagttgaattttacacccaaaattgatgtgactgaagaggaactgattgttgctaaccagctcacaagaatccagtattgagaccagttcactagaagaaacaaacatttctgccatgcagaccaaaaagttattagttggtgaatatgtattttctctttggaaggtctttaaggggagcaaaccagttttaatcaatcagattgcttggtaagtttggaatctgcaatcagttggtcttaaaaaaaaaaaaactttattttggaaatttaaagacatacacaaaagaggaacaatataattaacctctgttaactcatcaccaacaagactcatgaccacttttatacttcatgagtgattgtatttgtatccactgttttctattattttcgagcaagtctcagacacaccatttaatctgtaaataattcagcatgtatctctaaaagacaaagacctcttaaataacagttcattagtataaaacaaattgggtaaacttttgttggtcatcaaactatattagcactggtccaatagtttaattttcattgagcctttcaagaggaccgaccagtctgctgctcaagacatcctctcctctggaatgtagagataatacatatcatgctcctttttgttaaaacgtttttttttccccttcaaacacagtccattcatttttcagtttgggttgaaacatccttttcttgatcttgagcttataataacctagtcatattgctcagctcagatatttttactccctctccttaggcattctggttccttaaatatagttagtgtcacagaggataaataaccaaccttatttctaaggtctgagaacacttggaccacatattggttgagctcagccaccttctgattaaagttttcagacttgtaagaactgaaaatttttatggtggaagttctctgagccctcatccattctgtttttaaaaatgcattgcagatgggctatgtgaatatgtttttaaacatctgatatgtgcatgaaacaaaaaacacttgaagttattatgtatacaattctgtgggatgggacttcatgcaggattggttttcaagtttgatttcctgagggattttttagttgtttgtgaaagaaccccaggtctacttttgaaattttgtattataattgtaatgttgcccatggttaaaaaaaaaaagtgttcagtgatctatgtctcctactactcctatttctctgtttttcctctgcaggagcttgctgctgttaacagttattcttccaagttgttttctttgtggggagatgggaggtgggaggaaatataaacatatatgtatagatctttcaaaatatatgacggtatacccgtatgttctgagtcttgctgtttttacctggtaatatttagaaacatttattttgagataaaggagagcacttttaagttgaacctgtagttttaaaaagtacatttcaagtaagccaaagcagagaagtaaatgtatttttcattgttgtatcagaattttgaatttactattttaaaaattcaagagttttgtagctgatctatttcttcccctcagccatcccaaataggtcatttgtcaacagatttaagaatgtttagaaacaacaactttgggaaacgggaaacaatttggtataagtgggtgtgccataacctctctcgtagccattcattcccggatacataccctagagaaactcttacacatgcgtaccaggggatggatttaagcatttgtgtgtaataggaagaaaagaagaaaaaacccgggaagatcccaagtgtccaccaacagtgtgttggataaatactgtggtatattccaacagtggaattccacagaagtgaaactgaactgcagctgtgtatgtgaacatggacaaaactcaacaatagaaggatcaaaaaaagcaagtcacagaagaatacatcactatggttccatttcaatgaaagtcaaaaacaggctgtcaaatacatgataaaaggaaacgattaagacaaaatttaatgttagccgttttgatggagggagaggtgatcatgagggcacaggggtcttcagaagaactggtgagggtctgtttctgaagcctgtgggcatttccttttttaatctgtatgtttatgtgcttttgtatgtatgatatttcttaataaaatttaaaaagaagaatggg

SEQ ID NO: 149814 - DNA, 582 bp, Homo sapiens
  Payload ID: 9595
  Gene Symbol: LUC7L3
  Gene Name: LUC7-like 3 pre-mRNA splicing factor
  ENST ID: ENST00000509335
  CDS Start-End: 136-375
attttgtcttgtcggctcctgtgtgtaggagggatttcggcctgagagcgggccgaggagattggcgacggtgtcgcccgtgttttcgttggcgggtgcctgggctggtgggaacagccgcccgaaggaagcaccatgatttcggccgcgcagttgttggatgagttaatgggccgggaccgaaacctagccccggacgagaagcgcagcaacgtgcggtgggaccacgagagcgtttgtaaatattatctctgtggtttttgtcctgcggaattgttcacaaatacacgttctgatcttgatgtatttggaagaggagataacattagagatgtcagcaaatttttggaagatgacaagtggatggaggagtagcagcaaacgcaacagagcagagcaacctgtaccctaaaagcctgcagaaggggatactaaacagaagcgagtgtttgatcagcagaaccctggacaggctcaggatttggaggcaccaggtccgtgtgaaaaaattcatgatgaaaatctacgaaaacagtatgagaagagctctcgtttcatgaaagttggctatgagagagattt

SEQ ID NO: 149815 - DNA, 505 bp, Homo sapiens
  Payload ID: 9595
  Gene Symbol: LUC7L3
  Gene Name: LUC7-like 3 pre-mRNA splicing factor
  ENST ID: ENST00000510984
  CDS Start-End: 397-505
gggccgaggagattggcgacggtgtcgcccgtgttttcgttggcgggtgcctgggctggtgggaacagccgcccgaaggaagcaccatgatttcggccgcgcagttgttggatgagttaatgggccgggaccgaaacctagccccggacgagaagcgcagcaacgtgcggtgggaccacgagagctgagcaagcagcacttgcgaagcgcagtttcaagtgaaggatgcatctgtgatgcaaaatcatcgaccatttatttgtaatggtttgtaaatattatctctgtggtttttgtcctgcggaattgttcacaaatacacgttctgatcttggtccgtgtgaaaaaattcatgatgaaaatctacgaaaacagtatgagaagagctctcgtttcatgaaagttggctatgagagagattttttgcgatacttacagagcttacttgcagaagtagaacgtaggatcagacgaggccatgctcgtttggcattatctcaaaacc

SEQ ID NO: 149816 - DNA, 1071 bp, Homo sapiens
  Payload ID: 9595
  Gene Symbol: LUC7L3
  Gene Name: LUC7-like 3 pre-mRNA splicing factor
  ENST ID: ENST00000504065
  CDS Start-End: 1-624
agctttgctgcacaagaaaaacaaatggaagtttgtgaagtatgtggagcctttttaatagtaggagatgcccagtcccgggtagatgaccatttgatgggaaaacaacacatgggctatgccaaaattaaagctactgtagaagaattaaaagaaaagttaaggaaaagaaccgaagaacctgatcgtgatgagcgtctaaaaaaggagaagcaagaaagagaagaaagagaaaaagaacgggagagagaaagggaagaaagagaaaggaaaagacgaagggaagaggaagaaagagaaaaagaaagggctcgtgacagagaaagaagaaagagaagtcgttcacgaagtagacactcaagccgaacatcagacagaagatgcagcaggtctcgggaccacaaaaggtcacgaagtagagaaagaaggcggagcagaagtagagatcgacgaagaagcagaagccatgatcgatcagaaagaaaacacagatctcgaagtcgggatcgaagaagatcaaaaagccgggatcgaaagtcatataagcacaggagcaaaagtcgggacagagaacaagatagaaaatccaaggagaaagggcagaagataagattattggactgactactagtcctctacgggacaacaagacgactcttcctcattgaagctacctgtgcaccggagaagcccataaggcacaaagggaggactttcccacaagaaaagaggggatctgatgataaaaaaagtagtgtgaagtccggtagtcgagaaaagcagagtgaagacacaaacactgaatcgaaggaaagtgatactaagaatgaggtcaatgggaccagtgaagacattaaatctgaaggtgacactcagtccaattaaaactgatctgataagacctcagatcagacagaggtaagtgtattgtttctcactttgattagggctttttgttactgtttgacagtgcagcgtaagtatgcacagatgaagatggaactaagccgagtaagaagacatacaaaagcctcttctgaaggaaaagacagtgtagtcctgcaaaacatt

SEQ ID NO: 149817 - DNA, 582 bp, Homo sapiens
  Payload ID: 9595
  Gene Symbol: LUC7L3
  Gene Name: LUC7-like 3 pre-mRNA splicing factor
  ENST ID: ENST00000506686
  CDS Start-End: 136-375
attttgtcttgtcggctcctgtgtgtaggagggatttcggcctgagagcgggccgaggagattggcgacggtgtcgcccgtgttttcgttggcgggtgcctgggctggtgggaacagccgcccgaaggaagcaccatgatttcggccgcgcagttgttggatgagttaatgggccgggaccgaaacctagccccggacgagaagcgcagcaacgtgcggtgggaccacgagagcgtttgtaaatattatctctgtggtttttgtcctgcggaattgttcacaaatacacgttctgatcttgatgtatttggaagaggagataacattagagatgtcagcaaatttttggaagatgacaagtggatggaggagtagcagcaaacgcaacagagcagagcaacctgtaccctaaaagcctgcagaaggggatactaaacagaagcgagtgtttgatcagcagaaccctggacaggctcaggatttggaggcaccagaaggatacagccagatgtttttccccaggcagaagaaaagaggattcttctctagagaaagtgaacagttcctgagaagtgatctctg

SEQ ID NO: 149818 - DNA, 419 bp, Homo sapiens
  Payload ID: 9595
  Gene Symbol: LUC7L3
  Gene Name: LUC7-like 3 pre-mRNA splicing factor
  ENST ID: ENST00000513969
  CDS Start-End: 1-370
aagaagatcaaaaagccgggatcgaaagtcatataagcacaggagcaaaagtcgggacagagaacaagatagaaaatccaaggagaaagaaaagaggggatctgatgataaaaaaagtagtgtgaagtccggtagtcgagaaaagcagagtgaagacacaaacactgaatcgaaggaaagtgatactaagaatgaggtcaatgggaccagtgaagacattaaatctgaagtgcagcgtaagtatgcacagatgaagatggaactaagccgagtaagaagacatacaaaagcctcttctgaaggaaaagacagtgtagtcctgcaaaacattttgaggactactgttcgaagatttttggaagaatactgagaacggcataaagtgaagatcgacatttaaaaaatgaggtgaaagaaag

SEQ ID NO: 149819 - DNA, 507 bp, Homo sapiens
  Payload ID: 9595
  Gene Symbol: LUC7L3
  Gene Name: LUC7-like 3 pre-mRNA splicing factor
  ENST ID: ENST00000511974
  CDS Start-End: 1-259
tcgatcagaaagaaaacacagatctcgaagtcgggatcgaagaagatcaaaaagccgggatcgaaagtcatataagcacaggagcaaaagtcgggacagagaacaagatagaaaatccaaggagaaagtgcagcgtaagtatgcacagatgaagatggaactaagccgagtaagaagacatacaaaagcctcttctgaaggaaaagacagtgtagtcctgcaaaacattttgagcgttggtgttgtgagcggcccatgaaaagccaaattaaaaatcaaggattcagtcaaactaagcaggtactcatgccaggtactcctttctctacccacatccatgtttgaatgctattgcctgtgatctttacgcttaactgttgtgtatcttttttgttctttacaagaagtgcagaggggttttttgtgtattgcgtgaaaacttataaaacaaatgttaacagaatggaattttttttcaactgtatgtagggctgcagtggtggccag

SEQ ID NO: 149820 - DNA, 647 bp, Homo sapiens
  Payload ID: 9595
  Gene Symbol: LUC7L3
  Gene Name: LUC7-like 3 pre-mRNA splicing factor
  ENST ID: ENST00000509487
  CDS Start-End: 1-324
cgttcacgaagtagacactcaagccgaacatcagacagaagatgcagcaggtctcgggaccacaaaaggtcacgaagtagagaaagaaggcggagcagaagtagagatcgacgaagaagcagaagccatgatcgatcagaaagaaaacacagatctcgaagtcgggatcgaagaagatcaaaaagccgggatcgaaagtcatataagcacaggagcaaaagtcgggacagagaacaagatagaaaatccaaggagaaagaagataagattattggactgactactagtcctctacgggacaacaagacgactcttcctcattgaagctacctgtgcaccggagaagcccataaggcacaaagggaggactttcccacaagtgcagcgtaagtatgcacagatgaagatggaactaagccgagtaagaagacatacaaaagcctcttctgaaggaaaagacagtgtagtcctgcaaaacattttgaggtacattgttttgtctcagctattttgtagcagactcgtgcccccattagtgtgcctctttggaaattatcgcccacatttgtaatatagtcgccattgaaaagttaattatcctttttttagggattttgatgtcatttcttttttttttttaataaaaa

SEQ ID NO: 149821 - DNA, 783 bp, Homo sapiens
  Payload ID: 9595
  Gene Symbol: LUC7L3
  Gene Name: LUC7-like 3 pre-mRNA splicing factor
  ENST ID: ENST00000503728
  CDS Start-End: 1-356
gatcaaaaagccgggatcgaaagtcatataagcacaggagcaaaagtcgggacagagaacaagatagaaaatccaaggagaaagaaaagaggggatctgatgataaaaaaagtagtgtgaagtccggtagtcgagaaaagcagagtgaagacacaaacactgaatcgaaggaaagtgatactaagaatgaggtcaatgggaccagtgaagacattaaatctgaagtgcagcgtaagtatgcacagatgaagatggaactaagccgagtaagaagacatacaaaagcctcttctgaaggaaaagacagtgtagtcctgcaaaacattttgagcgttggtgttgtgagcggcccatgaaaagccaaattaaaaatcaaggattcagtcaaactaagcaggactactgttcgaagatttttggaagaatactgagaacggcataaagtgaagatcgacatttaaaaaatgaggtgaaagaaagctatagtggcatagaaaaagtataaagctcagttagtttttttattattattattattaaaagttaattcaggactgatgtgacctaccagatttcagaacatgtgttaatagtatatatgccactgaaaacttaggtcctgtatcatacttttttctttaagactttttaagaaatattacttaaacatgtggcttgctcagtgtttaattgcaagttttcaatcttggactttgaaaacaggattaaacgttagtattcgtgtgaatcagactaagtgggatttcatttttacaactctgc

SEQ ID NO: 149822 - DNA, 594 bp, Homo sapiens
  Payload ID: 9595
  Gene Symbol: LUC7L3
  Gene Name: LUC7-like 3 pre-mRNA splicing factor
  ENST ID: ENST00000513025
  CDS Start-End: 455-594
cgtaagagtttttaaaaatataaaaattgccctttattttgggatgtctttcccatatttgtttttgctactggggggtcagcaggtgatgattaaaaatagataaagaaaatactagtaatacgagtactgcagatttattcttttatcgaaattcaggagtctgaaaatcactaatttacctaatatgattcaacaaatgaaattcttacattggttgaaacatacatacctcaagaaatgagaaaatagttatttggcacctttctccaataaagttttaaaaccaagcaattttttaagtacctttgtttttctttactaggtttgtaaatattatctctgtggtttttgtcctgcggaattgttcacaaatacacgttctgatcttggtccgtgtgaaaaaattcatgatgaaaatctacgaaaacagtatgagaagagctctcgtttcatgaaagttggctatgagagagattttttgcgatacttacagagcttacttgcagaagtagaacgtaggatcagacgaggccatgctcgtttggcattatctcaaaaccagcagtcttctggggccgctggcccaacagg

SEQ ID NO: 149823 - DNA, 408 bp, Homo sapiens
  Payload ID: 9595
  Gene Symbol: LUC7L3
  Gene Name: LUC7-like 3 pre-mRNA splicing factor
  ENST ID: ENST00000625349
  CDS Start-End: 169-408
acggcatgctgggaaggcgtccgcgcggcggccattttgtcttgtcggctcctgtgtgtaggagggatttcggcctgagagcgggccgaggagattggcgacggtgtcgcccgtgttttcgttggcgggtgcctgggctggtgggaacagccgcccgaaggaagcaccatgatttcggccgcgcagttgttggatgagttaatgggccgggaccgaaacctagccccggacgagaagcgcagcaacgtgcggtgggaccacgagagcgtttgtaaatattatctctgtggtttttgtcctgcggaattgttcacaaatacacgttctgatcttgatgtatttggaagaggagataacattagagatgtcagcaaatttttggaagatgacaagtggatggaggagtag

SEQ ID NO: 149824 - DNA, 3008 bp, Homo sapiens
  Payload ID: 9596
  Gene Symbol: LUM
  Gene Name: lumican
  Uniprot ID: P51884
  ENST ID: ENST00000266718
  CDS Start-End: 456-1472
gagcacattgcacttaattgttgccacagccacagatgtaaagaggcttgtaagaaaaatgttctcacagtgagcttccttatttgaagcaggactcaattcttggttaaaagctatggtatttgagctagttaaacacatatctctctcccattccatagggaatgagctgggctgtcctttctccccacgttcacctgcacttcgttagagagcagtgttcacatgccacaccacaagatccccacaatgacataactccattcagagactggcgtgactgggctgggtctccccaccccccttcagctcttgtatcactcagaatctggcagccagttccgtcctgacagagttcacagcatatattggtggattcttgtccatagtgcatctgctttaagaattaacgaaagcagtgtcaagacagtaaggattcaaaccatttgccaaaaatgagtctaagtgcatttactctcttcctggcattgattggtggtaccagtggccagtactatgattatgattttcccctatcaatttatgggcaatcatcaccaaactgtgcaccagaatgtaactgccctgaaagctacccaagtgccatgtactgtgatgagctgaaattgaaaagtgtaccaatggtgcctcctggaatcaagtatctttaccttaggaataaccagattgaccatattgatgaaaaggcctttgagaatgtaactgatctgcagtggctcattctagatcacaaccttctagaaaactccaagataaaagggagagttttctctaaattgaaacaactgaagaagctgcatataaaccacaacaacctgacagagtctgtgggcccacttcccaaatctctggaggatctgcagcttactcataacaagatcacaaagctgggctcttttgaaggattggtaaacctgaccttcatccatctccagcacaatcggctgaaagaggatgctgtttcagctgcttttaaaggtcttaaatcactcgaataccttgacttgagcttcaatcagatagccagactgccttctggtctccctgtctctcttctaactctctacttagacaacaataagatcagcaacatccctgatgagtatttcaagcgttttaatgcattgcagtatctgcgtttatctcacaacgaactggctgatagtggaatacctggaaattctttcaatgtgtcatccctggttgagctggatctgtcctataacaagcttaaaaacataccaactgtcaatgaaaaccttgaaaactattacctggaggtcaatcaacttgagaagtttgacataaagagcttctgcaagatcctggggccattatcctactccaagatcaagcatttgcgtttggatggcaatcgcatctcagaaaccagtcttccaccggatatgtatgaatgtctacgtgttgctaacgaagtcactcttaattaatatctgtatcctggaacaatattttatggttatgtttttctgtgtgtcagttttcatagtatccatattttattactgtttattacttccatgaattttaaaatctgagggaaatgttttgtaaacatttattttttttaaagaaaagatgaaaggcaggcctatttcatcacaagaacacacacatatacacgaatagacatcaaactcaatgctttatttgtaaatttagtgtttttttatttctactgtcaaatgatgtgcaaaaccttttactggttgcatggaaatcagccaagttttataatccttaaatcttaatgttcctcaaagcttggattaaatacatatggatgttactctcttgcaccaaattatcttgatacattcaaatttgtctggttaaaaaataggtggtagatattgaggccaagaatattgcaaaatacatgaagcttcatgcacttaaagaagtatttttagaataagaatttgcatacttacctagtgaaacttttctagaattatttttcactctaagtcatgtatgtttctctttgattatttgcatgttatgtttaataagctactagcaaaataaaacatagcaaatggcatcactgtgtttgacttcttgtgaaatttctgtactttgtatataaaatacataaaacaatagattagaaatcaaaagatatctctggcctgcaatattttactgatgtgaacataggattttccactaaataatttgtctacttctagcattcacttacaaagagttcttaaaaacacctataataggtacttagatttcacaacttacttagatatttgtcattattcccattcctggtgtttttactggttcatatacaatggtattctattagataagaagctgctatgtgatctcagcactcactccttggttgtcaagaaatggtggataactcacaggattaaaaatgaatgaatataaaattttctgaaatagatatttaaaaaatcattttagcttgaagccaatatgtctggatcataggttttgagttcataatccagtaataacagctttcagctttctatgagtatatacaattctatacaatgataaatactctgcatataatttataaaaataacttctgttttacctagttaacaataaaacctatgtgtggagccaaatgttatgcagacaaaggtctgctcatcccataccagtgtatatatagtcaaatatgtgtctagtacaaataaaatgtatctctaaggcataaaatgttttaacacaccacttttagtgaactctatcttatggtacagcggcctttcatcagaggatcatcattgagactgagttgactggcagatatgtgcgatggatattacattaggtacaatgtgtatttttgattttcatgagttttctacattaaggtaaattccttagagtgtgatagcagcctcagtttatttgttggtttaaacttgaaatctactttttctcgataaaactataatgtagatgaa

SEQ ID NO: 149825 - DNA, 514 bp, Homo sapiens
  Payload ID: 9597
  Gene Symbol: LHB
  Gene Name: luteinizing hormone beta polypeptide
  Uniprot ID: P01229
  ENST ID: ENST00000221421
  CDS Start-End: 1-426
atggagatgctccaggggctgctgctgttgctgctgctgagcatgggcggggcatgggcatccagggagccgcttcggccatggtgccaccccatcaatgccatcctggctgtcgagaaggagggctgcccagtgtgcatcaccgtcaacaccaccatctgtgccggctactgccccaccatgatgcgcgtgctgcaggcggtcctgccgcccctgcctcaggtggtgtgcacctaccgtgatgtgcgcttcgagtccatccggctccctggctgcccgcgtggtgtggaccccgtggtctccttccctgtggctctcagctgtcgctgtggaccctgccgccgcagcacctctgactgtgggggtcccaaagaccaccccttgacctgtgaccacccccaactctcaggcctcctcttcctctaaagaccctccccgcagccttccaagtccatcccgactcctggagccctgacaccccgatcctcccacaataaaggcttctcaatccgca

SEQ ID NO: 149826 - DNA, 480 bp, Homo sapiens
  Payload ID: 9597
  Gene Symbol: LHB
  Gene Name: luteinizing hormone beta polypeptide
  ENST ID: ENST00000391869
  CDS Start-End: 16-480
gcaccaaggatggagatgctccaggggctgctgctgttgctgctgctgagcatgggcggggcatgggcatccagggagccgcttcggccatggtgccaccccatcaatgccatcctggctgtcgagaaggagggctgcccagtgtgcatcaccgtcaacaccaccatctgtgccggctactgccccaccatgatgcgcgtgctgcaggcggtcctgccgcccctgcctcaggtggtgtgcacctaccgtgatgtgcgcttcgagtccatccggctccctggctgcccgcgtggtgtggaccccgtggtctccttccctgtggctctcagctgtcgctgtggaccctgccgccgcagcacctctgactgtgggggtcccaaagaccaccccttgacctgtgaccacccccaacaggcctcctcttcctctaaagaccctccccgcagccttccaagtccatcccgactcctggagccctga

SEQ ID NO: 149827 - DNA, 3044 bp, Homo sapiens
  Payload ID: 9598
  Gene Symbol: LHCGR
  Gene Name: luteinizing hormone/choriogonadotropin receptor
  Uniprot ID: P22888
  ENST ID: ENST00000294954
  CDS Start-End: 23-2122
gcagaagcccagttcgccggccatgaagcagcggttctcggcgctgcagctgctgaagctgctgctgctgctgcagccgccgctgccacgagcgctgcgcgaggcgctctgccctgagccctgcaactgcgtgcccgacggcgccctgcgctgccccggccccacggccggtctcactcgactatcacttgcctacctccctgtcaaagtgatcccatctcaagctttcagaggacttaatgaggtcataaaaattgaaatctctcagattgattccctggaaaggatagaagctaatgcctttgacaacctcctcaatttgtctgaaatactgatccagaacaccaaaaatctgagatacattgagcccggagcatttataaatcttccccgattaaaatacttgagcatctgtaacacaggcatcagaaagtttccagatgttacgaaggtcttctcctctgaatcaaatttcattctggaaatttgtgataacttacacataaccaccataccaggaaatgcttttcaagggatgaataatgaatctgtaacactcaaactatatggaaatggatttgaagaagtacaaagtcatgcattcaatgggacgacactgacttcactggagctaaaggaaaacgtacatctggagaagatgcacaatggagccttccgtggggccacagggccgaaaaccttggatatttcttccaccaaattgcaggccctgccgagctatggcctagagtccattcagaggctaattgccacgtcatcctattctctaaaaaaattgccatcaagagaaacatttgtcaatctcctggaggccacgttgacttaccccagccactgctgtgcttttagaaacttgccaacaaaagaacagaatttttcacattccatttctgaaaacttttccaaacaatgtgaaagcacagtaaggaaagtgaataacaaaacactttattcttccatgcttgctgagagtgaactgagtggctgggactatgaatatggtttctgcttacccaagacaccccgatgtgctcctgaaccagatgcttttaatccctgtgaagatattatgggctatgacttccttagggtcctgatttggctgattaatattctagccatcatgggaaacatgactgttctttttgttctcctgacaagtcgttacaaacttacagtgcctcgttttctcatgtgcaatctctcctttgcagacttttgcatggggctctatctgctgctcatagcctcagttgattcccaaaccaagggccagtactataaccatgccatagactggcagacagggagtgggtgcagcactgctggctttttcactgtattcgcaagtgaactttctgtctacaccctcaccgtcatcactctagaaagatggcacaccatcacctatgctattcacctggaccaaaagctgcgattaagacatgccattctgattatgcttggaggatggctcttttcttctctaattgctatgttgccccttgtcggtgtcagcaattacatgaaggtcagtatttgcttccccatggatgtggaaaccactctctcacaagtctatatattaaccatcctgattctcaatgtggtggccttcttcataatttgtgcttgctacattaaaatttattttgcagttcgaaacccagaattaatggctaccaataaagatacaaagattgctaagaaaatggcaatcctcatcttcaccgatttcacctgcatggcacctatctctttttttgccatctcagctgccttcaaagtacctcttatcacagtaaccaactctaaagttttactggttcttttttatcccatcaattcttgtgccaatccatttctgtatgcaatattcactaagacattccaaagagatttctttcttttgctgagcaaatttggctgctgtaaacgtcgggctgaactttatagaaggaaagatttttcagcttacacctccaactgcaaaaatggcttcactggatcaaataagccttctcaatccaccttgaagttgtccacattgcactgtcaaggtacagctctcctagacaagactcgctacacagagtgttaactgttacatcagtaactgcattattgaattgttcttaaacctgtaaaaaaaaattacctgtaccagtaattttaacataaagggttggatttaggaaattatttatttttaggtacattaggcaagagacctctacctagtagaaagtgtagtctatgaccactgccacactaaaaactatttgtcattgttacatggcataaatactgaagttgagagtgtttagaaatttttatagaaattttgacacagtaattttgtttgatgaatcttttaaaaaactgaggaggtattttgcatatcttttttttcattttcgtaatttgtattgcattctataaaaatattagttcataacagatcagaaatttaaaataactggcctttttcctcaggtagtttgaaaaacacactctagagatgcactgtccaatccggtagccactagccacatgtggctaaattaaaattaaataaaatgagaaatgtagtttctcagttgcactagccacgtttcaagttctcaatggctacgtgtgactagtgcttaccatactggacagcacagacacagaatattttcatcaccacagaaagttctatctgttctattatagagacttttatctatgccctatctggattctacttatttataatttaaggtaaacatctgaaagcacatttcagcctatttgcttagtgaaacattaagctgtagactgtaaactcctcgtgagtaggaaccctgtctcagtgcattttgttttcctgcttcctacctcaagatcttggcaatggtacactacaaatgtgctgagttagaattactctgaagttatgaaacatataatgaaaacaattttttctagagcttatatttttatttgaatgaaataaaatgtttaaatatttaaaaata

SEQ ID NO: 149828 - DNA, 1477 bp, Homo sapiens
  Payload ID: 9598
  Gene Symbol: LHCGR
  Gene Name: luteinizing hormone/choriogonadotropin receptor
  ENST ID: ENST00000401907
  CDS Start-End: 60-1037
ggccgcactcagaggccgtccaagacactggcaagccgcagaagcccagttcgccggccatgaagcagcggttctcggcgctgcagctgctgaagctgctgctgctgctgcagccgccgctgccacgagcgctgcgcgaggcgctctgccctgagccctgcaactgcgtgcccgacggcgccctgcgctgccccggccccacggccggtctcactcgactatcacttgcctacctccctgtcaaagtgatcccatctcaagctttcagaggacttaatgaggtcataaaaattgaaatctctcagattgattccctggaaaggatagaagctaatgcctttgacaacctcctcaatttgtctgaaatactgatccagaacaccaaaaatctgagatacattgagcccggagcatttataaatcttccccgattaaaatacttgagcatctgtaacacaggcatcagaaagtttccagatgttacgaaggtcttctcctctgaatcaaatttcattctggaaatttgtgataacttacacataaccaccataccaggaaatgcttttcaagggatgaataatgaatctgtaacactcaaactatatggaaatggatttgaagaagtacaaagtcatgcattcaatgggacgacactgacttcactggagctaaaggaaaacgtacatctggagaagatgcacaatggagccttccgtggggccacagggccgaaaaccttggatatttcttccaccaaattgcaggccctgccgagctatggcctagagtccattcagaggctaattgccacgtcatcctattctctaaaaaaattgccatcaagagaaacatttgtcaatctcctggaggccacgttgacttaccccagccactgctgtgcttttagaaacttgccaacaaaagaacagaatttttcacattccatttctgaaaacttttccaaacaatgtgaaagcacagtaaggaaagtgaataacaaaacactttcgaaacccagaattaatggctaccaataaagatacaaagattgctaagaaaatggcaatcctcatcttcaccgatttcacctgcatggcacctatctctttttttgccatctcagctgccttcaaagtacctcttatcacagtaaccaactctaaagttttactggttcttttttatcccatcaattcttgtgccaatccatttctgtatgcaatattcactaagacattccaaagagatttctttcttttgctgagcaaatttggctgctgtaaacgtcgggctgaactttatagaaggaaagatttttcagcttacacctccaactgcaaaaatggcttcactggatcaaataagccttctcaatccaccttgaagttgtccacattgcactgtcaaggtacagctctcctagacaagactcgctacacagagtgttaactgttacatcagtaactgcattattgaa
